United States Patent Application Publication US 2026/0226133 A1 - sequence listing, part 8

SEQ ID NO: 13485 - protein, 631 aa, synthetic construct
MALPVTALLLPLALLLHAARPQSALTQPASASGSPGQSVTISCTGTSSDVGGYNYVSWYQQHPGKAPKLMIYDVSNRPSGVSNRFSGSKSGNTASLTISGLQAEDEADYYCSSYTSSSTLYVFGTGTQLTVLLEDLKNVFPPEVAVFEPSEAEISHTQKATLVCLATGFYPDHVELSWWVNGKEVHSGVCTDPQPLKEQPALNDSRYCLSSRLRVSATFWQNPRNHFRCQVQFYGLSENDEWTQDRAKPVTQIVSAEAWGRADCGFTSESYQQGVLSATNLSVIGFRILLLKVAGFNLLMTLRLWSSRAKRSGSGATNFSLLKQAGDVEENPGPTSMDWIWRILFLVGAATGAHSFEEVQLQQSGPGLVKPSQTLSLTCAISGDSMLSNSDTWNWIRQSPSRGLEWLGRTYHRSTWYDDYASSVRGRVSINVDTSKNQYSLQLNAVTPEDTGVYYCARVRLQDGNSWSDAFDVWGQGTMVTVSSTRIQNPDPAVYQLRDSKSSDKSVCLFTDFDSQTNVSQSKDSDVYITDKCVLDMRSMDFKSNSAVAWSNKSDFACANAFNNSIIPEDTFFPSPESSCDVKLVEKSFETDTNLNFQILYEILLGKATLYAVLVSALVLMAMVKRKDSRG

SEQ ID NO: 13486 - protein, 631 aa, synthetic construct
MALPVTALLLPLALLLHAARPDVMLTQTPLSLPVSLGDQASISCRSSQSILHSTGDTYLEWYLQKPGQSPKLLINKVSNRLSGVPDRFSGSGSGTDFTLKISRVEAEDLGVYYCFQGSHVPWTFGGGTKLEIKRADAAPTVSIFPLEDLKNVFPPEVAVFEPSEAEISHTQKATLVCLATGFYPDHVELSWWVNGKEVHSGVCTDPQPLKEQPALNDSRYCLSSRLRVSATFWQNPRNHFRCQVQFYGLSENDEWTQDRAKPVTQIVSAEAWGRADCGFTSESYQQGVLSATNLSVIGFRILLLKVAGFNLLMTLRLWSSRAKRSGSGATNFSLLKQAGDVEENPGPTSMDWIWRILFLVGAATGAHSFEQVKLQQSGPSLVKPGASVKMSCKASGYTFTDFYMKWVKQSHGKSLEWIGDINPNIGDTFYNQKFKGKATLTVDKSSSTAYMQLNSLTSEDSAVYFCSVGYFDVWGAGTTVTVSSTRIQNPDPAVYQLRDSKSSDKSVCLFTDFDSQTNVSQSKDSDVYITDKCVLDMRSMDFKSNSAVAWSNKSDFACANAFNNSIIPEDTFFPSPESSCDVKLVEKSFETDTNLNFQILYEILLGKATLYAVLVSALVLMAMVKRKDSRG

SEQ ID NO: 13487 - protein, 627 aa, synthetic construct
MALPVTALLLPLALLLHAARPEIVLTQSPATLSLSPGERATLSCRASQSVSIYLAWYQQKPGQAPRLLIYDASNRATGIPARFSGSGSGTDFTLTISSLEPEDFAVYYCQQRSNWPPFTFGPGTKVDIKLEDLKNVFPPEVAVFEPSEAEISHTQKATLVCLATGFYPDHVELSWWVNGKEVHSGVCTDPQPLKEQPALNDSRYCLSSRLRVSATFWQNPRNHFRCQVQFYGLSENDEWTQDRAKPVTQIVSAEAWGRADCGFTSESYQQGVLSATNLSVIGFRILLLKVAGFNLLMTLRLWSSRAKRSGSGATNFSLLKQAGDVEENPGPTSMDWIWRILFLVGAATGAHSFEQVQLVESGGGVVQPGRSLRLSCAASGFTFSSYGMHWVRQAPGKGLEWVAVIWDDGSNKYYVDSVKGRFTISRDNSKNTLYLQMNSLRAEDTAVYYCARDDYYGSGSFNSYYGTDVWGQGTTVTVSSTRIQNPDPAVYQLRDSKSSDKSVCLFTDFDSQTNVSQSKDSDVYITDKCVLDMRSMDFKSNSAVAWSNKSDFACANAFNNSIIPEDTFFPSPESSCDVKLVEKSFETDTNLNFQILYEILLGKATLYAVLVSALVLMAMVKRKDSRG

SEQ ID NO: 13488 - protein, 612 aa, synthetic construct
MALPVTALLLPLALLLHAARPDIQMTQSPSSLSASVGDRVTITCRASQGISSWLAWYQQKPEKAPKSLIYAASSLQSGVPSRFSGSGSGTDFTLTISSLQPEDFATYYCQQYNSYPYTFGQGTKLEIKLEDLKNVFPPEVAVFEPSEAEISHTQKATLVCLATGFYPDHVELSWWVNGKEVHSGVCTDPQPLKEQPALNDSRYCLSSRLRVSATFWQNPRNHFRCQVQFYGLSENDEWTQDRAKPVTQIVSAEAWGRADCGFTSESYQQGVLSATNLSVIGFRILLLKVAGFNLLMTLRLWSSRAKRSGSGATNFSLLKQAGDVEENPGPTSMDWIWRILFLVGAATGAHSFEEVQLVQSGGGLVHPGGSLRLSCAGSGFTFSTYLMYWVRQAPGKTLEWVSAIGSGGDTYYADSVKGRFTISRDNAKNSLYLQMNSLRAEDMAVYYCARGLGYWGQGTLVTVSSTRIQNPDPAVYQLRDSKSSDKSVCLFTDFDSQTNVSQSKDSDVYITDKCVLDMRSMDFKSNSAVAWSNKSDFACANAFNNSIIPEDTFFPSPESSCDVKLVEKSFETDTNLNFQILYEILLGKATLYAVLVSALVLMAMVKRKDSRG

SEQ ID NO: 13489 - protein, 631 aa, synthetic construct
MALPVTALLLPLALLLHAARPLPVLTQPPSVSVAPGKTARITCGGNNIGSKSVHWYQQKPGQAPVLVVYDDSDRPSGIPERFSGSNSGNTATLTISRVEAGDEADYYCQVWDSSSDYVVFGGGTKLTVLLEDLKNVFPPEVAVFEPSEAEISHTQKATLVCLATGFYPDHVELSWWVNGKEVHSGVCTDPQPLKEQPALNDSRYCLSSRLRVSATFWQNPRNHFRCQVQFYGLSENDEWTQDRAKPVTQIVSAEAWGRADCGFTSESYQQGVLSATNLSVIGFRILLLKVAGFNLLMTLRLWSSRAKRSGSGATNFSLLKQAGDVEENPGPTSMDWIWRILFLVGAATGAHSFEEVQLVQSGAEVKKPGESLKISCKGSGYSFTSYWIGWVRQMPGKGLEWMGIIYPGDSDTRYSPSFQGQVTISADKSISTAYLQWSSLKASDTAMYYCARQVWGWQGGMYPRSNWWYNLDSWGQGTLVTVSSTRIQNPDPAVYQLRDSKSSDKSVCLFTDFDSQTNVSQSKDSDVYITDKCVLDMRSMDFKSNSAVAWSNKSDFACANAFNNSIIPEDTFFPSPESSCDVKLVEKSFETDTNLNFQILYEILLGKATLYAVLVSALVLMAMVKRKDSRG

SEQ ID NO: 13490 - protein, 624 aa, synthetic construct
MALPVTALLLPLALLLHAARPELVMTQSPASLAVSLGQRATISCRASESVDSYGKSFMHWYQLKPGQPPKLLIYRASNLESGVPARFSGSGSRTDFTLTIDPVEADDAATYYCQQNNEDPWTFGGGTKLEIKLEDLKNVFPPEVAVFEPSEAEISHTQKATLVCLATGFYPDHVELSWWVNGKEVHSGVCTDPQPLKEQPALNDSRYCLSSRLRVSATFWQNPRNHFRCQVQFYGLSENDEWTQDRAKPVTQIVSAEAWGRADCGFTSESYQQGVLSATNLSVIGFRILLLKVAGFNLLMTLRLWSSRAKRSGSGATNFSLLKQAGDVEENPGPTSMDWIWRILFLVGAATGAHSFEEVQLEQSGPELVKPGASVKMSCKASGYTFTNYYMKWVKQSHGKSLEWIGDLNPNNGDTFYNQKFKGKATLTVDKSSNTAYMQLNSLTSEDSAVYYCARTGRYEENAMDYWGQGTSVTVSSTRIQNPDPAVYQLRDSKSSDKSVCLFTDFDSQTNVSQSKDSDVYITDKCVLDMRSMDFKSNSAVAWSNKSDFACANAFNNSIIPEDTFFPSPESSCDVKLVEKSFETDTNLNFQILYEILLGKATLYAVLVSALVLMAMVKRKDSRG

SEQ ID NO: 13491 - protein, 618 aa, synthetic construct
MALPVTALLLPLALLLHAARPDVVMTQSPSSLSASVGDRVTITCMASEDIYIRLAWYQQKPGNAPKLLIYAATSLETGVPSRFSGSGSGTDFTLTISSLQPEDFATYYCQQYWSSPWTFGGGTKVEIKLEDLKNVFPPEVAVFEPSEAEISHTQKATLVCLATGFYPDHVELSWWVNGKEVHSGVCTDPQPLKEQPALNDSRYCLSSRLRVSATFWQNPRNHFRCQVQFYGLSENDEWTQDRAKPVTQIVSAEAWGRADCGFTSESYQQGVLSATNLSVIGFRILLLKVAGFNLLMTLRLWSSRAKRSGSGATNFSLLKQAGDVEENPGPTSMDWIWRILFLVGAATGAHSFEQVQLQESGPGLVKPSQTLSLTCTVSGYSITSDYTWNWIRQPPGNGLEWIGYITYSGSTSYNPSLKSRVLISVDTSKNQVSLKLSSVTAADTAVYYCARLGRRYTMDYWGQGTTVTVSSTRIQNPDPAVYQLRDSKSSDKSVCLFTDFDSQTNVSQSKDSDVYITDKCVLDMRSMDFKSNSAVAWSNKSDFACANAFNNSIIPEDTFFPSPESSCDVKLVEKSFETDTNLNFQILYEILLGKATLYAVLVSALVLMAMVKRKDSRG

SEQ ID NO: 13492 - protein, 622 aa, synthetic construct; identical to SEQ ID NO: 13355

SEQ ID NO: 13493 - protein, 622 aa, synthetic construct
MALPVTALLLPLALLLHAARPDIVLTQSPATLSLSPGDRATLSCRASESVTILGSHLIYWYQQKPGQAPRLLIQLASNVQTGIPARFSGSGSRTDFTLTISSLEPEDFAVYYCLQSRTIPRTFGQGTKLEIKRLEDLKNVFPPEVAVFEPSEAEISHTQKATLVCLATGFYPDHVELSWWVNGKEVHSGVCTDPQPLKEQPALNDSRYCLSSRLRVSATFWQNPRNHFRCQVQFYGLSENDEWTQDRAKPVTQIVSAEAWGRADCGFTSESYQQGVLSATNLSVIGFRILLLKVAGFNLLMTLRLWSSRAKRSGSGATNFSLLKQAGDVEENPGPTSMDWIWRILFLVGAATGAHSFEQVQLVQSGSELKKPGESVKISCKASGYTFTHYSMNWVRQAPGQGLEWMGRINTETGEPLYADDFKGRFVFSLDTSASTAYLQISSLKAEDTAVYYCSNDYLYSLDYWGQGTLVTVSSTRIQNPDPAVYQLRDSKSSDKSVCLFTDFDSQTNVSQSKDSDVYITDKCVLDMRSMDFKSNSAVAWSNKSDFACANAFNNSIIPEDTFFPSPESSCDVKLVEKSFETDTNLNFQILYEILLGKATLYAVLVSALVLMAMVKRKDSRG

SEQ ID NO: 13494 - protein, 623 aa, synthetic construct
MALPVTALLLPLALLLHAARPDIQLTQSPSFLSASVGDRVTITCRASQGISTDLNWYQQKPGKAPKLLIYAASNLESGVPSRFSGSGSGTEFTLTISSLQPEDFATYYCQQSYNWPYTFGGGTKVEIKRLEDLKNVFPPEVAVFEPSEAEISHTQKATLVCLATGFYPDHVELSWWVNGKEVHSGVCTDPQPLKEQPALNDSRYCLSSRLRVSATFWQNPRNHFRCQVQFYGLSENDEWTQDRAKPVTQIVSAEAWGRADCGFTSESYQQGVLSATNLSVIGFRILLLKVAGFNLLMTLRLWSSRAKRSGSGATNFSLLKQAGDVEENPGPTSMDWIWRILFLVGAATGAHSFEEVQLVESGGGLVKPGGSLRLSCAASGFTFSNFEMNWVRQAPGKGLEWVSGISSNGRYINYADSVKGRFTISRDNAKNSLYLQMNSLRAEDTAVYYCARVVDFDQDYNGFDYWGQGTLVTVSSTRIQNPDPAVYQLRDSKSSDKSVCLFTDFDSQTNVSQSKDSDVYITDKCVLDMRSMDFKSNSAVAWSNKSDFACANAFNNSIIPEDTFFPSPESSCDVKLVEKSFETDTNLNFQILYEILLGKATLYAVLVSALVLMAMVKRKDSRG

SEQ ID NO: 13495 - protein, 621 aa, synthetic construct
MALPVTALLLPLALLLHAARPDIQLTQSPSFLSASVGDRVTITCSLSLGISTWRDWFPPRLGRGLEPLTYAASTLQSGVPSRFSGSGSGTEFTLTISSLQPEDFATYYCQQLNSYPLTFGGGTKVEIKRLEDLKNVFPPEVAVFEPSEAEISHTQKATLVCLATGFYPDHVELSWWVNGKEVHSGVCTDPQPLKEQPALNDSRYCLSSRLRVSATFWQNPRNHFRCQVQFYGLSENDEWTQDRAKPVTQIVSAEAWGRADCGFTSESYQQGVLSATNLSVIGFRILLLKVAGFNLLMTLRLWSSRAKRSGSGATNFSLLKQAGDVEENPGPTSMDWIWRILFLVGAATGAHSFEEVQLVESGGGLVKPGGSLRLSCAASGFTFSTYGMSWVRQAPGKGLEWVAYINNGSGYIYYADSVKGRFTISRDNAKNSLYLQMNSLRAEDTAVYYCARGQWWSGGDFDYWGQGTLVTVSSTRIQNPDPAVYQLRDSKSSDKSVCLFTDFDSQTNVSQSKDSDVYITDKCVLDMRSMDFKSNSAVAWSNKSDFACANAFNNSIIPEDTFFPSPESSCDVKLVEKSFETDTNLNFQILYEILLGKATLYAVLVSALVLMAMVKRKDSRG

SEQ ID NO: 13496 - protein, 622 aa, synthetic construct
MALPVTALLLPLALLLHAARPEIVLTQSPATLSLSPGERATLSCSASSSVSYMYWYQQKPGQAPRLLIYRTSNLASGIPARFSGSGSGTDFTLTISSLEPEDFAVYYCQQYHSYPTTFGQGTKVEIKRTVLEDLKNVFPPEVAVFEPSEAEISHTQKATLVCLATGFYPDHVELSWWVNGKEVHSGVCTDPQPLKEQPALNDSRYCLSSRLRVSATFWQNPRNHFRCQVQFYGLSENDEWTQDRAKPVTQIVSAEAWGRADCGFTSESYQQGVLSATNLSVIGFRILLLKVAGFNLLMTLRLWSSRAKRSGSGATNFSLLKQAGDVEENPGPTSMDWIWRILFLVGAATGAHSFEEVQLVESGGGLVQPGGSLRLSCAASGFSFNTYAMNWVRQAPGKGLEWVSHIRSKSNNFATYYADSVKDRFTISRDNAKNSLYLQMNSLRAEDTAVYYCARQGGDFPMDYWGQGTLVTVSSTRIQNPDPAVYQLRDSKSSDKSVCLFTDFDSQTNVSQSKDSDVYITDKCVLDMRSMDFKSNSAVAWSNKSDFACANAFNNSIIPEDTFFPSPESSCDVKLVEKSFETDTNLNFQILYEILLGKATLYAVLVSALVLMAMVKRKDSRG

SEQ ID NO: 13497 - protein, 618 aa, synthetic construct
MALPVTALLLPLALLLHAARPDVVMTQSPSSLSASVGDRVTITCKASEDIYIRLAWYQQKPGKAPKLLIYAATSLETGVPSRFSGSGSGTDFTLTISSLQPEDFATYYCQQYWTTPWTFGGGTKVEIKLEDLKNVFPPEVAVFEPSEAEISHTQKATLVCLATGFYPDHVELSWWVNGKEVHSGVCTDPQPLKEQPALNDSRYCLSSRLRVSATFWQNPRNHFRCQVQFYGLSENDEWTQDRAKPVTQIVSAEAWGRADCGFTSESYQQGVLSATNLSVIGFRILLLKVAGFNLLMTLRLWSSRAKRSGSGATNFSLLKQAGDVEENPGPTSMDWIWRILFLVGAATGAHSFEQVQLQESGPGLVKPSQTLSLTCTVSGYSITIDYTWNWIRQPPGKGLEWIGYITYSGSTDYNPSLKSRVLISVDTSKNQVSLKLSSVTAADTAVYYCARLGRRYALDYWGQGTTVTVSSTRIQNPDPAVYQLRDSKSSDKSVCLFTDFDSQTNVSQSKDSDVYITDKCVLDMRSMDFKSNSAVAWSNKSDFACANAFNNSIIPEDTFFPSPESSCDVKLVEKSFETDTNLNFQILYEILLGKATLYAVLVSALVLMAMVKRKDSRG

SEQ ID NO: 13498 - protein, 623 aa, synthetic construct
MALPVTALLLPLALLLHAARPDIQMTQTTSSLSASLGDRVTISCRASQDISNYLNWYQQKPDGTVKLLIYYTSILHSGVPSRFSGSGSGTDYSLTISNLEQEDFATYFCQQGNTLPWTFGGGTKLEIKALEDLKNVFPPEVAVFEPSEAEISHTQKATLVCLATGFYPDHVELSWWVNGKEVHSGVCTDPQPLKEQPALNDSRYCLSSRLRVSATFWQNPRNHFRCQVQFYGLSENDEWTQDRAKPVTQIVSAEAWGRADCGFTSESYQQGVLSATNLSVIGFRILLLKVAGFNLLMTLRLWSSRAKRSGSGATNFSLLKQAGDVEENPGPTSMDWIWRILFLVGAATGAHSFEEVQLVESGGGLVKPGGSLKLSCAASGFAFSIYDMSWVRQTPEKRLEWVAYISSGGGTYYPDTVKGRFTISRDNAKNTLYLQMSSLKSEDTAMYYCARHSGYGTHWGVLFAYWGQGTLVTVSATRIQNPDPAVYQLRDSKSSDKSVCLFTDFDSQTNVSQSKDSDVYITDKCVLDMRSMDFKSNSAVAWSNKSDFACANAFNNSIIPEDTFFPSPESSCDVKLVEKSFETDTNLNFQILYEILLGKATLYAVLVSALVLMAMVKRKDSRG

SEQ ID NO: 13499 - protein, 633 aa, synthetic construct
MALPVTALLLPLALLLHAARPDIVMTQSPDSLAVSLGERATINCKSSQSLLYRSNQKNYLAWYQQKPGQPPKLLIYWASTRESGVPDRFSGSGSGTDFTLTISSLQAEDVAVYYCQQYYNYPRTFGQGTKVEIKRTVLEDLKNVFPPEVAVFEPSEAEISHTQKATLVCLATGFYPDHVELSWWVNGKEVHSGVCTDPQPLKEQPALNDSRYCLSSRLRVSATFWQNPRNHFRCQVQFYGLSENDEWTQDRAKPVTQIVSAEAWGRADCGFTSESYQQGVLSATNLSVIGFRILLLKVAGFNLLMTLRLWSSRAKRSGSGATNFSLLKQAGDVEENPGPTSMDWIWRILFLVGAATGAHSFEEVQLLESGGGLVQPGGSLRLSCAASGYSITSDYAWNWVRQAPGKGLEWVSYISNSGSTSYNPSLKSRFTISRDNSKNTLYLQMNSLRAEDTAVYYCAKERNYDYDDYYYAMDYWGQGTLVTVSSTRIQNPDPAVYQLRDSKSSDKSVCLFTDFDSQTNVSQSKDSDVYITDKCVLDMRSMDFKSNSAVAWSNKSDFACANAFNNSIIPEDTFFPSPESSCDVKLVEKSFETDTNLNFQILYEILLGKATLYAVLVSALVLMAMVKRKDSRG

SEQ ID NO: 13500 - protein, 626 aa, synthetic construct
MALPVTALLLPLALLLHAARPDVVMTQSPLSLPVTLGQPASISCRSSQSLLHSSGNTYLEWYQQRPGQSPRPLIYKISTRFSGVPDRFSGSGSGTDFTLKISRVEAEDVGVYYCFQGSHVPYTFGGGTKVEIKRLEDLKNVFPPEVAVFEPSEAEISHTQKATLVCLATGFYPDHVELSWWVNGKEVHSGVCTDPQPLKEQPALNDSRYCLSSRLRVSATFWQNPRNHFRCQVQFYGLSENDEWTQDRAKPVTQIVSAEAWGRADCGFTSESYQQGVLSATNLSVIGFRILLLKVAGFNLLMTLRLWSSRAKRSGSGATNFSLLKQAGDVEENPGPTSMDWIWRILFLVGAATGAHSFEQVQLVQSGAEVKKPGASVKVSCKASGLTIEDYYMHWVRQAPGQGLEWMGWIDPENGDTEYGPKFQGRVTMTRDTSINTAYMELSRLRSDDTAVYYCAVHNAHYGTWFAYWGQGTLVTVSSTRIQNPDPAVYQLRDSKSSDKSVCLFTDFDSQTNVSQSKDSDVYITDKCVLDMRSMDFKSNSAVAWSNKSDFACANAFNNSIIPEDTFFPSPESSCDVKLVEKSFETDTNLNFQILYEILLGKATLYAVLVSALVLMAMVKRKDSRG

SEQ ID NO: 13501 - protein, 618 aa, synthetic construct
MALPVTALLLPLALLLHAARPDIQMTQSPSSLSASVGDRVTITCRASENIYSNLAWYQQKPGKAPKLLIYAATNLADGVPSRFSGSGSGTDFTLTISSLQPEDFATYYCQHFWGTPTFGQGTKVEIKRTVLEDLKNVFPPEVAVFEPSEAEISHTQKATLVCLATGFYPDHVELSWWVNGKEVHSGVCTDPQPLKEQPALNDSRYCLSSRLRVSATFWQNPRNHFRCQVQFYGLSENDEWTQDRAKPVTQIVSAEAWGRADCGFTSESYQQGVLSATNLSVIGFRILLLKVAGFNLLMTLRLWSSRAKRSGSGATNFSLLKQAGDVEENPGPTSMDWIWRILFLVGAATGAHSFEEVQLVESGGGLVQPGGSLRLSCAASGFSLTNYGVHWVRQAPGKGLEWVSVIWSGGSTDYNAAFISRFTISADTSKNTAYLQMNSLRAEDTAVYYCARELIHAMDNWGQGTLVTVSSTRIQNPDPAVYQLRDSKSSDKSVCLFTDFDSQTNVSQSKDSDVYITDKCVLDMRSMDFKSNSAVAWSNKSDFACANAFNNSIIPEDTFFPSPESSCDVKLVEKSFETDTNLNFQILYEILLGKATLYAVLVSALVLMAMVKRKDSRG

SEQ ID NO: 13502 - protein, 625 aa, synthetic construct
MALPVTALLLPLALLLHAARPDFVMTQSPLSLPVTPGEPASISCRSSQSIVHSNGNTYLEWYLQKPGQSPQLLIYKVSNRFSGVPDRFSGSGSGTDFTLKISRVEAEDVGVYYCFQGSHVPLTFGQGTKLEIKRLEDLKNVFPPEVAVFEPSEAEISHTQKATLVCLATGFYPDHVELSWWVNGKEVHSGVCTDPQPLKEQPALNDSRYCLSSRLRVSATFWQNPRNHFRCQVQFYGLSENDEWTQDRAKPVTQIVSAEAWGRADCGFTSESYQQGVLSATNLSVIGFRILLLKVAGFNLLMTLRLWSSRAKRSGSGATNFSLLKQAGDVEENPGPTSMDWIWRILFLVGAATGAHSFEEVQLVESGAEVKKPGASVKVSCKASGYTFTSYWIHWVRQAPGQGLEWMGENDPSNGRTNYNEKFKNRVTLTVDTSISTAYMELSRLRSDDTAVYYCARGPNYFYSMDYWGQGTMVTVSSTRIQNPDPAVYQLRDSKSSDKSVCLFTDFDSQTNVSQSKDSDVYITDKCVLDMRSMDFKSNSAVAWSNKSDFACANAFNNSIIPEDTFFPSPESSCDVKLVEKSFETDTNLNFQILYEILLGKATLYAVLVSALVLMAMVKRKDSRG

SEQ ID NO: 13503 - protein, 618 aa, synthetic construct
MALPVTALLLPLALLLHAARPDIQLTQSPSFLSASVGDRVTITCSARSSISFMYWYQQKPGKAPKLLIYDTSNLASGVPSRFSGSGSGTEFTLTISSLEAEDAATYYCQQWSSYPLTFGQGTKLEIKLEDLKNVFPPEVAVFEPSEAEISHTQKATLVCLATGFYPDHVELSWWVNGKEVHSGVCTDPQPLKEQPALNDSRYCLSSRLRVSATFWQNPRNHFRCQVQFYGLSENDEWTQDRAKPVTQIVSAEAWGRADCGFTSESYQQGVLSATNLSVIGFRILLLKVAGFNLLMTLRLWSSRAKRSGSGATNFSLLKQAGDVEENPGPTSMDWIWRILFLVGAATGAHSFEQVQLVQSGAEVKKPGASVKVSCKASGYTFTGSWMNWVRQAPGQGLEWIGRIYPGDGETNYNGKFKDRVTITADKSTSTAYMELSSLRSEDTAVYYCARIYGNNVYFDVWGQGTTVTVSSTRIQNPDPAVYQLRDSKSSDKSVCLFTDFDSQTNVSQSKDSDVYITDKCVLDMRSMDFKSNSAVAWSNKSDFACANAFNNSIIPEDTFFPSPESSCDVKLVEKSFETDTNLNFQILYEILLGKATLYAVLVSALVLMAMVKRKDSRG

SEQ ID NO: 13504 - protein, 626 aa, synthetic construct
MALPVTALLLPLALLLHAARPQLVLTQSPSASASLGSSVKLTCTLSSGHKTDTIDWYQQQPGKAPRYLMKLEGSGSYNKGSGVPDRFSGSSSGADWYLTISSLQSEDEADYYCGTDYPGNYLFGGGTQLTVLGLEDLKNVFPPEVAVFEPSEAEISHTQKATLVCLATGFYPDHVELSWWVNGKEVHSGVCTDPQPLKEQPALNDSRYCLSSRLRVSATFWQNPRNHFRCQVQFYGLSENDEWTQDRAKPVTQIVSAEAWGRADCGFTSESYQQGVLSATNLSVIGFRILLLKVAGFNLLMTLRLWSSRAKRSGSGATNFSLLKQAGDVEENPGPTSMDWIWRILFLVGAATGAHSFEQEQLVESGGGLVQPGGSLRLSCAASGFTFSDYYMSWIRQAPGKGLEWVATIYPSSGKTYYADSAKGRLTISSDNAKDSLYLQMNSLRAEDTAVYYCTRDSYADDAALFDIWGQGTTVTVSSTRIQNPDPAVYQLRDSKSSDKSVCLFTDFDSQTNVSQSKDSDVYITDKCVLDMRSMDFKSNSAVAWSNKSDFACANAFNNSIIPEDTFFPSPESSCDVKLVEKSFETDTNLNFQILYEILLGKATLYAVLVSALVLMAMVKRKDSRG

SEQ ID NO: 13505 - protein, 618 aa, synthetic construct; identical to SEQ ID NO: 13501

SEQ ID NO: 13506 - protein, 625 aa, synthetic construct; identical to SEQ ID NO: 13502

SEQ ID NO: 13507 - protein, 618 aa, synthetic construct; identical to SEQ ID NO: 13503

SEQ ID NO: 13508 - protein, 626 aa, synthetic construct; identical to SEQ ID NO: 13504

SEQ ID NO: 13509 - protein, 625 aa, synthetic construct
MALPVTALLLPLALLLHAARPDIQLTQSPSSLSASVGDRVSFTCQASQDINNFLNWYQQKPGKAPKLLIYDASNLETGVPSRFSGSGSGTDFTFTISSLQPEDIATYYCQQYGNLPFTFGGGTKVEIKRLEDLKNVFPPEVAVFEPSEAEISHTQKATLVCLATGFYPDHVELSWWVNGKEVHSGVCTDPQPLKEQPALNDSRYCLSSRLRVSATFWQNPRNHFRCQVQFYGLSENDEWTQDRAKPVTQIVSAEAWGRADCGFTSESYQQGVLSATNLSVIGFRILLLKVAGFNLLMTLRLWSSRAKRSGSGATNFSLLKQAGDVEENPGPTSMDWIWRILFLVGAATGAHSFEQVQLQESGPGLVKPSQTLSLTCTVSGGSISSGGFYWSWIRQHPGKGLEWIGYIHHSGSTHYNPSLKSRVTISIDTSKNLFSLRLSSVTAADTAVYYCASLVYCGGDCYSGFDYWGQGTLVTVSSTRIQNPDPAVYQLRDSKSSDKSVCLFTDFDSQTNVSQSKDSDVYITDKCVLDMRSMDFKSNSAVAWSNKSDFACANAFNNSIIPEDTFFPSPESSCDVKLVEKSFETDTNLNFQILYEILLGKATLYAVLVSALVLMAMVKRKDSRG

SEQ ID NO: 13510 - protein, 621 aa, synthetic construct
MALPVTALLLPLALLLHAARPDIQMTQSPSSLSASVGDRVTITCKSSQSVLYSSNQKNYLAWFQQKPGKAPKLLIYWASTRESGVPSRFSGSGSGTDFTLTISSLQPEDFATYFCHQYLSSYTFGQGTKVEIKRLEDLKNVFPPEVAVFEPSEAEISHTQKATLVCLATGFYPDHVELSWWVNGKEVHSGVCTDPQPLKEQPALNDSRYCLSSRLRVSATFWQNPRNHFRCQVQFYGLSENDEWTQDRAKPVTQIVSAEAWGRADCGFTSESYQQGVLSATNLSVIGFRILLLKVAGFNLLMTLRLWSSRAKRSGSGATNFSLLKQAGDVEENPGPTSMDWIWRILFLVGAATGAHSFEEVQLVESGGGLVQPGGSLRLSCAASGYTFTTYWMHWVRQAPGKGLEWVGYIRPSTGYTEYNQKFKDRFTISADTSKNTAYLQMNSLRAEDTAVYYCARSRWLLDYWGQGTLVTVSTRIQNPDPAVYQLRDSKSSDKSVCLFTDFDSQTNVSQSKDSDVYITDKCVLDMRSMDFKSNSAVAWSNKSDFACANAFNNSIIPEDTFFPSPESSCDVKLVEKSFETDTNLNFQILYEILLGKATLYAVLVSALVLMAMVKRKDSRG

SEQ ID NO: 13511 - protein, 618 aa, synthetic construct
MALPVTALLLPLALLLHAARPDIQMTQSPSSLSASVGDRVTITCRASQDISNYLNWYQQKPGKAPKLLIYYTSRLHSGVPSRFSGSGSGTDFTLTISSLQPEDFATYYCQQGNTLPYTFGQGTKVEIKRLEDLKNVFPPEVAVFEPSEAEISHTQKATLVCLATGFYPDHVELSWWVNGKEVHSGVCTDPQPLKEQPALNDSRYCLSSRLRVSATFWQNPRNHFRCQVQFYGLSENDEWTQDRAKPVTQIVSAEAWGRADCGFTSESYQQGVLSATNLSVIGFRILLLKVAGFNLLMTLRLWSSRAKRSGSGATNFSLLKQAGDVEENPGPTSMDWIWRILFLVGAATGAHSFEEVQLVESGGGLVQPGGSLRLSCAASGFTFSDYFMSWVRQAPGKGLEWVATISNGGTYTYYPDSVKGRFTISRDNSKNTLYLQMNSLRAEDTAVYYCARFDGYIFDYWGQGTLVTVSSTRIQNPDPAVYQLRDSKSSDKSVCLFTDFDSQTNVSQSKDSDVYITDKCVLDMRSMDFKSNSAVAWSNKSDFACANAFNNSIIPEDTFFPSPESSCDVKLVEKSFETDTNLNFQILYEILLGKATLYAVLVSALVLMAMVKRKDSRG

SEQ ID NO: 13512 - protein, 623 aa, synthetic construct
MALPVTALLLPLALLLHAARPDIQMTQTTSSLSASLGDRVTISCRASQDISKYLNWYQQKPDGTVKLLIYHTSRLHSGVPSRFSGSGSGTDYSLTISNLEQEDIATYFCQQGNTLPYTFGGGTKLEITLEIQNPDPAVYQLRDSKSSDKSVCLFTDFDSQTNVSQSKDSDVYITDKCVLDMRSMDFKSNSAVAWSNKSDFACANAFNNSIIPEDTFFPSPESSCDVKLVEKSFETDTNLNFQILYEILLGKATLYAVLVSALVLMAMVKRKDSRGRAKRSGSGVKQTLNFDLLKLAGDVESNPGPTSMDWIWRILFLVGAATGAHSFEVKLQESGPGLVAPSQSLSVTCTVSGVSLPDYGVSWIRQPPRKGLEWLGVIWGSETTYYNSALKSRLTIIKDNSKSQVFLKMNSLQTDDTAIYYCAKHYYYGGSYAMDYWGQGTSVTVSSTREDLKNVFPPEVAVFEPSEAEISHTQKATLVCLATGFYPDHVELSWWVNGKEVHSGVCTDPQPLKEQPALNDSRYCLSSRLRVSATFWQNPRNHFRCQVQFYGLSENDEWTQDRAKPVTQIVSAEAWGRADCGFTSESYQQGVLSATNLSVIGFRILLLKVAGFNLLMTLRLWSS

SEQ ID NO: 13513 - protein, 624 aa, synthetic construct
MALPVTALLLPLALLLHAARPEIVMTQSPATLSLSPGERATLSCRASQDISKYLNWYQQKPGQAPRLLIYHTSRLHSGIPARFSGSGSGTDYTLTISSLQPEDFAVYFCQQGNTLPYTFGQGTKLEIKLEIQNPDPAVYQLRDSKSSDKSVCLFTDFDSQTNVSQSKDSDVYITDKCVLDMRSMDFKSNSAVAWSNKSDFACANAFNNSIIPEDTFFPSPESSCDVKLVEKSFETDTNLNFQILYEILLGKATLYAVLVSALVLMAMVKRKDSRGRAKRSGSGVKQTLNFDLLKLAGDVESNPGPTSMDWIWRILFLVGAATGAHSFEQVQLQESGPGLVKPSETLSLTCTVSGVSLPDYGVSWIRQPPGKGLEWIGVIWGSETTYYNSSLKSRVTISKDNSKNQVSLKLSSVTAADTAVYYCAKHYYYGGSYAMDYWGQGTLVTVSSTREDLKNVFPPEVAVFEPSEAEISHTQKATLVCLATGFYPDHVELSWWVNGKEVHSGVCTDPQPLKEQPALNDSRYCLSSRLRVSATFWQNPRNHFRCQVQFYGLSENDEWTQDRAKPVTQIVSAEAWGRADCGFTSESYQQGVLSATNLSVIGFRILLLKVAGFNLLMTLRLWSS

SEQ ID NO: 13514 - protein, 625 aa, synthetic construct
MALPVTALLLPLALLLHAARPDEIVLTQSPATLSLSPGERATLSCSASSSVSYMHWYQQKPGQAPRLLIYDTSKLASGIPARFSGSGSGTDFTLTISSLEPEDVAVYYCFQGSVYPFTFGQGTKLEIKRLEIQNPDPAVYQLRDSKSSDKSVCLFTDFDSQTNVSQSKDSDVYITDKCVLDMRSMDFKSNSAVAWSNKSDFACANAFNNSIIPEDTFFPSPESSCDVKLVEKSFETDTNLNFQILYEILLGKATLYAVLVSALVLMAMVKRKDSRGRAKRSGSGVKQTLNFDLLKLAGDVESNPGPTSMDWIWRILFLVGAATGAHSFEQVQLQESGPGLVKPSQTLSLTCTVSGGSISTSGMGVGWIRQHPGKGLEWIGHIWWDDDKRYNPALKSRVTISVDTSKNQFSLKLSSVTAADTAVYYCARMELWSYYFDYWGQGTLVTVSSTREDLKNVFPPEVAVFEPSEAEISHTQKATLVCLATGFYPDHVELSWWVNGKEVHSGVCTDPQPLKEQPALNDSRYCLSSRLRVSATFWQNPRNHFRCQVQFYGLSENDEWTQDRAKPVTQIVSAEAWGRADCGFTSESYQQGVLSATNLSVIGFRILLLKVAGFNLLMTLRLWSS

SEQ ID NO: 13515 - protein, 623 aa, synthetic construct
MALPVTALLLPLALLLHAARPDYIHVTQSPSSLSVSIGDRVTINCQTSQGVGSDLHWYQHKPGRAPKLLIHHASSVEDGVPSRFSGTGFHTSFNLTINDLQADDIGTYYCQVLQSFGRGSRLDTKLEIQNPDPAVYQLRDSKSSDKSVCLFTDFDSQTNVSQSKDSDVYITDKCVLDMRSMDFKSNSAVAWSNKSDFACANAFNNSIIPEDTFFPSPESSCDVKLVEKSFETDTNLNFQILYEILLGKATLYAVLVSALVLMAMVKRKDSRGRAKRSGSGVKQTLNFDLLKLAGDVESNPGPTSMDWIWRILFLVGAATGAHSFERAHLVQSGTAMKKPGASVRVSCQTSGYTFTAHILFWFRQAPGRGLEWVGWIKPQYGAVNFGGGFRDRVTLTRDVYREIAYMDIRGLKPDDTAVYYCARDRSYGDSSWALDAWGQGTTVVVSATREDLKNVFPPEVAVFEPSEAEISHTQKATLVCLATGFYPDHVELSWWVNGKEVHSGVCTDPQPLKEQPALNDSRYCLSSRLRVSATFWQNPRNHFRCQVQFYGLSENDEWTQDRAKPVTQIVSAEAWGRADCGFTSESYQQGVLSATNLSVIGFRILLLKVAGFNLLMTLRLWSS

SEQ ID NO: 13516 - protein, 633 aa, synthetic construct
MALPVTALLLPLALLLHAARPDVQMIQTPDSLAVSLGQRATISCRASESVDNYGISFMHWYQQKPGQSPKLLIYRASNLESGIPARFSGSGSRTDFTLTINPVETDDVATYYCQQNNKDPPTFGGGTKLEIKLEIQNPDPAVYQLRDSKSSDKSVCLFTDFDSQTNVSQSKDSDVYITDKCVLDMRSMDFKSNSAVAWSNKSDFACANAFNNSIIPEDTFFPSPESSCDVKLVEKSFETDTNLNFQILYEILLGKATLYAVLVSALVLMAMVKRKDSRGRAKRSGSGVKQTLNFDLLKLAGDVESNPGPTSMDWIWRILFLVGAATGAHSFEGGGGSQVQLQQSGAELVKPGASVKISCKASGYAFSSYWMNWVKQRPGKGLEWIGQIYPGDGDTTYNGKFKGKATLTADKSSSTVYMQLNSLTSEDSAVYFCVRYYYGSSGYFDYWGQGTTLTVSSTREDLKNVFPPEVAVFEPSEAEISHTQKATLVCLATGFYPDHVELSWWVNGKEVHSGVCTDPQPLKEQPALNDSRYCLSSRLRVSATFWQNPRNHFRCQVQFYGLSENDEWTQDRAKPVTQIVSAEAWGRADCGFTSESYQQGVLSATNLSVIGFRILLLKVAGFNLLMTLRLWSS

SEQ ID NO: 13517 - protein, 624 aa, synthetic construct
MALPVTALLLPLALLLHAARPDVQMIQTPSSLSASLGDRVTISCRASQDIGNYLNWYQQKPDGTVKLLIYYTSRLHSGVPSRFSGSGSGTEYSLTISNLEQEDIATYFCQQGSALPPTFGGGTKLEINLEIQNPDPAVYQLRDSKSSDKSVCLFTDFDSQTNVSQSKDSDVYITDKCVLDMRSMDFKSNSAVAWSNKSDFACANAFNNSIIPEDTFFPSPESSCDVKLVEKSFETDTNLNFQILYEILLGKATLYAVLVSALVLMAMVKRKDSRGRAKRSGSGVKQTLNFDLLKLAGDVESNPGPTSMDWIWRILFLVGAATGAHSFEALQLQQSGAELVRPGASVTLSCKASGYTFTDYEMHWVKQTPVHGLEWIGAIDPETGGTAYNQKFEGKAILTADKSSSTAYMELRSLTSEDSPVYYCARRRYYGSSSFDYWGQGTTLTVSSTREDLKNVFPPEVAVFEPSEAEISHTQKATLVCLATGFYPDHVELSWWVNGKEVHSGVCTDPQPLKEQPALNDSRYCLSSRLRVSATFWQNPRNHFRCQVQFYGLSENDEWTQDRAKPVTQIVSAEAWGRADCGFTSESYQQGVLSATNLSVIGFRILLLKVAGFNLLMTLRLWSS

SEQ ID NO: 13518 - protein, 628 aa, synthetic construct
MALPVTALLLPLALLLHAARPDIVLTQSPASLAVSLGQRATISCRASKSVSTSGYSYLHWYQQKPGQPPKLLIYLASNLESGVPARFSGSGSGTDFTLNIHPVEEEDAATYYCQHSRELPFTFGSGTKLEIKLEIQNPDPAVYQLRDSKSSDKSVCLFTDFDSQTNVSQSKDSDVYITDKCVLDMRSMDFKSNSAVAWSNKSDFACANAFNNSIIPEDTFFPSPESSCDVKLVEKSFETDTNLNFQILYEILLGKATLYAVLVSALVLMAMVKRKDSRGRAKRSGSGVKQTLNFDLLKLAGDVESNPGPTSMDWIWRILFLVGAATGAHSFEQVQLVESGGGLVQPGGSLKLSCAASGFDFSRYWMSWVRQAPGKGLEWIGEINPTSSTINFTPSLKDKVFISRDNAKNTLYLQMSKVRSEDTALYYCARGNYYRYGDAMDYWGQGTSVTVSTREDLKNVFPPEVAVFEPSEAEISHTQKATLVCLATGFYPDHVELSWWVNGKEVHSGVCTDPQPLKEQPALNDSRYCLSSRLRVSATFWQNPRNHFRCQVQFYGLSENDEWTQDRAKPVTQIVSAEAWGRADCGFTSESYQQGVLSATNLSVIGFRILLLKVAGFNLLMTLRLWSS

SEQ ID NO: 13519 - protein, 626 aa, synthetic construct
MALPVTALLLPLALLLHAARPDIQMTQSPSSLSASVGDRVTITCSASQDISNYLNWYQQKPGKAPKLLIYYTSNLHSGVPSRFSGSGSGTDFTLTISSLQPEDFATYYCQQYRKLPWTFGQGTKLEIKRLEIQNPDPAVYQLRDSKSSDKSVCLFTDFDSQTNVSQSKDSDVYITDKCVLDMRSMDFKSNSAVAWSNKSDFACANAFNNSIIPEDTFFPSPESSCDVKLVEKSFETDTNLNFQILYEILLGKATLYAVLVSALVLMAMVKRKDSRGRAKRSGSGVKQTLNFDLLKLAGDVESNPGPTSMDWIWRILFLVGAATGAHSFEQVQLVQSGAEVKKPGSSVKVSCKASGGTFSNYWMHWVRQAPGQGLEWMGATYRGHSDTYYNQKFKGRVTITADKSTSTAYMELSSLRSEDTAVYYCARGAIYDGYDVLDNWGQGTLVTVSSTREDLKNVFPPEVAVFEPSEAEISHTQKATLVCLATGFYPDHVELSWWVNGKEVHSGVCTDPQPLKEQPALNDSRYCLSSRLRVSATFWQNPRNHFRCQVQFYGLSENDEWTQDRAKPVTQIVSAEAWGRADCGFTSESYQQGVLSATNLSVIGFRILLLKVAGFNLLMTLRLWSS

SEQ ID NO: 13520 - protein, 626 aa, synthetic construct
MALPVTALLLPLALLLHAARPDIVLTQSPATLSLSPGDRATISCRASESVTILGSHLIYWYQQKPGQPPRLLIQLASNVQTGVPARFSGSGSRTDFTLTISSVEPEDFAVYYCLQSRTIPRTFGQGTKLEIKRLEIQNPDPAVYQLRDSKSSDKSVCLFTDFDSQTNVSQSKDSDVYITDKCVLDMRSMDFKSNSAVAWSNKSDFACANAFNNSIIPEDTFFPSPESSCDVKLVEKSFETDTNLNFQILYEILLGKATLYAVLVSALVLMAMVKRKDSRGRAKRSGSGVKQTLNFDLLKLAGDVESNPGPTSMDWIWRILFLVGAATGAHSFEQVQLVQSGPEVKKPGESVKISCKASGYTFRHYSMNWVKQAPGQGLKWMGRINTESGVPIYADDFKGRFSFTVDTSASTAYLEISSLTSEDTAVYFCSNDYLYSLDFWGQGTTLTVSSTREDLKNVFPPEVAVFEPSEAEISHTQKATLVCLATGFYPDHVELSWWVNGKEVHSGVCTDPQPLKEQPALNDSRYCLSSRLRVSATFWQNPRNHFRCQVQFYGLSENDEWTQDRAKPVTQIVSAEAWGRADCGFTSESYQQGVLSATNLSVIGFRILLLKVAGFNLLMTLRLWSS

SEQ ID NO: 13521 - protein, 627 aa, synthetic construct
MALPVTALLLPLALLLHAARPQSVLTQPPSVSGAPGQRVTISCTGSSSNIGAGFDVHWYQQLPGTAPKLLIYGNSNRPSGVPDRFSGSKSGTSASLAITGLQAEDEADYYCQSYDSSLSGYVFGTGTKVTVLGLEIQNPDPAVYQLRDSKSSDKSVCLFTDFDSQTNVSQSKDSDVYITDKCVLDMRSMDFKSNSAVAWSNKSDFACANAFNNSIIPEDTFFPSPESSCDVKLVEKSFETDTNLNFQILYEILLGKATLYAVLVSALVLMAMVKRKDSRGRAKRSGSGVKQTLNFDLLKLAGDVESNPGPTSMDWIWRILFLVGAATGAHSFEQVQLVQSGAEVKKPGASVKVSCKASGYTFTDYYMHWVRQAPGQRLEWMGWINPNSGGTNYAQKFQDRITVTRDTSSNTGYMELTRLRSDDTAVYYCARSPYSGVLDKWGQGTLVTVSSTREDLKNVFPPEVAVFEPSEAEISHTQKATLVCLATGFYPDHVELSWWVNGKEVHSGVCTDPQPLKEQPALNDSRYCLSSRLRVSATFWQNPRNHFRCQVQFYGLSENDEWTQDRAKPVTQIVSAEAWGRADCGFTSESYQQGVLSATNLSVIGFRILLLKVAGFNLLMTLRLWSS

SEQ ID NO: 13522 - protein, 624 aa, synthetic construct
MALPVTALLLPLALLLHAARPQAVLTQPPSASGTPGQRVTISCSGSSSNIGSYTVSWYQQLPGTAPKFLIYSNNQRPSGVPDRFSGSKSGTSASLAISGLQSEDEADYYCAAWDDSLNGYVFGTGTKVTVLGLEIQNPDPAVYQLRDSKSSDKSVCLFTDFDSQTNVSQSKDSDVYITDKCVLDMRSMDFKSNSAVAWSNKSDFACANAFNNSIIPEDTFFPSPESSCDVKLVEKSFETDTNLNFQILYEILLGKATLYAVLVSALVLMAMVKRKDSRGRAKRSGSGVKQTLNFDLLKLAGDVESNPGPTSMDWIWRILFLVGAATGAHSFEVQLVQSGAEVKKPGESLKISCKGSGYDFTTYWIGWVRQMPGKGLEWMGIIYPGDSDTRYSPSVRGRVTISADKSINTAYLQWSSLEASDTAMYYCARMWTFSQDGWGQGTLVTVSSTREDLKNVFPPEVAVFEPSEAEISHTQKATLVCLATGFYPDHVELSWWVNGKEVHSGVCTDPQPLKEQPALNDSRYCLSSRLRVSATFWQNPRNHFRCQVQFYGLSENDEWTQDRAKPVTQIVSAEAWGRADCGFTSESYQQGVLSATNLSVIGFRILLLKVAGFNLLMTLRLWSS

SEQ ID NO: 13523 - protein, 627 aa, synthetic construct
MALPVTALLLPLALLLHAARPDIVMTQSPDSLAVSLGERATINCKSSQSILYSSNQKNYLAWYQQKPGQSPKLLIYWASTRESGVPDRFSGSGSGTDFTLTISSLQAEDVAVYYCHQYISSYTFGQGTKLEIKLEIQNPDPAVYQLRDSKSSDKSVCLFTDFDSQTNVSQSKDSDVYITDKCVLDMRSMDFKSNSAVAWSNKSDFACANAFNNSIIPEDTFFPSPESSCDVKLVEKSFETDTNLNFQILYEILLGKATLYAVLVSALVLMAMVKRKDSRGRAKRSGSGVKQTLNFDLLKLAGDVESNPGPTSMDWIWRILFLVGAATGAHSFEQVQLVQSGAEVKKPGASVKVSCKASGYTFASQWMHWMRQAPGQGLEWIGWINPGNVNTKYNEKFKGRATLTVDTSTNTAYMELSSLRSEDTAVYYCARSTWYRPLDYWGQGTLVTVSSTREDLKNVFPPEVAVFEPSEAEISHTQKATLVCLATGFYPDHVELSWWVNGKEVHSGVCTDPQPLKEQPALNDSRYCLSSRLRVSATFWQNPRNHFRCQVQFYGLSENDEWTQDRAKPVTQIVSAEAWGRADCGFTSESYQQGVLSATNLSVIGFRILLLKVAGFNLLMTLRLWSS

SEQ ID NO: 13524 - protein, 627 aa, synthetic construct
MALPVTALLLPLALLLHAARPDHIVLTQSPSSLSASLGDRVTISCRASQDISTYLNWYQQKPDGTVKLLIFYTSRLHAGVPSRFSGSGSGTHHSLTISNLEQEDIATYFCQQGNSLPFTFGSGTKLEIKRLEIQNPDPAVYQLRDSKSSDKSVCLFTDFDSQTNVSQSKDSDVYITDKCVLDMRSMDFKSNSAVAWSNKSDFACANAFNNSIIPEDTFFPSPESSCDVKLVEKSFETDTNLNFQILYEILLGKATLYAVLVSALVLMAMVKRKDSRGRAKRSGSGVKQTLNFDLLKLAGDVESNPGPTSMDWIWRILFLVGAATGAHSFEQVQLKESGPELEKPGASVKISCKASGYSFTAYSMNWVKQNNGMSLEWIGSIDPYYGDTKYAQKFKGKATLTVDKASSTAYLQLKSLTSEDSAVYYCARRMITTGDWYFDVWGAGTTVTVSSTREDLKNVFPPEVAVFEPSEAEISHTQKATLVCLATGFYPDHVELSWWVNGKEVHSGVCTDPQPLKEQPALNDSRYCLSSRLRVSATFWQNPRNHFRCQVQFYGLSENDEWTQDRAKPVTQIVSAEAWGRADCGFTSESYQQGVLSATNLSVIGFRILLLKVAGFNLLMTLRLWSS

SEQ ID NO: 13525 - protein, 627 aa, synthetic construct; identical to SEQ ID NO: 13524

SEQ ID NO: 13526 - protein, 627 aa, synthetic construct
MALPVTALLLPLALLLHAARPDEIVLTQSPATLSLSPGERATLSCRASQSVSSYLAWYQQKPGQAPRLLIYDASNRATGIPARFSGSGSGTDFTLTISSLEPEDFAVYYCQQRSNWPITFGQGTRLEIKLEIQNPDPAVYQLRDSKSSDKSVCLFTDFDSQTNVSQSKDSDVYITDKCVLDMRSMDFKSNSAVAWSNKSDFACANAFNNSIIPEDTFFPSPESSCDVKLVEKSFETDTNLNFQILYEILLGKATLYAVLVSALVLMAMVKRKDSRGRAKRSGSGVKQTLNFDLLKLAGDVESNPGPTSMDWIWRILFLVGAATGAHSFEEVQLVESGGGLVQPGRSLRLSCAASGFTFNDYAMHWVRQAPGKGLEWVSTISWNSGSIGYADSVKGRFTISRDNAKKSLYLQMNSLRAEDTALYYCAKDIQYGNYYYGMDVWGQGTTVTVSSTREDLKNVFPPEVAVFEPSEAEISHTQKATLVCLATGFYPDHVELSWWVNGKEVHSGVCTDPQPLKEQPALNDSRYCLSSRLRVSATFWQNPRNHFRCQVQFYGLSENDEWTQDRAKPVTQIVSAEAWGRADCGFTSESYQQGVLSATNLSVIGFRILLLKVAGFNLLMTLRLWSS

SEQ ID NO: 13527 - protein, 629 aa, synthetic construct
MALPVTALLLPLALLLHAARPDIVMTQTPLSLPVTPGEPASISCRSSKSLLHSNGITYLYWYLQKPGQSPQLLIYQMSNLVSGVPDRFSGSGSGTDFTLKISRVEAEDVGVYYCAQNLELPYTFGGGTKVEIKRLEIQNPDPAVYQLRDSKSSDKSVCLFTDFDSQTNVSQSKDSDVYITDKCVLDMRSMDFKSNSAVAWSNKSDFACANAFNNSIIPEDTFFPSPESSCDVKLVEKSFETDTNLNFQILYEILLGKATLYAVLVSALVLMAMVKRKDSRGRAKRSGSGVKQTLNFDLLKLAGDVESNPGPTSMDWIWRILFLVGAATGAHSFEQVQLVQSGAEVKKPGSSVKVSCKASGYAFSYSWINWVRQAPGQGLEWMGRIFPGDGDTDYNGKFKGRVTITADKSTSTAYMELSSLRSEDTAVYYCARNVFDGYWLVYWGQGTLVTVSSTREDLKNVFPPEVAVFEPSEAEISHTQKATLVCLATGFYPDHVELSWWVNGKEVHSGVCTDPQPLKEQPALNDSRYCLSSRLRVSATFWQNPRNHFRCQVQFYGLSENDEWTQDRAKPVTQIVSAEAWGRADCGFTSESYQQGVLSATNLSVIGFRILLLKVAGFNLLMTLRLWSS

SEQ ID NO: 13528 - protein, 630 aa, synthetic construct
MALPVTALLLPLALLLHAARPDIQMTQSPSSLSASVGDRVTITCRSSQSIVHSVGNTFLEWYQQKPGKAPKLLIYKVSNRFSGVPSRFSGSGSGTDFTLTISSLQPEDFATYYCFQGSQFPYTFGQGTKVEIKRLEIQNPDPAVYQLRDSKSSDKSVCLFTDFDSQTNVSQSKDSDVYITDKCVLDMRSMDFKSNSAVAWSNKSDFACANAFNNSIIPEDTFFPSPESSCDVKLVEKSFETDTNLNFQILYEILLGKATLYAVLVSALVLMAMVKRKDSRGRAKRSGSGVKQTLNFDLLKLAGDVESNPGPTSMDWIWRILFLVGAATGAHSFEEVQLVESGGGLVQPGGSLRLSCAASGYEFSRSWMNWVRQAPGKGLEWVGRIYPGDGDTNYSGKFKGRFTISADTSKNTAYLQMNSLRAEDTAVYYCARDGSSWDWYFDVWGQGTLVTVSSTREDLKNVFPPEVAVFEPSEAEISHTQKATLVCLATGFYPDHVELSWWVNGKEVHSGVCTDPQPLKEQPALNDSRYCLSSRLRVSATFWQNPRNHFRCQVQFYGLSENDEWTQDRAKPVTQIVSAEAWGRADCGFTSESYQQGVLSATNLSVIGFRILLLKVAGFNLLMTLRLWSS

SEQ ID NO: 13529 - protein, 628 aa, synthetic construct
MALPVTALLLPLALLLHAARPDIQMTQSPSSLSASVGDRVTITCRASQTIWSYLNWYQQRPGKAPNLLIYAASSLQSGVPSRFSGRGSGTDFTLTISSLQAEDFATYYCQQSYSIPQIFGQGTKLEIKLEIQNPDPAVYQLRDSKSSDKSVCLFTDFDSQTNVSQSKDSDVYITDKCVLDMRSMDFKSNSAVAWSNKSDFACANAFNNSIIPEDTFFPSPESSCDVKLVEKSFETDTNLNFQILYEILLGKATLYAVLVSALVLMAMVKRKDSRGRAKRSGSGVKQTLNFDLLKLAGDVESNPGPTSMDWIWRILFLVGAATGAHSFEQVQLQQSGPGLVKPSQTLSLTCAISGDSVSSNSAAWNWIRQSPSRGLEWLGRTYYRSKWYNDYAVSVKSRITINPDTSKNQFSLQLNSVTPEDTAVYYCAREVTGDLEDAFDIWGQGTMVTVSSTREDLKNVFPPEVAVFEPSEAEISHTQKATLVCLATGFYPDHVELSWWVNGKEVHSGVCTDPQPLKEQPALNDSRYCLSSRLRVSATFWQNPRNHFRCQVQFYGLSENDEWTQDRAKPVTQIVSAEAWGRADCGFTSESYQQGVLSATNLSVIGFRILLLKVAGFNLLMTLRLWSS

SEQ ID NO: 13530 - protein, 621 aa, synthetic construct
MALPVTALLLPLALLLHAARPDIQMTQSPATIENTSLSASVGDRVTITCRASQGISSWLTWYQQKPEKAPKSLIYAASSLQSGVPSRFSGSGSGTDFTLTISSLQPEDFATYYCQQYDSYPITFGQGTRLEIKLEIQNPDPAVYQLRDSKSSDKSVCLFTDFDSQTNVSQSKDSDVYITDKCVLDMRSMDFKSNSAVAWSNKSDFACANAFNNSIIPEDTFFPSPESSCDVKLVEKSFETDTNLNFQILYEILLGKATLYAVLVSALVLMAMVKRKDSRGRAKRSGSGVKQTLNFDLLKLAGDVESNPGPTSMDWIWRILFLVGAATGAHSFEQVQLQQWGAGLLKPSETLSLTCAVYGGSFSAYYWSWIRQPPGKGLEWIGDINHGGGTNYNPSLKSRVTISVDTSKNQFSLKLNSVTAADTAVYYCASLTAYWGQGSLVTVSSTREDLKNVFPPEVAVFEPSEAEISHTQKATLVCLATGFYPDHVELSWWVNGKEVHSGVCTDPQPLKEQPALNDSRYCLSSRLRVSATFWQNPRNHFRCQVQFYGLSENDEWTQDRAKPVTQIVSAEAWGRADCGFTSESYQQGVLSATNLSVIGFRILLLKVAGFNLLMTLRLWSS

SEQ ID NO: 13531 - protein, 626 aa, synthetic construct
MALPVTALLLPLALLLHAARPDEIVLTQSPDSLAVSLGERATINCKASQSVDFDGDSYLNWYQQKPGQPPKVLIYAASTLQSGVPSRFSGSGSGTDFTLTINSLEAEDAATYYCQQSNEDPWTFGGGTKVEIKLEIQNPDPAVYQLRDSKSSDKSVCLFTDFDSQTNVSQSKDSDVYITDKCVLDMRSMDFKSNSAVAWSNKSDFACANAFNNSIIPEDTFFPSPESSCDVKLVEKSFETDTNLNFQILYEILLGKATLYAVLVSALVLMAMVKRKDSRGRAKRSGSGVKQTLNFDLLKLAGDVESNPGPTSMDWIWRILFLVGAATGAHSFEQVQLVQSGAEVKKPGASVKVSCKVSGYTFTDYYITWVRQAPGQALEWMGWIYPGSGNTKYSQKFQGRFVFSVDTSASTAYLQLSSLKAEDTAVYYCANYGNYWFAYWGQGTLVTVSSTREDLKNVFPPEVAVFEPSEAEISHTQKATLVCLATGFYPDHVELSWWVNGKEVHSGVCTDPQPLKEQPALNDSRYCLSSRLRVSATFWQNPRNHFRCQVQFYGLSENDEWTQDRAKPVTQIVSAEAWGRADCGFTSESYQQGVLSATNLSVIGFRILLLKVAGFNLLMTLRLWSS

SEQ ID NO: 13532 - protein, 623 aa, synthetic construct
MALPVTALLLPLALLLHAARPDIQMTQSPSSLSASVGDRVTITCRASQGISSWLAWYQQKPEKAPKSLIYAASSLQSGVPSRFSGSGSGTDFTLTISSLQPEDFATYYCQQYNSYPPTFGGGTKVEIKLEIQNPDPAVYQLRDSKSSDKSVCLFTDFDSQTNVSQSKDSDVYITDKCVLDMRSMDFKSNSAVAWSNKSDFACANAFNNSIIPEDTFFPSPESSCDVKLVEKSFETDTNLNFQILYEILLGKATLYAVLVSALVLMAMVKRKDSRGRAKRSGSGVKQTLNFDLLKLAGDVESNPGPTSMDWIWRILFLVGAATGAHSFEEVQLVQSGGGLVHPGGSLRLSCAGSGFAFSSSTMHWIRQAPGKGLEWISLIGSGGGIYYGDSVKGRFTISRDNAKNSLYLQMNSLRAEDMAVYYCVRGYFDWVDYFDYWGQGTLVTVSSTREDLKNVFPPEVAVFEPSEAEISHTQKATLVCLATGFYPDHVELSWWVNGKEVHSGVCTDPQPLKEQPALNDSRYCLSSRLRVSATFWQNPRNHFRCQVQFYGLSENDEWTQDRAKPVTQIVSAEAWGRADCGFTSESYQQGVLSATNLSVIGFRILLLKVAGFNLLMTLRLWSS

SEQ ID NO: 13533 - protein, 633 aa, synthetic construct
MALPVTALLLPLALLLHAARPDDIVMTQSPDSLTVSLGERTTINCKSSQSVLDSSKNKNSLAWYQQKPGQPPKLLLSWASTRESGIPDRFSGSGSGTDFTLTIDSLQPEDSATYYCQQSAHFPITFGQGTRLEIKLEIQNPDPAVYQLRDSKSSDKSVCLFTDFDSQTNVSQSKDSDVYITDKCVLDMRSMDFKSNSAVAWSNKSDFACANAFNNSIIPEDTFFPSPESSCDVKLVEKSFETDTNLNFQILYEILLGKATLYAVLVSALVLMAMVKRKDSRGRAKRSGSGVKQTLNFDLLKLAGDVESNPGPTSMDWIWRILFLVGAATGAHSFEQVQLVQSGAEVKKPGASVKVSCKASGYTFTNYGMNWVKQAPGQGLKWMGWINTYTGEPTYADDFKGRVTMTSDTSTSTAYLELHNLRSDDTAVYYCARWSWSDGYYVYFDYWGQGTTVTVSSTREDLKNVFPPEVAVFEPSEAEISHTQKATLVCLATGFYPDHVELSWWVNGKEVHSGVCTDPQPLKEQPALNDSRYCLSSRLRVSATFWQNPRNHFRCQVQFYGLSENDEWTQDRAKPVTQIVSAEAWGRADCGFTSESYQQGVLSATNLSVIGFRILLLKVAGFNLLMTLRLWSS

SEQ ID NO: 13534 - protein, 629 aa, synthetic construct
MALPVTALLLPLALLLHAARPDEIVLTQSPGSLAVSPGERVTMSCKSSQSVFFSSSQKNYLAWYQQIPGQSPRLLIYWASTRESGVPDRFTGSGSGTDFTLTISSVQPEDLAIYYCHQYLSSRTFGQGTKLEIKRLEIQNPDPAVYQLRDSKSSDKSVCLFTDFDSQTNVSQSKDSDVYITDKCVLDMRSMDFKSNSAVAWSNKSDFACANAFNNSIIPEDTFFPSPESSCDVKLVEKSFETDTNLNFQILYEILLGKATLYAVLVSALVLMAMVKRKDSRGRAKRSGSGVKQTLNFDLLKLAGDVESNPGPTSMDWIWRILFLVGAATGAHSFEQVQLQQPGAEVVKPGASVKMSCKASGYTFTSYYIHWIKQTPGQGLEWVGVIYPGNDDISYNQKFQGKATLTADKSSTTAYMQLSSLTSEDSAVYYCAREVRLRYFDVWGQGTTVTVSSTREDLKNVFPPEVAVFEPSEAEISHTQKATLVCLATGFYPDHVELSWWVNGKEVHSGVCTDPQPLKEQPALNDSRYCLSSRLRVSATFWQNPRNHFRCQVQFYGLSENDEWTQDRAKPVTQIVSAEAWGRADCGFTSESYQQGVLSATNLSVIGFRILLLKVAGFNLLMTLRLWSS

SEQ ID NO: 13535 - protein, 633 aa, synthetic construct
MALPVTALLLPLALLLHAARPDVLLTQSPLSLPVTLGQPASISCRSSQTIVHSNGNTYLEWFQQRPGQSPRLLIYQVSNRFSGVPDRFSGSGSGTDFTLKISRVEAEDVGVYYCFQGSHVPRTFGGGTKVEIKRALEIQNPDPAVYQLRDSKSSDKSVCLFTDFDSQTNVSQSKDSDVYITDKCVLDMRSMDFKSNSAVAWSNKSDFACANAFNNSIIPEDTFFPSPESSCDVKLVEKSFETDTNLNFQILYEILLGKATLYAVLVSALVLMAMVKRKDSRGRAKRSGSGVKQTLNFDLLKLAGDVESNPGPTSMDWIWRILFLVGAATGAHSFEQIQLVQSGSELKKPGASVKVSCKASGYTFTNYGMNWVRQAPGQGLKWMGWINTNTGEPKYAEEFKGRFALSLDTSVSTAYLQINSLKAEDTAVYFCARGYGNYARGAWLAYWGQGTLVTVSSTREDLKNVFPPEVAVFEPSEAEISHTQKATLVCLATGFYPDHVELSWWVNGKEVHSGVCTDPQPLKEQPALNDSRYCLSSRLRVSATFWQNPRNHFRCQVQFYGLSENDEWTQDRAKPVTQIVSAEAWGRADCGFTSESYQQGVLSATNLSVIGFRILLLKVAGFNLLMTLRLWSS

SEQ ID NO: 13536 - protein, 618 aa, synthetic construct
MALPVTALLLPLALLLHAARPDEIVLTQSPATLSLSPGERATLSCSASSSINYIYWLQQKPGQAPRILIYLTSNLASGVPARFSGSGSGTDFTLTISSLEPEDFAVYYCLQWSSNPLTFGGGTKVEIKLEIQNPDPAVYQLRDSKSSDKSVCLFTDFDSQTNVSQSKDSDVYITDKCVLDMRSMDFKSNSAVAWSNKSDFACANAFNNSIIPEDTFFPSPESSCDVKLVEKSFETDTNLNFQILYEILLGKATLYAVLVSALVLMAMVKRKDSRGRAKRSGSGVKQTLNFDLLKLAGDVESNPGPTSMDWIWRILFLVGAATGAHSFEEVQLVESGGGLVKPGGSLRLSCAASGFTFSSYDMSWVRQAPGKGLEWVSTISSGGSYTYYLDSIKGRFTISRDNAKNSLYLQMNSLRAEDTAVYYCARQGLDYWGRGTLVTVSSTREDLKNVFPPEVAVFEPSEAEISHTQKATLVCLATGFYPDHVELSWWVNGKEVHSGVCTDPQPLKEQPALNDSRYCLSSRLRVSATFWQNPRNHFRCQVQFYGLSENDEWTQDRAKPVTQIVSAEAWGRADCGFTSESYQQGVLSATNLSVIGFRILLLKVAGFNLLMTLRLWSS

SEQ ID NO: 13537 - protein, 627 aa, synthetic construct
MALPVTALLLPLALLLHAARPDIVMTQSPDSLAVSLGERATINCRASKSVSTSGYSFMHWYQQKPGQPPKLLIYLASNLESGVPDRFSGSGSGTDFTLTISSLQAEDVAVYYCQHSREVPWTFGQGTKVEIKRLEIQNPDPAVYQLRDSKSSDKSVCLFTDFDSQTNVSQSKDSDVYITDKCVLDMRSMDFKSNSAVAWSNKSDFACANAFNNSIIPEDTFFPSPESSCDVKLVEKSFETDTNLNFQILYEILLGKATLYAVLVSALVLMAMVKRKDSRGRAKRSGSGVKQTLNFDLLKLAGDVESNPGPTSMDWIWRILFLVGAATGAHSFEQVQLVQSGAEVKKPGASVKVSCKASGYTFTNYGMNWVRQAPGQGLEWMGWINTYTGEPTYADAFKGRFAFSLDTSTSTAYLQINSLRSDDTAVYYCARDYGDYGMDYWGQGTTVTVSSTREDLKNVFPPEVAVFEPSEAEISHTQKATLVCLATGFYPDHVELSWWVNGKEVHSGVCTDPQPLKEQPALNDSRYCLSSRLRVSATFWQNPRNHFRCQVQFYGLSENDEWTQDRAKPVTQIVSAEAWGRADCGFTSESYQQGVLSATNLSVIGFRILLLKVAGFNLLMTLRLWSS

SEQ ID NO: 13538 - protein, 623 aa, synthetic construct
MALPVTALLLPLALLLHAARPDIVMTQTPLTLSVTIGQPASISCKSSQSLLDSDGKTYLNWLLQRPGQSPERLIYLVSKLDSGVPDRFTGSGSGTDFTLKISRVEAEDLGVYCCWQGTHFPYTFGGGTKVEIKGLEIQNPDPAVYQLRDSKSSDKSVCLFTDFDSQTNVSQSKDSDVYITDKCVLDMRSMDFKSNSAVAWSNKSDFACANAFNNSIIPEDTFFPSPESSCDVKLVEKSFETDTNLNFQILYEILLGKATLYAVLVSALVLMAMVKRKDSRGRAKRSGSGVKQTLNFDLLKLAGDVESNPGPTSMDWIWRILFLVGAATGAHSFEQVQLQQPGAELVRPGASVKLSCKASGYTFTSYWMNWVKQRPGQGLEWIGMIDPSDSETHYNHIFKDKATLTVDKSSSTAYLQLSSLTSEDSAVYYCARNLYLWGQGTSVTVSSTREDLKNVFPPEVAVFEPSEAEISHTQKATLVCLATGFYPDHVELSWWVNGKEVHSGVCTDPQPLKEQPALNDSRYCLSSRLRVSATFWQNPRNHFRCQVQFYGLSENDEWTQDRAKPVTQIVSAEAWGRADCGFTSESYQQGVLSATNLSVIGFRILLLKVAGFNLLMTLRLWSS

SEQ ID NO: 13539 - protein, 631 aa, synthetic construct
MALPVTALLLPLALLLHAARPDIVMTQSPDSLAVSLGERATINCESSQSLLNSGNQKNYLTWYQQKPGQPPKPLIYWASTRESGVPDRFSGSGSGTDFTLTISSLQAEDVAVYYCQNDYSYPYTFGQGTKLEIKRLEIQNPDPAVYQLRDSKSSDKSVCLFTDFDSQTNVSQSKDSDVYITDKCVLDMRSMDFKSNSAVAWSNKSDFACANAFNNSIIPEDTFFPSPESSCDVKLVEKSFETDTNLNFQILYEILLGKATLYAVLVSALVLMAMVKRKDSRGRAKRSGSGVKQTLNFDLLKLAGDVESNPGPTSMDWIWRILFLVGAATGAHSFEEVQLVQSGAEVKKPGESLKISCKGSGYSFTDYYMKWARQMPGKGLEWMGDIIPSNGATFYNQKFKGQVTISADKSISTTYLQWSSLKASDTAMYYCARSHLLRASWFAYWGQGTMVTVSSTREDLKNVFPPEVAVFEPSEAEISHTQKATLVCLATGFYPDHVELSWWVNGKEVHSGVCTDPQPLKEQPALNDSRYCLSSRLRVSATFWQNPRNHFRCQVQFYGLSENDEWTQDRAKPVTQIVSAEAWGRADCGFTSESYQQGVLSATNLSVIGFRILLLKVAGFNLLMTLRLWSS

SEQ ID NO: 13540 - protein, 626 aa, synthetic construct
MALPVTALLLPLALLLHAARPDIQMTQSTSSLSASLGDRVTISCSASQGINNYLNWYQQKPDGTVELLIYYTSTLQSGVPSRFSGSGSGTDYSLTISNLEPEDIGTYYCQQYSKLPRTFGGGTKLEIKLEIQNPDPAVYQLRDSKSSDKSVCLFTDFDSQTNVSQSKDSDVYITDKCVLDMRSMDFKSNSAVAWSNKSDFACANAFNNSIIPEDTFFPSPESSCDVKLVEKSFETDTNLNFQILYEILLGKATLYAVLVSALVLMAMVKRKDSRGRAKRSGSGVKQTLNFDLLKLAGDVESNPGPTSMDWIWRILFLVGAATGAHSFEQVQLQQSGSELMMPGASVKISCKATGYTFSNYWIEWVKQRPGHGLEWIGEILPGTGRTIYNEKFKGKATFTADISSNTVQMQLSSLTSEDSAVYYCARRDYYGNFYYAMDYWGQGTSVTVSSTREDLKNVFPPEVAVFEPSEAEISHTQKATLVCLATGFYPDHVELSWWVNGKEVHSGVCTDPQPLKEQPALNDSRYCLSSRLRVSATFWQNPRNHFRCQVQFYGLSENDEWTQDRAKPVTQIVSAEAWGRADCGFTSESYQQGVLSATNLSVIGFRILLLKVAGFNLLMTLRLWSS

SEQ ID NO: 13541 - protein, 621 aa, synthetic construct
MALPVTALLLPLALLLHAARPDIQMTQSPASLSVSVGETVTITCRASENIYSNLAWYQQKQGKSPQLLVYAATNLADGVPSRFSGSGSGTQYSLKINSLQSEDFGSYYCQHFWGTWTFGGGTTLEIKLEIQNPDPAVYQLRDSKSSDKSVCLFTDFDSQTNVSQSKDSDVYITDKCVLDMRSMDFKSNSAVAWSNKSDFACANAFNNSIIPEDTFFPSPESSCDVKLVEKSFETDTNLNFQILYEILLGKATLYAVLVSALVLMAMVKRKDSRGRAKRSGSGVKQTLNFDLLKLAGDVESNPGPTSMDWIWRILFLVGAATGAHSFEEVQLQQSGPELVKPGASVKMSCKASGYTFTDYYMKWMKQSHGKSLEWIGDINPNNGGTTYNQKFKGKATLTVDKSSSTAYMQLNSLTSEDSAVYYCARDYGYGYFDYWGQGTTLTVSSTREDLKNVFPPEVAVFEPSEAEISHTQKATLVCLATGFYPDHVELSWWVNGKEVHSGVCTDPQPLKEQPALNDSRYCLSSRLRVSATFWQNPRNHFRCQVQFYGLSENDEWTQDRAKPVTQIVSAEAWGRADCGFTSESYQQGVLSATNLSVIGFRILLLKVAGFNLLMTLRLWSS

SEQ ID NO: 13542 - protein, 624 aa, synthetic construct
MALPVTALLLPLALLLHAARPEIVLTQSPGTLSLSPGERATLSCRASQSVGGYLAWYQQKPGQAPRLLIYDASNRATGIPARFSGSGSGTDFTLTISSLEPEDFAVYYCQQRNNWPPMYTFGQGTKLEIKRLEIQNPDPAVYQLRDSKSSDKSVCLFTDFDSQTNVSQSKDSDVYITDKCVLDMRSMDFKSNSAVAWSNKSDFACANAFNNSIIPEDTFFPSPESSCDVKLVEKSFETDTNLNFQILYEILLGKATLYAVLVSALVLMAMVKRKDSRGRAKRSGSGVKQTLNFDLLKLAGDVESNPGPTSMDWIWRILFLVGAATGAHSFEQVQLVQSGAEVKKPGSSVKVSCKASGGTFSSYAISWVRQAPGQGLEWMGGIIPILGTANYAQKFQGRVTITADESTSTAYMELSSLRSEDTAVYYCARWGGGAFDIWGQGTMVTVSSTREDLKNVFPPEVAVFEPSEAEISHTQKATLVCLATGFYPDHVELSWWVNGKEVHSGVCTDPQPLKEQPALNDSRYCLSSRLRVSATFWQNPRNHFRCQVQFYGLSENDEWTQDRAKPVTQIVSAEAWGRADCGFTSESYQQGVLSATNLSVIGFRILLLKVAGFNLLMTLRLWSS

SEQ ID NO: 13543 - protein, 619 aa, synthetic construct
MALPVTALLLPLALLLHAARPQIVLTQSPALMSASPGEKVTMTCSASSSVRYMYWYQQKPRSSPKPWIHLTSNLASGVPARFSGSGSGTSYSLTISSMEAEDAATYYCQQWSSHPFTFGSGTKLEIKLEIQNPDPAVYQLRDSKSSDKSVCLFTDFDSQTNVSQSKDSDVYITDKCVLDMRSMDFKSNSAVAWSNKSDFACANAFNNSIIPEDTFFPSPESSCDVKLVEKSFETDTNLNFQILYEILLGKATLYAVLVSALVLMAMVKRKDSRGRAKRSGSGVKQTLNFDLLKLAGDVESNPGPTSMDWIWRILFLVGAATGAHSFEDVQLQESGPGLVKPSQSLSLTCTVTGFSITSDYSWNWIRQFPGNKLEWMGYISYSGHTSYNPSLESRISITRDTSKNQFFLQLNSVTTEDTATYYCTRGNWDVVYWGQGTLVTVSATREDLKNVFPPEVAVFEPSEAEISHTQKATLVCLATGFYPDHVELSWWVNGKEVHSGVCTDPQPLKEQPALNDSRYCLSSRLRVSATFWQNPRNHFRCQVQFYGLSENDEWTQDRAKPVTQIVSAEAWGRADCGFTSESYQQGVLSATNLSVIGFRILLLKVAGFNLLMTLRLWSS

SEQ ID NO: 13544 - protein, 629 aa, synthetic construct
MALPVTALLLPLALLLHAARPDVVMTQSPLSLPVTLGQPASISCRSSQSIVHSDGNTYLEWYQQRPGQSPRRLIYKVSNRFSGVPDRFSGSGSGTDFTLKISRVEAEDVGVYYCFQGSHAPWTFGGGTKVEIKLEIQNPDPAVYQLRDSKSSDKSVCLFTDFDSQTNVSQSKDSDVYITDKCVLDMRSMDFKSNSAVAWSNKSDFACANAFNNSIIPEDTFFPSPESSCDVKLVEKSFETDTNLNFQILYEILLGKATLYAVLVSALVLMAMVKRKDSRGRAKRSGSGVKQTLNFDLLKLAGDVESNPGPTSMDWIWRILFLVGAATGAHSFEEVQLVESGGGLVQPGGSLRLSCAASGFTFSSYGMHWVRQAPGKGLEWVAYITTRSSTIYYADSVKGRFTISRDNAKNSLYLQMNSLRAEDTAVYYCTREPLTGYYAMDYWGQGTSVTVSSTREDLKNVFPPEVAVFEPSEAEISHTQKATLVCLATGFYPDHVELSWWVNGKEVHSGVCTDPQPLKEQPALNDSRYCLSSRLRVSATFWQNPRNHFRCQVQFYGLSENDEWTQDRAKPVTQIVSAEAWGRADCGFTSESYQQGVLSATNLSVIGFRILLLKVAGFNLLMTLRLWSS

SEQ ID NO: 13545 - protein, 621 aa, synthetic construct
MALPVTALLLPLALLLHAARPDIQMTQSPSSLSASVGDRVTITCRASQSISLWLNWYQQKPGKAPKLLIYAASTLQSGVPSRFSGSGSGTDFTLTISSLQPEDFATYYCQQYYTSPYTFGQGTKVEIKRLEIQNPDPAVYQLRDSKSSDKSVCLFTDFDSQTNVSQSKDSDVYITDKCVLDMRSMDFKSNSAVAWSNKSDFACANAFNNSIIPEDTFFPSPESSCDVKLVEKSFETDTNLNFQILYEILLGKATLYAVLVSALVLMAMVKRKDSRGRAKRSGSGVKQTLNFDLLKLAGDVESNPGPTSMDWIWRILFLVGAATGAHSFEQVQLLESGGGLVQPGGSLRLSCAASGFTFSSYAMSWVRQAPGKGLEWVSVIRSSGSSTYYADSVKGRFTISRDNSKNTLYLQMNSLRAEDTAVYYCARGGGYFDYWGQGTLVTVSSTREDLKNVFPPEVAVFEPSEAEISHTQKATLVCLATGFYPDHVELSWWVNGKEVHSGVCTDPQPLKEQPALNDSRYCLSSRLRVSATFWQNPRNHFRCQVQFYGLSENDEWTQDRAKPVTQIVSAEAWGRADCGFTSESYQQGVLSATNLSVIGFRILLLKVAGFNLLMTLRLWSS

SEQ ID NO: 13546 - protein, 624 aa, synthetic construct
MALPVTALLLPLALLLHAARPDIQMTQSPSSLSASVGDRVTITCRASQSISSYLNWYQQKPGKAPKLLIYAVSTLQSGVPSRFSGSGSGTDFTLTISSLQPEDFATYYCQQSGTFPPTTFGQGTKVEIKRLEIQNPDPAVYQLRDSKSSDKSVCLFTDFDSQTNVSQSKDSDVYITDKCVLDMRSMDFKSNSAVAWSNKSDFACANAFNNSIIPEDTFFPSPESSCDVKLVEKSFETDTNLNFQILYEILLGKATLYAVLVSALVLMAMVKRKDSRGRAKRSGSGVKQTLNFDLLKLAGDVESNPGPTSMDWIWRILFLVGAATGAHSFEQVQLLESGGGLVQPGGSLRLSCAASGFTFSSHGMHWVRQAPGKGLEWVSVISGSGSNTGYADSVKGRFTISRDNSKNTLYLQMNSLRAEDTAVYYCARQWGSYAFDSWGQGTLVTVSSTREDLKNVFPPEVAVFEPSEAEISHTQKATLVCLATGFYPDHVELSWWVNGKEVHSGVCTDPQPLKEQPALNDSRYCLSSRLRVSATFWQNPRNHFRCQVQFYGLSENDEWTQDRAKPVTQIVSAEAWGRADCGFTSESYQQGVLSATNLSVIGFRILLLKVAGFNLLMTLRLWSS

SEQ ID NO: 13547 - protein, 634 aa, synthetic construct
MALPVTALLLPLALLLHAARPDIVMSQSPSSLAVSVGEKVTMSCKSSQSLLHSSNQKNYLAWYQQKPGQSPKVLIYWASTRESGVPDRFTGSGSGTDFTLTITSVKSEDLAVYYCQQYYSYPWTFGGGTRLEIKRLEIQNPDPAVYQLRDSKSSDKSVCLFTDFDSQTNVSQSKDSDVYITDKCVLDMRSMDFKSNSAVAWSNKSDFACANAFNNSIIPEDTFFPSPESSCDVKLVEKSFETDTNLNFQILYEILLGKATLYAVLVSALVLMAMVKRKDSRGRAKRSGSGVKQTLNFDLLKLAGDVESNPGPTSMDWIWRILFLVGAATGAHSFEEVQLQQSVAELVKPGASVKMSCKVSGYTLTDHTIHWMKQRPEQGLEWIGYIYPRDGITGYNEKFKGKATLTADTSSSTAYMQLNSLTSEDSAVYFCARWGYSYRNYAYYYDYWGQGTTLTVSSTREDLKNVFPPEVAVFEPSEAEISHTQKATLVCLATGFYPDHVELSWWVNGKEVHSGVCTDPQPLKEQPALNDSRYCLSSRLRVSATFWQNPRNHFRCQVQFYGLSENDEWTQDRAKPVTQIVSAEAWGRADCGFTSESYQQGVLSATNLSVIGFRILLLKVAGFNLLMTLRLWSS

SEQ ID NO: 13548 - protein, 631 aa, synthetic construct
MALPVTALLLPLALLLHAARPEIVLTQSPGTLSLSPGERATLSCRASQSVSSSYLAWYQQKPGQAPRLLIYGTSSRATGIPDRFSGSGSGTDFTLTISRLEPEDFAVYYCQQYGSSPFTFGGGTKVEIKRLEIQNPDPAVYQLRDSKSSDKSVCLFTDFDSQTNVSQSKDSDVYITDKCVLDMRSMDFKSNSAVAWSNKSDFACANAFNNSIIPEDTFFPSPESSCDVKLVEKSFETDTNLNFQILYEILLGKATLYAVLVSALVLMAMVKRKDSRGRAKRSGSGVKQTLNFDLLKLAGDVESNPGPTSMDWIWRILFLVGAATGAHSFEQVQLQESGPGLAKPSETLSLTCTVSGDSITSYYWSWIRQPPGKGLEWIGYIYYSGSTNYNPSLKSRVTISVDTSKNQFSLKLSSVTAADTAVYYCARDQRRIAAAGTHFYGMDVWGQGTTVTVSSTREDLKNVFPPEVAVFEPSEAEISHTQKATLVCLATGFYPDHVELSWWVNGKEVHSGVCTDPQPLKEQPALNDSRYCLSSRLRVSATFWQNPRNHFRCQVQFYGLSENDEWTQDRAKPVTQIVSAEAWGRADCGFTSESYQQGVLSATNLSVIGFRILLLKVAGFNLLMTLRLWSS

SEQ ID NO: 13549 - protein, 623 aa, synthetic construct
MALPVTALLLPLALLLHAARPDILLTQSPVILSVSPGERVSFSCRASQSIGTNIHWYQQRTNGSPRLLIKYASESISGIPSRFSGSGSGTDFTLSINSVESEDIADYYCQQNNNWPTTFGAGTKLELKLEIQNPDPAVYQLRDSKSSDKSVCLFTDFDSQTNVSQSKDSDVYITDKCVLDMRSMDFKSNSAVAWSNKSDFACANAFNNSIIPEDTFFPSPESSCDVKLVEKSFETDTNLNFQILYEILLGKATLYAVLVSALVLMAMVKRKDSRGRAKRSGSGVKQTLNFDLLKLAGDVESNPGPTSMDWIWRILFLVGAATGAHSFEQVQLKQSGPGLVQPSQSLSITCTVSGFSLTNYGVHWVRQSPGKGLEWLGVIWSGGNTDYNTPFTSRLSINKDNSKSQVFFKMNSLQSNDTAIYYCARALTYYDYEFAYWGQGTLVTVSATREDLKNVFPPEVAVFEPSEAEISHTQKATLVCLATGFYPDHVELSWWVNGKEVHSGVCTDPQPLKEQPALNDSRYCLSSRLRVSATFWQNPRNHFRCQVQFYGLSENDEWTQDRAKPVTQIVSAEAWGRADCGFTSESYQQGVLSATNLSVIGFRILLLKVAGFNLLMTLRLWSS

SEQ ID NO: 13550 - protein, 616 aa, synthetic construct
MALPVTALLLPLALLLHAARPMTQSPKFLLVSAGDRVTLTCKASQSVNNDVYWYQQEPGQSPKLLIYWASTRESGVPDRFTGSGSGTDFTLTISSVQAEDLAVYYCKQSYNLYTFGGGTKLEIKRLEIQNPDPAVYQLRDSKSSDKSVCLFTDFDSQTNVSQSKDSDVYITDKCVLDMRSMDFKSNSAVAWSNKSDFACANAFNNSIIPEDTFFPSPESSCDVKLVEKSFETDTNLNFQILYEILLGKATLYAVLVSALVLMAMVKRKDSRGRAKRSGSGVKQTLNFDLLKLAGDVESNPGPTSMDWIWRILFLVGAATGAHSFEESGRGLVQPGGSRKLSCAASGFTFSTSGMHWVRQAPEKGLEWVAYISSGSTTIYHADTVKGRFTISRDNPKNTLFLQMTSLRSEDTAMYYCCARSGQFGNYFDYWGQGTTLTVSSTREDLKNVFPPEVAVFEPSEAEISHTQKATLVCLATGFYPDHVELSWWVNGKEVHSGVCTDPQPLKEQPALNDSRYCLSSRLRVSATFWQNPRNHFRCQVQFYGLSENDEWTQDRAKPVTQIVSAEAWGRADCGFTSESYQQGVLSATNLSVIGFRILLLKVAGFNLLMTLRLWSS

SEQ ID NO: 13551 - protein, 621 aa, synthetic construct
MALPVTALLLPLALLLHAARPQSPSSLAVSAGEKVTMSCKSSQSLLNSRTRKNYLAWYQQKPGQSPKLLIYWASTRESGVPDRFTGSGSGTDFTLTISSVQAEDLAVYYCKQSNLYTFGGGTKLEIKLEIQNPDPAVYQLRDSKSSDKSVCLFTDFDSQTNVSQSKDSDVYITDKCVLDMRSMDFKSNSAVAWSNKSDFACANAFNNSIIPEDTFFPSPESSCDVKLVEKSFETDTNLNFQILYEILLGKATLYAVLVSALVLMAMVKRKDSRGRAKRSGSGVKQTLNFDLLKLAGDVESNPGPTSMDWIWRILFLVGAATGAHSFEQVQLEESGPELVKPGASVKLSCKASGYTFTEYIIHWVKQRSGQGLEWIGWFYPGSGSIKYNEKFKDKATLTADKSSSTVYMELSGLTSEDSAVYFCARHDGYSYFDYWGQGTTLTVSSTREDLKNVFPPEVAVFEPSEAEISHTQKATLVCLATGFYPDHVELSWWVNGKEVHSGVCTDPQPLKEQPALNDSRYCLSSRLRVSATFWQNPRNHFRCQVQFYGLSENDEWTQDRAKPVTQIVSAEAWGRADCGFTSESYQQGVLSATNLSVIGFRILLLKVAGFNLLMTLRLWSS

SEQ ID NO: 13552 - protein, 624 aa, synthetic construct
MALPVTALLLPLALLLHAARPDIQMTQSPSSLSASLGERVSLTCRATQELSGYLSWLQQKPDGTIKRLIYAASTLDSGVPKRFSGNRSGSDYSLTISSLESEDFADYYCLQYAIYPYTFGGGTKLEIKLEIQNPDPAVYQLRDSKSSDKSVCLFTDFDSQTNVSQSKDSDVYITDKCVLDMRSMDFKSNSAVAWSNKSDFACANAFNNSIIPEDTFFPSPESSCDVKLVEKSFETDTNLNFQILYEILLGKATLYAVLVSALVLMAMVKRKDSRGRAKRSGSGVKQTLNFDLLKLAGDVESNPGPTSMDWIWRILFLVGAATGAHSFEEVQLQQSGPELVKPGASVKMSCKASGYTFTSYFIHWVKQKPGQGLEWIGFINPYNDGSKYNEKFKGKATLTSDKSSSTAYMELSSLTSEDSAVYYCTRDDGYYGYAMDYWGQGTSVTVSSTREDLKNVFPPEVAVFEPSEAEISHTQKATLVCLATGFYPDHVELSWWVNGKEVHSGVCTDPQPLKEQPALNDSRYCLSSRLRVSATFWQNPRNHFRCQVQFYGLSENDEWTQDRAKPVTQIVSAEAWGRADCGFTSESYQQGVLSATNLSVIGFRILLLKVAGFNLLMTLRLWSS

SEQ ID NO: 13553 - protein, 629 aa, synthetic construct
MALPVTALLLPLALLLHAARPDTIVLTQSPASLAVSLGQRATISCRASESVDSYGNSFMHWYQQKPGQPPKLLIYLASNLESGVPARFSGSGSRTDFTLTIDPVEADDAATYYCQQNNYDPWTFGGGTKLEIKLEIQNPDPAVYQLRDSKSSDKSVCLFTDFDSQTNVSQSKDSDVYITDKCVLDMRSMDFKSNSAVAWSNKSDFACANAFNNSIIPEDTFFPSPESSCDVKLVEKSFETDTNLNFQILYEILLGKATLYAVLVSALVLMAMVKRKDSRGRAKRSGSGVKQTLNFDLLKLAGDVESNPGPTSMDWIWRILFLVGAATGAHSFEEVQLQQSGPELVKPGASVKMSCKASGYTFTSYVMHWVKQKPGQGLEWIGYINPYNDGTKYNEKFKGKATLTSDTSSSTAYMELNSLTSEDSAVYFCARPIYFDNDYFDYWGQGTTLKVSSTREDLKNVFPPEVAVFEPSEAEISHTQKATLVCLATGFYPDHVELSWWVNGKEVHSGVCTDPQPLKEQPALNDSRYCLSSRLRVSATFWQNPRNHFRCQVQFYGLSENDEWTQDRAKPVTQIVSAEAWGRADCGFTSESYQQGVLSATNLSVIGFRILLLKVAGFNLLMTLRLWSS

SEQ ID NO: 13554 - protein, 624 aa, synthetic construct
MALPVTALLLPLALLLHAARPDIQMTQSPSSLSASVGDRVTITCKASQDVGIAVAWYQQKPGKVPKLLIYWASTRHTGVPDRFSGSGSGTDFTLTISSLQPEDVATYYCQQYSSYPYTFGQGTKVEIKRLEIQNPDPAVYQLRDSKSSDKSVCLFTDFDSQTNVSQSKDSDVYITDKCVLDMRSMDFKSNSAVAWSNKSDFACANAFNNSIIPEDTFFPSPESSCDVKLVEKSFETDTNLNFQILYEILLGKATLYAVLVSALVLMAMVKRKDSRGRAKRSGSGVKQTLNFDLLKLAGDVESNPGPTSMDWIWRILFLVGAATGAHSFEEVQLVESGGGLVQPGGSLRLSCAASGFDFSRYWMSWVRQAPGKGLEWIGEINPDSSTINYAPSLKDKFIISRDNAKNSLYLQMNSLRAEDTAVYYCARPDGNYWYFDVWGQGTLVTVSSTREDLKNVFPPEVAVFEPSEAEISHTQKATLVCLATGFYPDHVELSWWVNGKEVHSGVCTDPQPLKEQPALNDSRYCLSSRLRVSATFWQNPRNHFRCQVQFYGLSENDEWTQDRAKPVTQIVSAEAWGRADCGFTSESYQQGVLSATNLSVIGFRILLLKVAGFNLLMTLRLWSS

SEQ ID NO: 13555 - protein, 624 aa, synthetic construct
MALPVTALLLPLALLLHAARPDIVMTQSQKSMSTSVGDRVSITCKASQDVITGVAWYQQKPGQSPKLLIYSASYRYTGVPDRFTGSGSGTDFTFTISNVQAEDLAVYYCQQHYSTPLTFGAGTKLELKLEIQNPDPAVYQLRDSKSSDKSVCLFTDFDSQTNVSQSKDSDVYITDKCVLDMRSMDFKSNSAVAWSNKSDFACANAFNNSIIPEDTFFPSPESSCDVKLVEKSFETDTNLNFQILYEILLGKATLYAVLVSALVLMAMVKRKDSRGRAKRSGSGVKQTLNFDLLKLAGDVESNPGPTSMDWIWRILFLVGAATGAHSFEQVQLQQPGAELVRPGASVKLSCKASGYSFTTYWMNWVKQRPGQGLEWIGMIHPSDSETRLNQKFKDKATLTVDKSSSTAYMQLSSPTSEDSAVYYCARSTMIATRAMDYWGQGTSVTVSSTREDLKNVFPPEVAVFEPSEAEISHTQKATLVCLATGFYPDHVELSWWVNGKEVHSGVCTDPQPLKEQPALNDSRYCLSSRLRVSATFWQNPRNHFRCQVQFYGLSENDEWTQDRAKPVTQIVSAEAWGRADCGFTSESYQQGVLSATNLSVIGFRILLLKVAGFNLLMTLRLWSS

SEQ ID NO: 13556 - protein, 630 aa, synthetic construct
MALPVTALLLPLALLLHAARPQSVLTQPPSVSGAPGQRVTISCTGSGSNIGAPYDVSWYQQLPGTAPKLLIYHNNKRPSGVPDRFSGSKSGTSASLAITGLQAEDEADYYCATVEAGLSGSVFGGGTKLTVLGALEIQNPDPAVYQLRDSKSSDKSVCLFTDFDSQTNVSQSKDSDVYITDKCVLDMRSMDFKSNSAVAWSNKSDFACANAFNNSIIPEDTFFPSPESSCDVKLVEKSFETDTNLNFQILYEILLGKATLYAVLVSALVLMAMVKRKDSRGRAKRSGSGVKQTLNFDLLKLAGDVESNPGPTSMDWIWRILFLVGAATGAHSFEQVQLVQSGAEVKKPGASVKVSCKVSGYTLTELSIHWVRQAPGKGLEWMGGFDPEENEIVYAQRFQGRVTMTEDTSTDTAYMELSSLRSEDTAVYYCAIVGSFSPLTLGLWGQGTMVTVSSTREDLKNVFPPEVAVFEPSEAEISHTQKATLVCLATGFYPDHVELSWWVNGKEVHSGVCTDPQPLKEQPALNDSRYCLSSRLRVSATFWQNPRNHFRCQVQFYGLSENDEWTQDRAKPVTQIVSAEAWGRADCGFTSESYQQGVLSATNLSVIGFRILLLKVAGFNLLMTLRLWSS

SEQ ID NO: 13557 - protein, 630 aa, synthetic construct
MALPVTALLLPLALLLHAARPQSVLTQPPSVSGAPGQRVTISCTGSGSNIGAPYDVSWYQQLPGTAPKLLIYHNNKRPSGVPDRFSGSKSGTSASLAITGLQAEDEADYYCQSYDSSSISTIFGGGTKLTVLGALEIQNPDPAVYQLRDSKSSDKSVCLFTDFDSQTNVSQSKDSDVYITDKCVLDMRSMDFKSNSAVAWSNKSDFACANAFNNSIIPEDTFFPSPESSCDVKLVEKSFETDTNLNFQILYEILLGKATLYAVLVSALVLMAMVKRKDSRGRAKRSGSGVKQTLNFDLLKLAGDVESNPGPTSMDWIWRILFLVGAATGAHSFEQVQLVQSGAEVKKPGASVKVSCKVSGYTLTELSIHWVRQAPGKGLEWMGGFDPEENEIVYAQRFQGRVTMTEDTSTDTAYMELSSLRSEDTAVYYCAIVGSFSGIAYRPWGQGTMVTVSSTREDLKNVFPPEVAVFEPSEAEISHTQKATLVCLATGFYPDHVELSWWVNGKEVHSGVCTDPQPLKEQPALNDSRYCLSSRLRVSATFWQNPRNHFRCQVQFYGLSENDEWTQDRAKPVTQIVSAEAWGRADCGFTSESYQQGVLSATNLSVIGFRILLLKVAGFNLLMTLRLWSS

SEQ ID NO: 13558 - protein, 618 aa, synthetic construct
MALPVTALLLPLALLLHAARPDIQMTQSPSSLSASVGDRVTITCRASQGIRNNLAWYQQKPGKAPKRLIYAASNLQSGVPSRFTGSGSGTEFTLIVSSLQPEDFATYYCLQHHSYPLTSGGGTKVELEIQNPDPAVYQLRDSKSSDKSVCLFTDFDSQTNVSQSKDSDVYITDKCVLDMRSMDFKSNSAVAWSNKSDFACANAFNNSIIPEDTFFPSPESSCDVKLVEKSFETDTNLNFQILYEILLGKATLYAVLVSALVLMAMVKRKDSRGRAKRSGSGVKQTLNFDLLKLAGDVESNPGPTSMDWIWRILFLVGAATGAHSFEEVQVLESGGGLVQPGGSLRLSCAASGFTFSSYAMSWVRQAPGKGLEWVSAISGSGGSTNYADSVKGRFTISRDNSKNTLYLQMNSLRAEDTAVYYCAGSSGWSEYWGQGTLVTVSSTREDLKNVFPPEVAVFEPSEAEISHTQKATLVCLATGFYPDHVELSWWVNGKEVHSGVCTDPQPLKEQPALNDSRYCLSSRLRVSATFWQNPRNHFRCQVQFYGLSENDEWTQDRAKPVTQIVSAEAWGRADCGFTSESYQQGVLSATNLSVIGFRILLLKVAGFNLLMTLRLWSS

SEQ ID NO: 13559 - protein, 624 aa, synthetic construct
MALPVTALLLPLALLLHAARPDEIQLVQSGAEVKKPGESLRISCKGSGFNIEDYYIHWVRQMPGKGLEWMGRIDPENDETKYGPIFQGHVTISADTSINTVYLQWSSLKASDTAMYYCAFRGGVYWGQGTTVTVSSLEIQNPDPAVYQLRDSKSSDKSVCLFTDFDSQTNVSQSKDSDVYITDKCVLDMRSMDFKSNSAVAWSNKSDFACANAFNNSIIPEDTFFPSPESSCDVKLVEKSFETDTNLNFQILYEILLGKATLYAVLVSALVLMAMVKRKDSRGRAKRSGSGVKQTLNFDLLKLAGDVESNPGPTSMDWIWRILFLVGAATGAHSFEDVVMTQSPDSLAVSLGERATINCKSSQSLLDSDGKTYLNWLQQKPGQPPKRLISLVSKLDSGVPDRFSGSGSGTDFTLTISSLQAEDVAVYYCWQGTHFPGTFGGGTKVEIKTREDLKNVFPPEVAVFEPSEAEISHTQKATLVCLATGFYPDHVELSWWVNGKEVHSGVCTDPQPLKEQPALNDSRYCLSSRLRVSATFWQNPRNHFRCQVQFYGLSENDEWTQDRAKPVTQIVSAEAWGRADCGFTSESYQQGVLSATNLSVIGFRILLLKVAGFNLLMTLRLWSS

SEQ ID NO: 13560 - protein, 631 aa, synthetic construct
MALPVTALLLPLALLLHAARPDELVMTQSPSSLTVTAGEKVTMSCKSSQSLLNSGNQKNYLTWYQQKPGQPPKLLIYWASTRESGVPDRFTGSGSGTDFTLTISSVQAEDLAVYYCQNDYSYPLTFGAGTKLEIKLEIQNPDPAVYQLRDSKSSDKSVCLFTDFDSQTNVSQSKDSDVYITDKCVLDMRSMDFKSNSAVAWSNKSDFACANAFNNSIIPEDTFFPSPESSCDVKLVEKSFETDTNLNFQILYEILLGKATLYAVLVSALVLMAMVKRKDSRGRAKRSGSGVKQTLNFDLLKLAGDVESNPGPTSMDWIWRILFLVGAATGAHSFEEVQLLEQSGAELVRPGTSVKISCKASGYAFTNYWLGWVKQRPGHGLEWIGDIFPGSGNIHYNEKFKGKATLTADKSSSTAYMQLSSLTFEDSAVYFCARLRNWDEPMDYWGQGTTVTVSSTREDLKNVFPPEVAVFEPSEAEISHTQKATLVCLATGFYPDHVELSWWVNGKEVHSGVCTDPQPLKEQPALNDSRYCLSSRLRVSATFWQNPRNHFRCQVQFYGLSENDEWTQDRAKPVTQIVSAEAWGRADCGFTSESYQQGVLSATNLSVIGFRILLLKVAGFNLLMTLRLWSS

SEQ ID NO: 13561 - protein, 632 aa, synthetic construct
MALPVTALLLPLALLLHAARPDELQMTQSPSSLSASVGDRVTITCRASQSISSYLNWYQQKPGQPPKLLIYWASTRESGVPDRFSGSESGTNYTLTISSLQPEDFATYFCQQSDSLPITFGQGTRLDIQLEIQNPDPAVYQLRDSKSSDKSVCLFTDFDSQTNVSQSKDSDVYITDKCVLDMRSMDFKSNSAVAWSNKSDFACANAFNNSIIPEDTFFPSPESSCDVKLVEKSFETDTNLNFQILYEILLGKATLYAVLVSALVLMAMVKRKDSRGRAKRSGSGVKQTLNFDLLKLAGDVESNPGPTSMDWIWRILFLVGAATGAHSFEEVQLLESGGGVVQPGRSLRLSCAASGFTFSSYGMHWVRQAPGKGLEWVAVISYDGSNKYYADSVKGRFTISRDNSKNTLYLQMNSLRAEDTAVYYCAKDMGWGSGWRPYYYYGMDVWGQGTTVTVSSTREDLKNVFPPEVAVFEPSEAEISHTQKATLVCLATGFYPDHVELSWWVNGKEVHSGVCTDPQPLKEQPALNDSRYCLSSRLRVSATFWQNPRNHFRCQVQFYGLSENDEWTQDRAKPVTQIVSAEAWGRADCGFTSESYQQGVLSATNLSVIGFRILLLKVAGFNLLMTLRLWSS

SEQ ID NO: 13562 - protein, 629 aa, synthetic construct
MALPVTALLLPLALLLHAARPDDIQMTQSPSSLSASVGDRVTITCRASQSISSYLNWYQQKPGKAPKLLIYAASSLQSGVPSRFSGSGSGTDFTLTISSLQPEDLATYYCQQSYSTPFTFGPGTKVDIKLEIQNPDPAVYQLRDSKSSDKSVCLFTDFDSQTNVSQSKDSDVYITDKCVLDMRSMDFKSNSAVAWSNKSDFACANAFNNSIIPEDTFFPSPESSCDVKLVEKSFETDTNLNFQILYEILLGKATLYAVLVSALVLMAMVKRKDSRGRAKRSGSGVKQTLNFDLLKLAGDVESNPGPTSMDWIWRILFLVGAATGAHSFEVHEVQLVQSGAEVKKPGSSVKVSCKASGGTFSSYAISWVRQAPGQGLEWMGGIIPIFGTANYAQKFQGRVTITADKSTSTAYMELSSLRSEDTAVYYCATFALFGFREQAFDIWGQGTTVTVSSTREDLKNVFPPEVAVFEPSEAEISHTQKATLVCLATGFYPDHVELSWWVNGKEVHSGVCTDPQPLKEQPALNDSRYCLSSRLRVSATFWQNPRNHFRCQVQFYGLSENDEWTQDRAKPVTQIVSAEAWGRADCGFTSESYQQGVLSATNLSVIGFRILLLKVAGFNLLMTLRLWSS

SEQ ID NO: 13563 - protein, 627 aa, synthetic construct
MALPVTALLLPLALLLHAARPDIVLTQSPLSLAVSLGQPAIISCKASQSVSFAGTSLMHWYHQKPGQQPRLLIYRASNLEAGVPDRFSGSGSKTDFTLTISPVEAEDAATYYCQQSREYPYTFGGGTKLEIKRLEIQNPDPAVYQLRDSKSSDKSVCLFTDFDSQTNVSQSKDSDVYITDKCVLDMRSMDFKSNSAVAWSNKSDFACANAFNNSIIPEDTFFPSPESSCDVKLVEKSFETDTNLNFQILYEILLGKATLYAVLVSALVLMAMVKRKDSRGRAKRSGSGVKQTLNFDLLKLAGDVESNPGPTSMDWIWRILFLVGAATGAHSFEQVQLVQSGAEVVKPGASVKISCKASGYTFTGYFMNWVKQSPGQSLEWIGRIHPYDGDTFYNQKFQGKATLTVDKSSNTAHMELLSLTSEDFAVYYCTRYDGSRAMDYWGQGTTVTVSSTREDLKNVFPPEVAVFEPSEAEISHTQKATLVCLATGFYPDHVELSWWVNGKEVHSGVCTDPQPLKEQPALNDSRYCLSSRLRVSATFWQNPRNHFRCQVQFYGLSENDEWTQDRAKPVTQIVSAEAWGRADCGFTSESYQQGVLSATNLSVIGFRILLLKVAGFNLLMTLRLWSS

SEQ ID NO: 13564 - protein, 624 aa, synthetic construct
MALPVTALLLPLALLLHAARPDDVVMTQTPLSLPVTPGEPASISCRSSQSLVHRNGNTYLHWYLQKPGQSPKLLIHKVSNRFSGVPDRFSGSGSGTDFTLKISRVEAEDLGVYFCSQSTHVPPLTFGAGTKLELKLEIQNPDPAVYQLRDSKSSDKSVCLFTDFDSQTNVSQSKDSDVYITDKCVLDMRSMDFKSNSAVAWSNKSDFACANAFNNSIIPEDTFFPSPESSCDVKLVEKSFETDTNLNFQILYEILLGKATLYAVLVSALVLMAMVKRKDSRGRAKRSGSGVKQTLNFDLLKLAGDVESNPGPTSMDWIWRILFLVGAATGAHSFEEVQLVQSGAEVEKPGASVKISCKASGSSFTGYNMNWVRQNIGKSLEWIGAIDPYYGGTSYNQKFKGRATLTVDKSTSTAYMHLKSLRSEDTAVYYCVSGMEYWGQGTSVTVSSTREDLKNVFPPEVAVFEPSEAEISHTQKATLVCLATGFYPDHVELSWWVNGKEVHSGVCTDPQPLKEQPALNDSRYCLSSRLRVSATFWQNPRNHFRCQVQFYGLSENDEWTQDRAKPVTQIVSAEAWGRADCGFTSESYQQGVLSATNLSVIGFRILLLKVAGFNLLMTLRLWSS

SEQ ID NO: 13565 - protein, 622 aa, synthetic construct
MALPVTALLLPLALLLHAARPDEIVMTQTPATLSVSAGERVTITCKASQSVSNDVTWYQQKPGQAPRLLIYSASNRYSGVPARFSGSGYGTEFTFTISSVQSEDFAVYFCQQDYSSFGQGTKLEIKRLEIQNPDPAVYQLRDSKSSDKSVCLFTDFDSQTNVSQSKDSDVYITDKCVLDMRSMDFKSNSAVAWSNKSDFACANAFNNSIIPEDTFFPSPESSCDVKLVEKSFETDTNLNFQILYEILLGKATLYAVLVSALVLMAMVKRKDSRGRAKRSGSGVKQTLNFDLLKLAGDVESNPGPTSMDWIWRILFLVGAATGAHSFEQVQLVESGPGVVQPGRSLRISCAVSGFSVTNYGVHWVRQPPGKGLEWLGVIWAGGITNYNSAFMSRLTISKDNSKNTVYLQMNSLRAEDTAMYYCASRGGHYGYALDYWGQGTLVTVSSTREDLKNVFPPEVAVFEPSEAEISHTQKATLVCLATGFYPDHVELSWWVNGKEVHSGVCTDPQPLKEQPALNDSRYCLSSRLRVSATFWQNPRNHFRCQVQFYGLSENDEWTQDRAKPVTQIVSAEAWGRADCGFTSESYQQGVLSATNLSVIGFRILLLKVAGFNLLMTLRLWSS

SEQ ID NO: 13566 - protein, 624 aa, synthetic construct
MALPVTALLLPLALLLHAARPDIQMTQTASSLPASLGDRVTISCSASQDISNYLNWYQQKPDGTVKLLIFYSSNLHSGVPSRFSGGGSGTDYSLTISNLEPEDIATYFCHQYSKLPWTFGGGTKLEIKRLEIQNPDPAVYQLRDSKSSDKSVCLFTDFDSQTNVSQSKDSDVYITDKCVLDMRSMDFKSNSAVAWSNKSDFACANAFNNSIIPEDTFFPSPESSCDVKLVEKSFETDTNLNFQILYEILLGKATLYAVLVSALVLMAMVKRKDSRGRAKRSGSGVKQTLNFDLLKLAGDVESNPGPTSMDWIWRILFLVGAATGAHSFEEVTLVESGGDFVKPGGSLKVSCAASGFAFSHYAMSWVRQTPAKRLEWVAYISSGGSGTYYSDSVKGRFTISRDNAKNTLYLQMRSLRSEDSAMYFCTRVKLGTYYFDSWGQGTTLTVSSTREDLKNVFPPEVAVFEPSEAEISHTQKATLVCLATGFYPDHVELSWWVNGKEVHSGVCTDPQPLKEQPALNDSRYCLSSRLRVSATFWQNPRNHFRCQVQFYGLSENDEWTQDRAKPVTQIVSAEAWGRADCGFTSESYQQGVLSATNLSVIGFRILLLKVAGFNLLMTLRLWSS

SEQ ID NO: 13567 - protein, 626 aa, synthetic construct
MALPVTALLLPLALLLHAARPQFVLTQSPSASAALGASAKLTCTLSSAHKTYTIDWYQQQKGKAPRYLIQVKSDGTYTKATGVPDRFSGSSSGADRYLIIPSVQADDEADYYCGTDYTGGYVFGGGTQLTVTLEIQNPDPAVYQLRDSKSSDKSVCLFTDFDSQTNVSQSKDSDVYITDKCVLDMRSMDFKSNSAVAWSNKSDFACANAFNNSIIPEDTFFPSPESSCDVKLVEKSFETDTNLNFQILYEILLGKATLYAVLVSALVLMAMVKRKDSRGRAKRSGSGVKQTLNFDLLKLAGDVESNPGPTSMDWIWRILFLVGAATGAHSFEEQLKESGGGLFKPTDTLTLTCTVSGFSLSYYGVNWVRQAPGNGLEWIGTIGGSGDTYYASWAKSRSTIIRNTNENTVTLKMTSLTAADTATYFCVRYANIGYEYFNVWGPGTLVTVSSTREDLKNVFPPEVAVFEPSEAEISHTQKATLVCLATGFYPDHVELSWWVNGKEVHSGVCTDPQPLKEQPALNDSRYCLSSRLRVSATFWQNPRNHFRCQVQFYGLSENDEWTQDRAKPVTQIVSAEAWGRADCGFTSESYQQGVLSATNLSVIGFRILLLKVAGFNLLMTLRLWSS

SEQ ID NO: 13568 - protein, 631 aa, synthetic construct
MALPVTALLLPLALLLHAARPQFVLTQSPSVSAALGASAKLTCTLSSAHKTYTIDWYQQQQGEAPRYLMQVKSDGSYTKGTGVPDRFSGSSSGADRYLIIPSVQADDEAGYVCGADDNGGYVFGGGTQLTVTLEIQNPDPAVYQLRDSKSSDKSVCLFTDFDSQTNVSQSKDSDVYITDKCVLDMRSMDFKSNSAVAWSNKSDFACANAFNNSIIPEDTFFPSPESSCDVKLVEKSFETDTNLNFQILYEILLGKATLYAVLVSALVLMAMVKRKDSRGRAKRSGSGVKQTLNFDLLKLAGDVESNPGPTSMDWIWRILFLVGAATGAHSFEQSVKESEGGLFKPTDTLTLTCTVSGFSLSRHALTWVRQAPGNGLEWIGAIDNAGTTYYASWAKSRSTITRNTDLHTVTLKMTSLTASDTATYFCARVFYDINSGYYLDGMDLWGPGTLVTVSSTREDLKNVFPPEVAVFEPSEAEISHTQKATLVCLATGFYPDHVELSWWVNGKEVHSGVCTDPQPLKEQPALNDSRYCLSSRLRVSATFWQNPRNHFRCQVQFYGLSENDEWTQDRAKPVTQIVSAEAWGRADCGFTSESYQQGVLSATNLSVIGFRILLLKVAGFNLLMTLRLWSS

SEQ ID NO: 13569 - protein, 625 aa, synthetic construct
MALPVTALLLPLALLLHAARPDIQMTQSPSSLSASVGDRVTITCRASQGISSWLAWYQQKPEKAPKSLIYAASSLQSGVPSRFSGSGSGTDFTLTISSLQPEDFATYYCQQYNSYPPTFGGGTKVEIKLEIQNPDPAVYQLRDSKSSDKSVCLFTDFDSQTNVSQSKDSDVYITDKCVLDMRSMDFKSNSAVAWSNKSDFACANAFNNSIIPEDTFFPSPESSCDVKLVEKSFETDTNLNFQILYEILLGKATLYAVLVSALVLMAMVKRKDSRGRAKRSGSGVKQTLNFDLLKLAGDVESNPGPTSMDWIWRILFLVGAATGAHSFEEVQLVESGGGLVQPGESLRLSCVASGFTFSRYKMNWVRQAPGKGLEWVSYISRSGRDIYYADSVKGRFTISRDNAKNSLYLQMNSLRDEDTAVYYCAGTVTTYYYFGMDVWGHGTTVTVSSTREDLKNVFPPEVAVFEPSEAEISHTQKATLVCLATGFYPDHVELSWWVNGKEVHSGVCTDPQPLKEQPALNDSRYCLSSRLRVSATFWQNPRNHFRCQVQFYGLSENDEWTQDRAKPVTQIVSAEAWGRADCGFTSESYQQGVLSATNLSVIGFRILLLKVAGFNLLMTLRLWSS

SEQ ID NO: 13570 - protein, 626 aa, synthetic construct
MALPVTALLLPLALLLHAARPDIQMTQSPSSLSASVGDRVTITCRASQGISSWLAWYQQKPEKAPKSLIYAASSLQSGVPSRFSGSGSGTDFTLTISSLQPEDFATYYCQQYNSYPPTFGGGTKVEIKLEIQNPDPAVYQLRDSKSSDKSVCLFTDFDSQTNVSQSKDSDVYITDKCVLDMRSMDFKSNSAVAWSNKSDFACANAFNNSIIPEDTFFPSPESSCDVKLVEKSFETDTNLNFQILYEILLGKATLYAVLVSALVLMAMVKRKDSRGRAKRSGSGVKQTLNFDLLKLAGDVESNPGPTSMDWIWRILFLVGAATGAHSFEEVQLVESGGGSVQPGESLRLSCVASGFTFSRYKMNWVRQAPGKGLEWVSYISRSGRDIYYADSVKGRFTISRDNAKNSLYLQMNSLRDEDTAVYYCAGTVTTYYYDFGMDVWGQGTTVTVSSTREDLKNVFPPEVAVFEPSEAEISHTQKATLVCLATGFYPDHVELSWWVNGKEVHSGVCTDPQPLKEQPALNDSRYCLSSRLRVSATFWQNPRNHFRCQVQFYGLSENDEWTQDRAKPVTQIVSAEAWGRADCGFTSESYQQGVLSATNLSVIGFRILLLKVAGFNLLMTLRLWSS

SEQ ID NO: 13571 - protein, 624 aa, synthetic construct
MALPVTALLLPLALLLHAARPQSVLTQPPSASGTPGQRVTISCSGSRSNVGGNYVFWYQQVPGATPKLLIYRSNQRPSGVPDRFAGSKSGSSASLAISGLRSEDEADYYCATWDDSLSGFVFGTGTKVTVLGLEIQNPDPAVYQLRDSKSSDKSVCLFTDFDSQTNVSQSKDSDVYITDKCVLDMRSMDFKSNSAVAWSNKSDFACANAFNNSIIPEDTFFPSPESSCDVKLVEKSFETDTNLNFQILYEILLGKATLYAVLVSALVLMAMVKRKDSRGRAKRSGSGVKQTLNFDLLKLAGDVESNPGPTSMDWIWRILFLVGAATGAHSFEVQLVESGGGLVKPGGSLRLSCAASGFTFSDYYMSWIRQAPGKGLEWVSYISSSGSTIYYADSVKGRFTISRDNAKNSLYLQMNSLRAEDTAVYYCARGYGKAYDQWGQGTLVTVSSTREDLKNVFPPEVAVFEPSEAEISHTQKATLVCLATGFYPDHVELSWWVNGKEVHSGVCTDPQPLKEQPALNDSRYCLSSRLRVSATFWQNPRNHFRCQVQFYGLSENDEWTQDRAKPVTQIVSAEAWGRADCGFTSESYQQGVLSATNLSVIGFRILLLKVAGFNLLMTLRLWSS

SEQ ID NO: 13572 - protein, 623 aa, synthetic construct
MALPVTALLLPLALLLHAARPQSVVTQPPSMSAAPGQQVTISCSGGNSNIERNYVSWYLQLPGTAPKLVIFDNDRRPSGIPDRFSGSKSGTSATLGITGLQTGDEADYYCGTWDSSLRGWVFGGGTKLTVLGLEIQNPDPAVYQLRDSKSSDKSVCLFTDFDSQTNVSQSKDSDVYITDKCVLDMRSMDFKSNSAVAWSNKSDFACANAFNNSIIPEDTFFPSPESSCDVKLVEKSFETDTNLNFQILYEILLGKATLYAVLVSALVLMAMVKRKDSRGRAKRSGSGVKQTLNFDLLKLAGDVESNPGPTSMDWIWRILFLVGAATGAHSFEVQLVESGGGLIQPGGSLRLSCAASGFTFSNYAMNWVRQAPGKGLEWVSTINGRGSSTIYADSVKGRFTISRDNSKNTLYLQMNSLRAEDTATYYCARYISRGLGDSWGQGTLVTVTREDLKNVFPPEVAVFEPSEAEISHTQKATLVCLATGFYPDHVELSWWVNGKEVHSGVCTDPQPLKEQPALNDSRYCLSSRLRVSATFWQNPRNHFRCQVQFYGLSENDEWTQDRAKPVTQIVSAEAWGRADCGFTSESYQQGVLSATNLSVIGFRILLLKVAGFNLLMTLRLWSS

SEQ ID NO: 13573 - protein, 624 aa, synthetic construct
MALPVTALLLPLALLLHAARPDVVMTQTPLSLPVSLGDQASISCRSSQSLVHSNGNTYLHWYLQKPGQSPKLLIYKVSNRFSGVPDRFSGSGSGTDFTLKISRVEAEDLGVYFCSQNTPVPPKFGSGTKLEIKLEIQNPDPAVYQLRDSKSSDKSVCLFTDFDSQTNVSQSKDSDVYITDKCVLDMRSMDFKSNSAVAWSNKSDFACANAFNNSIIPEDTFFPSPESSCDVKLVEKSFETDTNLNFQILYEILLGKATLYAVLVSALVLMAMVKRKDSRGRAKRSGSGVKQTLNFDLLKLAGDVESNPGPTSMDWIWRILFLVGAATGAHSFEQVQLQQSGAELVRPGASVKLSCKASGYTFNDYEMHWVKQTPVHGLKWIGALEPKTGDTAYSQKFKGKATLTADKSSSTAYMELRSLTSEDSAVYYCTSCYYYTYSGQGTLVTVSATREDLKNVFPPEVAVFEPSEAEISHTQKATLVCLATGFYPDHVELSWWVNGKEVHSGVCTDPQPLKEQPALNDSRYCLSSRLRVSATFWQNPRNHFRCQVQFYGLSENDEWTQDRAKPVTQIVSAEAWGRADCGFTSESYQQGVLSATNLSVIGFRILLLKVAGFNLLMTLRLWSS

SEQ ID NO: 13574 - protein, 623 aa, synthetic construct
MALPVTALLLPLALLLHAARPDIQLTQSPSSLSASVGDRVTITCRASQGIRNDLGWYQQKPGKAPKRLIYAASSLQNGVPSRFSGSGSGTEFTLTISSLQPEDFATYYCLQHNTYPAFGQGTKVEIKRLEIQNPDPAVYQLRDSKSSDKSVCLFTDFDSQTNVSQSKDSDVYITDKCVLDMRSMDFKSNSAVAWSNKSDFACANAFNNSIIPEDTFFPSPESSCDVKLVEKSFETDTNLNFQILYEILLGKATLYAVLVSALVLMAMVKRKDSRGRAKRSGSGVKQTLNFDLLKLAGDVESNPGPTSMDWIWRILFLVGAATGAHSFEQVQLQESGPGLVKPSQTLSLTCTVSGGSISSFNYYWSWIRHHPGKGLEWIGYIYYSGSTYSNPSLKSRVTISVDTSKNQFSLTLSSVTAADTAVYYCARGYNWNYFDYWGQGTLVTVSSTREDLKNVFPPEVAVFEPSEAEISHTQKATLVCLATGFYPDHVELSWWVNGKEVHSGVCTDPQPLKEQPALNDSRYCLSSRLRVSATFWQNPRNHFRCQVQFYGLSENDEWTQDRAKPVTQIVSAEAWGRADCGFTSESYQQGVLSATNLSVIGFRILLLKVAGFNLLMTLRLWSS

SEQ ID NO: 13575 - protein, 625 aa, synthetic construct
MALPVTALLLPLALLLHAARPDDIVLTQSPASLAVSLGQSVTISCRASESVEYYGTSLMQWYQQKPGQPPKLLIYATSNVESGVPARFSGSGSGTDFSLNIHPVEEDDIAMYFCQQSRKLPSTFGGGTKLEIKLEIQNPDPAVYQLRDSKSSDKSVCLFTDFDSQTNVSQSKDSDVYITDKCVLDMRSMDFKSNSAVAWSNKSDFACANAFNNSIIPEDTFFPSPESSCDVKLVEKSFETDTNLNFQILYEILLGKATLYAVLVSALVLMAMVKRKDSRGRAKRSGSGVKQTLNFDLLKLAGDVESNPGPTSMDWIWRILFLVGAATGAHSFEDVRLQESGPGQVKPSQTVSLTCSVTGYSITNGNHWWNWIRQVSGSKLEWIGYISSSGSTDSNPSLKSRISITRDTSKNQLFLQLNSVTTEDIATYYCARGYYFDYWGQGTTLTVSSTREDLKNVFPPEVAVFEPSEAEISHTQKATLVCLATGFYPDHVELSWWVNGKEVHSGVCTDPQPLKEQPALNDSRYCLSSRLRVSATFWQNPRNHFRCQVQFYGLSENDEWTQDRAKPVTQIVSAEAWGRADCGFTSESYQQGVLSATNLSVIGFRILLLKVAGFNLLMTLRLWSS

SEQ ID NO: 13576 - protein, 624 aa, synthetic construct
MALPVTALLLPLALLLHAARPDIQMTQSPSSLSASVGDRVTITCRASQDVNTAVAWYQQKPGKAPKLLIYSASFLESGVPSRFSGSRSGTDFTLTISSLQPEDFATYYCQQHYTTPPTFGQTKVEIKRLEIQNPDPAVYQLRDSKSSDKSVCLFTDFDSQTNVSQSKDSDVYITDKCVLDMRSMDFKSNSAVAWSNKSDFACANAFNNSIIPEDTFFPSPESSCDVKLVEKSFETDTNLNFQILYEILLGKATLYAVLVSALVLMAMVKRKDSRGRAKRSGSGVKQTLNFDLLKLAGDVESNPGPTSMDWIWRILFLVGAATGAHSFEEVQLVESGGGLVQPGGSLRLSCAASGFNIKDTYIHWVRQAPGKGLEWVARIYPTNGYTRYADSVKGRFTISADTSKNTAYLQMNSLRAEDTAVYYCSRWGGDGFYAMDVWGQGTLVTVSSTREDLKNVFPPEVAVFEPSEAEISHTQKATLVCLATGFYPDHVELSWWVNGKEVHSGVCTDPQPLKEQPALNDSRYCLSSRLRVSATFWQNPRNHFRCQVQFYGLSENDEWTQDRAKPVTQIVSAEAWGRADCGFTSESYQQGVLSATNLSVIGFRILLLKVAGFNLLMTLRLWSS

SEQ ID NO: 13577 - protein, 623 aa, synthetic construct
MALPVTALLLPLALLLHAARPDQSVLTQPPSVSVAPGKTARIPCEGNYIGSSNVHWYQQKPGQAPVLVIHFDSDRPSGIPDRFSGSNSGNMATLTISRVEAGDEADYYCQVWENHGWVFGGGTKLTVLSLEIQNPDPAVYQLRDSKSSDKSVCLFTDFDSQTNVSQSKDSDVYITDKCVLDMRSMDFKSNSAVAWSNKSDFACANAFNNSIIPEDTFFPSPESSCDVKLVEKSFETDTNLNFQILYEILLGKATLYAVLVSALVLMAMVKRKDSRGRAKRSGSGVKQTLNFDLLKLAGDVESNPGPTSMDWIWRILFLVGAATGAHSFEEVQLVETGGGLVQPGESLRLSCAASGFTFSDYEMNWVRQAPGKGLEWVSYISSSGSTIYYADSVKGRFTIYRDNAKNSLYLQMNSLRAEDTALYYCARAWGVGPPDYWGQGTLVTVSSTREDLKNVFPPEVAVFEPSEAEISHTQKATLVCLATGFYPDHVELSWWVNGKEVHSGVCTDPQPLKEQPALNDSRYCLSSRLRVSATFWQNPRNHFRCQVQFYGLSENDEWTQDRAKPVTQIVSAEAWGRADCGFTSESYQQGVLSATNLSVIGFRILLLKVAGFNLLMTLRLWSS

SEQ ID NO: 13578 - protein, 631 aa, synthetic construct
MALPVTALLLPLALLLHAARPDIQMTQSPSSLSASVGDTVTITCQANGYLNWYQQRRGKAPKLLIYDGSKLERGVPSRFSGRRWGQEYNLTINNLQPEDIATYFCQVYEFVVPGTRLDLKRTVAAPLEIQNPDPAVYQLRDSKSSDKSVCLFTDFDSQTNVSQSKDSDVYITDKCVLDMRSMDFKSNSAVAWSNKSDFACANAFNNSIIPEDTFFPSPESSCDVKLVEKSFETDTNLNFQILYEILLGKATLYAVLVSALVLMAMVKRKDSRGRAKRSGSGVKQTLNFDLLKLAGDVESNPGPTSMDWIWRILFLVGAATGAHSFEQVQLLQSGAAVTKPGASVRVSCEASGYNIRDYFIHWWRQAPGQGLQWVGWINPKTGQPNNPRQFQGRVSLTRHASWDFDTFSFYMDLKALRSDDTAVYFCARQRSDYWDFDVWGSGTQVTVSSASTKGPTREDLKNVFPPEVAVFEPSEAEISHTQKATLVCLATGFYPDHVELSWWVNGKEVHSGVCTDPQPLKEQPALNDSRYCLSSRLRVSATFWQNPRNHFRCQVQFYGLSENDEWTQDRAKPVTQIVSAEAWGRADCGFTSESYQQGVLSATNLSVIGFRILLLKVAGFNLLMTLRLWSS

SEQ ID NO: 13579 - protein, 637 aa, synthetic construct
MALPVTALLLPLALLLHAARPQSALTQPPSASGSPGQSITISCTGTSNNFVSWYQQHAGKAPKLVIYDVNKRPSGVPDRFSGSKSGNTASLTVSGLQTDDEAVYYCGSLVGNWDVIFGGGTKLTVLLEIQNPDPAVYQLRDSKSSDKSVCLFTDFDSQTNVSQSKDSDVYITDKCVLDMRSMDFKSNSAVAWSNKSDFACANAFNNSIIPEDTFFPSPESSCDVKLVEKSFETDTNLNFQILYEILLGKATLYAVLVSALVLMAMVKRKDSRGRAKRSGSGVKQTLNFDLLKLAGDVESNPGPTSMDWIWRILFLVGAATGAHSFEQPQLQESGPTLVEASETLSLTCAVSGDSTAACNSFWGWVRQPPGKGLEWVGSLSHCASYWNRGWTYHNPSLKSRLTLALDTPKNLVFLKLNSVTAADTATYYCARFGGEVLRYTDWPKPAWVDLWGRGTLVTVSSTREDLKNVFPPEVAVFEPSEAEISHTQKATLVCLATGFYPDHVELSWWVNGKEVHSGVCTDPQPLKEQPALNDSRYCLSSRLRVSATFWQNPRNHFRCQVQFYGLSENDEWTQDRAKPVTQIVSAEAWGRADCGFTSESYQQGVLSATNLSVIGFRILLLKVAGFNLLMTLRLWSS

SEQ ID NO: 13580 - protein, 622 aa, synthetic construct
MALPVTALLLPLALLLHAARPEIVLTQSPGTLSLSPGETAIISCRTSQYGSLAWYQQRPGQAPRLVIYSGSTRAAGIPDRFSGSRWGPDYNLTISNLESGDFGVYYCQQYEFFGQGTKVQVDIKRLEIQNPDPAVYQLRDSKSSDKSVCLFTDFDSQTNVSQSKDSDVYITDKCVLDMRSMDFKSNSAVAWSNKSDFACANAFNNSIIPEDTFFPSPESSCDVKLVEKSFETDTNLNFQILYEILLGKATLYAVLVSALVLMAMVKRKDSRGRAKRSGSGVKQTLNFDLLKLAGDVESNPGPTSMDWIWRILFLVGAATGAHSFEQVQLVQSGGQMKKPGESMRISCRASGYEFIDCTLNWIRLAPGKRPEWMGWLKPRGGAVNYARPLQGRVTMTRDVYSDTAFLELRSLTVDDTAVYFCTRGKNCDYNWDFEHWGRGTPVIVSSTREDLKNVFPPEVAVFEPSEAEISHTQKATLVCLATGFYPDHVELSWWVNGKEVHSGVCTDPQPLKEQPALNDSRYCLSSRLRVSATFWQNPRNHFRCQVQFYGLSENDEWTQDRAKPVTQIVSAEAWGRADCGFTSESYQQGVLSATNLSVIGFRILLLKVAGFNLLMTLRLWSS

SEQ ID NO: 13581 - protein, 632 aa, synthetic construct
MALPVTALLLPLALLLHAARPELVLTQSPGTLSLSAGERATLSCRASQSVSSGSLAWYQQKPGQAPRLLIYGASTRATGIPDRFSGSGSGTDFTLTIGRLEPEDLAVYYCQQYGTSPYTFGQGTKLEILEIQNPDPAVYQLRDSKSSDKSVCLFTDFDSQTNVSQSKDSDVYITDKCVLDMRSMDFKSNSAVAWSNKSDFACANAFNNSIIPEDTFFPSPESSCDVKLVEKSFETDTNLNFQILYEILLGKATLYAVLVSALVLMAMVKRKDSRGRAKRSGSGVKQTLNFDLLKLAGDVESNPGPTSMDWIWRILFLVGAATGAHSFELEQSGAEVKKPGSSVQVSCKASGGTFSMYGFNWVRQAPGHGLEWMGGIIPIFGTSNYAQKFRGRVTFTADQATSTAYMELTNLRSDDTAVYYCARDFGPDWEDGDSYDGSGRGFFDFWGQGTLVTVSSTREDLKNVFPPEVAVFEPSEAEISHTQKATLVCLATGFYPDHVELSWWVNGKEVHSGVCTDPQPLKEQPALNDSRYCLSSRLRVSATFWQNPRNHFRCQVQFYGLSENDEWTQDRAKPVTQIVSAEAWGRADCGFTSESYQQGVLSATNLSVIGFRILLLKVAGFNLLMTLRLWSS

SEQ ID NO: 13582 - protein, 612 aa, synthetic construct
MALPVTALLLPLALLLHAARPDIQMTQSPSSLSASVGDRVTITCQASQDINNYLNWYQQKPGKAPKLLIYDASNLQTGVPSRFSGSGSGTDFTFTIEDIATYYCQQYTFGPGTKVDIKLEIQNPDPAVYQLRDSKSSDKSVCLFTDFDSQTNVSQSKDSDVYITDKCVLDMRSMDFKSNSAVAWSNKSDFACANAFNNSIIPEDTFFPSPESSCDVKLVEKSFETDTNLNFQILYEILLGKATLYAVLVSALVLMAMVKRKDSRGRAKRSGSGVKQTLNFDLLKLAGDVESNPGPTSMDWIWRILFLVGAATGAHSFEEVQLLESGGGLVQPGGSLRLSCAASGFTFSWYSMTWVRQAPGKGLEWVSSIVPWGDFTQYADSVKGRFTISRDNSKNTLYLQMNSLRAEDTAVYYCAKGPGWGSFDLWGRGTLVTVSSTREDLKNVFPPEVAVFEPSEAEISHTQKATLVCLATGFYPDHVELSWWVNGKEVHSGVCTDPQPLKEQPALNDSRYCLSSRLRVSATFWQNPRNHFRCQVQFYGLSENDEWTQDRAKPVTQIVSAEAWGRADCGFTSESYQQGVLSATNLSVIGFRILLLKVAGFNLLMTLRLWSS

SEQ ID NO: 13583 - protein, 622 aa, synthetic construct
MALPVTALLLPLALLLHAARPDIQMTQSPSSLSASVGDRVTITCTASLSVSSTYLHWYQQKPGSSPKLWIYSTSNLASGVPSRFSGSGSGTSYTLTISSLQPEDFATYYCHQYHRSPLTFGGGTKVEIKRLEIQNPDPAVYQLRDSKSSDKSVCLFTDFDSQTNVSQSKDSDVYITDKCVLDMRSMDFKSNSAVAWSNKSDFACANAFNNSIIPEDTFFPSPESSCDVKLVEKSFETDTNLNFQILYEILLGKATLYAVLVSALVLMAMVKRKDSRGRAKRSGSGVKQTLNFDLLKLAGDVESNPGPTSMDWIWRILFLVGAATGAHSFEEVQLVESGGGLVQPGGSLRLSCAASGFSLTKYGVHWVRQAPGKGLEWVGVKWAGGSTDYNSALMSRFTISKDNAKNSLYLQMNSLRAEDTAVYYCARDHRDAMDYWGQGTLVTVSSTREDLKNVFPPEVAVFEPSEAEISHTQKATLVCLATGFYPDHVELSWWVNGKEVHSGVCTDPQPLKEQPALNDSRYCLSSRLRVSATFWQNPRNHFRCQVQFYGLSENDEWTQDRAKPVTQIVSAEAWGRADCGFTSESYQQGVLSATNLSVIGFRILLLKVAGFNLLMTLRLWSS

SEQ ID NO: 13584 - protein, 626 aa, synthetic construct
MALPVTALLLPLALLLHAARPDIQMTQSPSSLSASVGDRVTITCKASQDVGTAVAWYQQKPGKAPKLLIYSASYRSTGVPSRFSGSGSGTDFTLTISSLQPEDFATYYCQHHYSAPWTFGGGTKVEIKLEIQNPDPAVYQLRDSKSSDKSVCLFTDFDSQTNVSQSKDSDVYITDKCVLDMRSMDFKSNSAVAWSNKSDFACANAFNNSIIPEDTFFPSPESSCDVKLVEKSFETDTNLNFQILYEILLGKATLYAVLVSALVLMAMVKRKDSRGRAKRSGSGVKQTLNFDLLKLAGDVESNPGPTSMDWIWRILFLVGAATGAHSFEEVQLVESGGGLVQPGGSLRLSCAASGFTFSRNGMSWVRQAPGKGLEWVATVSSGGSYIYYADSVKGRFTISRDNAKNSLYLQMNSLRAEDTAVYYCARQGTTALATRFFDVWGQGTLVTVSSTREDLKNVFPPEVAVFEPSEAEISHTQKATLVCLATGFYPDHVELSWWVNGKEVHSGVCTDPQPLKEQPALNDSRYCLSSRLRVSATFWQNPRNHFRCQVQFYGLSENDEWTQDRAKPVTQIVSAEAWGRADCGFTSESYQQGVLSATNLSVIGFRILLLKVAGFNLLMTLRLWSS

SEQ ID NO: 13585 - protein, 622 aa, synthetic construct
MALPVTALLLPLALLLHAARPDIQMTQSPPSLSASVGGKVTITCKASQDIDRYMAWYQDKPGKGPKLLIHDTSTLQPGIPSRFSGSGSGRDYSFSISNLEPEDIATYYCLQYDNLWTFGGGTKLEIKRLEIQNPDPAVYQLRDSKSSDKSVCLFTDFDSQTNVSQSKDSDVYITDKCVLDMRSMDFKSNSAVAWSNKSDFACANAFNNSIIPEDTFFPSPESSCDVKLVEKSFETDTNLNFQILYEILLGKATLYAVLVSALVLMAMVKRKDSRGRAKRSGSGVKQTLNFDLLKLAGDVESNPGPTSMDWIWRILFLVGAATGAHSFEQVQLVQSGAELVKPGASVKMSCKASGYIFTNYNIHWVKKSPGQGLEWIGAIYPGNGDAPYSQKFQDRATLTADTSSSTTYMELSSLTSEDSAVYYCVRANWDVAFAYWGQGTLVSVSSTREDLKNVFPPEVAVFEPSEAEISHTQKATLVCLATGFYPDHVELSWWVNGKEVHSGVCTDPQPLKEQPALNDSRYCLSSRLRVSATFWQNPRNHFRCQVQFYGLSENDEWTQDRAKPVTQIVSAEAWGRADCGFTSESYQQGVLSATNLSVIGFRILLLKVAGFNLLMTLRLWSS

SEQ ID NO: 13586 - protein, 623 aa, synthetic construct
MALPVTALLLPLALLLHAARPDIQMTQSPASLSASVGETVTITCRVSGNIHNYLAWYQQKQGKSPQLLVYNAKTLADGVPSRFSGSGSGTQYSLKINSLQPEDFGSYYCQHFWSNPYTFGGGTKLEIKLEIQNPDPAVYQLRDSKSSDKSVCLFTDFDSQTNVSQSKDSDVYITDKCVLDMRSMDFKSNSAVAWSNKSDFACANAFNNSIIPEDTFFPSPESSCDVKLVEKSFETDTNLNFQILYEILLGKATLYAVLVSALVLMAMVKRKDSRGRAKRSGSGVKQTLNFDLLKLAGDVESNPGPTSMDWIWRILFLVGAATGAHSFEQVQLQQSGASVKVSCKASELVRPGTGYAFTNYLIEWVKQRPGQGLEWIGVINPGSGGTNYNEKFKGKATLTADKSSSTAYMQLSSLTSDDSAVYFCARYRSYDWYFDVWGAGTTVTVSSTREDLKNVFPPEVAVFEPSEAEISHTQKATLVCLATGFYPDHVELSWWVNGKEVHSGVCTDPQPLKEQPALNDSRYCLSSRLRVSATFWQNPRNHFRCQVQFYGLSENDEWTQDRAKPVTQIVSAEAWGRADCGFTSESYQQGVLSATNLSVIGFRILLLKVAGFNLLMTLRLWSS

SEQ ID NO: 13587 - protein, 622 aa, synthetic construct
MALPVTALLLPLALLLHAARPDIQMTQSFSSLSASVGDRVTITCRASQDISNYLNWYQQKPGKAPKLLIYYTSRLHSGVPSRFSGSGSGTDYTLTISSLQPEDFATYFCQQGNTLPWTFGGGTKLEIKRLEIQNPDPAVYQLRDSKSSDKSVCLFTDFDSQTNVSQSKDSDVYITDKCVLDMRSMDFKSNSAVAWSNKSDFACANAFNNSIIPEDTFFPSPESSCDVKLVEKSFETDTNLNFQILYEILLGKATLYAVLVSALVLMAMVKRKDSRGRAKRSGSGVKQTLNFDLLKLAGDVESNPGPTSMDWIWRILFLVGAATGAHSFEEVQLVQSGGGLVQSGGSLRLSCRASGYTFTRYWMLWVRQRPGKGLEWVAEINPRNDRTNYNEKFKTRFTISVDRSKNTLYLQMDSLRAEDTAVYFCALGGGYAMDYWGQGTLVTVSSTREDLKNVFPPEVAVFEPSEAEISHTQKATLVCLATGFYPDHVELSWWVNGKEVHSGVCTDPQPLKEQPALNDSRYCLSSRLRVSATFWQNPRNHFRCQVQFYGLSENDEWTQDRAKPVTQIVSAEAWGRADCGFTSESYQQGVLSATNLSVIGFRILLLKVAGFNLLMTLRLWSS

SEQ ID NO: 13588 - protein, 623 aa, synthetic construct
MALPVTALLLPLALLLHAARPDIQMTQSPASLSASVGETVTIICRASVNIYSYLAWYQQKQGKSPQLLVYNAKILAEGVPSRFSGSGSGTQFSLKINSLQPEDFGSYYCQHHYGTFTFGSGTKLEIKRLEIQNPDPAVYQLRDSKSSDKSVCLFTDFDSQTNVSQSKDSDVYITDKCVLDMRSMDFKSNSAVAWSNKSDFACANAFNNSIIPEDTFFPSPESSCDVKLVEKSFETDTNLNFQILYEILLGKATLYAVLVSALVLMAMVKRKDSRGRAKRSGSGVKQTLNFDLLKLAGDVESNPGPTSMDWIWRILFLVGAATGAHSFEQVQLKESGPGLVAPSQSLSITCTISGFSLTSYGVHWVRQPPGKGLEWLVVIWSDGSTTYNSALKSRLSISKDNSKSQVFLKMNSLQTDDTAIYYCASHYGSTLAFASWGHGTLVTVSAATREDLKNVFPPEVAVFEPSEAEISHTQKATLVCLATGFYPDHVELSWWVNGKEVHSGVCTDPQPLKEQPALNDSRYCLSSRLRVSATFWQNPRNHFRCQVQFYGLSENDEWTQDRAKPVTQIVSAEAWGRADCGFTSESYQQGVLSATNLSVIGFRILLLKVAGFNLLMTLRLWSS

SEQ ID NO: 13589 - protein, 631 aa, synthetic construct
MALPVTALLLPLALLLHAARPDIVMTQSHKFMSTSVGDRVSVTCKASQNVGNNVAWYQQKPGQSPKVLIYSASYRYSGVPDRFTGSGSGTDFTLTISNVQSEDLAEYFCQQYNTYPFTFGSGTKLEIKLEIQNPDPAVYQLRDSKSSDKSVCLFTDFDSQTNVSQSKDSDVYITDKCVLDMRSMDFKSNSAVAWSNKSDFACANAFNNSIIPEDTFFPSPESSCDVKLVEKSFETDTNLNFQILYEILLGKATLYAVLVSALVLMAMVKRKDSRGRAKRSGSGVKQTLNFDLLKLAGDVESNPGPTSMDWIWRILFLVGAATGAHSFEEVQLEESGGGLVQPGGSMKLSCVASGFTFSNYWMNWVRQSPEKGLEWVAEIRFKSHNYATHFAESVKGRFTISRDDSKSSVYLQMNNLRAEDTGIYYCTRRIGNSDYDWWYFDVWGAGTSVTVSSASTREDLKNVFPPEVAVFEPSEAEISHTQKATLVCLATGFYPDHVELSWWVNGKEVHSGVCTDPQPLKEQPALNDSRYCLSSRLRVSATFWQNPRNHFRCQVQFYGLSENDEWTQDRAKPVTQIVSAEAWGRADCGFTSESYQQGVLSATNLSVIGFRILLLKVAGFNLLMTLRLWSS

SEQ ID NO: 13590 - protein, 624 aa, synthetic construct
MALPVTALLLPLALLLHAARPDQIVLTQSPAIMSASPGEKVTISCSASSSVSYMYWYQQKPGSSPKPWIYRTSNLASGVPARFSGSGSGTSYSLTISNMEAEDAAAYYCQQYHSYPTTFGGGTKLEVKLEIQNPDPAVYQLRDSKSSDKSVCLFTDFDSQTNVSQSKDSDVYITDKCVLDMRSMDFKSNSAVAWSNKSDFACANAFNNSIIPEDTFFPSPESSCDVKLVEKSFETDTNLNFQILYEILLGKATLYAVLVSALVLMAMVKRKDSRGRAKRSGSGVKQTLNFDLLKLAGDVESNPGPTSMDWIWRILFLVGAATGAHSFEEVQLVESGGGLVQPKGSLKLSCAASGFSFNTYAMNWVRQAPGKGLEWIAHIRSKSNNFATYYADSVKDRFSISRDASENILFLQMNNLKTEDTAMYYCVRQGGDFPMDYWGQGTSVTVSSTREDLKNVFPPEVAVFEPSEAEISHTQKATLVCLATGFYPDHVELSWWVNGKEVHSGVCTDPQPLKEQPALNDSRYCLSSRLRVSATFWQNPRNHFRCQVQFYGLSENDEWTQDRAKPVTQIVSAEAWGRADCGFTSESYQQGVLSATNLSVIGFRILLLKVAGFNLLMTLRLWSS

SEQ ID NO: 13591 - protein, 623 aa, synthetic construct
MALPVTALLLPLALLLHAARPDDIQMTQSSSSFSVSLGDRVTITCMASEDIYIRLAWYQQKPGNAPRLLISAATSLETGVPSRFSGSGSGKDYTLSITSLQTEDVGTYYCQQYWSSPWTFGGGTKLEINLEIQNPDPAVYQLRDSKSSDKSVCLFTDFDSQTNVSQSKDSDVYITDKCVLDMRSMDFKSNSAVAWSNKSDFACANAFNNSIIPEDTFFPSPESSCDVKLVEKSFETDTNLNFQILYEILLGKATLYAVLVSALVLMAMVKRKDSRGRAKRSGSGVKQTLNFDLLKLAGDVESNPGPTSMDWIWRILFLVGAATGAHSFEDVQLQESGPGLVKPSQSLSLTCTVTGYSITSDYTWNWIRQFPGNKLEWMGYITYSGSTSYNPSLKSRNSITRDTSKNQFFLQLNSVTTEDTATYYCARLGRRYTMDYWGQGTSVTVSSTREDLKNVFPPEVAVFEPSEAEISHTQKATLVCLATGFYPDHVELSWWVNGKEVHSGVCTDPQPLKEQPALNDSRYCLSSRLRVSATFWQNPRNHFRCQVQFYGLSENDEWTQDRAKPVTQIVSAEAWGRADCGFTSESYQQGVLSATNLSVIGFRILLLKVAGFNLLMTLRLWSS

SEQ ID NO: 13592 - protein, 626 aa, synthetic construct
MALPVTALLLPLALLLHAARPDDIQMTQSPSSLSASVGDRVTITCRASQSISSYLNWYQQKPGKAPKLLIYDASNLETGVPSRFSGSGSGTDFTFTISSLQPEDIATYYCQQYDNLPLTFGGGTKVDIKRLEIQNPDPAVYQLRDSKSSDKSVCLFTDFDSQTNVSQSKDSDVYITDKCVLDMRSMDFKSNSAVAWSNKSDFACANAFNNSIIPEDTFFPSPESSCDVKLVEKSFETDTNLNFQILYEILLGKATLYAVLVSALVLMAMVKRKDSRGRAKRSGSGVKQTLNFDLLKLAGDVESNPGPTSMDWIWRILFLVGAATGAHSFEQVQLVESGGGVVQPGRSLRLSCAASGFTFSSYAMHWVRQAPGKGLEWVAVISYDGSNKYYADSVKGRFTISRDNSKNTLYLQMNSLRAEDTAVYYCARAHNSSSWSFDYWGQGTLVTVSSTREDLKNVFPPEVAVFEPSEAEISHTQKATLVCLATGFYPDHVELSWWVNGKEVHSGVCTDPQPLKEQPALNDSRYCLSSRLRVSATFWQNPRNHFRCQVQFYGLSENDEWTQDRAKPVTQIVSAEAWGRADCGFTSESYQQGVLSATNLSVIGFRILLLKVAGFNLLMTLRLWSS

SEQ ID NO: 13593 - protein, 635 aa, synthetic construct
MALPVTALLLPLALLLHAARPDDVVMTQSPLSLPVSLGDQASISCRSSQRLVHSNGNTYLHWYLQKPGQSPKLLIYRVSNRFPGVPDRFSGSGSGTDFTLKISRVEAEDLGIYFCSQSTHVPYTFGGGTKLEIKRLEIQNPDPAVYQLRDSKSSDKSVCLFTDFDSQTNVSQSKDSDVYITDKCVLDMRSMDFKSNSAVAWSNKSDFACANAFNNSIIPEDTFFPSPESSCDVKLVEKSFETDTNLNFQILYEILLGKATLYAVLVSALVLMAMVKRKDSRGRAKRSGSGVKQTLNFDLLKLAGDVESNPGPTSMDWIWRILFLVGAATGAHSFEEVRLQQSGPDLIKPGASVKMSCKASGYTFTGYVMHWVKQRPGQGLEWIGFINPYNDDIQSNERFRGKATLTSDKSSTTAYMELSSLTSEDSAVYYCARGAGYNFDGAYRFFDFWGQGTTLTVSSTREDLKNVFPPEVAVFEPSEAEISHTQKATLVCLATGFYPDHVELSWWVNGKEVHSGVCTDPQPLKEQPALNDSRYCLSSRLRVSATFWQNPRNHFRCQVQFYGLSENDEWTQDRAKPVTQIVSAEAWGRADCGFTSESYQQGVLSATNLSVIGFRILLLKVAGFNLLMTLRLWSS

SEQ ID NO: 13594 - protein, 626 aa, synthetic construct
MALPVTALLLPLALLLHAARPDSYELTQPPSVSVSPGQTATISCSGDQLGGKYGHWYQKKPGQSPVLVLYQDRKRPAGIPERFSGSSSGNTITLTISGTQAVDEADYYCQAWDTNLGGVFGGGTKVTVLGQLEIQNPDPAVYQLRDSKSSDKSVCLFTDFDSQTNVSQSKDSDVYITDKCVLDMRSMDFKSNSAVAWSNKSDFACANAFNNSIIPEDTFFPSPESSCDVKLVEKSFETDTNLNFQILYEILLGKATLYAVLVSALVLMAMVKRKDSRGRAKRSGSGVKQTLNFDLLKLAGDVESNPGPTSMDWIWRILFLVGAATGAHSFEQVQLVESGAEVKKPGASVKVSCKASGYTFTGYYMHWVRQAPGQGLEWMGRINPNSGGTNYAQKFQGRVTMTRDTSISTAYMELSRLRSDDTAVYYCASPRGRGSAFDIWGQGTLVTVSSTREDLKNVFPPEVAVFEPSEAEISHTQKATLVCLATGFYPDHVELSWWVNGKEVHSGVCTDPQPLKEQPALNDSRYCLSSRLRVSATFWQNPRNHFRCQVQFYGLSENDEWTQDRAKPVTQIVSAEAWGRADCGFTSESYQQGVLSATNLSVIGFRILLLKVAGFNLLMTLRLWSS

SEQ ID NO: 13595 - protein, 629 aa, synthetic construct
MALPVTALLLPLALLLHAARPDNFMLTQPHSVSESPGKTVTISCTRSSGSIASKYVQWYQQRPGSSPTTVIYEDNQRPSGVPDRFSGSIDTSSNSASLTISGLRTEDEADYYCHSYDSNNHSVFGGGTKVTVLGQLEIQNPDPAVYQLRDSKSSDKSVCLFTDFDSQTNVSQSKDSDVYITDKCVLDMRSMDFKSNSAVAWSNKSDFACANAFNNSIIPEDTFFPSPESSCDVKLVEKSFETDTNLNFQILYEILLGKATLYAVLVSALVLMAMVKRKDSRGRAKRSGSGVKQTLNFDLLKLAGDVESNPGPTSMDWIWRILFLVGAATGAHSFEEVQLVESGGGVVQPGGSLRLSCAASGFTFSSYAMSWVRQAPGKGLEWVSAISGSGGSTYYADSVKGRFSISRDNSKNTLYLQMNSLRAEDTAVYYCARTRSSGAFDIWGQGTLVTVSSTREDLKNVFPPEVAVFEPSEAEISHTQKATLVCLATGFYPDHVELSWWVNGKEVHSGVCTDPQPLKEQPALNDSRYCLSSRLRVSATFWQNPRNHFRCQVQFYGLSENDEWTQDRAKPVTQIVSAEAWGRADCGFTSESYQQGVLSATNLSVIGFRILLLKVAGFNLLMTLRLWSS

SEQ ID NO: 13596 - protein, 624 aa, synthetic construct
MALPVTALLLPLALLLHAARPDIQMNQSPSSLSASLGDTITITCHASQNINVWLSWYQQKPGNIPKLLIYKASNLHTGVPSRFSGSGSGTGFTITISSLQPEDIATYYCQQGQSYPWTFGGGTKLEIKRLEIQNPDPAVYQLRDSKSSDKSVCLFTDFDSQTNVSQSKDSDVYITDKCVLDMRSMDFKSNSAVAWSNKSDFACANAFNNSIIPEDTFFPSPESSCDVKLVEKSFETDTNLNFQILYEILLGKATLYAVLVSALVLMAMVKRKDSRGRAKRSGSGVKQTLNFDLLKLAGDVESNPGPTSMDWIWRILFLVGAATGAHSFEEVQLQQSGPELVKPGASVKISCKASGYSFTGYFMNWVKQSHGKSLEYIGRFNPYNGETLYNQKFKGKATLTVDKSSSTVHMELLSVTSEDSAVYYCGRSGNDDAMDYWGQGTSVTVSSATREDLKNVFPPEVAVFEPSEAEISHTQKATLVCLATGFYPDHVELSWWVNGKEVHSGVCTDPQPLKEQPALNDSRYCLSSRLRVSATFWQNPRNHFRCQVQFYGLSENDEWTQDRAKPVTQIVSAEAWGRADCGFTSESYQQGVLSATNLSVIGFRILLLKVAGFNLLMTLRLWSS

SEQ ID NO: 13597 - protein, 625 aa, synthetic construct
MALPVTALLLPLALLLHAARPEIVLTQSPATLSLSPGERATLSCRASQSVRSYLAWYQQKPGQAPRLLIYDASNRATGIPARFSGSGSGTDFTLTISSLEPEDFAVYYCQQRSNWPPTFGQGTKVEIKLEIQNPDPAVYQLRDSKSSDKSVCLFTDFDSQTNVSQSKDSDVYITDKCVLDMRSMDFKSNSAVAWSNKSDFACANAFNNSIIPEDTFFPSPESSCDVKLVEKSFETDTNLNFQILYEILLGKATLYAVLVSALVLMAMVKRKDSRGRAKRSGSGVKQTLNFDLLKLAGDVESNPGPTSMDWIWRILFLVGAATGAHSFEQLQVQESGPGLVKPSETLSLTCTVSGGSISNSYFSWGWIRQPPGKGLEWIGSFYYGEKTYYNPSLKSRATISIDTSKSQFSLKLSSVTAADTAVYYCPRGPTMIRGVIDSWGQGTLVTVSSTREDLKNVFPPEVAVFEPSEAEISHTQKATLVCLATGFYPDHVELSWWVNGKEVHSGVCTDPQPLKEQPALNDSRYCLSSRLRVSATFWQNPRNHFRCQVQFYGLSENDEWTQDRAKPVTQIVSAEAWGRADCGFTSESYQQGVLSATNLSVIGFRILLLKVAGFNLLMTLRLWSS

SEQ ID NO: 13598 - protein, 634 aa, synthetic construct
MALPVTALLLPLALLLHAARPDIVMTQTPLSLPVTPGEPASISCRSSRSLLDSDDGNTYLDWYLQKPGQSPQLLIYTLSYRASGVPDRFSGSGSGTDFTLKISRVEAEDVGVYYCMQRVEFPITFGQGTRLEIKRLEIQNPDPAVYQLRDSKSSDKSVCLFTDFDSQTNVSQSKDSDVYITDKCVLDMRSMDFKSNSAVAWSNKSDFACANAFNNSIIPEDTFFPSPESSCDVKLVEKSFETDTNLNFQILYEILLGKATLYAVLVSALVLMAMVKRKDSRGRAKRSGSGVKQTLNFDLLKLAGDVESNPGPTSMDWIWRILFLVGAATGAHSFEQVQLVESGGGVVQPGRSLRLSCAASGFIFSRYGMHWVRQAPGKGLKWVAVIWYDGSNKLYADSVKGRFTISRDNSKNTLYLQMNSLRAEDTAVYYCARDYYDNSRHHWGFDYWGQGTLVTVSSTREDLKNVFPPEVAVFEPSEAEISHTQKATLVCLATGFYPDHVELSWWVNGKEVHSGVCTDPQPLKEQPALNDSRYCLSSRLRVSATFWQNPRNHFRCQVQFYGLSENDEWTQDRAKPVTQIVSAEAWGRADCGFTSESYQQGVLSATNLSVIGFRILLLKVAGFNLLMTLRLWSS

SEQ ID NO: 13599 - protein, 624 aa, synthetic construct
MALPVTALLLPLALLLHAARPEIQMTQSPSSMSASLGDTITITCQATQDIFKNLNWYQQKPGKPPSLLIYYATELAEGVPSRFSGSGSGSDYSLTISNLESEDFAAYYCLQFFEFPFTFGSGTKLEMKLEIQNPDPAVYQLRDSKSSDKSVCLFTDFDSQTNVSQSKDSDVYITDKCVLDMRSMDFKSNSAVAWSNKSDFACANAFNNSIIPEDTFFPSPESSCDVKLVEKSFETDTNLNFQILYEILLGKATLYAVLVSALVLMAMVKRKDSRGRAKRSGSGVKQTLNFDLLKLAGDVESNPGPTSMDWIWRILFLVGAATGAHSFEQVQLQQSGAELVRPGTSVKVSCKASGYVFTNYWIEWIKQRPGQGLEWIGVMNPGSGETTYNEKFKGKATLTADKSSSTAYMQLSSLTSVDSAVYFCARDHDRDYYAMDYWGQGTSVTVSSTREDLKNVFPPEVAVFEPSEAEISHTQKATLVCLATGFYPDHVELSWWVNGKEVHSGVCTDPQPLKEQPALNDSRYCLSSRLRVSATFWQNPRNHFRCQVQFYGLSENDEWTQDRAKPVTQIVSAEAWGRADCGFTSESYQQGVLSATNLSVIGFRILLLKVAGFNLLMTLRLWSS

SEQ ID NO: 13600 - protein, 621 aa, synthetic construct
MALPVTALLLPLALLLHAARPDILLTQSPAILSVSPGERVSFSCRASQNIGTSIHWYQQRTNGSPRLLIKYASESVSGIPSRFSGSGSGTDFTLSINSVESEDIADYYCQHTNSWPTTFGGGTKLEIKRLEIQNPDPAVYQLRDSKSSDKSVCLFTDFDSQTNVSQSKDSDVYITDKCVLDMRSMDFKSNSAVAWSNKSDFACANAFNNSIIPEDTFFPSPESSCDVKLVEKSFETDTNLNFQILYEILLGKATLYAVLVSALVLMAMVKRKDSRGRAKRSGSGVKQTLNFDLLKLAGDVESNPGPTSMDWIWRILFLVGAATGAHSFEQVQLQQSDAELVKPGASVKISCKASGYTFTDHAIHWVKQKPEQGLEWIGYFSPGNGDIKYNEKFKGKATLTADKSSSTAYMQLNSLTSEDSAVYFCKRSYGNYDYWGQGTTLTVSSTREDLKNVFPPEVAVFEPSEAEISHTQKATLVCLATGFYPDHVELSWWVNGKEVHSGVCTDPQPLKEQPALNDSRYCLSSRLRVSATFWQNPRNHFRCQVQFYGLSENDEWTQDRAKPVTQIVSAEAWGRADCGFTSESYQQGVLSATNLSVIGFRILLLKVAGFNLLMTLRLWSS

SEQ ID NO: 13601 - protein, 626 aa, synthetic construct
MALPVTALLLPLALLLHAARPDIVMTQSPDSLAVSLGERATINCKSSQSLLNSGDQKNYLTWYQQKPGQPPKLLIYWASTRESGVPDRFSGSGSGTDFTLTISSLQAEDVAVYYCQNDYSYPLTFGQGTKVEIKLEIQNPDPAVYQLRDSKSSDKSVCLFTDFDSQTNVSQSKDSDVYITDKCVLDMRSMDFKSNSAVAWSNKSDFACANAFNNSIIPEDTFFPSPESSCDVKLVEKSFETDTNLNFQILYEILLGKATLYAVLVSALVLMAMVKRKDSRGRAKRSGSGVKQTLNFDLLKLAGDVESNPGPTSMDWIWRILFLVGAATGAHSFEQVQLVQSGAEVKKTGSSVKVSCKASGYTFTDHAIHVWRQAPGQALEWMGHFSPGNTDIKYNDKFKGRVTLTVDRSMSTAYMELSSLRSEDTAMYYCKTSTFFFDYWGQGTMVTVSSTREDLKNVFPPEVAVFEPSEAEISHTQKATLVCLATGFYPDHVELSWWVNGKEVHSGVCTDPQPLKEQPALNDSRYCLSSRLRVSATFWQNPRNHFRCQVQFYGLSENDEWTQDRAKPVTQIVSAEAWGRADCGFTSESYQQGVLSATNLSVIGFRILLLKVAGFNLLMTLRLWSS

SEQ ID NO: 13602 - protein, 625 aa, synthetic construct
MALPVTALLLPLALLLHAARPDIQMTQSPSSLSASVGDRVTITCKASQDVSIAVAWYQQKPGKAPKVLIYSASYRYTGVPDRFSGSGSGTDFTFTISSLQPEDIAVYYCQQHYITPLTFGGGTKVEIKLEIQNPDPAVYQLRDSKSSDKSVCLFTDFDSQTNVSQSKDSDVYITDKCVLDMRSMDFKSNSAVAWSNKSDFACANAFNNSIIPEDTFFPSPESSCDVKLVEKSFETDTNLNFQILYEILLGKATLYAVLVSALVLMAMVKRKDSRGRAKRSGSGVKQTLNFDLLKLAGDVESNPGPTSMDWIWRILFLVGAATGAHSFEQIQLVQSGHEVKKPGASVKVSCKASGYTFTNYGMNWVRQAPGQGLEWMGWINTKTGEPTYAEEFKGRFVFSLETSASTAYLQISSLKAEDTAMYFCGRGGYGSSYWYFDVWGQGTTVTVSSTREDLKNVFPPEVAVFEPSEAEISHTQKATLVCLATGFYPDHVELSWWVNGKEVHSGVCTDPQPLKEQPALNDSRYCLSSRLRVSATFWQNPRNHFRCQVQFYGLSENDEWTQDRAKPVTQIVSAEAWGRADCGFTSESYQQGVLSATNLSVIGFRILLLKVAGFNLLMTLRLWSS

SEQ ID NO: 13603 - protein, 627 aa, synthetic construct
MALPVTALLLPLALLLHAARPDIVMTQSPDSLAVSLGERATINCRASKSVSTSGYSYMHWYQQKPGQPPKLLIYLASNLESGVPDRFSGSGSGTDFTLTISSLQAEDVAVYYCQHSRELPYTFGQGTKLEIKLEIQNPDPAVYQLRDSKSSDKSVCLFTDFDSQTNVSQSKDSDVYITDKCVLDMRSMDFKSNSAVAWSNKSDFACANAFNNSIIPEDTFFPSPESSCDVKLVEKSFETDTNLNFQILYEILLGKATLYAVLVSALVLMAMVKRKDSRGRAKRSGSGVKQTLNFDLLKLAGDVESNPGPTSMDWIWRILFLVGAATGAHSFEQVQLQESGPGLVKPSETLSLTCTVSGGSISSYGVHWIRQPPGKGLEWIGVIWTSGVTDYNSALMGRVTISVDTSKNQFSLKLSSVTAADTAVYYCARDGDYDRYTMDYWGQGTLVTVSSTREDLKNVFPPEVAVFEPSEAEISHTQKATLVCLATGFYPDHVELSWWVNGKEVHSGVCTDPQPLKEQPALNDSRYCLSSRLRVSATFWQNPRNHFRCQVQFYGLSENDEWTQDRAKPVTQIVSAEAWGRADCGFTSESYQQGVLSATNLSVIGFRILLLKVAGFNLLMTLRLWSS

SEQ ID NO: 13604 - protein, 627 aa, synthetic construct
MALPVTALLLPLALLLHAARPDIQMTQSPSSLSASVGDRVTITCRASQSIGTSLHWYQQKPGKAPKLLIKFASRLQSGVPSRFSGSGSGTDFTLTISSLQPEDFATYYCQQSPGFPPTFGQGTKLEIKRLEIQNPDPAVYQLRDSKSSDKSVCLFTDFDSQTNVSQSKDSDVYITDKCVLDMRSMDFKSNSAVAWSNKSDFACANAFNNSIIPEDTFFPSPESSCDVKLVEKSFETDTNLNFQILYEILLGKATLYAVLVSALVLMAMVKRKDSRGRAKRSGSGVKQTLNFDLLKLAGDVESNPGPTSMDWIWRILFLVGAATGAHSFEQVQLVESGGGLVKPGGSLRLSCAASGFSITTSGYYWTWIRQFPGKGLEWMGYIGYNSKTYYNPALKSRITISRDNAKNSLYLQMNSLRAEDTAVYYCARSLYGGYKDAFDSWGQGTLVTVSSTREDLKNVFPPEVAVFEPSEAEISHTQKATLVCLATGFYPDHVELSWWVNGKEVHSGVCTDPQPLKEQPALNDSRYCLSSRLRVSATFWQNPRNHFRCQVQFYGLSENDEWTQDRAKPVTQIVSAEAWGRADCGFTSESYQQGVLSATNLSVIGFRILLLKVAGFNLLMTLRLWSS

SEQ ID NO: 13605 - protein, 632 aa, synthetic construct
MALPVTALLLPLALLLHAARPDEIVLTQSPLSLPVTPGEPASISCRSSQSLLHSIGYNYLDWYLQKPGQSPQLLIYLGSNRASGVPDRFSGSGSGTDFTLKISRVEAEDVGVYYCMQALQTPLTFGGGTKVEIKRLEIQNPDPAVYQLRDSKSSDKSVCLFTDFDSQTNVSQSKDSDVYITDKCVLDMRSMDFKSNSAVAWSNKSDFACANAFNNSIIPEDTFFPSPESSCDVKLVEKSFETDTNLNFQILYEILLGKATLYAVLVSALVLMAMVKRKDSRGRAKRSGSGVKQTLNFDLLKLAGDVESNPGPTSMDWIWRILFLVGAATGAHSFEEVQLVESGGGVVQPGRSLRLSCAASGFTFRSYGMHWVRQAPGKGLEWVAVISYDGSNKYYTDSVNGRFTISRDNSKNTLYLQMNSLRAEDTAVYYCARGGGYYETSGPDYWGQGTLVTVSSTREDLKNVFPPEVAVFEPSEAEISHTQKATLVCLATGFYPDHVELSWWVNGKEVHSGVCTDPQPLKEQPALNDSRYCLSSRLRVSATFWQNPRNHFRCQVQFYGLSENDEWTQDRAKPVTQIVSAEAWGRADCGFTSESYQQGVLSATNLSVIGFRILLLKVAGFNLLMTLRLWSS

SEQ ID NO: 13606 - protein, 630 aa, synthetic construct
MALPVTALLLPLALLLHAARPDDVVMTQSPLSLPVTPGEPASISCRSSQSLLHSIGYNYLHWFLQKPGQSPQLLIYLGSNRASGVPDRFSGSGSGTDFTLKISRVEAEDVGVYYCMQALQTPPTFGQGTRLEIKRLEIQNPDPAVYQLRDSKSSDKSVCLFTDFDSQTNVSQSKDSDVYITDKCVLDMRSMDFKSNSAVAWSNKSDFACANAFNNSIIPEDTFFPSPESSCDVKLVEKSFETDTNLNFQILYEILLGKATLYAVLVSALVLMAMVKRKDSRGRAKRSGSGVKQTLNFDLLKLAGDVESNPGPTSMDWIWRILFLVGAATGAHSFEQLQLQESGPGLVKPSGTLSLTCAVSGGSISSSNWWSWVRQPPGKGLEWIGEIYHSGSTNYNPSLKSRVTISVDKSKNQFSLKLSSVTAADTAVYYCVGSPYGDYVLDYWGQGTLVTVSSTREDLKNVFPPEVAVFEPSEAEISHTQKATLVCLATGFYPDHVELSWWVNGKEVHSGVCTDPQPLKEQPALNDSRYCLSSRLRVSATFWQNPRNHFRCQVQFYGLSENDEWTQDRAKPVTQIVSAEAWGRADCGFTSESYQQGVLSATNLSVIGFRILLLKVAGFNLLMTLRLWSS

SEQ ID NO: 13607 - protein, 628 aa, synthetic construct
MALPVTALLLPLALLLHAARPDEIVLTQSPGTLSLSLGERATLSCRASQSISSSFLAWYQQKPGQAPKLLIYAASTRATGIPDRFSGSGSGTDFTLTISRLEPEDFAVYYCQQYGRSLSFGGGTKVEVKLEIQNPDPAVYQLRDSKSSDKSVCLFTDFDSQTNVSQSKDSDVYITDKCVLDMRSMDFKSNSAVAWSNKSDFACANAFNNSIIPEDTFFPSPESSCDVKLVEKSFETDTNLNFQILYEILLGKATLYAVLVSALVLMAMVKRKDSRGRAKRSGSGVKQTLNFDLLKLAGDVESNPGPTSMDWIWRILFLVGAATGAHSFEQVQLQQSGPGLVKPSQTLSLTCAISGDSVSGNSATWNWIRQSPSRGLEWLGRTYYRSKWNHDYAESVKSRITINPDTSKNQFSLQLNSVTPEDTAVYYCARGDSSSWYAFDYWGQGTLVTVSSTREDLKNVFPPEVAVFEPSEAEISHTQKATLVCLATGFYPDHVELSWWVNGKEVHSGVCTDPQPLKEQPALNDSRYCLSSRLRVSATFWQNPRNHFRCQVQFYGLSENDEWTQDRAKPVTQIVSAEAWGRADCGFTSESYQQGVLSATNLSVIGFRILLLKVAGFNLLMTLRLWSS

SEQ ID NO: 13608 - protein, 627 aa, synthetic construct
MALPVTALLLPLALLLHAARPDQSVVTQPPSVSVAPGKTARITCGRNNIGSKSVHWYQQKPGQAPVLVVYDDSDRPSGIPERFSGSNSGNTATLTISRVEAGDEADYYCQVWDSSSDHVVFGGGTKLTVLGLEIQNPDPAVYQLRDSKSSDKSVCLFTDFDSQTNVSQSKDSDVYITDKCVLDMRSMDFKSNSAVAWSNKSDFACANAFNNSIIPEDTFFPSPESSCDVKLVEKSFETDTNLNFQILYEILLGKATLYAVLVSALVLMAMVKRKDSRGRAKRSGSGVKQTLNFDLLKLAGDVESNPGPTSMDWIWRILFLVGAATGAHSFEVQLVQSGGGVMRPGGSLRLSCAASGFTFDDYGMSWVRQAPGKGLEWVSGINWNGGSTGYADSVRGRFTISRDNAKNSLYLQMNSLRAEDTALYYCARERGYGYHDPHDYWGQGTLVTVSSTREDLKNVFPPEVAVFEPSEAEISHTQKATLVCLATGFYPDHVELSWWVNGKEVHSGVCTDPQPLKEQPALNDSRYCLSSRLRVSATFWQNPRNHFRCQVQFYGLSENDEWTQDRAKPVTQIVSAEAWGRADCGFTSESYQQGVLSATNLSVIGFRILLLKVAGFNLLMTLRLWSS

SEQ ID NO: 13609 - protein, 640 aa, synthetic construct
MALPVTALLLPLALLLHAARPEQKLISEEDLEFQAVVTQPPSASGTPGQRVTISCSGSSSNIGSNTVNWYQQVPGTAPKLLIYSNNQRPSGVPDRFSGSKSGTSASLAISGLQSEDEADYYCAAWDDSLNGWVFGGGTKLTVLLEIQNPDPAVYQLRDSKSSDKSVCLFTDFDSQTNVSQSKDSDVYITDKCVLDMRSMDFKSNSAVAWSNKSDFACANAFNNSIIPEDTFFPSPESSCDVKLVEKSFETDTNLNFQILYEILLGKATLYAVLVSALVLMAMVKRKDSRGRAKRSGSGVKQTLNFDLLKLAGDVESNPGPTSMDWIWRILFLVGAATGAHSFEQMQLVQSGAEVKEPGESLRISCKGSGYSFTNFWISWVRQMPGKGLEWMGRVDPGYSYSTYSPSFQGHVTISADKSTSTAYLQWNSLKASDTAMYYCARVQYSGYYDWFDPWGQGTLVTVSSTREDLKNVFPPEVAVFEPSEAEISHTQKATLVCLATGFYPDHVELSWWVNGKEVHSGVCTDPQPLKEQPALNDSRYCLSSRLRVSATFWQNPRNHFRCQVQFYGLSENDEWTQDRAKPVTQIVSAEAWGRADCGFTSESYQQGVLSATNLSVIGFRILLLKVAGFNLLMTLRLWSS

SEQ ID NO: 13610 - protein, 634 aa, synthetic construct
MALPVTALLLPLALLLHAARPEQKLISEEDLEFDIQMTQSPSTLSASVGDRVTITCRASQNINKWLAWYQQRPGKAPQLLIYKASSLESGVPSRFSGSGSGTEYTLTISSLQPDDFATYYCQQYNSYATFGQGTKVEIKRLEIQNPDPAVYQLRDSKSSDKSVCLFTDFDSQTNVSQSKDSDVYITDKCVLDMRSMDFKSNSAVAWSNKSDFACANAFNNSIIPEDTFFPSPESSCDVKLVEKSFETDTNLNFQILYEILLGKATLYAVLVSALVLMAMVKRKDSRGRAKRSGSGVKQTLNFDLLKLAGDVESNPGPTSMDWIWRILFLVGAATGAHSFEQVQLVQSGAEVKKPGESLKISCKGSGYNFSNKWIGWVRQLPGRGLEWIAIIYPGYSDITYSPSFQGRVTISADTSINTAYLHWHSLKASDTAMYYCVRHTALAGFDYWGLGTLVTVSSTREDLKNVFPPEVAVFEPSEAEISHTQKATLVCLATGFYPDHVELSWWVNGKEVHSGVCTDPQPLKEQPALNDSRYCLSSRLRVSATFWQNPRNHFRCQVQFYGLSENDEWTQDRAKPVTQIVSAEAWGRADCGFTSESYQQGVLSATNLSVIGFRILLLKVAGFNLLMTLRLWSS

SEQ ID NO: 13611 - protein, 626 aa, synthetic construct
MALPVTALLLPLALLLHAARPDIVLTQSPASLAVSLGQRATISCRASESVDNYGNTFMHWYQQKPGQPPKLLIYRASNLESGIPARFSGSGSRTDFTLTINPVEADDVATYYCQQSNEDPPTFGAGTKLELKLEIQNPDPAVYQLRDSKSSDKSVCLFTDFDSQTNVSQSKDSDVYITDKCVLDMRSMDFKSNSAVAWSNKSDFACANAFNNSIIPEDTFFPSPESSCDVKLVEKSFETDTNLNFQILYEILLGKATLYAVLVSALVLMAMVKRKDSRGRAKRSGSGVKQTLNFDLLKLAGDVESNPGPTSMDWIWRILFLVGAATGAHSFEQIQLVQSGPELKKPGETVKISCKASGYIFTNYGMNWVKQAPGKSFKWMGWINTYTGESTYSADFKGRFAFSLETSASTAYLHINDLKNEDTATYFCARSGGYDPMDYWGQGTSVTVSSTREDLKNVFPPEVAVFEPSEAEISHTQKATLVCLATGFYPDHVELSWWVNGKEVHSGVCTDPQPLKEQPALNDSRYCLSSRLRVSATFWQNPRNHFRCQVQFYGLSENDEWTQDRAKPVTQIVSAEAWGRADCGFTSESYQQGVLSATNLSVIGFRILLLKVAGFNLLMTLRLWSS

SEQ ID NO: 13612 - protein, 625 aa, synthetic construct
MALPVTALLLPLALLLHAARPDEIVLTQSPGTLSLSPGERATLSCRASQSVSNTYLAWYHQRPGQAPRLLIYGASSRATGIPDRFSGSGSGTDFALTISSLEPEDFAVYYCQQYSNSWTFGQGTKVEIKRLEIQNPDPAVYQLRDSKSSDKSVCLFTDFDSQTNVSQSKDSDVYITDKCVLDMRSMDFKSNSAVAWSNKSDFACANAFNNSIIPEDTFFPSPESSCDVKLVEKSFETDTNLNFQILYEILLGKATLYAVLVSALVLMAMVKRKDSRGRAKRSGSGVKQTLNFDLLKLAGDVESNPGPTSMDWIWRILFLVGAATGAHSFEQVQLVESGGGVVQPGRSLRLSCAASGFTFSSYDMHWVRQAPGKGLEWVAVISYDGTNEYYADSVKGRFTISRDTSKNTLYLQMNSLRAEDTAVYYCARERYFDWSFDYWGQGTLVSVSSTREDLKNVFPPEVAVFEPSEAEISHTQKATLVCLATGFYPDHVELSWWVNGKEVHSGVCTDPQPLKEQPALNDSRYCLSSRLRVSATFWQNPRNHFRCQVQFYGLSENDEWTQDRAKPVTQIVSAEAWGRADCGFTSESYQQGVLSATNLSVIGFRILLLKVAGFNLLMTLRLWSS

SEQ ID NO: 13613 - protein, 624 aa, synthetic construct
MALPVTALLLPLALLLHAARPDELTQDPAVSVALGQTVRITCQGDSLRSNYANWYQQKPGQAPVLVIYGQNNRPSGIPDRFSGSSSGNTASLTITGAQAADEADYYCDSRVSTGNHVVFGGGTKLTVLGQLEIQNPDPAVYQLRDSKSSDKSVCLFTDFDSQTNVSQSKDSDVYITDKCVLDMRSMDFKSNSAVAWSNKSDFACANAFNNSIIPEDTFFPSPESSCDVKLVEKSFETDTNLNFQILYEILLGKATLYAVLVSALVLMAMVKRKDSRGRAKRSGSGVKQTLNFDLLKLAGDVESNPGPTSMDWIWRILFLVGAATGAHSFEEVQLVQSGAEVKKPGASVKVSCKASGYTFTSYAMHWVRQAPGQRLEWMGWINAGNGNTKYSQKFQGRVTITRDTSASTAYMELSSLRSEDTAVYYCARDISYGSFDYWGQGTLVTVSSTREDLKNVFPPEVAVFEPSEAEISHTQKATLVCLATGFYPDHVELSWWVNGKEVHSGVCTDPQPLKEQPALNDSRYCLSSRLRVSATFWQNPRNHFRCQVQFYGLSENDEWTQDRAKPVTQIVSAEAWGRADCGFTSESYQQGVLSATNLSVIGFRILLLKVAGFNLLMTLRLWSS

SEQ ID NO: 13614 - protein, 626 aa, synthetic construct
MALPVTALLLPLALLLHAARPDDIVLTQTPATLSVTPGDSVSLSCRASQSISNNLHWYQQKSHESPRLLIKNASQSISGIPSKFSGSGSGTDFTLRINSVETEDFGMYFCQQSNSWPYTFGSGTKLEIKLEIQNPDPAVYQLRDSKSSDKSVCLFTDFDSQTNVSQSKDSDVYITDKCVLDMRSMDFKSNSAVAWSNKSDFACANAFNNSIIPEDTFFPSPESSCDVKLVEKSFETDTNLNFQILYEILLGKATLYAVLVSALVLMAMVKRKDSRGRAKRSGSGVKQTLNFDLLKLAGDVESNPGPTSMDWIWRILFLVGAATGAHSFEQVKLQQSGPELVKPGASVKISCKASGYSFTGYYMHWVKQSHGNILDWIGYIYPYNGVSSYNQKFKGKATLTVDKSSSTAYMELRSLTSEDSAVYYCARERGLYQLRAMDYWGQGTSVTVSSTREDLKNVFPPEVAVFEPSEAEISHTQKATLVCLATGFYPDHVELSWWVNGKEVHSGVCTDPQPLKEQPALNDSRYCLSSRLRVSATFWQNPRNHFRCQVQFYGLSENDEWTQDRAKPVTQIVSAEAWGRADCGFTSESYQQGVLSATNLSVIGFRILLLKVAGFNLLMTLRLWSS

SEQ ID NO: 13615 - protein, 617 aa, synthetic construct
MALPVTALLLPLALLLHAARPDDIVMTQTPAIMSASPGQKVTITCSASSSVNYMHWYQQKLGSSPKLWIYDTSKLAPGVPARFSGSGSGTSYSLTISSMEAEDAASYFCHQWSSYPYTFGSGTKLEIKLEIQNPDPAVYQLRDSKSSDKSVCLFTDFDSQTNVSQSKDSDVYITDKCVLDMRSMDFKSNSAVAWSNKSDFACANAFNNSIIPEDTFFPSPESSCDVKLVEKSFETDTNLNFQILYEILLGKATLYAVLVSALVLMAMVKRKDSRGRAKRSGSGVKQTLNFDLLKLAGDVESNPGPTSMDWIWRILFLVGAATGAHSFEEVQLQESGPDLVKPSQSLSLTCTVTGYSITSGYGWHWIRQFPGNKLEWMGYIHYSGSTTYNPSLKSRISISRDTSKNQFFLQLNSVTTEDTATYYCARSLRYWGQGTTLTVSSTREDLKNVFPPEVAVFEPSEAEISHTQKATLVCLATGFYPDHVELSWWVNGKEVHSGVCTDPQPLKEQPALNDSRYCLSSRLRVSATFWQNPRNHFRCQVQFYGLSENDEWTQDRAKPVTQIVSAEAWGRADCGFTSESYQQGVLSATNLSVIGFRILLLKVAGFNLLMTLRLWSS

SEQ ID NO: 13616 - protein, 620 aa, synthetic construct
MALPVTALLLPLALLLHAARPDDIQMTQSPSSLSASVGDRVTITCSATSSISYMHWYQQKPGKAPKGWIYDTSKLAHGVPSRFSGSGSGTDFTLTISSLQPEDFATYYCHQRRSYPFTFGQGTKVEIKLEIQNPDPAVYQLRDSKSSDKSVCLFTDFDSQTNVSQSKDSDVYITDKCVLDMRSMDFKSNSAVAWSNKSDFACANAFNNSIIPEDTFFPSPESSCDVKLVEKSFETDTNLNFQILYEILLGKATLYAVLVSALVLMAMVKRKDSRGRAKRSGSGVKQTLNFDLLKLAGDVESNPGPTSMDWIWRILFLVGAATGAHSFEEVQLVQSGAEVKKPGASVKVSCKASGYTFTNFWIHWVRQAPGQGLEWIGEIDPSDSYTNYNQKFKGRVTITRDTSTSTAYLELSSLRSEDTAVYYCAREITTVDYWGQGTLVTVSSTREDLKNVFPPEVAVFEPSEAEISHTQKATLVCLATGFYPDHVELSWWVNGKEVHSGVCTDPQPLKEQPALNDSRYCLSSRLRVSATFWQNPRNHFRCQVQFYGLSENDEWTQDRAKPVTQIVSAEAWGRADCGFTSESYQQGVLSATNLSVIGFRILLLKVAGFNLLMTLRLWSS

SEQ ID NO: 13617 - protein, 627 aa, synthetic construct
MALPVTALLLPLALLLHAARPDDIQMTQSPSSLSASVGDRVTITCKASQGFNKYVAWYQQKPGKAPKLLIYYTSTLQPGVPSRFSGSGSGRDYTLTISSLQPEDFATYYCLQYGNLLYAFGQGTKVEIKRLEIQNPDPAVYQLRDSKSSDKSVCLFTDFDSQTNVSQSKDSDVYITDKCVLDMRSMDFKSNSAVAWSNKSDFACANAFNNSIIPEDTFFPSPESSCDVKLVEKSFETDTNLNFQILYEILLGKATLYAVLVSALVLMAMVKRKDSRGRAKRSGSGVKQTLNFDLLKLAGDVESNPGPTSMDWIWRILFLVGAATGAHSFEEVQLVQSGAEVKKPGASVKVSCKASGYTFTSYWIGWVRQAPGQGLEWIGDIYPGGGYTNYNEKFKGRVTITRDTSTSTAYLELSSLRSEDTAVYYCARLDGSSYRGAMDSWGQGTLVTVSSTREDLKNVFPPEVAVFEPSEAEISHTQKATLVCLATGFYPDHVELSWWVNGKEVHSGVCTDPQPLKEQPALNDSRYCLSSRLRVSATFWQNPRNHFRCQVQFYGLSENDEWTQDRAKPVTQIVSAEAWGRADCGFTSESYQQGVLSATNLSVIGFRILLLKVAGFNLLMTLRLWSS

SEQ ID NO: 13618 - protein, 623 aa, synthetic construct
MALPVTALLLPLALLLHAARPDDIQMTQSPSSLSASVGDRVTITCRASQDIRYYLNWYQQKPGKAPKLLIYVASSLQSGVPSRFSGSGSGTEFTLTVSSLQPEDFATYYCLQVYSTPRTFGQGTKVEIKLEIQNPDPAVYQLRDSKSSDKSVCLFTDFDSQTNVSQSKDSDVYITDKCVLDMRSMDFKSNSAVAWSNKSDFACANAFNNSIIPEDTFFPSPESSCDVKLVEKSFETDTNLNFQILYEILLGKATLYAVLVSALVLMAMVKRKDSRGRAKRSGSGVKQTLNFDLLKLAGDVESNPGPTSMDWIWRILFLVGAATGAHSFEEVQLVESGGGLAKPGGSLRLSCAASGFRFTFNNYYMDWVRQAPGQGLEWVSRISSSGDPTWYADSVKGRFTISRENAKNTLFLQMNSLRAEDTAVYYCASLTTGSDSWGQGVLVTVSSTREDLKNVFPPEVAVFEPSEAEISHTQKATLVCLATGFYPDHVELSWWVNGKEVHSGVCTDPQPLKEQPALNDSRYCLSSRLRVSATFWQNPRNHFRCQVQFYGLSENDEWTQDRAKPVTQIVSAEAWGRADCGFTSESYQQGVLSATNLSVIGFRILLLKVAGFNLLMTLRLWSS

SEQ ID NO: 13619 - protein, 623 aa, synthetic construct
MALPVTALLLPLALLLHAARPEIVMTQSPATLSVSPGERATLSCRASQSVSRNLAWYQQKPGQAPRLLIYGASTRATGIPARFSGSGSGTEFTLTIGSLQSEDFAVYYCQQYKTWPRTFGQGTNVEIKLEIQNPDPAVYQLRDSKSSDKSVCLFTDFDSQTNVSQSKDSDVYITDKCVLDMRSMDFKSNSAVAWSNKSDFACANAFNNSIIPEDTFFPSPESSCDVKLVEKSFETDTNLNFQILYEILLGKATLYAVLVSALVLMAMVKRKDSRGRAKRSGSGVKQTLNFDLLKLAGDVESNPGPTSMDWIWRILFLVGAATGAHSFEQVQLQQWGAGLLKPSETLSLTCAVFGGSFSGYYWSWIRQPPGKGLEWIGEINHRGNTNDNPSLKSRVTISVDTSKNQFALKLSSVTAADTAVYYCARERGYTYGNFDHWGQGTLVTVSSTREDLKNVFPPEVAVFEPSEAEISHTQKATLVCLATGFYPDHVELSWWVNGKEVHSGVCTDPQPLKEQPALNDSRYCLSSRLRVSATFWQNPRNHFRCQVQFYGLSENDEWTQDRAKPVTQIVSAEAWGRADCGFTSESYQQGVLSATNLSVIGFRILLLKVAGFNLLMTLRLWSS

SEQ ID NO: 13620 - protein, 624 aa, synthetic construct
MALPVTALLLPLALLLHAARPEIVMTPSSATLSVSPGERATLSCRASQSVSRNLAWYQQKPGQAPRLLIYGASTRATGIPARFSGSGSGTEFTLTISSLQSEDFAVYYCHQYSNWMCSFGQGTKLEIKLEIQNPDPAVYQLRDSKSSDKSVCLFTDFDSQTNVSQSKDSDVYITDKCVLDMRSMDFKSNSAVAWSNKSDFACANAFNNSIIPEDTFFPSPESSCDVKLVEKSFETDTNLNFQILYEILLGKATLYAVLVSALVLMAMVKRKDSRGRAKRSGSGVKQTLNFDLLKLAGDVESNPGPTSMDWIWRILFLVGAATGAHSFEEVQLLESGGGLVQPGGSLRLSCAASGFTFSRYAMNWVRQAPGKGLEWVSGISGSGGRTYYADSVKGRFTISRDNSKNTLYLQMNSLRAEDTAVYYCAKDRDFWSGPFDYWGQGTLVTVSSTREDLKNVFPPEVAVFEPSEAEISHTQKATLVCLATGFYPDHVELSWWVNGKEVHSGVCTDPQPLKEQPALNDSRYCLSSRLRVSATFWQNPRNHFRCQVQFYGLSENDEWTQDRAKPVTQIVSAEAWGRADCGFTSESYQQGVLSATNLSVIGFRILLLKVAGFNLLMTLRLWSS

SEQ ID NO: 13621 - protein, 629 aa, synthetic construct
MALPVTALLLPLALLLHAARPDIQMTQSPSSLSASVGDRVTITCKASKNIRSYLAWYQQKPGKAPKLLIYSGSTLHSGVPSRFSGSGSGTDFTLTISSLQPEDFATYYCQQHHEYPLTFGQGTKVEIKRLEIQNPDPAVYQLRDSKSSDKSVCLFTDFDSQTNVSQSKDSDVYITDKCVLDMRSMDFKSNSAVAWSNKSDFACANAFNNSIIPEDTFFPSPESSCDVKLVEKSFETDTNLNFQILYEILLGKATLYAVLVSALVLMAMVKRKDSRGRAKRSGSGVKQTLNFDLLKLAGDVESNPGPTSMDWIWRILFLVGAATGAHSFEQVQLQESGPGLVKPSETLSLTCTVSGYTITSGYDWSWIRQPPGKGLEWIGYINYGGSTNYKPSLGSRVTISVDTSKNQFSLKLSSVTAADTAVYYCARYNEYKSYIYDWYFDFWGQGTLVTVSSTREDLKNVFPPEVAVFEPSEAEISHTQKATLVCLATGFYPDHVELSWWVNGKEVHSGVCTDPQPLKEQPALNDSRYCLSSRLRVSATFWQNPRNHFRCQVQFYGLSENDEWTQDRAKPVTQIVSAEAWGRADCGFTSESYQQGVLSATNLSVIGFRILLLKVAGFNLLMTLRLWSS

SEQ ID NO: 13622 - protein, 631 aa, synthetic construct
MALPVTALLLPLALLLHAARPQSVVTQPPSVSAAPGQKVTISCSGSSSNIGNNYVSWYQQLPGTAPKLLIYDNNKRPSGIPDRFSGSKSGTSATLGITGLQTGDEADYYCGTWDGSLYTMLFGGGTKLTVLLEIQNPDPAVYQLRDSKSSDKSVCLFTDFDSQTNVSQSKDSDVYITDKCVLDMRSMDFKSNSAVAWSNKSDFACANAFNNSIIPEDTFFPSPESSCDVKLVEKSFETDTNLNFQILYEILLGKATLYAVLVSALVLMAMVKRKDSRGRAKRSGSGVKQTLNFDLLKLAGDVESNPGPTSMDWIWRILFLVGAATGAHSFEEVQLVESGGGLVKPGGSLRLSCAASGFTFSNAWMSWVRQAPGKGLEWVGFIRSKAYGGTTEYAASVKGRFTISRDDSKSIAYLQMNNLKTEDTAVYYCARDGLYSSSWYDSDYWGQGTLVTVSSTREDLKNVFPPEVAVFEPSEAEISHTQKATLVCLATGFYPDHVELSWWVNGKEVHSGVCTDPQPLKEQPALNDSRYCLSSRLRVSATFWQNPRNHFRCQVQFYGLSENDEWTQDRAKPVTQIVSAEAWGRADCGFTSESYQQGVLSATNLSVIGFRILLLKVAGFNLLMTLRLWSS

SEQ ID NO: 13623 - protein, 636 aa, synthetic construct
MALPVTALLLPLALLLHAARPQSVLTQPPSVSGAPGQRVTISCTGSSSNIGAGYDVHWYQQLPGTAPKLLIFGNSNRPSGVPDRFSGFKSGTSASLAITGLQAEDEADYFCQSYDSSLSGSGVFGTGTKVTVLGLEIQNPDPAVYQLRDSKSSDKSVCLFTDFDSQTNVSQSKDSDVYITDKCVLDMRSMDFKSNSAVAWSNKSDFACANAFNNSIIPEDTFFPSPESSCDVKLVEKSFETDTNLNFQILYEILLGKATLYAVLVSALVLMAMVKRKDSRGRAKRSGSGVKQTLNFDLLKLAGDVESNPGPTSMDWIWRILFLVGAATGAHSFEQMQLVQSGGGLVQPGRSLRLSCAASGFTFDDYAMHWVRQAPGKGLEWVSGISWNSGSIGYADSVKGRFTISRDNAKNSLYLQMNSLRAEDTALYYCAKDIHSGSYYGLLYYAMDVWGQGTTVTVSSTREDLKNVFPPEVAVFEPSEAEISHTQKATLVCLATGFYPDHVELSWWVNGKEVHSGVCTDPQPLKEQPALNDSRYCLSSRLRVSATFWQNPRNHFRCQVQFYGLSENDEWTQDRAKPVTQIVSAEAWGRADCGFTSESYQQGVLSATNLSVIGFRILLLKVAGFNLLMTLRLWSS

SEQ ID NO: 13624 - protein, 636 aa, synthetic construct
MALPVTALLLPLALLLHAARPLPVLTQPPSASGTPGQRVTISCSGRSSNIGSNSVNWYRQLPGAAPKLLIYSNNQRPPGVPVRFSGSKSGTSASLAISGLQSEDEATYYCATWDDNLNVHYVFGTGTKVTVLGSRLEIQNPDPAVYQLRDSKSSDKSVCLFTDFDSQTNVSQSKDSDVYITDKCVLDMRSMDFKSNSAVAWSNKSDFACANAFNNSIIPEDTFFPSPESSCDVKLVEKSFETDTNLNFQILYEILLGKATLYAVLVSALVLMAMVKRKDSRGRAKRSGSGVKQTLNFDLLKLAGDVESNPGPTSMDWIWRILFLVGAATGAHSFELEMAQVQLVQSGAEVKKPGSSVKVSCKASGGTFSSYAISWVRQAPGQGLEWMGRIIPILGIANYAQKFQGRVTITADKSTSTAYMELSSLRSEDTAVYYCARGGYYSHDMWSEDWGQGTLVTVSSTREDLKNVFPPEVAVFEPSEAEISHTQKATLVCLATGFYPDHVELSWWVNGKEVHSGVCTDPQPLKEQPALNDSRYCLSSRLRVSATFWQNPRNHFRCQVQFYGLSENDEWTQDRAKPVTQIVSAEAWGRADCGFTSESYQQGVLSATNLSVIGFRILLLKVAGFNLLMTLRLWSS

SEQ ID NO: 13625 - protein, 630 aa, synthetic construct
MALPVTALLLPLALLLHAARPDFVMTQSPDSLAVSLGERVTMSCKSSQSLLNSGNQKNYLTWYQQKPGQPPKLLIYWASTRESGVPDRFSGSGSGTDFTLTISSLQAEDVAVYYCQNDYSYPYTFGQGTKLEIKLEIQNPDPAVYQLRDSKSSDKSVCLFTDFDSQTNVSQSKDSDVYITDKCVLDMRSMDFKSNSAVAWSNKSDFACANAFNNSIIPEDTFFPSPESSCDVKLVEKSFETDTNLNFQILYEILLGKATLYAVLVSALVLMAMVKRKDSRGRAKRSGSGVKQTLNFDLLKLAGDVESNPGPTSMDWIWRILFLVGAATGAHSFEEVQLVQSGAELKKPGASVKVSCKASGYTFTDYYMKWVRQAPGQGLEWIGDIIPSNGATFYNQKFKGRVTITVDKSTSTAYMELSSLRSEDTAVYYCARSHLLRASWFAYWGQGTLVTVSSTREDLKNVFPPEVAVFEPSEAEISHTQKATLVCLATGFYPDHVELSWWVNGKEVHSGVCTDPQPLKEQPALNDSRYCLSSRLRVSATFWQNPRNHFRCQVQFYGLSENDEWTQDRAKPVTQIVSAEAWGRADCGFTSESYQQGVLSATNLSVIGFRILLLKVAGFNLLMTLRLWSS

SEQ ID NO: 13626 - protein, 630 aa, synthetic construct
MALPVTALLLPLALLLHAARPDFVMTQSPDSLAVSLGERVTMSCKSSQSLLNSGNQKNYLTWYQQKPGQPPKLLIYWASTRESGVPDRFSGSGSGTDFTLTISSLQAEDVAVYYCQNDYSYPYTFGQGTKLEIKLEIQNPDPAVYQLRDSKSSDKSVCLFTDFDSQTNVSQSKDSDVYITDKCVLDMRSMDFKSNSAVAWSNKSDFACANAFNNSIIPEDTFFPSPESSCDVKLVEKSFETDTNLNFQILYEILLGKATLYAVLVSALVLMAMVKRKDSRGRAKRSGSGVKQTLNFDLLKLAGDVESNPGPTSMDWIWRILFLVGAATGAHSFEQVQLVQSGAELKKPGASVKVSCKASGYTFTDYYMKWVRQAPGQGLEWIGDIIPSNGATFYNQKFKGRVTITVDKSTSTAYMELSSLRSEDTAVYYCARSHLLRASWFAYWGQGTLVTVSSTREDLKNVFPPEVAVFEPSEAEISHTQKATLVCLATGFYPDHVELSWWVNGKEVHSGVCTDPQPLKEQPALNDSRYCLSSRLRVSATFWQNPRNHFRCQVQFYGLSENDEWTQDRAKPVTQIVSAEAWGRADCGFTSESYQQGVLSATNLSVIGFRILLLKVAGFNLLMTLRLWSS

SEQ ID NO: 13627 - protein, 620 aa, synthetic construct
MALPVTALLLPLALLLHAARPDVQITQSPSYLAASPGETITINCRASKSISKDLAWYQEKPGKTNKLLIYSGSTLQSGIPSRFSGSGSGTDFTLTISSLEPEDFAMYYCQQHNKYPYTFGGGTKLEIKRLEIQNPDPAVYQLRDSKSSDKSVCLFTDFDSQTNVSQSKDSDVYITDKCVLDMRSMDFKSNSAVAWSNKSDFACANAFNNSIIPEDTFFPSPESSCDVKLVEKSFETDTNLNFQILYEILLGKATLYAVLVSALVLMAMVKRKDSRGRAKRSGSGVKQTLNFDLLKLAGDVESNPGPTSMDWIWRILFLVGAATGAHSFEQVQLQQPGAELVRPGASVKLSCKASGYTFTSYWMNWVKQRPDQGLEWIGRIDPYDSETHYNQKFKDKAILTVDKSSSTAYMQLSSLTSEDSAVYYCARGNWDDYWGQGTTLTVSSTREDLKNVFPPEVAVFEPSEAEISHTQKATLVCLATGFYPDHVELSWWVNGKEVHSGVCTDPQPLKEQPALNDSRYCLSSRLRVSATFWQNPRNHFRCQVQFYGLSENDEWTQDRAKPVTQIVSAEAWGRADCGFTSESYQQGVLSATNLSVIGFRILLLKVAGFNLLMTLRLWSS

SEQ ID NO: 13628 - protein, 622 aa, synthetic construct
MALPVTALLLPLALLLHAARPEIVLTQSPTSMTASPGEQVTITCRASSSINYMHWYQQKPGASPRPWIYETSKLASGVPDRFSGSASGTSYSLTINNMEAEDAATYYCQQWNYPSWTFGGGTKLELKLEIQNPDPAVYQLRDSKSSDKSVCLFTDFDSQTNVSQSKDSDVYITDKCVLDMRSMDFKSNSAVAWSNKSDFACANAFNNSIIPEDTFFPSPESSCDVKLVEKSFETDTNLNFQILYEILLGKATLYAVLVSALVLMAMVKRKDSRGRAKRSGSGVKQTLNFDLLKLAGDVESNPGPTSMDWIWRILFLVGAATGAHSFEEVQLVESGGGLVQPGRSLKLSCAASGFTFSDYNMAWVRQAPKKGLEWVATILYDGGRTYYRGSVKGRFTISRDNAKSTLYLRMDSLRSEDTATYYCATHSRGTDYFDYWGQGVMVTVSSTREDLKNVFPPEVAVFEPSEAEISHTQKATLVCLATGFYPDHVELSWWVNGKEVHSGVCTDPQPLKEQPALNDSRYCLSSRLRVSATFWQNPRNHFRCQVQFYGLSENDEWTQDRAKPVTQIVSAEAWGRADCGFTSESYQQGVLSATNLSVIGFRILLLKVAGFNLLMTLRLWSS

SEQ ID NO: 13629 - protein, 631 aa, synthetic construct
MALPVTALLLPLALLLHAARPDIVMTQSPSSLAVSEGETVTINCKSSQSFLSSGDGKNYVAWYQYKPGQSPKLLIYWASTRQSGVPDRFIGSGSGTDFTLTISTVQAEDLAIYYCQQYYDTPLTFGSGTKLEIKLEIQNPDPAVYQLRDSKSSDKSVCLFTDFDSQTNVSQSKDSDVYITDKCVLDMRSMDFKSNSAVAWSNKSDFACANAFNNSIIPEDTFFPSPESSCDVKLVEKSFETDTNLNFQILYEILLGKATLYAVLVSALVLMAMVKRKDSRGRAKRSGSGVKQTLNFDLLKLAGDVESNPGPTSMDWIWRILFLVGAATGAHSFEEVKLQESGPSLVQSSQTLSLTCTVSGFSLTSYHIHWVRQTPGKGLEWMGVMWSDGDTSYNSALKSRLSISRDTSQSQVFLKMNSLQTEDTATYYCARGYYSSYLYLWFAYWGQGTLVTVSSTREDLKNVFPPEVAVFEPSEAEISHTQKATLVCLATGFYPDHVELSWWVNGKEVHSGVCTDPQPLKEQPALNDSRYCLSSRLRVSATFWQNPRNHFRCQVQFYGLSENDEWTQDRAKPVTQIVSAEAWGRADCGFTSESYQQGVLSATNLSVIGFRILLLKVAGFNLLMTLRLWSS

SEQ ID NO: 13630 - protein, 635 aa, synthetic construct
MALPVTALLLPLALLLHAARPDVLMTQTPVSLPVSLGGQVSISCRSSQSLVHSDGDTYLHWYLQKPGQSPQLLIYRVSNRFSGVPDRFSGSGSGTDFTLKISRVEPEDLGLYYCLQTTHFPPWTFGGGTKLEMKLEIQNPDPAVYQLRDSKSSDKSVCLFTDFDSQTNVSQSKDSDVYITDKCVLDMRSMDFKSNSAVAWSNKSDFACANAFNNSIIPEDTFFPSPESSCDVKLVEKSFETDTNLNFQILYEILLGKATLYAVLVSALVLMAMVKRKDSRGRAKRSGSGVKQTLNFDLLKLAGDVESNPGPTSMDWIWRILFLVGAATGAHSFEQVQLQQSGPELRRPGSSVRLSCKASGYRIKDFLIHWIKNRPEHGLEWIGWIDPEDGETKYAQKFQTKATLTADTSSNTAYMQLSSLTSEDTATYFCARWGDVYYGLMRGHVMDAWGQGTSVTVSSTREDLKNVFPPEVAVFEPSEAEISHTQKATLVCLATGFYPDHVELSWWVNGKEVHSGVCTDPQPLKEQPALNDSRYCLSSRLRVSATFWQNPRNHFRCQVQFYGLSENDEWTQDRAKPVTQIVSAEAWGRADCGFTSESYQQGVLSATNLSVIGFRILLLKVAGFNLLMTLRLWSS

SEQ ID NO: 13631 - protein, 630 aa, synthetic construct
MALPVTALLLPLALLLHAARPDIVMTQSPATLSLSPGERATLSCRSSKSLQNVNGNTYLYWFQQKPGQSPQLLIYRMSNLNSGVPDRFSGSGSGTEFTLTISSLEPEDFAVYYCMQHLEYPITFGAGTKLEIKLEIQNPDPAVYQLRDSKSSDKSVCLFTDFDSQTNVSQSKDSDVYITDKCVLDMRSMDFKSNSAVAWSNKSDFACANAFNNSIIPEDTFFPSPESSCDVKLVEKSFETDTNLNFQILYEILLGKATLYAVLVSALVLMAMVKRKDSRGRAKRSGSGVKQTLNFDLLKLAGDVESNPGPTSMDWIWRILFLVGAATGAHSFEEVQLVESGGGLVKPGGSLKLSCAASGYTFTSYVMHWVRQAPGKGLEWIGYINPYNDGTKYNEKFQGRVTISSDKSISTAYMELSSLRSEDTAMYYCARGTYYYGTRVFDYWGQGTLVTVSSTREDLKNVFPPEVAVFEPSEAEISHTQKATLVCLATGFYPDHVELSWWVNGKEVHSGVCTDPQPLKEQPALNDSRYCLSSRLRVSATFWQNPRNHFRCQVQFYGLSENDEWTQDRAKPVTQIVSAEAWGRADCGFTSESYQQGVLSATNLSVIGFRILLLKVAGFNLLMTLRLWSS

SEQ ID NO: 13632 - protein, 626 aa, synthetic construct
MALPVTALLLPLALLLHAARPDIQMTQSPSSLSASVGDRVTITCKASDHINNWLAWYQQKPGQAPKLLIYGATTLETGVPSRFSGSGSGTDYTLTISSLQPEDFATYYCQQSWNTPWTFGQGTKLEIKRLEIQNPDPAVYQLRDSKSSDKSVCLFTDFDSQTNVSQSKDSDVYITDKCVLDMRSMDFKSNSAVAWSNKSDFACANAFNNSIIPEDTFFPSPESSCDVKLVEKSFETDTNLNFQILYEILLGKATLYAVLVSALVLMAMVKRKDSRGRAKRSGSGVKQTLNFDLLKLAGDVESNPGPTSMDWIWRILFLVGAATGAHSFEQVQLQQPGAELVKPGASVKMSCKASGYAFSSYWINWMKQKPGQGLEWIGQIYPGDGDTNYNGKFKGRATLTADTSSSTAYMQLSSLTSEDSAVYFCARSITTVVGCAMDYWGQGTSVTVSSTREDLKNVFPPEVAVFEPSEAEISHTQKATLVCLATGFYPDHVELSWWVNGKEVHSGVCTDPQPLKEQPALNDSRYCLSSRLRVSATFWQNPRNHFRCQVQFYGLSENDEWTQDRAKPVTQIVSAEAWGRADCGFTSESYQQGVLSATNLSVIGFRILLLKVAGFNLLMTLRLWSS

SEQ ID NO: 13633 - protein, 628 aa, synthetic construct
MALPVTALLLPLALLLHAARPQIVLSQSPAILSASPGEKVTMTCRASSSVSYMHWYQQKPGSSPKPWIYATSNLASGVPARFSGSGSGTSYSFTISRVEAEDAATYYCQQWTFNPPTFGGGTRLEIKRTVAALEIQNPDPAVYQLRDSKSSDKSVCLFTDFDSQTNVSQSKDSDVYITDKCVLDMRSMDFKSNSAVAWSNKSDFACANAFNNSIIPEDTFFPSPESSCDVKLVEKSFETDTNLNFQILYEILLGKATLYAVLVSALVLMAMVKRKDSRGRAKRSGSGVKQTLNFDLLKLAGDVESNPGPTSMDWIWRILFLVGAATGAHSFEQAYLQQSGAELVRPGASVKMSCKASGYTFTSYNMHWVKQTPRQGLEWIGGIYPGNGDTSYNQKFKGKATLTVGKSSSTAYMQLSSLTSEDSAVYFCARYDYNYAMDYWGQGTSVTVSSASTREDLKNVFPPEVAVFEPSEAEISHTQKATLVCLATGFYPDHVELSWWVNGKEVHSGVCTDPQPLKEQPALNDSRYCLSSRLRVSATFWQNPRNHFRCQVQFYGLSENDEWTQDRAKPVTQIVSAEAWGRADCGFTSESYQQGVLSATNLSVIGFRILLLKVAGFNLLMTLRLWSS

SEQ ID NO: 13634 - protein, 626 aa, synthetic construct
MALPVTALLLPLALLLHAARPEIVLTQSPATLSLSPGERATLSCRASQSVSSYLAWYQQKPGQAPRLLIYDASNRATGIPARFSGSGSGTDFTLTISSLEPEDFAVYYCQQRSNWPITFGQGTRLEIKLEIQNPDPAVYQLRDSKSSDKSVCLFTDFDSQTNVSQSKDSDVYITDKCVLDMRSMDFKSNSAVAWSNKSDFACANAFNNSIIPEDTFFPSPESSCDVKLVEKSFETDTNLNFQILYEILLGKATLYAVLVSALVLMAMVKRKDSRGRAKRSGSGVKQTLNFDLLKLAGDVESNPGPTSMDWIWRILFLVGAATGAHSFEEVQLVESGGGLVQPDRSLRLSCAASGFTFHDYAMHWVRQAPGKGLEWVSTISWNSGTIGYADSVKGRFTISRDNAKNSLYLQMNSLRAEDTALYYCAKDIQYGNYYYGMDVWGQGTTVTVSSTREDLKNVFPPEVAVFEPSEAEISHTQKATLVCLATGFYPDHVELSWWVNGKEVHSGVCTDPQPLKEQPALNDSRYCLSSRLRVSATFWQNPRNHFRCQVQFYGLSENDEWTQDRAKPVTQIVSAEAWGRADCGFTSESYQQGVLSATNLSVIGFRILLLKVAGFNLLMTLRLWSS

SEQ ID NO: 13635 - protein, 621 aa, synthetic construct
MALPVTALLLPLALLLHAARPDIQMTQSPSSLSASVGDRVTINCKASQDINSYLSWFQQKPGKAPKTLIYRANRLVDGVPSRFSGSGSGQDYTLTISSLQPEDFATYYCLQYDEFPLTFGGGTKVEIKLEIQNPDPAVYQLRDSKSSDKSVCLFTDFDSQTNVSQSKDSDVYITDKCVLDMRSMDFKSNSAVAWSNKSDFACANAFNNSIIPEDTFFPSPESSCDVKLVEKSFETDTNLNFQILYEILLGKATLYAVLVSALVLMAMVKRKDSRGRAKRSGSGVKQTLNFDLLKLAGDVESNPGPTSMDWIWRILFLVGAATGAHSFEQVQLVQSGAEVKKPGASVKVSCKASGYTFTNYDINWVRQAPGQGLEWIGWIYPGDGSTKYNEKFKAKATLTADTSTSTAYMELRSLRSDDTAVYYCASGYEDAMDYWGQGTTVTVSSTREDLKNVFPPEVAVFEPSEAEISHTQKATLVCLATGFYPDHVELSWWVNGKEVHSGVCTDPQPLKEQPALNDSRYCLSSRLRVSATFWQNPRNHFRCQVQFYGLSENDEWTQDRAKPVTQIVSAEAWGRADCGFTSESYQQGVLSATNLSVIGFRILLLKVAGFNLLMTLRLWSS

SEQ ID NO: 13636 - protein, 623 aa, synthetic construct
MALPVTALLLPLALLLHAARPDIVMTQTPLSLSVTPGQPASISCKSSQSLLDGDGKTYLNWLLQKPGQSPQRLIYLVSKLDSGVPDRFSGSGSGTDFTLKISRVEAEDVGVYYCWQGTHFPRTFGQGTKLEIKLEIQNPDPAVYQLRDSKSSDKSVCLFTDFDSQTNVSQSKDSDVYITDKCVLDMRSMDFKSNSAVAWSNKSDFACANAFNNSIIPEDTFFPSPESSCDVKLVEKSFETDTNLNFQILYEILLGKATLYAVLVSALVLMAMVKRKDSRGRAKRSGSGVKQTLNFDLLKLAGDVESNPGPTSMDWIWRILFLVGAATGAHSFEQVQLVQSGAEVKKPGASVKVSCKASGYTFKDTYIHWVRQAPGQGLEWMGRIDPANGNTKYDPKFQGRVTMTRDTSISTAYMELSRLRSDDTAVYYCARRGGVDWGQGTLVTVSSTREDLKNVFPPEVAVFEPSEAEISHTQKATLVCLATGFYPDHVELSWWVNGKEVHSGVCTDPQPLKEQPALNDSRYCLSSRLRVSATFWQNPRNHFRCQVQFYGLSENDEWTQDRAKPVTQIVSAEAWGRADCGFTSESYQQGVLSATNLSVIGFRILLLKVAGFNLLMTLRLWSS

SEQ ID NO: 13637 - protein, 624 aa, synthetic construct
MALPVTALLLPLALLLHAARPDIQMTQSPSSLSASVGDRVTITCKASQDVSTAVAWFQQKPGKAPKLLIYSPSYRYTGVPSRFSGSGSGTDFTLTISSLQPEDFTYYCQQLYSTPYTFGQGTKVEIKLEIQNPDPAVYQLRDSKSSDKSVCLFTDFDSQTNVSQSKDSDVYITDKCVLDMRSMDFKSNSAVAWSNKSDFACANAFNNSIIPEDTFFPSPESSCDVKLVEKSFETDTNLNFQILYEILLGKATLYAVLVSALVLMAMVKRKDSRGRAKRSGSGVKQTLNFDLLKLAGDVESNPGPTSMDWIWRILFLVGAATGAHSFEEVQLVQSGAEVKKPGASVKVSCKASGYTFTDYYLDVVVRQAPGQGLEWIGRVNPYNGGTIYNQKFKGRVTLTRDTSTSTAYLELSSLRSEDTAVYYCARDHYRYDPLLDYWGQGTLVTVSSTREDLKNVFPPEVAVFEPSEAEISHTQKATLVCLATGFYPDHVELSWWVNGKEVHSGVCTDPQPLKEQPALNDSRYCLSSRLRVSATFWQNPRNHFRCQVQFYGLSENDEWTQDRAKPVTQIVSAEAWGRADCGFTSESYQQGVLSATNLSVIGFRILLLKVAGFNLLMTLRLWSS

SEQ ID NO: 13638 - protein, 630 aa, synthetic construct
MALPVTALLLPLALLLHAARPDIQMTQSPSSLSASVGDRVTITCRASQSVSTSSYNYMHWYQQKPGKPPKLLIKYASNLESGVPSRFSGSGSGTDFTLTISSLQPEDFATYYCQHSWEIPLTFGQGTKVEIKLEIQNPDPAVYQLRDSKSSDKSVCLFTDFDSQTNVSQSKDSDVYITDKCVLDMRSMDFKSNSAVAWSNKSDFACANAFNNSIIPEDTFFPSPESSCDVKLVEKSFETDTNLNFQILYEILLGKATLYAVLVSALVLMAMVKRKDSRGRAKRSGSGVKQTLNFDLLKLAGDVESNPGPTSMDWIWRILFLVGAATGAHSFEEVQLVQSGAEVKKPGASVKVSCKASGYSFTDYYMHWVRQAPGQGLEWIGRINPYNGAAFYSQNFKDRVTLTVDTSTSTAYLELSSLRSEDTAVYYCAIERGADLEGYAMDYWGQGTLVTVSSTREDLKNVFPPEVAVFEPSEAEISHTQKATLVCLATGFYPDHVELSWWVNGKEVHSGVCTDPQPLKEQPALNDSRYCLSSRLRVSATFWQNPRNHFRCQVQFYGLSENDEWTQDRAKPVTQIVSAEAWGRADCGFTSESYQQGVLSATNLSVIGFRILLLKVAGFNLLMTLRLWSS

SEQ ID NO: 13639 - protein, 628 aa, synthetic construct
MALPVTALLLPLALLLHAARPEIVLTQSPATLSASPGERVTLTCRASSNVISSYVHWYQQKPGSSPRLFLYSTSNLASGVPSRFSGSGSGTDFTFTISSLEAEDAATYYCQQYSGYPLTFGQGTRLEIKLEIQNPDPAVYQLRDSKSSDKSVCLFTDFDSQTNVSQSKDSDVYITDKCVLDMRSMDFKSNSAVAWSNKSDFACANAFNNSIIPEDTFFPSPESSCDVKLVEKSFETDTNLNFQILYEILLGKATLYAVLVSALVLMAMVKRKDSRGRAKRSGSGVKQTLNFDLLKLAGDVESNPGPTSMDWIWRILFLVGAATGAHSFEQVQLQESGPGLVKPSETLSLTCAVSGYSITSAYYWNWIRQPPGKGLEWIGYISYDGRNNYNPSLKNRITINPDTSKNQFSLQLNSVTPEDTAVYYCAREGDYDVGNYYAMDYWGQGTLVTVSSTREDLKNVFPPEVAVFEPSEAEISHTQKATLVCLATGFYPDHVELSWWVNGKEVHSGVCTDPQPLKEQPALNDSRYCLSSRLRVSATFWQNPRNHFRCQVQFYGLSENDEWTQDRAKPVTQIVSAEAWGRADCGFTSESYQQGVLSATNLSVIGFRILLLKVAGFNLLMTLRLWSS

SEQ ID NO: 13640 - protein, 628 aa, synthetic construct
MALPVTALLLPLALLLHAARPEIVLTQSPATLSLSPGERATLSCRASSNVISSYVHWYQQKPGQAPRLLIYSTSNLASGIPARFSGSGSGTDFTLTISSLEPEDFAVYYCQQYSGYPLTFGQGTRLEIKLEIQNPDPAVYQLRDSKSSDKSVCLFTDFDSQTNVSQSKDSDVYITDKCVLDMRSMDFKSNSAVAWSNKSDFACANAFNNSIIPEDTFFPSPESSCDVKLVEKSFETDTNLNFQILYEILLGKATLYAVLVSALVLMAMVKRKDSRGRAKRSGSGVKQTLNFDLLKLAGDVESNPGPTSMDWIWRILFLVGAATGAHSFEEVQLVESGGGLVQPGRSLRLSCAASGYSITSAYYWNWVRQAPGKGLEWVSYISYDGRNNYNPSLKNRFTISRDNAKKSLYLQMNSLRAEDTALYYCAKEGDYDVGNYYAMDYWGQGTTVTVSSTREDLKNVFPPEVAVFEPSEAEISHTQKATLVCLATGFYPDHVELSWWVNGKEVHSGVCTDPQPLKEQPALNDSRYCLSSRLRVSATFWQNPRNHFRCQVQFYGLSENDEWTQDRAKPVTQIVSAEAWGRADCGFTSESYQQGVLSATNLSVIGFRILLLKVAGFNLLMTLRLWSS

SEQ ID NO: 13641 - protein, 627 aa, synthetic construct
MALPVTALLLPLALLLHAARPDVVMTQTPLSLPVSLGDQASISCRSSQSLVHSNGNTYLRWYLQKPGQSPKVLIYKVSNRVSGVPDRFSGSGSGTDFTLKINRVEAEDLGVYFCSQSTHVPWTFGGGTKLEIKLEIQNPDPAVYQLRDSKSSDKSVCLFTDFDSQTNVSQSKDSDVYITDKCVLDMRSMDFKSNSAVAWSNKSDFACANAFNNSIIPEDTFFPSPESSCDVKLVEKSFETDTNLNFQILYEILLGKATLYAVLVSALVLMAMVKRKDSRGRAKRSGSGVKQTLNFDLLKLAGDVESNPGPTSMDWIWRILFLVGAATGAHSFEGVKLDETGGGLVQPGGAMKLSCVTSGFTFGHYWMNWVRQSPEKGLEWVAQFRNKPYNYETYYSDSVKGRFTISRDDSKSSVYLQMNNLRVEDTGIYYCTGASYGMEYLGQGTSVTVSTTREDLKNVFPPEVAVFEPSEAEISHTQKATLVCLATGFYPDHVELSWWVNGKEVHSGVCTDPQPLKEQPALNDSRYCLSSRLRVSATFWQNPRNHFRCQVQFYGLSENDEWTQDRAKPVTQIVSAEAWGRADCGFTSESYQQGVLSATNLSVIGFRILLLKVAGFNLLMTLRLWSS

SEQ ID NO: 13642 - protein, 633 aa, synthetic construct
MALPVTALLLPLALLLHAARPQVQLVESGGNLVQPGGSLRLSCAASGFTFGSFSMSWVRQAPGGGLEWVAGLSARSSLTHYADSVKGRFTISRDNAKNSVYLQMNSLRVEDTAVYYCARRSYDSSGYWGHFYSYMDVWGQGTLVTVSLEIQNPDPAVYQLRDSKSSDKSVCLFTDFDSQTNVSQSKDSDVYITDKCVLDMRSMDFKSNSAVAWSNKSDFACANAFNNSIIPEDTFFPSPESSCDVKLVEKSFETDTNLNFQILYEILLGKATLYAVLVSALVLMAMVKRKDSRGRAKRSGSGVKQTLNFDLLKLAGDVESNPGPTSMDWIWRILFLVGAATGAHSFESVLTQPSSVSAAPGQKVTISCSGSTSNIGNNYVSWYQQHPGKAPKLMIYDVSKRPSGVPDRFSGSKSGNSASLDISGLQSEDEADYYCAAWDDSLSEFLFGTGTKLTVLGTREDLKNVFPPEVAVFEPSEAEISHTQKATLVCLATGFYPDHVELSWWVNGKEVHSGVCTDPQPLKEQPALNDSRYCLSSRLRVSATFWQNPRNHFRCQVQFYGLSENDEWTQDRAKPVTQIVSAEAWGRADCGFTSESYQQGVLSATNLSVIGFRILLLKVAGFNLLMTLRLWSS

SEQ ID NO: 13643 - protein, 628 aa, synthetic construct
MALPVTALLLPLALLLHAARPDVVMTQSPSSLSASVGDRVTITCQSSLDISHYLNWYQQKPGKAPKLLIYDASNLETGVPSRFSGSGSGTHFTFTISSLQPEDFATYYCQQYDNLPLTFGGGTKLEIKRLEIQNPDPAVYQLRDSKSSDKSVCLFTDFDSQTNVSQSKDSDVYITDKCVLDMRSMDFKSNSAVAWSNKSDFACANAFNNSIIPEDTFFPSPESSCDVKLVEKSFETDTNLNFQILYEILLGKATLYAVLVSALVLMAMVKRKDSRGRAKRSGSGVKQTLNFDLLKLAGDVESNPGPTSMDWIWRILFLVGAATGAHSFEQVQLVQSGGGVVQPGGSLRVSCAASGVTLSDYGMHWVRQAPGKGLEWVAFIRNDGSDKYYADSVKGRFTISRDNSEKTVSLQMSSLRAEDTAVYYCAKNGESGPLDYWYLDLWGRGTLVTVSSTREDLKNVFPPEVAVFEPSEAEISHTQKATLVCLATGFYPDHVELSWWVNGKEVHSGVCTDPQPLKEQPALNDSRYCLSSRLRVSATFWQNPRNHFRCQVQFYGLSENDEWTQDRAKPVTQIVSAEAWGRADCGFTSESYQQGVLSATNLSVIGFRILLLKVAGFNLLMTLRLWSS

SEQ ID NO: 13644 - protein, 632 aa, synthetic construct
MALPVTALLLPLALLLHAARPSYELTQPPSVSGTPGQRVAISCSGSSSNIGTRMVTWYQHVPGTAPKLLIFNNNQRPSGVPDRFSASKSGTSASLAIIGLQSDDEADYYCATWDDNVKSYVFGTGTKVTVLGSRLEIQNPDPAVYQLRDSKSSDKSVCLFTDFDSQTNVSQSKDSDVYITDKCVLDMRSMDFKSNSAVAWSNKSDFACANAFNNSIIPEDTFFPSPESSCDVKLVEKSFETDTNLNFQILYEILLGKATLYAVLVSALVLMAMVKRKDSRGRAKRSGSGVKQTLNFDLLKLAGDVESNPGPTSMDWIWRILFLVGAATGAHSFELEMAQVQLQQWGAGLLKPSETLSLTCAVYGGSFSGYYWSWIRQPPGKGLEWIGEINHSGSTNYNPSLKSRVTISVDTSKNQFSLKLSSVTAADTAVYYCARAPQSWYVGDVWGQGTLVTVSSTREDLKNVFPPEVAVFEPSEAEISHTQKATLVCLATGFYPDHVELSWWVNGKEVHSGVCTDPQPLKEQPALNDSRYCLSSRLRVSATFWQNPRNHFRCQVQFYGLSENDEWTQDRAKPVTQIVSAEAWGRADCGFTSESYQQGVLSATNLSVIGFRILLLKVAGFNLLMTLRLWSS

SEQ ID NO: 13645 - protein, 629 aa, synthetic construct
MALPVTALLLPLALLLHAARPQSVLTQPPSLSVAPGKTASITCGGNNIGMKSVHWYQQRPGQAPVLVIYYDSDRPSGIPGRFSGSNSGNTATLTISRVEAGDEADYYCQVWDTTGDHPGYVFGTGTKVTVLLEIQNPDPAVYQLRDSKSSDKSVCLFTDFDSQTNVSQSKDSDVYITDKCVLDMRSMDFKSNSAVAWSNKSDFACANAFNNSIIPEDTFFPSPESSCDVKLVEKSFETDTNLNFQILYEILLGKATLYAVLVSALVLMAMVKRKDSRGRAKRSGSGVKQTLNFDLLKLAGDVESNPGPTSMDWIWRILFLVGAATGAHSFEQVQLVQSGAEVKKPGSSVKVSCKASGGTFSSYAISWVRQAPGQGLEWMGGIIPIFGTANYAQKFQGRVTITADESTSTAYMELSSLRSEDTAVYYCARGVYGYSGSAPYDEWGQGTLVTVSSTREDLKNVFPPEVAVFEPSEAEISHTQKATLVCLATGFYPDHVELSWWVNGKEVHSGVCTDPQPLKEQPALNDSRYCLSSRLRVSATFWQNPRNHFRCQVQFYGLSENDEWTQDRAKPVTQIVSAEAWGRADCGFTSESYQQGVLSATNLSVIGFRILLLKVAGFNLLMTLRLWSS

SEQ ID NO: 13646 - protein, 627 aa, synthetic construct
MALPVTALLLPLALLLHAARPEVQLVESGGGLVQPGRSLRLSCAASGFTFDDYAMHWVRQAPGKGLEWVSGISWNSGSIGYADSVKGRFTISRDNAKNSLYLQMNSLRAEDTALYYCAKDKGGGYYDFWSGSDYWGQGTLVTVSSLEIQNPDPAVYQLRDSKSSDKSVCLFTDFDSQTNVSQSKDSDVYITDKCVLDMRSMDFKSNSAVAWSNKSDFACANAFNNSIIPEDTFFPSPESSCDVKLVEKSFETDTNLNFQILYEILLGKATLYAVLVSALVLMAMVKRKDSRGRAKRSGSGVKQTLNFDLLKLAGDVESNPGPTSMDWIWRILFLVGAATGAHSFESSELTQDPAVSVALGQTVRITCQGDSLRSYYASWYQQKPGQAPVLVIYGKNNRPSGIPDRFSGSSSGNTASLTITGAQAEDEADYYCNSRDSSGWVFGGGTKLTVLTREDLKNVFPPEVAVFEPSEAEISHTQKATLVCLATGFYPDHVELSWWVNGKEVHSGVCTDPQPLKEQPALNDSRYCLSSRLRVSATFWQNPRNHFRCQVQFYGLSENDEWTQDRAKPVTQIVSAEAWGRADCGFTSESYQQGVLSATNLSVIGFRILLLKVAGFNLLMTLRLWSS

SEQ ID NO: 13647 - protein, 636 aa, synthetic construct
MALPVTALLLPLALLLHAARPEVQLQQSGPGLVKPSQTLSLTCAISGDSVLSNSDTWNWIRQSPSRGLEWLGRTYHRSTWYDDYASSVRGRVSINVDTSKNQYSLQLNAVTPEDTGVYYCARDRLQDGNSWSDAFDVWGQGTMVTVSSLEIQNPDPAVYQLRDSKSSDKSVCLFTDFDSQTNVSQSKDSDVYITDKCVLDMRSMDFKSNSAVAWSNKSDFACANAFNNSIIPEDTFFPSPESSCDVKLVEKSFETDTNLNFQILYEILLGKATLYAVLVSALVLMAMVKRKDSRGRAKRSGSGVKQTLNFDLLKLAGDVESNPGPTSMDWIWRILFLVGAATGAHSFEQSALTQPASVSGSPGQSITISCTGTSSDVGGYNYVSWYQQHPGKAPKLMIYDVSNRPSGVSNRFSGSKSGNTASLTISGLQAEDEADYYCSSYTSSSTLVYVFGTGTKVTVLTREDLKNVFPPEVAVFEPSEAEISHTQKATLVCLATGFYPDHVELSWWVNGKEVHSGVCTDPQPLKEQPALNDSRYCLSSRLRVSATFWQNPRNHFRCQVQFYGLSENDEWTQDRAKPVTQIVSAEAWGRADCGFTSESYQQGVLSATNLSVIGFRILLLKVAGFNLLMTLRLWSS

SEQ ID NO: 13648 - protein, 614 aa, synthetic construct
MALPVTALLLPLALLLHAARPQVQLVQSGAEVKKPGASVKVSCKASGYTFTSYDINWVRQATGQGLEWMGWMNPNSGNTGYAQKFQGRVTMTRNTSISTAYMELSSLRSEDTAVYYCARGDSTKVEIKLEIQNPDPAVYQLRDSKSSDKSVCLFTDFDSQTNVSQSKDSDVYITDKCVLDMRSMDFKSNSAVAWSNKSDFACANAFNNSIIPEDTFFPSPESSCDVKLVEKSFETDTNLNFQILYEILLGKATLYAVLVSALVLMAMVKRKDSRGRAKRSGSGVKQTLNFDLLKLAGDVESNPGPTSMDWIWRILFLVGAATGAHSFEQSVLTQPRSVSGSPGQSVTISCTGTSSDVGGYNYVSWYQQHPGEAPKLIIYDADKRPSGISNRFSSGKSGNTASLTISGLQVEDEADYYCCSYAGGSTWVFGGGTKVTVLTREDLKNVFPPEVAVFEPSEAEISHTQKATLVCLATGFYPDHVELSWWVNGKEVHSGVCTDPQPLKEQPALNDSRYCLSSRLRVSATFWQNPRNHFRCQVQFYGLSENDEWTQDRAKPVTQIVSAEAWGRADCGFTSESYQQGVLSATNLSVIGFRILLLKVAGFNLLMTLRLWSS

SEQ ID NO: 13649 - protein, 636 aa, synthetic construct
MALPVTALLLPLALLLHAARPEVQLQQSGPGLVKPSQTLSLTCAISGDSVSSNSAAWNWIRQSPSRGLEWLGRTYYRSKWYSDYAVSVKSRITINPDTSKNQFSLQLNSVTPEDTAVYYCARDPYDFWSGYPDAFDIWGQGTMVTVSSLEIQNPDPAVYQLRDSKSSDKSVCLFTDFDSQTNVSQSKDSDVYITDKCVLDMRSMDFKSNSAVAWSNKSDFACANAFNNSIIPEDTFFPSPESSCDVKLVEKSFETDTNLNFQILYEILLGKATLYAVLVSALVLMAMVKRKDSRGRAKRSGSGVKQTLNFDLLKLAGDVESNPGPTSMDWIWRILFLVGAATGAHSFEQSALTQPASVSGSPGQSITISCTGTSSDVGGYNYVSWYQQHPGKAPKVIISEVNNRPSGVSHRFSGSKSGNTASLTISGLQAEDEADYFCSSYTSGRTLYVFGTGSKVTVLGTREDLKNVFPPEVAVFEPSEAEISHTQKATLVCLATGFYPDHVELSWWVNGKEVHSGVCTDPQPLKEQPALNDSRYCLSSRLRVSATFWQNPRNHFRCQVQFYGLSENDEWTQDRAKPVTQIVSAEAWGRADCGFTSESYQQGVLSATNLSVIGFRILLLKVAGFNLLMTLRLWSS

SEQ ID NO: 13650 - protein, 635 aa, synthetic construct
MALPVTALLLPLALLLHAARPQSALTQPASASGSPGQSVTISCTGTSSDVGGYNYVSWYQQHPGKAPKLMIYDVSNRPSGVSNRFSGSKSGNTASLTISGLQAEDEADYYCSSYTSSSTLYVFGTGTQLTVLLEIQNPDPAVYQLRDSKSSDKSVCLFTDFDSQTNVSQSKDSDVYITDKCVLDMRSMDFKSNSAVAWSNKSDFACANAFNNSIIPEDTFFPSPESSCDVKLVEKSFETDTNLNFQILYEILLGKATLYAVLVSALVLMAMVKRKDSRGRAKRSGSGVKQTLNFDLLKLAGDVESNPGPTSMDWIWRILFLVGAATGAHSFEEVQLQQSGPGLVKPSQTLSLTCAISGDSMLSNSDTWNWIRQSPSRGLEWLGRTYHRSTWYDDYASSVRGRVSINVDTSKNQYSLQLNAVTPEDTGVYYCARVRLQDGNSWSDAFDVWGQGTMVTVSSTREDLKNVFPPEVAVFEPSEAEISHTQKATLVCLATGFYPDHVELSWWVNGKEVHSGVCTDPQPLKEQPALNDSRYCLSSRLRVSATFWQNPRNHFRCQVQFYGLSENDEWTQDRAKPVTQIVSAEAWGRADCGFTSESYQQGVLSATNLSVIGFRILLLKVAGFNLLMTLRLWSS

SEQ ID NO: 13651 - protein, 635 aa, synthetic construct
MALPVTALLLPLALLLHAARPDVMLTQTPLSLPVSLGDQASISCRSSQSILHSTGDTYLEWYLQKPGQSPKLLINKVSNRLSGVPDRFSGSGSGTDFTLKISRVEAEDLGVYYCFQGSHVPWTFGGGTKLEIKRADAAPTVSIFPLEIQNPDPAVYQLRDSKSSDKSVCLFTDFDSQTNVSQSKDSDVYITDKCVLDMRSMDFKSNSAVAWSNKSDFACANAFNNSIIPEDTFFPSPESSCDVKLVEKSFETDTNLNFQILYEILLGKATLYAVLVSALVLMAMVKRKDSRGRAKRSGSGVKQTLNFDLLKLAGDVESNPGPTSMDWIWRILFLVGAATGAHSFEQVKLQQSGPSLVKPGASVKMSCKASGYTFTDFYMKWVKQSHGKSLEWIGDINPNIGDTFYNQKFKGKATLTVDKSSSTAYMQLNSLTSEDSAVYFCSVGYFDVWGAGTTVTVSSTREDLKNVFPPEVAVFEPSEAEISHTQKATLVCLATGFYPDHVELSWWVNGKEVHSGVCTDPQPLKEQPALNDSRYCLSSRLRVSATFWQNPRNHFRCQVQFYGLSENDEWTQDRAKPVTQIVSAEAWGRADCGFTSESYQQGVLSATNLSVIGFRILLLKVAGFNLLMTLRLWSS

SEQ ID NO: 13652 - protein, 631 aa, synthetic construct
MALPVTALLLPLALLLHAARPEIVLTQSPATLSLSPGERATLSCRASQSVSIYLAWYQQKPGQAPRLLIYDASNRATGIPARFSGSGSGTDFTLTISSLEPEDFAVYYCQQRSNWPPFTFGPGTKVDIKLEIQNPDPAVYQLRDSKSSDKSVCLFTDFDSQTNVSQSKDSDVYITDKCVLDMRSMDFKSNSAVAWSNKSDFACANAFNNSIIPEDTFFPSPESSCDVKLVEKSFETDTNLNFQILYEILLGKATLYAVLVSALVLMAMVKRKDSRGRAKRSGSGVKQTLNFDLLKLAGDVESNPGPTSMDWIWRILFLVGAATGAHSFEQVQLVESGGGVVQPGRSLRLSCAASGFTFSSYGMHWVRQAPGKGLEWVAVIWDDGSNKYYVDSVKGRFTISRDNSKNTLYLQMNSLRAEDTAVYYCARDDYYGSGSFNSYYGTDVWGQGTTVTVSSTREDLKNVFPPEVAVFEPSEAEISHTQKATLVCLATGFYPDHVELSWWVNGKEVHSGVCTDPQPLKEQPALNDSRYCLSSRLRVSATFWQNPRNHFRCQVQFYGLSENDEWTQDRAKPVTQIVSAEAWGRADCGFTSESYQQGVLSATNLSVIGFRILLLKVAGFNLLMTLRLWSS

SEQ ID NO: 13653 - protein, 616 aa, synthetic construct
MALPVTALLLPLALLLHAARPDIQMTQSPSSLSASVGDRVTITCRASQGISSWLAWYQQKPEKAPKSLIYAASSLQSGVPSRFSGSGSGTDFTLTISSLQPEDFATYYCQQYNSYPYTFGQGTKLEIKLEIQNPDPAVYQLRDSKSSDKSVCLFTDFDSQTNVSQSKDSDVYITDKCVLDMRSMDFKSNSAVAWSNKSDFACANAFNNSIIPEDTFFPSPESSCDVKLVEKSFETDTNLNFQILYEILLGKATLYAVLVSALVLMAMVKRKDSRGRAKRSGSGVKQTLNFDLLKLAGDVESNPGPTSMDWIWRILFLVGAATGAHSFEEVQLVQSGGGLVHPGGSLRLSCAGSGFTFSTYLMYWVRQAPGKTLEWVSAIGSGGDTYYADSVKGRFTISRDNAKNSLYLQMNSLRAEDMAVYYCARGLGYWGQGTLVTVSSTREDLKNVFPPEVAVFEPSEAEISHTQKATLVCLATGFYPDHVELSWWVNGKEVHSGVCTDPQPLKEQPALNDSRYCLSSRLRVSATFWQNPRNHFRCQVQFYGLSENDEWTQDRAKPVTQIVSAEAWGRADCGFTSESYQQGVLSATNLSVIGFRILLLKVAGFNLLMTLRLWSS

SEQ ID NO: 13654 - protein, 635 aa, synthetic construct
MALPVTALLLPLALLLHAARPLPVLTQPPSVSVAPGKTARITCGGNNIGSKSVHWYQQKPGQAPVLVVYDDSDRPSGIPERFSGSNSGNTATLTISRVEAGDEADYYCQVWDSSSDYVVFGGGTKLTVLLEIQNPDPAVYQLRDSKSSDKSVCLFTDFDSQTNVSQSKDSDVYITDKCVLDMRSMDFKSNSAVAWSNKSDFACANAFNNSIIPEDTFFPSPESSCDVKLVEKSFETDTNLNFQILYEILLGKATLYAVLVSALVLMAMVKRKDSRGRAKRSGSGVKQTLNFDLLKLAGDVESNPGPTSMDWIWRILFLVGAATGAHSFEEVQLVQSGAEVKKPGESLKISCKGSGYSFTSYWIGWVRQMPGKGLEWMGIIYPGDSDTRYSPSFQGQVTISADKSISTAYLQWSSLKASDTAMYYCARQVWGWQGGMYPRSNWWYNLDSWGQGTLVTVSSTREDLKNVFPPEVAVFEPSEAEISHTQKATLVCLATGFYPDHVELSWWVNGKEVHSGVCTDPQPLKEQPALNDSRYCLSSRLRVSATFWQNPRNHFRCQVQFYGLSENDEWTQDRAKPVTQIVSAEAWGRADCGFTSESYQQGVLSATNLSVIGFRILLLKVAGFNLLMTLRLWSS

SEQ ID NO: 13655 - protein, 628 aa, synthetic construct
MALPVTALLLPLALLLHAARPELVMTQSPASLAVSLGQRATISCRASESVDSYGKSFMHWYQLKPGQPPKLLIYRASNLESGVPARFSGSGSRTDFTLTIDPVEADDAATYYCQQNNEDPWTFGGGTKLEIKLEIQNPDPAVYQLRDSKSSDKSVCLFTDFDSQTNVSQSKDSDVYITDKCVLDMRSMDFKSNSAVAWSNKSDFACANAFNNSIIPEDTFFPSPESSCDVKLVEKSFETDTNLNFQILYEILLGKATLYAVLVSALVLMAMVKRKDSRGRAKRSGSGVKQTLNFDLLKLAGDVESNPGPTSMDWIWRILFLVGAATGAHSFEEVQLEQSGPELVKPGASVKMSCKASGYTFTNYYMKWVKQSHGKSLEWIGDLNPNNGDTFYNQKFKGKATLTVDKSSNTAYMQLNSLTSEDSAVYYCARTGRYEENAMDYWGQGTSVTVSSTREDLKNVFPPEVAVFEPSEAEISHTQKATLVCLATGFYPDHVELSWWVNGKEVHSGVCTDPQPLKEQPALNDSRYCLSSRLRVSATFWQNPRNHFRCQVQFYGLSENDEWTQDRAKPVTQIVSAEAWGRADCGFTSESYQQGVLSATNLSVIGFRILLLKVAGFNLLMTLRLWSS

SEQ ID NO: 13656 - protein, 622 aa, synthetic construct
MALPVTALLLPLALLLHAARPDVVMTQSPSSLSASVGDRVTITCMASEDIYIRLAWYQQKPGNAPKLLIYAATSLETGVPSRFSGSGSGTDFTLTISSLQPEDFATYYCQQYWSSPWTFGGGTKVEIKLEIQNPDPAVYQLRDSKSSDKSVCLFTDFDSQTNVSQSKDSDVYITDKCVLDMRSMDFKSNSAVAWSNKSDFACANAFNNSIIPEDTFFPSPESSCDVKLVEKSFETDTNLNFQILYEILLGKATLYAVLVSALVLMAMVKRKDSRGRAKRSGSGVKQTLNFDLLKLAGDVESNPGPTSMDWIWRILFLVGAATGAHSFEQVQLQESGPGLVKPSQTLSLTCTVSGYSITSDYTWNWIRQPPGNGLEWIGYITYSGSTSYNPSLKSRVLISVDTSKNQVSLKLSSVTAADTAVYYCARLGRRYTMDYWGQGTTVTVSSTREDLKNVFPPEVAVFEPSEAEISHTQKATLVCLATGFYPDHVELSWWVNGKEVHSGVCTDPQPLKEQPALNDSRYCLSSRLRVSATFWQNPRNHFRCQVQFYGLSENDEWTQDRAKPVTQIVSAEAWGRADCGFTSESYQQGVLSATNLSVIGFRILLLKVAGFNLLMTLRLWSS

SEQ ID NO: 13657 - protein, 626 aa, synthetic construct; identical to SEQ ID NO: 13520

SEQ ID NO: 13658 - protein, 626 aa, synthetic construct
MALPVTALLLPLALLLHAARPDIVLTQSPATLSLSPGDRATLSCRASESVTILGSHLIYWYQQKPGQAPRLLIQLASNVQTGIPARFSGSGSRTDFTLTISSLEPEDFAVYYCLQSRTIPRTFGQGTKLEIKRLEIQNPDPAVYQLRDSKSSDKSVCLFTDFDSQTNVSQSKDSDVYITDKCVLDMRSMDFKSNSAVAWSNKSDFACANAFNNSIIPEDTFFPSPESSCDVKLVEKSFETDTNLNFQILYEILLGKATLYAVLVSALVLMAMVKRKDSRGRAKRSGSGVKQTLNFDLLKLAGDVESNPGPTSMDWIWRILFLVGAATGAHSFEQVQLVQSGSELKKPGESVKISCKASGYTFTHYSMNWVRQAPGQGLEWMGRINTETGEPLYADDFKGRFVFSLDTSASTAYLQISSLKAEDTAVYYCSNDYLYSLDYWGQGTLVTVSSTREDLKNVFPPEVAVFEPSEAEISHTQKATLVCLATGFYPDHVELSWWVNGKEVHSGVCTDPQPLKEQPALNDSRYCLSSRLRVSATFWQNPRNHFRCQVQFYGLSENDEWTQDRAKPVTQIVSAEAWGRADCGFTSESYQQGVLSATNLSVIGFRILLLKVAGFNLLMTLRLWSS

SEQ ID NO: 13659 - protein, 627 aa, synthetic construct
MALPVTALLLPLALLLHAARPDIQLTQSPSFLSASVGDRVTITCRASQGISTDLNWYQQKPGKAPKLLIYAASNLESGVPSRFSGSGSGTEFTLTISSLQPEDFATYYCQQSYNWPYTFGGGTKVEIKRLEIQNPDPAVYQLRDSKSSDKSVCLFTDFDSQTNVSQSKDSDVYITDKCVLDMRSMDFKSNSAVAWSNKSDFACANAFNNSIIPEDTFFPSPESSCDVKLVEKSFETDTNLNFQILYEILLGKATLYAVLVSALVLMAMVKRKDSRGRAKRSGSGVKQTLNFDLLKLAGDVESNPGPTSMDWIWRILFLVGAATGAHSFEEVQLVESGGGLVKPGGSLRLSCAASGFTFSNFEMNWVRQAPGKGLEWVSGISSNGRYINYADSVKGRFTISRDNAKNSLYLQMNSLRAEDTAVYYCARVVDFDQDYNGFDYWGQGTLVTVSSTREDLKNVFPPEVAVFEPSEAEISHTQKATLVCLATGFYPDHVELSWWVNGKEVHSGVCTDPQPLKEQPALNDSRYCLSSRLRVSATFWQNPRNHFRCQVQFYGLSENDEWTQDRAKPVTQIVSAEAWGRADCGFTSESYQQGVLSATNLSVIGFRILLLKVAGFNLLMTLRLWSS

SEQ ID NO: 13660 - protein, 625 aa, synthetic construct
MALPVTALLLPLALLLHAARPDIQLTQSPSFLSASVGDRVTITCSLSLGISTWRDWFPPRLGRGLEPLTYAASTLQSGVPSRFSGSGSGTEFTLTISSLQPEDFATYYCQQLNSYPLTFGGGTKVEIKRLEIQNPDPAVYQLRDSKSSDKSVCLFTDFDSQTNVSQSKDSDVYITDKCVLDMRSMDFKSNSAVAWSNKSDFACANAFNNSIIPEDTFFPSPESSCDVKLVEKSFETDTNLNFQILYEILLGKATLYAVLVSALVLMAMVKRKDSRGRAKRSGSGVKQTLNFDLLKLAGDVESNPGPTSMDWIWRILFLVGAATGAHSFEEVQLVESGGGLVKPGGSLRLSCAASGFTFSTYGMSWVRQAPGKGLEWVAYINNGSGYIYYADSVKGRFTISRDNAKNSLYLQMNSLRAEDTAVYYCARGQWWSGGDFDYWGQGTLVTVSSTREDLKNVFPPEVAVFEPSEAEISHTQKATLVCLATGFYPDHVELSWWVNGKEVHSGVCTDPQPLKEQPALNDSRYCLSSRLRVSATFWQNPRNHFRCQVQFYGLSENDEWTQDRAKPVTQIVSAEAWGRADCGFTSESYQQGVLSATNLSVIGFRILLLKVAGFNLLMTLRLWSS

SEQ ID NO: 13661 - protein, 626 aa, synthetic construct
MALPVTALLLPLALLLHAARPEIVLTQSPATLSLSPGERATLSCSASSSVSYMYWYQQKPGQAPRLLIYRTSNLASGIPARFSGSGSGTDFTLTISSLEPEDFAVYYCQQYHSYPTTFGQGTKVEIKRTVLEIQNPDPAVYQLRDSKSSDKSVCLFTDFDSQTNVSQSKDSDVYITDKCVLDMRSMDFKSNSAVAWSNKSDFACANAFNNSIIPEDTFFPSPESSCDVKLVEKSFETDTNLNFQILYEILLGKATLYAVLVSALVLMAMVKRKDSRGRAKRSGSGVKQTLNFDLLKLAGDVESNPGPTSMDWIWRILFLVGAATGAHSFEEVQLVESGGGLVQPGGSLRLSCAASGFSFNTYAMNWVRQAPGKGLEWVSHIRSKSNNFATYYADSVKDRFTISRDNAKNSLYLQMNSLRAEDTAVYYCARQGGDFPMDYWGQGTLVTVSSTREDLKNVFPPEVAVFEPSEAEISHTQKATLVCLATGFYPDHVELSWWVNGKEVHSGVCTDPQPLKEQPALNDSRYCLSSRLRVSATFWQNPRNHFRCQVQFYGLSENDEWTQDRAKPVTQIVSAEAWGRADCGFTSESYQQGVLSATNLSVIGFRILLLKVAGFNLLMTLRLWSS

SEQ ID NO: 13662 - protein, 622 aa, synthetic construct
MALPVTALLLPLALLLHAARPDVVMTQSPSSLSASVGDRVTITCKASEDIYIRLAWYQQKPGKAPKLLIYAATSLETGVPSRFSGSGSGTDFTLTISSLQPEDFATYYCQQYWTTPWTFGGGTKVEIKLEIQNPDPAVYQLRDSKSSDKSVCLFTDFDSQTNVSQSKDSDVYITDKCVLDMRSMDFKSNSAVAWSNKSDFACANAFNNSIIPEDTFFPSPESSCDVKLVEKSFETDTNLNFQILYEILLGKATLYAVLVSALVLMAMVKRKDSRGRAKRSGSGVKQTLNFDLLKLAGDVESNPGPTSMDWIWRILFLVGAATGAHSFEQVQLQESGPGLVKPSQTLSLTCTVSGYSITIDYTWNWIRQPPGKGLEWIGYITYSGSTDYNPSLKSRVLISVDTSKNQVSLKLSSVTAADTAVYYCARLGRRYALDYWGQGTTVTVSSTREDLKNVFPPEVAVFEPSEAEISHTQKATLVCLATGFYPDHVELSWWVNGKEVHSGVCTDPQPLKEQPALNDSRYCLSSRLRVSATFWQNPRNHFRCQVQFYGLSENDEWTQDRAKPVTQIVSAEAWGRADCGFTSESYQQGVLSATNLSVIGFRILLLKVAGFNLLMTLRLWSS

SEQ ID NO: 13663 - protein, 626 aa, synthetic construct
MALPVTALLLPLALLLHAARPDIQMTQTTSSLSASLGDRVTISCRASQDISNYLNWYQQKPDGTVKLLIYYTSILHSGVPSRFSGSGSGTDYSLTISNLEQEDFATYFCQQGNTLPWTFGGGTKLEIKALEIQNPDPAVYQLRDSKSSDKSVCLFTDFDSQTNVSQSKDSDVYITDKCVLDMRSMDFKSNSAVAWSNKSDFACANAFNNSIIPEDTFFPSPESSCDVKLVEKSFETDTNLNFQILYEILLGKATLYAVLVSALVLMAMVKRKDSRGRAKRSGSGVKQTLNFDLLKLAGDVESNPGPTSMDWIWRILFLVGAATGAHSFEVQLVESGGGLVKPGGSLKLSCAASGFAFSIYDMSWVRQTPEKRLEWVAYISSGGGTYYPDTVKGRFTISRDNAKNTLYLQMSSLKSEDTAMYYCARHSGYGTHWGVLFAYWGQGTLVTVSATREDLKNVFPPEVAVFEPSEAEISHTQKATLVCLATGFYPDHVELSWWVNGKEVHSGVCTDPQPLKEQPALNDSRYCLSSRLRVSATFWQNPRNHFRCQVQFYGLSENDEWTQDRAKPVTQIVSAEAWGRADCGFTSESYQQGVLSATNLSVIGFRILLLKVAGFNLLMTLRLWSS

SEQ ID NO: 13664 - protein, 637 aa, synthetic construct
MALPVTALLLPLALLLHAARPDIVMTQSPDSLAVSLGERATINCKSSQSLLYRSNQKNYLAWYQQKPGQPPKLLIYWASTRESGVPDRFSGSGSGTDFTLTISSLQAEDVAVYYCQQYYNYPRTFGQGTKVEIKRTVLEIQNPDPAVYQLRDSKSSDKSVCLFTDFDSQTNVSQSKDSDVYITDKCVLDMRSMDFKSNSAVAWSNKSDFACANAFNNSIIPEDTFFPSPESSCDVKLVEKSFETDTNLNFQILYEILLGKATLYAVLVSALVLMAMVKRKDSRGRAKRSGSGVKQTLNFDLLKLAGDVESNPGPTSMDWIWRILFLVGAATGAHSFEEVQLLESGGGLVQPGGSLRLSCAASGYSITSDYAWNWVRQAPGKGLEWVSYISNSGSTSYNPSLKSRFTISRDNSKNTLYLQMNSLRAEDTAVYYCAKERNYDYDDYYYAMDYWGQGTLVTVSSTREDLKNVFPPEVAVFEPSEAEISHTQKATLVCLATGFYPDHVELSWWVNGKEVHSGVCTDPQPLKEQPALNDSRYCLSSRLRVSATFWQNPRNHFRCQVQFYGLSENDEWTQDRAKPVTQIVSAEAWGRADCGFTSESYQQGVLSATNLSVIGFRILLLKVAGFNLLMTLRLWSS

SEQ ID NO: 13665 - protein, 630 aa, synthetic construct
MALPVTALLLPLALLLHAARPDVVMTQSPLSLPVTLGQPASISCRSSQSLLHSSGNTYLEWYQQRPGQSPRPLIYKISTRFSGVPDRFSGSGSGTDFTLKISRVEAEDVGVYYCFQGSHVPYTFGGGTKVEIKRLEIQNPDPAVYQLRDSKSSDKSVCLFTDFDSQTNVSQSKDSDVYITDKCVLDMRSMDFKSNSAVAWSNKSDFACANAFNNSIIPEDTFFPSPESSCDVKLVEKSFETDTNLNFQILYEILLGKATLYAVLVSALVLMAMVKRKDSRGRAKRSGSGVKQTLNFDLLKLAGDVESNPGPTSMDWIWRILFLVGAATGAHSFEQVQLVQSGAEVKKPGASVKVSCKASGLTIEDYYMHWVRQAPGQGLEWMGWIDPENGDTEYGPKFQGRVTMTRDTSINTAYMELSRLRSDDTAVYYCAVHNAHYGTWFAYWGQGTLVTVSSTREDLKNVFPPEVAVFEPSEAEISHTQKATLVCLATGFYPDHVELSWWVNGKEVHSGVCTDPQPLKEQPALNDSRYCLSSRLRVSATFWQNPRNHFRCQVQFYGLSENDEWTQDRAKPVTQIVSAEAWGRADCGFTSESYQQGVLSATNLSVIGFRILLLKVAGFNLLMTLRLWSS

SEQ ID NO: 13666 - protein, 622 aa, synthetic construct
MALPVTALLLPLALLLHAARPDIQMTQSPSSLSASVGDRVTITCRASENIYSNLAWYQQKPGKAPKLLIYAATNLADGVPSRFSGSGSGTDFTLTISSLQPEDFATYYCQHFWGTPTFGQGTKVEIKRTVLEIQNPDPAVYQLRDSKSSDKSVCLFTDFDSQTNVSQSKDSDVYITDKCVLDMRSMDFKSNSAVAWSNKSDFACANAFNNSIIPEDTFFPSPESSCDVKLVEKSFETDTNLNFQILYEILLGKATLYAVLVSALVLMAMVKRKDSRGRAKRSGSGVKQTLNFDLLKLAGDVESNPGPTSMDWIWRILFLVGAATGAHSFEEVQLVESGGGLVQPGGSLRLSCAASGFSLTNYGVHWVRQAPGKGLEWVSVIWSGGSTDYNAAFISRFTISADTSKNTAYLQMNSLRAEDTAVYYCARELIHAMDNWGQGTLVTVSSTREDLKNVFPPEVAVFEPSEAEISHTQKATLVCLATGFYPDHVELSWWVNGKEVHSGVCTDPQPLKEQPALNDSRYCLSSRLRVSATFWQNPRNHFRCQVQFYGLSENDEWTQDRAKPVTQIVSAEAWGRADCGFTSESYQQGVLSATNLSVIGFRILLLKVAGFNLLMTLRLWSS

SEQ ID NO: 13667 - protein, 629 aa, synthetic construct
MALPVTALLLPLALLLHAARPDFVMTQSPLSLPVTPGEPASISCRSSQSIVHSNGNTYLEWYLQKPGQSPQLLIYKVSNRFSGVPDRFSGSGSGTDFTLKISRVEAEDVGVYYCFQGSHVPLTFGQGTKLEIKRLEIQNPDPAVYQLRDSKSSDKSVCLFTDFDSQTNVSQSKDSDVYITDKCVLDMRSMDFKSNSAVAWSNKSDFACANAFNNSIIPEDTFFPSPESSCDVKLVEKSFETDTNLNFQILYEILLGKATLYAVLVSALVLMAMVKRKDSRGRAKRSGSGVKQTLNFDLLKLAGDVESNPGPTSMDWIWRILFLVGAATGAHSFEEVQLVESGAEVKKPGASVKVSCKASGYTFTSYWIHWVRQAPGQGLEWMGENDPSNGRTNYNEKFKNRVTLTVDTSISTAYMELSRLRSDDTAVYYCARGPNYFYSMDYWGQGTMVTVSSTREDLKNVFPPEVAVFEPSEAEISHTQKATLVCLATGFYPDHVELSWWVNGKEVHSGVCTDPQPLKEQPALNDSRYCLSSRLRVSATFWQNPRNHFRCQVQFYGLSENDEWTQDRAKPVTQIVSAEAWGRADCGFTSESYQQGVLSATNLSVIGFRILLLKVAGFNLLMTLRLWSS

SEQ ID NO: 13668 - protein, 622 aa, synthetic construct
MALPVTALLLPLALLLHAARPDIQLTQSPSFLSASVGDRVTITCSARSSISFMYWYQQKPGKAPKLLIYDTSNLASGVPSRFSGSGSGTEFTLTISSLEAEDAATYYCQQWSSYPLTFGQGTKLEIKLEIQNPDPAVYQLRDSKSSDKSVCLFTDFDSQTNVSQSKDSDVYITDKCVLDMRSMDFKSNSAVAWSNKSDFACANAFNNSIIPEDTFFPSPESSCDVKLVEKSFETDTNLNFQILYEILLGKATLYAVLVSALVLMAMVKRKDSRGRAKRSGSGVKQTLNFDLLKLAGDVESNPGPTSMDWIWRILFLVGAATGAHSFEQVQLVQSGAEVKKPGASVKVSCKASGYTFTGSWMNWVRQAPGQGLEWIGRIYPGDGETNYNGKFKDRVTITADKSTSTAYMELSSLRSEDTAVYYCARIYGNNVYFDVWGQGTTVTVSSTREDLKNVFPPEVAVFEPSEAEISHTQKATLVCLATGFYPDHVELSWWVNGKEVHSGVCTDPQPLKEQPALNDSRYCLSSRLRVSATFWQNPRNHFRCQVQFYGLSENDEWTQDRAKPVTQIVSAEAWGRADCGFTSESYQQGVLSATNLSVIGFRILLLKVAGFNLLMTLRLWSS

SEQ ID NO: 13669 - protein, 630 aa, synthetic construct
MALPVTALLLPLALLLHAARPQLVLTQSPSASASLGSSVKLTCTLSSGHKTDTIDWYQQQPGKAPRYLMKLEGSGSYNKGSGVPDRFSGSSSGADWYLTISSLQSEDEADYYCGTDYPGNYLFGGGTQLTVLGLEIQNPDPAVYQLRDSKSSDKSVCLFTDFDSQTNVSQSKDSDVYITDKCVLDMRSMDFKSNSAVAWSNKSDFACANAFNNSIIPEDTFFPSPESSCDVKLVEKSFETDTNLNFQILYEILLGKATLYAVLVSALVLMAMVKRKDSRGRAKRSGSGVKQTLNFDLLKLAGDVESNPGPTSMDWIWRILFLVGAATGAHSFEQEQLVESGGGLVQPGGSLRLSCAASGFTFSDYYMSWIRQAPGKGLEWVATIYPSSGKTYYADSAKGRLTISSDNAKDSLYLQMNSLRAEDTAVYYCTRDSYADDAALFDIWGQGTTVTVSSTREDLKNVFPPEVAVFEPSEAEISHTQKATLVCLATGFYPDHVELSWWVNGKEVHSGVCTDPQPLKEQPALNDSRYCLSSRLRVSATFWQNPRNHFRCQVQFYGLSENDEWTQDRAKPVTQIVSAEAWGRADCGFTSESYQQGVLSATNLSVIGFRILLLKVAGFNLLMTLRLWSS

SEQ ID NO: 13670 - protein, 622 aa, synthetic construct; identical to SEQ ID NO: 13666

SEQ ID NO: 13671 - protein, 629 aa, synthetic construct; identical to SEQ ID NO: 13667

SEQ ID NO: 13672 - protein, 622 aa, synthetic construct; identical to SEQ ID NO: 13668

SEQ ID NO: 13673 - protein, 630 aa, synthetic construct; identical to SEQ ID NO: 13669

SEQ ID NO: 13674 - protein, 629 aa, synthetic construct
MALPVTALLLPLALLLHAARPDIQLTQSPSSLSASVGDRVSFTCQASQDINNFLNWYQQKPGKAPKLLIYDASNLETGVPSRFSGSGSGTDFTFTISSLQPEDIATYYCQQYGNLPFTFGGGTKVEIKRLEIQNPDPAVYQLRDSKSSDKSVCLFTDFDSQTNVSQSKDSDVYITDKCVLDMRSMDFKSNSAVAWSNKSDFACANAFNNSIIPEDTFFPSPESSCDVKLVEKSFETDTNLNFQILYEILLGKATLYAVLVSALVLMAMVKRKDSRGRAKRSGSGVKQTLNFDLLKLAGDVESNPGPTSMDWIWRILFLVGAATGAHSFEQVQLQESGPGLVKPSQTLSLTCTVSGGSISSGGFYWSWIRQHPGKGLEWIGYIHHSGSTHYNPSLKSRVTISIDTSKNLFSLRLSSVTAADTAVYYCASLVYCGGDCYSGFDYWGQGTLVTVSSTREDLKNVFPPEVAVFEPSEAEISHTQKATLVCLATGFYPDHVELSWWVNGKEVHSGVCTDPQPLKEQPALNDSRYCLSSRLRVSATFWQNPRNHFRCQVQFYGLSENDEWTQDRAKPVTQIVSAEAWGRADCGFTSESYQQGVLSATNLSVIGFRILLLKVAGFNLLMTLRLWSS

SEQ ID NO: 13675 - protein, 625 aa, synthetic construct
MALPVTALLLPLALLLHAARPDIQMTQSPSSLSASVGDRVTITCKSSQSVLYSSNQKNYLAWFQQKPGKAPKLLIYWASTRESGVPSRFSGSGSGTDFTLTISSLQPEDFATYFCHQYLSSYTFGQGTKVEIKRLEIQNPDPAVYQLRDSKSSDKSVCLFTDFDSQTNVSQSKDSDVYITDKCVLDMRSMDFKSNSAVAWSNKSDFACANAFNNSIIPEDTFFPSPESSCDVKLVEKSFETDTNLNFQILYEILLGKATLYAVLVSALVLMAMVKRKDSRGRAKRSGSGVKQTLNFDLLKLAGDVESNPGPTSMDWIWRILFLVGAATGAHSFEEVQLVESGGGLVQPGGSLRLSCAASGYTFTTYWMHWVRQAPGKGLEWVGYIRPSTGYTEYNQKFKDRFTISADTSKNTAYLQMNSLRAEDTAVYYCARSRWLLDYWGQGTLVTVSTREDLKNVFPPEVAVFEPSEAEISHTQKATLVCLATGFYPDHVELSWWVNGKEVHSGVCTDPQPLKEQPALNDSRYCLSSRLRVSATFWQNPRNHFRCQVQFYGLSENDEWTQDRAKPVTQIVSAEAWGRADCGFTSESYQQGVLSATNLSVIGFRILLLKVAGFNLLMTLRLWSS

SEQ ID NO: 13676 - protein, 622 aa, synthetic construct
MALPVTALLLPLALLLHAARPDIQMTQSPSSLSASVGDRVTITCRASQDISNYLNWYQQKPGKAPKLLIYYTSRLHSGVPSRFSGSGSGTDFTLTISSLQPEDFATYYCQQGNTLPYTFGQGTKVEIKRLEIQNPDPAVYQLRDSKSSDKSVCLFTDFDSQTNVSQSKDSDVYITDKCVLDMRSMDFKSNSAVAWSNKSDFACANAFNNSIIPEDTFFPSPESSCDVKLVEKSFETDTNLNFQILYEILLGKATLYAVLVSALVLMAMVKRKDSRGRAKRSGSGVKQTLNFDLLKLAGDVESNPGPTSMDWIWRILFLVGAATGAHSFEEVQLVESGGGLVQPGGSLRLSCAASGFTFSDYFMSWVRQAPGKGLEWVATISNGGTYTYYPDSVKGRFTISRDNSKNTLYLQMNSLRAEDTAVYYCARFDGYIFDYWGQGTLVTVSSTREDLKNVFPPEVAVFEPSEAEISHTQKATLVCLATGFYPDHVELSWWVNGKEVHSGVCTDPQPLKEQPALNDSRYCLSSRLRVSATFWQNPRNHFRCQVQFYGLSENDEWTQDRAKPVTQIVSAEAWGRADCGFTSESYQQGVLSATNLSVIGFRILLLKVAGFNLLMTLRLWSS

SEQ ID NO: 13677 - protein, 754 aa, synthetic construct
MALPVTALLLPLALLLHAARPEVQLVESGGGLVQPGGSLRLSCAASGFSFSDFWMSWVRQAPGKGLEWVATISQAGSEKDYVDSVKGRFTISRDNAKKSLYLQMNSLRAEDTAVYYCASGVYSFDYRGQGTLVTVSSGTGGGGSGGGGSGGGGSEFDIQMTQTTSSLSASLGDRVTISCRASQDISKYLNWYQQKPDGTVKLLIYHTSRLHSGVPSRFSGSGSGTDYSLTISNLEQEDIATYFCQQGNTLPYTFGGGTKLEITLEDLKNVFPPEVAVFEPSEAEISHTQKATLVCLATGFYPDHVELSWWVNGKEVHSGVCTDPQPLKEQPALNDSRYCLSSRLRVSATFWQNPRNHFRCQVQFYGLSENDEWTQDRAKPVTQIVSAEAWGRADCGFTSESYQQGVLSATNLSVIGFRILLLKVAGFNLLMTLRLWSSRAKRSGSGATNFSLLKQAGDVEENPGPTSMDWIWRILFLVGAATGAHSFEVKLQESGPGLVAPSQSLSVTCTVSGVSLPDYGVSWIRQPPRKGLEWLGVIWGSETTYYNSALKSRLTIIKDNSKSQVFLKMNSLQTDDTAIYYCAKHYYYGGSYAMDYWGQGTSVTVSSTRIQNPDPAVYQLRDSKSSDKSVCLFTDFDSQTNVSQSKDSDVYITDKCVLDMRSMDFKSNSAVAWSNKSDFACANAFNNSIIPEDTFFPSPESSCDVKLVEKSFETDTNLNFQILYEILLGKATLYAVLVSALVLMAMVKRKDSRG

SEQ ID NO: 13678 - protein, 755 aa, synthetic construct
MALPVTALLLPLALLLHAARPEVQLVESGGGLVQPGGSLRLSCAASGFSFSDFWMSWVRQAPGKGLEWVATISQAGSEKDYVDSVKGRFTISRDNAKKSLYLQMNSLRAEDTAVYYCASGVYSFDYRGQGTLVTVSSGTGGGGSGGGGSGGGGSEFEIVMTQSPATLSLSPGERATLSCRASQDISKYLNWYQQKPGQAPRLLIYHTSRLHSGIPARFSGSGSGTDYTLTISSLQPEDFAVYFCQQGNTLPYTFGQGTKLEIKLEDLKNVFPPEVAVFEPSEAEISHTQKATLVCLATGFYPDHVELSWWVNGKEVHSGVCTDPQPLKEQPALNDSRYCLSSRLRVSATFWQNPRNHFRCQVQFYGLSENDEWTQDRAKPVTQIVSAEAWGRADCGFTSESYQQGVLSATNLSVIGFRILLLKVAGFNLLMTLRLWSSRAKRSGSGATNFSLLKQAGDVEENPGPTSMDWIWRILFLVGAATGAHSFEQVQLQESGPGLVKPSETLSLTCTVSGVSLPDYGVSWIRQPPGKGLEWIGVIWGSETTYYNSSLKSRVTISKDNSKNQVSLKLSSVTAADTAVYYCAKHYYYGGSYAMDYWGQGTLVTVSSTRIQNPDPAVYQLRDSKSSDKSVCLFTDFDSQTNVSQSKDSDVYITDKCVLDMRSMDFKSNSAVAWSNKSDFACANAFNNSIIPEDTFFPSPESSCDVKLVEKSFETDTNLNFQILYEILLGKATLYAVLVSALVLMAMVKRKDSRG

SEQ ID NO: 13679 - protein, 756 aa, synthetic construct
MALPVTALLLPLALLLHAARPEVQLVESGGGLVQPGGSLRLSCAASGFSFSDFWMSWVRQAPGKGLEWVATISQAGSEKDYVDSVKGRFTISRDNAKKSLYLQMNSLRAEDTAVYYCASGVYSFDYRGQGTLVTVSSGTGGGGSGGGGSGGGGSEFDEIVLTQSPATLSLSPGERATLSCSASSSVSYMHWYQQKPGQAPRLLIYDTSKLASGIPARFSGSGSGTDFTLTISSLEPEDVAVYYCFQGSVYPFTFGQGTKLEIKRLEDLKNVFPPEVAVFEPSEAEISHTQKATLVCLATGFYPDHVELSWWVNGKEVHSGVCTDPQPLKEQPALNDSRYCLSSRLRVSATFWQNPRNHFRCQVQFYGLSENDEWTQDRAKPVTQIVSAEAWGRADCGFTSESYQQGVLSATNLSVIGFRILLLKVAGFNLLMTLRLWSSRAKRSGSGATNFSLLKQAGDVEENPGPTSMDWIWRILFLVGAATGAHSFEQVQLQESGPGLVKPSQTLSLTCTVSGGSISTSGMGVGWIRQHPGKGLEWIGHIWWDDDKRYNPALKSRVTISVDTSKNQFSLKLSSVTAADTAVYYCARMELWSYYFDYWGQGTLVTVSSTRIQNPDPAVYQLRDSKSSDKSVCLFTDFDSQTNVSQSKDSDVYITDKCVLDMRSMDFKSNSAVAWSNKSDFACANAFNNSIIPEDTFFPSPESSCDVKLVEKSFETDTNLNFQILYEILLGKATLYAVLVSALVLMAMVKRKDSRG

SEQ ID NO: 13680 - protein, 754 aa, synthetic construct
MALPVTALLLPLALLLHAARPEVQLVESGGGLVQPGGSLRLSCAASGFSFSDFWMSWVRQAPGKGLEWVATISQAGSEKDYVDSVKGRFTISRDNAKKSLYLQMNSLRAEDTAVYYCASGVYSFDYRGQGTLVTVSSGTGGGGSGGGGSGGGGSEFDYIHVTQSPSSLSVSIGDRVTINCQTSQGVGSDLHWYQHKPGRAPKLLIHHASSVEDGVPSRFSGTGFHTSFNLTINDLQADDIGTYYCQVLQSFGRGSRLDTKLEDLKNVFPPEVAVFEPSEAEISHTQKATLVCLATGFYPDHVELSWWVNGKEVHSGVCTDPQPLKEQPALNDSRYCLSSRLRVSATFWQNPRNHFRCQVQFYGLSENDEWTQDRAKPVTQIVSAEAWGRADCGFTSESYQQGVLSATNLSVIGFRILLLKVAGFNLLMTLRLWSSRAKRSGSGATNFSLLKQAGDVEENPGPTSMDWIWRILFLVGAATGAHSFERAHLVQSGTAMKKPGASVRVSCQTSGYTFTAHILFWFRQAPGRGLEWVGWIKPQYGAVNFGGGFRDRVTLTRDVYREIAYMDIRGLKPDDTAVYYCARDRSYGDSSWALDAWGQGTTVVVSATRIQNPDPAVYQLRDSKSSDKSVCLFTDFDSQTNVSQSKDSDVYITDKCVLDMRSMDFKSNSAVAWSNKSDFACANAFNNSIIPEDTFFPSPESSCDVKLVEKSFETDTNLNFQILYEILLGKATLYAVLVSALVLMAMVKRKDSRG

SEQ ID NO: 13681 - protein, 764 aa, synthetic construct
MALPVTALLLPLALLLHAARPEVQLVESGGGLVQPGGSLRLSCAASGFSFSDFWMSWVRQAPGKGLEWVATISQAGSEKDYVDSVKGRFTISRDNAKKSLYLQMNSLRAEDTAVYYCASGVYSFDYRGQGTLVTVSSGTGGGGSGGGGSGGGGSEFDVQMIQTPDSLAVSLGQRATISCRASESVDNYGISFMHWYQQKPGQSPKLLIYRASNLESGIPARFSGSGSRTDFTLTINPVETDDVATYYCQQNNKDPPTFGGGTKLEIKLEDLKNVFPPEVAVFEPSEAEISHTQKATLVCLATGFYPDHVELSWWVNGKEVHSGVCTDPQPLKEQPALNDSRYCLSSRLRVSATFWQNPRNHFRCQVQFYGLSENDEWTQDRAKPVTQIVSAEAWGRADCGFTSESYQQGVLSATNLSVIGFRILLLKVAGFNLLMTLRLWSSRAKRSGSGATNFSLLKQAGDVEENPGPTSMDWIWRILFLVGAATGAHSFEGGGGSQVQLQQSGAELVKPGASVKISCKASGYAFSSYWMNWVKQRPGKGLEWIGQIYPGDGDTTYNGKFKGKATLTADKSSSTVYMQLNSLTSEDSAVYFCVRYYYGSSGYFDYWGQGTTLTVSSTRIQNPDPAVYQLRDSKSSDKSVCLFTDFDSQTNVSQSKDSDVYITDKCVLDMRSMDFKSNSAVAWSNKSDFACANAFNNSIIPEDTFFPSPESSCDVKLVEKSFETDTNLNFQILYEILLGKATLYAVLVSALVLMAMVKRKDSRG

SEQ ID NO: 13682 - protein, 755 aa, synthetic construct
MALPVTALLLPLALLLHAARPEVQLVESGGGLVQPGGSLRLSCAASGFSFSDFWMSWVRQAPGKGLEWVATISQAGSEKDYVDSVKGRFTISRDNAKKSLYLQMNSLRAEDTAVYYCASGVYSFDYRGQGTLVTVSSGTGGGGSGGGGSGGGGSEFDVQMIQTPSSLSASLGDRVTISCRASQDIGNYLNWYQQKPDGTVKLLIYYTSRLHSGVPSRFSGSGSGTEYSLTISNLEQEDIATYFCQQGSALPPTFGGGTKLEINLEDLKNVFPPEVAVFEPSEAEISHTQKATLVCLATGFYPDHVELSWWVNGKEVHSGVCTDPQPLKEQPALNDSRYCLSSRLRVSATFWQNPRNHFRCQVQFYGLSENDEWTQDRAKPVTQIVSAEAWGRADCGFTSESYQQGVLSATNLSVIGFRILLLKVAGFNLLMTLRLWSSRAKRSGSGATNFSLLKQAGDVEENPGPTSMDWIWRILFLVGAATGAHSFEALQLQQSGAELVRPGASVTLSCKASGYTFTDYEMHWVKQTPVHGLEWIGAIDPETGGTAYNQKFEGKAILTADKSSSTAYMELRSLTSEDSPVYYCARRRYYGSSSFDYWGQGTTLTVSSTRIQNPDPAVYQLRDSKSSDKSVCLFTDFDSQTNVSQSKDSDVYITDKCVLDMRSMDFKSNSAVAWSNKSDFACANAFNNSIIPEDTFFPSPESSCDVKLVEKSFETDTNLNFQILYEILLGKATLYAVLVSALVLMAMVKRKDSRG

SEQ ID NO: 13683 - protein, 759 aa, synthetic construct
MALPVTALLLPLALLLHAARPEVQLVESGGGLVQPGGSLRLSCAASGFSFSDFWMSWVRQAPGKGLEWVATISQAGSEKDYVDSVKGRFTISRDNAKKSLYLQMNSLRAEDTAVYYCASGVYSFDYRGQGTLVTVSSGTGGGGSGGGGSGGGGSEFDIVLTQSPASLAVSLGQRATISCRASKSVSTSGYSYLHWYQQKPGQPPKLLIYLASNLESGVPARFSGSGSGTDFTLNIHPVEEEDAATYYCQHSRELPFTFGSGTKLEIKLEDLKNVFPPEVAVFEPSEAEISHTQKATLVCLATGFYPDHVELSWWVNGKEVHSGVCTDPQPLKEQPALNDSRYCLSSRLRVSATFWQNPRNHFRCQVQFYGLSENDEWTQDRAKPVTQIVSAEAWGRADCGFTSESYQQGVLSATNLSVIGFRILLLKVAGFNLLMTLRLWSSRAKRSGSGATNFSLLKQAGDVEENPGPTSMDWIWRILFLVGAATGAHSFEQVQLVESGGGLVQPGGSLKLSCAASGFDFSRYWMSWVRQAPGKGLEWIGEINPTSSTINFTPSLKDKVFISRDNAKNTLYLQMSKVRSEDTALYYCARGNYYRYGDAMDYWGQGTSVTVSTRIQNPDPAVYQLRDSKSSDKSVCLFTDFDSQTNVSQSKDSDVYITDKCVLDMRSMDFKSNSAVAWSNKSDFACANAFNNSIIPEDTFFPSPESSCDVKLVEKSFETDTNLNFQILYEILLGKATLYAVLVSALVLMAMVKRKDSRG

SEQ ID NO: 13684 - protein, 757 aa, synthetic construct
MALPVTALLLPLALLLHAARPEVQLVESGGGLVQPGGSLRLSCAASGFSFSDFWMSWVRQAPGKGLEWVATISQAGSEKDYVDSVKGRFTISRDNAKKSLYLQMNSLRAEDTAVYYCASGVYSFDYRGQGTLVTVSSGTGGGGSGGGGSGGGGSEFDIQMTQSPSSLSASVGDRVTITCSASQDISNYLNWYQQKPGKAPKLLIYYTSNLHSGVPSRFSGSGSGTDFTLTISSLQPEDFATYYCQQYRKLPWTFGQGTKLEIKRLEDLKNVFPPEVAVFEPSEAEISHTQKATLVCLATGFYPDHVELSWWVNGKEVHSGVCTDPQPLKEQPALNDSRYCLSSRLRVSATFWQNPRNHFRCQVQFYGLSENDEWTQDRAKPVTQIVSAEAWGRADCGFTSESYQQGVLSATNLSVIGFRILLLKVAGFNLLMTLRLWSSRAKRSGSGATNFSLLKQAGDVEENPGPTSMDWIWRILFLVGAATGAHSFEQVQLVQSGAEVKKPGSSVKVSCKASGGTFSNYWMHWVRQAPGQGLEWMGATYRGHSDTYYNQKFKGRVTITADKSTSTAYMELSSLRSEDTAVYYCARGAIYDGYDVLDNWGQGTLVTVSSTRIQNPDPAVYQLRDSKSSDKSVCLFTDFDSQTNVSQSKDSDVYITDKCVLDMRSMDFKSNSAVAWSNKSDFACANAFNNSIIPEDTFFPSPESSCDVKLVEKSFETDTNLNFQILYEILLGKATLYAVLVSALVLMAMVKRKDSRG

SEQ ID NO: 13685 - protein, 757 aa, synthetic construct
MALPVTALLLPLALLLHAARPEVQLVESGGGLVQPGGSLRLSCAASGFSFSDFWMSWVRQAPGKGLEWVATISQAGSEKDYVDSVKGRFTISRDNAKKSLYLQMNSLRAEDTAVYYCASGVYSFDYRGQGTLVTVSSGTGGGGSGGGGSGGGGSEFDIVLTQSPATLSLSPGDRATISCRASESVTILGSHLIYWYQQKPGQPPRLLIQLASNVQTGVPARFSGSGSRTDFTLTISSVEPEDFAVYYCLQSRTIPRTFGQGTKLEIKRLEDLKNVFPPEVAVFEPSEAEISHTQKATLVCLATGFYPDHVELSWWVNGKEVHSGVCTDPQPLKEQPALNDSRYCLSSRLRVSATFWQNPRNHFRCQVQFYGLSENDEWTQDRAKPVTQIVSAEAWGRADCGFTSESYQQGVLSATNLSVIGFRILLLKVAGFNLLMTLRLWSSRAKRSGSGATNFSLLKQAGDVEENPGPTSMDWIWRILFLVGAATGAHSFEQVQLVQSGPEVKKPGESVKISCKASGYTFRHYSMNWVKQAPGQGLKWMGRINTESGVPIYADDFKGRFSFTVDTSASTAYLEISSLTSEDTAVYFCSNDYLYSLDFWGQGTTLTVSSTRIQNPDPAVYQLRDSKSSDKSVCLFTDFDSQTNVSQSKDSDVYITDKCVLDMRSMDFKSNSAVAWSNKSDFACANAFNNSIIPEDTFFPSPESSCDVKLVEKSFETDTNLNFQILYEILLGKATLYAVLVSALVLMAMVKRKDSRG

SEQ ID NO: 13686 - protein, 758 aa, synthetic construct
MALPVTALLLPLALLLHAARPEVQLVESGGGLVQPGGSLRLSCAASGFSFSDFWMSWVRQAPGKGLEWVATISQAGSEKDYVDSVKGRFTISRDNAKKSLYLQMNSLRAEDTAVYYCASGVYSFDYRGQGTLVTVSSGTGGGGSGGGGSGGGGSEFQSVLTQPPSVSGAPGQRVTISCTGSSSNIGAGFDVHWYQQLPGTAPKLLIYGNSNRPSGVPDRFSGSKSGTSASLAITGLQAEDEADYYCQSYDSSLSGYVFGTGTKVTVLGLEDLKNVFPPEVAVFEPSEAEISHTQKATLVCLATGFYPDHVELSWWVNGKEVHSGVCTDPQPLKEQPALNDSRYCLSSRLRVSATFWQNPRNHFRCQVQFYGLSENDEWTQDRAKPVTQIVSAEAWGRADCGFTSESYQQGVLSATNLSVIGFRILLLKVAGFNLLMTLRLWSSRAKRSGSGATNFSLLKQAGDVEENPGPTSMDWIWRILFLVGAATGAHSFEQVQLVQSGAEVKKPGASVKVSCKASGYTFTDYYMHWVRQAPGQRLEWMGWINPNSGGTNYAQKFQDRITVTRDTSSNTGYMELTRLRSDDTAVYYCARSPYSGVLDKWGQGTLVTVSSTRIQNPDPAVYQLRDSKSSDKSVCLFTDFDSQTNVSQSKDSDVYITDKCVLDMRSMDFKSNSAVAWSNKSDFACANAFNNSIIPEDTFFPSPESSCDVKLVEKSFETDTNLNFQILYEILLGKATLYAVLVSALVLMAMVKRKDSRG

SEQ ID NO: 13687 - protein, 755 aa, synthetic construct
MALPVTALLLPLALLLHAARPEVQLVESGGGLVQPGGSLRLSCAASGFSFSDFWMSWVRQAPGKGLEWVATISQAGSEKDYVDSVKGRFTISRDNAKKSLYLQMNSLRAEDTAVYYCASGVYSFDYRGQGTLVTVSSGTGGGGSGGGGSGGGGSEFQAVLTQPPSASGTPGQRVTISCSGSSSNIGSYTVSWYQQLPGTAPKFLIYSNNQRPSGVPDRFSGSKSGTSASLAISGLQSEDEADYYCAAWDDSLNGYVFGTGTKVTVLGLEDLKNVFPPEVAVFEPSEAEISHTQKATLVCLATGFYPDHVELSWWVNGKEVHSGVCTDPQPLKEQPALNDSRYCLSSRLRVSATFWQNPRNHFRCQVQFYGLSENDEWTQDRAKPVTQIVSAEAWGRADCGFTSESYQQGVLSATNLSVIGFRILLLKVAGFNLLMTLRLWSSRAKRSGSGATNFSLLKQAGDVEENPGPTSMDWIWRILFLVGAATGAHSFEVQLVQSGAEVKKPGESLKISCKGSGYDFTTYWIGWVRQMPGKGLEWMGIIYPGDSDTRYSPSVRGRVTISADKSINTAYLQWSSLEASDTAMYYCARMWTFSQDGWGQGTLVTVSSTRIQNPDPAVYQLRDSKSSDKSVCLFTDFDSQTNVSQSKDSDVYITDKCVLDMRSMDFKSNSAVAWSNKSDFACANAFNNSIIPEDTFFPSPESSCDVKLVEKSFETDTNLNFQILYEILLGKATLYAVLVSALVLMAMVKRKDSRG

SEQ ID NO: 13688 - protein, 758 aa, synthetic construct
MALPVTALLLPLALLLHAARPEVQLVESGGGLVQPGGSLRLSCAASGFSFSDFWMSWVRQAPGKGLEWVATISQAGSEKDYVDSVKGRFTISRDNAKKSLYLQMNSLRAEDTAVYYCASGVYSFDYRGQGTLVTVSSGTGGGGSGGGGSGGGGSEFDIVMTQSPDSLAVSLGERATINCKSSQSILYSSNQKNYLAWYQQKPGQSPKLLIYWASTRESGVPDRFSGSGSGTDFTLTISSLQAEDVAVYYCHQYISSYTFGQGTKLEIKLEDLKNVFPPEVAVFEPSEAEISHTQKATLVCLATGFYPDHVELSWWVNGKEVHSGVCTDPQPLKEQPALNDSRYCLSSRLRVSATFWQNPRNHFRCQVQFYGLSENDEWTQDRAKPVTQIVSAEAWGRADCGFTSESYQQGVLSATNLSVIGFRILLLKVAGFNLLMTLRLWSSRAKRSGSGATNFSLLKQAGDVEENPGPTSMDWIWRILFLVGAATGAHSFEQVQLVQSGAEVKKPGASVKVSCKASGYTFASQWMHWMRQAPGQGLEWIGWINPGNVNTKYNEKFKGRATLTVDTSTNTAYMELSSLRSEDTAVYYCARSTWYRPLDYWGQGTLVTVSSTRIQNPDPAVYQLRDSKSSDKSVCLFTDFDSQTNVSQSKDSDVYITDKCVLDMRSMDFKSNSAVAWSNKSDFACANAFNNSIIPEDTFFPSPESSCDVKLVEKSFETDTNLNFQILYEILLGKATLYAVLVSALVLMAMVKRKDSRG

SEQ ID NO: 13689 - protein, 758 aa, synthetic construct
MALPVTALLLPLALLLHAARPEVQLVESGGGLVQPGGSLRLSCAASGFSFSDFWMSWVRQAPGKGLEWVATISQAGSEKDYVDSVKGRFTISRDNAKKSLYLQMNSLRAEDTAVYYCASGVYSFDYRGQGTLVTVSSGTGGGGSGGGGSGGGGSEFDHIVLTQSPSSLSASLGDRVTISCRASQDISTYLNWYQQKPDGTVKLLIFYTSRLHAGVPSRFSGSGSGTHHSLTISNLEQEDIATYFCQQGNSLPFTFGSGTKLEIKRLEDLKNVFPPEVAVFEPSEAEISHTQKATLVCLATGFYPDHVELSWWVNGKEVHSGVCTDPQPLKEQPALNDSRYCLSSRLRVSATFWQNPRNHFRCQVQFYGLSENDEWTQDRAKPVTQIVSAEAWGRADCGFTSESYQQGVLSATNLSVIGFRILLLKVAGFNLLMTLRLWSSRAKRSGSGATNFSLLKQAGDVEENPGPTSMDWIWRILFLVGAATGAHSFEQVQLKESGPELEKPGASVKISCKASGYSFTAYSMNWVKQNNGMSLEWIGSIDPYYGDTKYAQKFKGKATLTVDKASSTAYLQLKSLTSEDSAVYYCARRMITTGDWYFDVWGAGTTVTVSSTRIQNPDPAVYQLRDSKSSDKSVCLFTDFDSQTNVSQSKDSDVYITDKCVLDMRSMDFKSNSAVAWSNKSDFACANAFNNSIIPEDTFFPSPESSCDVKLVEKSFETDTNLNFQILYEILLGKATLYAVLVSALVLMAMVKRKDSRG

SEQ ID NO: 13690 - protein, 758 aa, synthetic construct; identical to SEQ ID NO: 13689

SEQ ID NO: 13691 - protein, 758 aa, synthetic construct
MALPVTALLLPLALLLHAARPEVQLVESGGGLVQPGGSLRLSCAASGFSFSDFWMSWVRQAPGKGLEWVATISQAGSEKDYVDSVKGRFTISRDNAKKSLYLQMNSLRAEDTAVYYCASGVYSFDYRGQGTLVTVSSGTGGGGSGGGGSGGGGSEFDEIVLTQSPATLSLSPGERATLSCRASQSVSSYLAWYQQKPGQAPRLLIYDASNRATGIPARFSGSGSGTDFTLTISSLEPEDFAVYYCQQRSNWPITFGQGTRLEIKLEDLKNVFPPEVAVFEPSEAEISHTQKATLVCLATGFYPDHVELSWWVNGKEVHSGVCTDPQPLKEQPALNDSRYCLSSRLRVSATFWQNPRNHFRCQVQFYGLSENDEWTQDRAKPVTQIVSAEAWGRADCGFTSESYQQGVLSATNLSVIGFRILLLKVAGFNLLMTLRLWSSRAKRSGSGATNFSLLKQAGDVEENPGPTSMDWIWRILFLVGAATGAHSFEEVQLVESGGGLVQPGRSLRLSCAASGFTFNDYAMHWVRQAPGKGLEWVSTISWNSGSIGYADSVKGRFTISRDNAKKSLYLQMNSLRAEDTALYYCAKDIQYGNYYYGMDVWGQGTTVTVSSTRIQNPDPAVYQLRDSKSSDKSVCLFTDFDSQTNVSQSKDSDVYITDKCVLDMRSMDFKSNSAVAWSNKSDFACANAFNNSIIPEDTFFPSPESSCDVKLVEKSFETDTNLNFQILYEILLGKATLYAVLVSALVLMAMVKRKDSRG

SEQ ID NO: 13692 - protein, 760 aa, synthetic construct
MALPVTALLLPLALLLHAARPEVQLVESGGGLVQPGGSLRLSCAASGFSFSDFWMSWVRQAPGKGLEWVATISQAGSEKDYVDSVKGRFTISRDNAKKSLYLQMNSLRAEDTAVYYCASGVYSFDYRGQGTLVTVSSGTGGGGSGGGGSGGGGSEFDIVMTQTPLSLPVTPGEPASISCRSSKSLLHSNGITYLYWYLQKPGQSPQLLIYQMSNLVSGVPDRFSGSGSGTDFTLKISRVEAEDVGVYYCAQNLELPYTFGGGTKVEIKRLEDLKNVFPPEVAVFEPSEAEISHTQKATLVCLATGFYPDHVELSWWVNGKEVHSGVCTDPQPLKEQPALNDSRYCLSSRLRVSATFWQNPRNHFRCQVQFYGLSENDEWTQDRAKPVTQIVSAEAWGRADCGFTSESYQQGVLSATNLSVIGFRILLLKVAGFNLLMTLRLWSSRAKRSGSGATNFSLLKQAGDVEENPGPTSMDWIWRILFLVGAATGAHSFEQVQLVQSGAEVKKPGSSVKVSCKASGYAFSYSWINWVRQAPGQGLEWMGRIFPGDGDTDYNGKFKGRVTITADKSTSTAYMELSSLRSEDTAVYYCARNVFDGYWLVYWGQGTLVTVSSTRIQNPDPAVYQLRDSKSSDKSVCLFTDFDSQTNVSQSKDSDVYITDKCVLDMRSMDFKSNSAVAWSNKSDFACANAFNNSIIPEDTFFPSPESSCDVKLVEKSFETDTNLNFQILYEILLGKATLYAVLVSALVLMAMVKRKDSRG

SEQ ID NO: 13693 - protein, 761 aa, synthetic construct
MALPVTALLLPLALLLHAARPEVQLVESGGGLVQPGGSLRLSCAASGFSFSDFWMSWVRQAPGKGLEWVATISQAGSEKDYVDSVKGRFTISRDNAKKSLYLQMNSLRAEDTAVYYCASGVYSFDYRGQGTLVTVSSGTGGGGSGGGGSGGGGSEFDIQMTQSPSSLSASVGDRVTITCRSSQSIVHSVGNTFLEWYQQKPGKAPKLLIYKVSNRFSGVPSRFSGSGSGTDFTLTISSLQPEDFATYYCFQGSQFPYTFGQGTKVEIKRLEDLKNVFPPEVAVFEPSEAEISHTQKATLVCLATGFYPDHVELSWWVNGKEVHSGVCTDPQPLKEQPALNDSRYCLSSRLRVSATFWQNPRNHFRCQVQFYGLSENDEWTQDRAKPVTQIVSAEAWGRADCGFTSESYQQGVLSATNLSVIGFRILLLKVAGFNLLMTLRLWSSRAKRSGSGATNFSLLKQAGDVEENPGPTSMDWIWRILFLVGAATGAHSFEEVQLVESGGGLVQPGGSLRLSCAASGYEFSRSWMNWVRQAPGKGLEWVGRIYPGDGDTNYSGKFKGRFTISADTSKNTAYLQMNSLRAEDTAVYYCARDGSSWDWYFDVWGQGTLVTVSSTRIQNPDPAVYQLRDSKSSDKSVCLFTDFDSQTNVSQSKDSDVYITDKCVLDMRSMDFKSNSAVAWSNKSDFACANAFNNSIIPEDTFFPSPESSCDVKLVEKSFETDTNLNFQILYEILLGKATLYAVLVSALVLMAMVKRKDSRG

SEQ ID NO: 13694 - protein, 759 aa, synthetic construct
MALPVTALLLPLALLLHAARPEVQLVESGGGLVQPGGSLRLSCAASGFSFSDFWMSWVRQAPGKGLEWVATISQAGSEKDYVDSVKGRFTISRDNAKKSLYLQMNSLRAEDTAVYYCASGVYSFDYRGQGTLVTVSSGTGGGGSGGGGSGGGGSEFDIQMTQSPSSLSASVGDRVTITCRASQTIWSYLNWYQQRPGKAPNLLIYAASSLQSGVPSRFSGRGSGTDFTLTISSLQAEDFATYYCQQSYSIPQIFGQGTKLEIKLEDLKNVFPPEVAVFEPSEAEISHTQKATLVCLATGFYPDHVELSWWVNGKEVHSGVCTDPQPLKEQPALNDSRYCLSSRLRVSATFWQNPRNHFRCQVQFYGLSENDEWTQDRAKPVTQIVSAEAWGRADCGFTSESYQQGVLSATNLSVIGFRILLLKVAGFNLLMTLRLWSSRAKRSGSGATNFSLLKQAGDVEENPGPTSMDWIWRILFLVGAATGAHSFEQVQLQQSGPGLVKPSQTLSLTCAISGDSVSSNSAAWNWIRQSPSRGLEWLGRTYYRSKWYNDYAVSVKSRITINPDTSKNQFSLQLNSVTPEDTAVYYCAREVTGDLEDAFDIWGQGTMVTVSSTRIQNPDPAVYQLRDSKSSDKSVCLFTDFDSQTNVSQSKDSDVYITDKCVLDMRSMDFKSNSAVAWSNKSDFACANAFNNSIIPEDTFFPSPESSCDVKLVEKSFETDTNLNFQILYEILLGKATLYAVLVSALVLMAMVKRKDSRG

SEQ ID NO: 13695 - protein, 752 aa, synthetic construct
MALPVTALLLPLALLLHAARPEVQLVESGGGLVQPGGSLRLSCAASGFSFSDFWMSWVRQAPGKGLEWVATISQAGSEKDYVDSVKGRFTISRDNAKKSLYLQMNSLRAEDTAVYYCASGVYSFDYRGQGTLVTVSSGTGGGGSGGGGSGGGGSEFDIQMTQSPATIENTSLSASVGDRVTITCRASQGISSWLTWYQQKPEKAPKSLIYAASSLQSGVPSRFSGSGSGTDFTLTISSLQPEDFATYYCQQYDSYPITFGQGTRLEIKLEDLKNVFPPEVAVFEPSEAEISHTQKATLVCLATGFYPDHVELSWWVNGKEVHSGVCTDPQPLKEQPALNDSRYCLSSRLRVSATFWQNPRNHFRCQVQFYGLSENDEWTQDRAKPVTQIVSAEAWGRADCGFTSESYQQGVLSATNLSVIGFRILLLKVAGFNLLMTLRLWSSRAKRSGSGATNFSLLKQAGDVEENPGPTSMDWIWRILFLVGAATGAHSFEQVQLQQWGAGLLKPSETLSLTCAVYGGSFSAYYWSWIRQPPGKGLEWIGDINHGGGTNYNPSLKSRVTISVDTSKNQFSLKLNSVTAADTAVYYCASLTAYWGQGSLVTVSSTRIQNPDPAVYQLRDSKSSDKSVCLFTDFDSQTNVSQSKDSDVYITDKCVLDMRSMDFKSNSAVAWSNKSDFACANAFNNSIIPEDTFFPSPESSCDVKLVEKSFETDTNLNFQILYEILLGKATLYAVLVSALVLMAMVKRKDSRG

SEQ ID NO: 13696 - protein, 757 aa, synthetic construct
MALPVTALLLPLALLLHAARPEVQLVESGGGLVQPGGSLRLSCAASGFSFSDFWMSWVRQAPGKGLEWVATISQAGSEKDYVDSVKGRFTISRDNAKKSLYLQMNSLRAEDTAVYYCASGVYSFDYRGQGTLVTVSSGTGGGGSGGGGSGGGGSEFDEIVLTQSPDSLAVSLGERATINCKASQSVDFDGDSYLNWYQQKPGQPPKVLIYAASTLQSGVPSRFSGSGSGTDFTLTINSLEAEDAATYYCQQSNEDPWTFGGGTKVEIKLEDLKNVFPPEVAVFEPSEAEISHTQKATLVCLATGFYPDHVELSWWVNGKEVHSGVCTDPQPLKEQPALNDSRYCLSSRLRVSATFWQNPRNHFRCQVQFYGLSENDEWTQDRAKPVTQIVSAEAWGRADCGFTSESYQQGVLSATNLSVIGFRILLLKVAGFNLLMTLRLWSSRAKRSGSGATNFSLLKQAGDVEENPGPTSMDWIWRILFLVGAATGAHSFEQVQLVQSGAEVKKPGASVKVSCKVSGYTFTDYYITWVRQAPGQALEWMGWIYPGSGNTKYSQKFQGRFVFSVDTSASTAYLQLSSLKAEDTAVYYCANYGNYWFAYWGQGTLVTVSSTRIQNPDPAVYQLRDSKSSDKSVCLFTDFDSQTNVSQSKDSDVYITDKCVLDMRSMDFKSNSAVAWSNKSDFACANAFNNSIIPEDTFFPSPESSCDVKLVEKSFETDTNLNFQILYEILLGKATLYAVLVSALVLMAMVKRKDSRG

SEQ ID NO: 13697 - protein, 754 aa, synthetic construct
MALPVTALLLPLALLLHAARPEVQLVESGGGLVQPGGSLRLSCAASGFSFSDFWMSWVRQAPGKGLEWVATISQAGSEKDYVDSVKGRFTISRDNAKKSLYLQMNSLRAEDTAVYYCASGVYSFDYRGQGTLVTVSSGTGGGGSGGGGSGGGGSEFDIQMTQSPSSLSASVGDRVTITCRASQGISSWLAWYQQKPEKAPKSLIYAASSLQSGVPSRFSGSGSGTDFTLTISSLQPEDFATYYCQQYNSYPPTFGGGTKVEIKLEDLKNVFPPEVAVFEPSEAEISHTQKATLVCLATGFYPDHVELSWWVNGKEVHSGVCTDPQPLKEQPALNDSRYCLSSRLRVSATFWQNPRNHFRCQVQFYGLSENDEWTQDRAKPVTQIVSAEAWGRADCGFTSESYQQGVLSATNLSVIGFRILLLKVAGFNLLMTLRLWSSRAKRSGSGATNFSLLKQAGDVEENPGPTSMDWIWRILFLVGAATGAHSFEEVQLVQSGGGLVHPGGSLRLSCAGSGFAFSSSTMHWIRQAPGKGLEWISLIGSGGGIYYGDSVKGRFTISRDNAKNSLYLQMNSLRAEDMAVYYCVRGYFDWVDYFDYWGQGTLVTVSSTRIQNPDPAVYQLRDSKSSDKSVCLFTDFDSQTNVSQSKDSDVYITDKCVLDMRSMDFKSNSAVAWSNKSDFACANAFNNSIIPEDTFFPSPESSCDVKLVEKSFETDTNLNFQILYEILLGKATLYAVLVSALVLMAMVKRKDSRG

SEQ ID NO: 13698 - protein, 764 aa, synthetic construct
MALPVTALLLPLALLLHAARPEVQLVESGGGLVQPGGSLRLSCAASGFSFSDFWMSWVRQAPGKGLEWVATISQAGSEKDYVDSVKGRFTISRDNAKKSLYLQMNSLRAEDTAVYYCASGVYSFDYRGQGTLVTVSSGTGGGGSGGGGSGGGGSEFDDIVMTQSPDSLTVSLGERTTINCKSSQSVLDSSKNKNSLAWYQQKPGQPPKLLLSWASTRESGIPDRFSGSGSGTDFTLTIDSLQPEDSATYYCQQSAHFPITFGQGTRLEIKLEDLKNVFPPEVAVFEPSEAEISHTQKATLVCLATGFYPDHVELSWWVNGKEVHSGVCTDPQPLKEQPALNDSRYCLSSRLRVSATFWQNPRNHFRCQVQFYGLSENDEWTQDRAKPVTQIVSAEAWGRADCGFTSESYQQGVLSATNLSVIGFRILLLKVAGFNLLMTLRLWSSRAKRSGSGATNFSLLKQAGDVEENPGPTSMDWIWRILFLVGAATGAHSFEQVQLVQSGAEVKKPGASVKVSCKASGYTFTNYGMNWVKQAPGQGLKWMGWINTYTGEPTYADDFKGRVTMTSDTSTSTAYLELHNLRSDDTAVYYCARWSWSDGYYVYFDYWGQGTTVTVSSTRIQNPDPAVYQLRDSKSSDKSVCLFTDFDSQTNVSQSKDSDVYITDKCVLDMRSMDFKSNSAVAWSNKSDFACANAFNNSIIPEDTFFPSPESSCDVKLVEKSFETDTNLNFQILYEILLGKATLYAVLVSALVLMAMVKRKDSRG

SEQ ID NO: 13699 - protein, 760 aa, synthetic construct
MALPVTALLLPLALLLHAARPEVQLVESGGGLVQPGGSLRLSCAASGFSFSDFWMSWVRQAPGKGLEWVATISQAGSEKDYVDSVKGRFTISRDNAKKSLYLQMNSLRAEDTAVYYCASGVYSFDYRGQGTLVTVSSGTGGGGSGGGGSGGGGSEFDEIVLTQSPGSLAVSPGERVTMSCKSSQSVFFSSSQKNYLAWYQQIPGQSPRLLIYWASTRESGVPDRFTGSGSGTDFTLTISSVQPEDLAIYYCHQYLSSRTFGQGTKLEIKRLEDLKNVFPPEVAVFEPSEAEISHTQKATLVCLATGFYPDHVELSWWVNGKEVHSGVCTDPQPLKEQPALNDSRYCLSSRLRVSATFWQNPRNHFRCQVQFYGLSENDEWTQDRAKPVTQIVSAEAWGRADCGFTSESYQQGVLSATNLSVIGFRILLLKVAGFNLLMTLRLWSSRAKRSGSGATNFSLLKQAGDVEENPGPTSMDWIWRILFLVGAATGAHSFEQVQLQQPGAEVVKPGASVKMSCKASGYTFTSYYIHWIKQTPGQGLEWVGVIYPGNDDISYNQKFQGKATLTADKSSTTAYMQLSSLTSEDSAVYYCAREVRLRYFDVWGQGTTVTVSSTRIQNPDPAVYQLRDSKSSDKSVCLFTDFDSQTNVSQSKDSDVYITDKCVLDMRSMDFKSNSAVAWSNKSDFACANAFNNSIIPEDTFFPSPESSCDVKLVEKSFETDTNLNFQILYEILLGKATLYAVLVSALVLMAMVKRKDSRG

SEQ ID NO: 13700 - protein, 764 aa, synthetic construct
MALPVTALLLPLALLLHAARPEVQLVESGGGLVQPGGSLRLSCAASGFSFSDFWMSWVRQAPGKGLEWVATISQAGSEKDYVDSVKGRFTISRDNAKKSLYLQMNSLRAEDTAVYYCASGVYSFDYRGQGTLVTVSSGTGGGGSGGGGSGGGGSEFDVLLTQSPLSLPVTLGQPASISCRSSQTIVHSNGNTYLEWFQQRPGQSPRLLIYQVSNRFSGVPDRFSGSGSGTDFTLKISRVEAEDVGVYYCFQGSHVPRTFGGGTKVEIKRALEDLKNVFPPEVAVFEPSEAEISHTQKATLVCLATGFYPDHVELSWWVNGKEVHSGVCTDPQPLKEQPALNDSRYCLSSRLRVSATFWQNPRNHFRCQVQFYGLSENDEWTQDRAKPVTQIVSAEAWGRADCGFTSESYQQGVLSATNLSVIGFRILLLKVAGFNLLMTLRLWSSRAKRSGSGATNFSLLKQAGDVEENPGPTSMDWIWRILFLVGAATGAHSFEQIQLVQSGSELKKPGASVKVSCKASGYTFTNYGMNWVRQAPGQGLKWMGWINTNTGEPKYAEEFKGRFALSLDTSVSTAYLQINSLKAEDTAVYFCARGYGNYARGAWLAYWGQGTLVTVSSTRIQNPDPAVYQLRDSKSSDKSVCLFTDFDSQTNVSQSKDSDVYITDKCVLDMRSMDFKSNSAVAWSNKSDFACANAFNNSIIPEDTFFPSPESSCDVKLVEKSFETDTNLNFQILYEILLGKATLYAVLVSALVLMAMVKRKDSRG

SEQ ID NO: 13701 - protein, 749 aa, synthetic construct
MALPVTALLLPLALLLHAARPEVQLVESGGGLVQPGGSLRLSCAASGFSFSDFWMSWVRQAPGKGLEWVATISQAGSEKDYVDSVKGRFTISRDNAKKSLYLQMNSLRAEDTAVYYCASGVYSFDYRGQGTLVTVSSGTGGGGSGGGGSGGGGSEFDEIVLTQSPATLSLSPGERATLSCSASSSINYIYWLQQKPGQAPRILIYLTSNLASGVPARFSGSGSGTDFTLTISSLEPEDFAVYYCLQWSSNPLTFGGGTKVEIKLEDLKNVFPPEVAVFEPSEAEISHTQKATLVCLATGFYPDHVELSWWVNGKEVHSGVCTDPQPLKEQPALNDSRYCLSSRLRVSATFWQNPRNHFRCQVQFYGLSENDEWTQDRAKPVTQIVSAEAWGRADCGFTSESYQQGVLSATNLSVIGFRILLLKVAGFNLLMTLRLWSSRAKRSGSGATNFSLLKQAGDVEENPGPTSMDWIWRILFLVGAATGAHSFEEVQLVESGGGLVKPGGSLRLSCAASGFTFSSYDMSWVRQAPGKGLEWVSTISSGGSYTYYLDSIKGRFTISRDNAKNSLYLQMNSLRAEDTAVYYCARQGLDYWGRGTLVTVSSTRIQNPDPAVYQLRDSKSSDKSVCLFTDFDSQTNVSQSKDSDVYITDKCVLDMRSMDFKSNSAVAWSNKSDFACANAFNNSIIPEDTFFPSPESSCDVKLVEKSFETDTNLNFQILYEILLGKATLYAVLVSALVLMAMVKRKDSRG

SEQ ID NO: 13702 - protein, 758 aa, synthetic construct
MALPVTALLLPLALLLHAARPEVQLVESGGGLVQPGGSLRLSCAASGFSFSDFWMSWVRQAPGKGLEWVATISQAGSEKDYVDSVKGRFTISRDNAKKSLYLQMNSLRAEDTAVYYCASGVYSFDYRGQGTLVTVSSGTGGGGSGGGGSGGGGSEFDIVMTQSPDSLAVSLGERATINCRASKSVSTSGYSFMHWYQQKPGQPPKLLIYLASNLESGVPDRFSGSGSGTDFTLTISSLQAEDVAVYYCQHSREVPWTFGQGTKVEIKRLEDLKNVFPPEVAVFEPSEAEISHTQKATLVCLATGFYPDHVELSWWVNGKEVHSGVCTDPQPLKEQPALNDSRYCLSSRLRVSATFWQNPRNHFRCQVQFYGLSENDEWTQDRAKPVTQIVSAEAWGRADCGFTSESYQQGVLSATNLSVIGFRILLLKVAGFNLLMTLRLWSSRAKRSGSGATNFSLLKQAGDVEENPGPTSMDWIWRILFLVGAATGAHSFEQVQLVQSGAEVKKPGASVKVSCKASGYTFTNYGMNWVRQAPGQGLEWMGWINTYTGEPTYADAFKGRFAFSLDTSTSTAYLQINSLRSDDTAVYYCARDYGDYGMDYWGQGTTVTVSSTRIQNPDPAVYQLRDSKSSDKSVCLFTDFDSQTNVSQSKDSDVYITDKCVLDMRSMDFKSNSAVAWSNKSDFACANAFNNSIIPEDTFFPSPESSCDVKLVEKSFETDTNLNFQILYEILLGKATLYAVLVSALVLMAMVKRKDSRG

SEQ ID NO: 13703 - protein, 754 aa, synthetic construct
MALPVTALLLPLALLLHAARPEVQLVESGGGLVQPGGSLRLSCAASGFSFSDFWMSWVRQAPGKGLEWVATISQAGSEKDYVDSVKGRFTISRDNAKKSLYLQMNSLRAEDTAVYYCASGVYSFDYRGQGTLVTVSSGTGGGGSGGGGSGGGGSEFDIVMTQTPLTLSVTIGQPASISCKSSQSLLDSDGKTYLNWLLQRPGQSPERLIYLVSKLDSGVPDRFTGSGSGTDFTLKISRVEAEDLGVYCCWQGTHFPYTFGGGTKVEIKGLEDLKNVFPPEVAVFEPSEAEISHTQKATLVCLATGFYPDHVELSWWVNGKEVHSGVCTDPQPLKEQPALNDSRYCLSSRLRVSATFWQNPRNHFRCQVQFYGLSENDEWTQDRAKPVTQIVSAEAWGRADCGFTSESYQQGVLSATNLSVIGFRILLLKVAGFNLLMTLRLWSSRAKRSGSGATNFSLLKQAGDVEENPGPTSMDWIWRILFLVGAATGAHSFEQVQLQQPGAELVRPGASVKLSCKASGYTFTSYWMNWVKQRPGQGLEWIGMIDPSDSETHYNHIFKDKATLTVDKSSSTAYLQLSSLTSEDSAVYYCARNLYLWGQGTSVTVSSTRIQNPDPAVYQLRDSKSSDKSVCLFTDFDSQTNVSQSKDSDVYITDKCVLDMRSMDFKSNSAVAWSNKSDFACANAFNNSIIPEDTFFPSPESSCDVKLVEKSFETDTNLNFQILYEILLGKATLYAVLVSALVLMAMVKRKDSRG

SEQ ID NO: 13704 - protein, 762 aa, synthetic construct
MALPVTALLLPLALLLHAARPEVQLVESGGGLVQPGGSLRLSCAASGFSFSDFWMSWVRQAPGKGLEWVATISQAGSEKDYVDSVKGRFTISRDNAKKSLYLQMNSLRAEDTAVYYCASGVYSFDYRGQGTLVTVSSGTGGGGSGGGGSGGGGSEFDIVMTQSPDSLAVSLGERATINCESSQSLLNSGNQKNYLTWYQQKPGQPPKPLIYWASTRESGVPDRFSGSGSGTDFTLTISSLQAEDVAVYYCQNDYSYPYTFGQGTKLEIKRLEDLKNVFPPEVAVFEPSEAEISHTQKATLVCLATGFYPDHVELSWWVNGKEVHSGVCTDPQPLKEQPALNDSRYCLSSRLRVSATFWQNPRNHFRCQVQFYGLSENDEWTQDRAKPVTQIVSAEAWGRADCGFTSESYQQGVLSATNLSVIGFRILLLKVAGFNLLMTLRLWSSRAKRSGSGATNFSLLKQAGDVEENPGPTSMDWIWRILFLVGAATGAHSFEEVQLVQSGAEVKKPGESLKISCKGSGYSFTDYYMKWARQMPGKGLEWMGDIIPSNGATFYNQKFKGQVTISADKSISTTYLQWSSLKASDTAMYYCARSHLLRASWFAYWGQGTMVTVSSTRIQNPDPAVYQLRDSKSSDKSVCLFTDFDSQTNVSQSKDSDVYITDKCVLDMRSMDFKSNSAVAWSNKSDFACANAFNNSIIPEDTFFPSPESSCDVKLVEKSFETDTNLNFQILYEILLGKATLYAVLVSALVLMAMVKRKDSRG

SEQ ID NO: 13705 - protein, 757 aa, synthetic construct
MALPVTALLLPLALLLHAARPEVQLVESGGGLVQPGGSLRLSCAASGFSFSDFWMSWVRQAPGKGLEWVATISQAGSEKDYVDSVKGRFTISRDNAKKSLYLQMNSLRAEDTAVYYCASGVYSFDYRGQGTLVTVSSGTGGGGSGGGGSGGGGSEFDIQMTQSTSSLSASLGDRVTISCSASQGINNYLNWYQQKPDGTVELLIYYTSTLQSGVPSRFSGSGSGTDYSLTISNLEPEDIGTYYCQQYSKLPRTFGGGTKLEIKLEDLKNVFPPEVAVFEPSEAEISHTQKATLVCLATGFYPDHVELSWWVNGKEVHSGVCTDPQPLKEQPALNDSRYCLSSRLRVSATFWQNPRNHFRCQVQFYGLSENDEWTQDRAKPVTQIVSAEAWGRADCGFTSESYQQGVLSATNLSVIGFRILLLKVAGFNLLMTLRLWSSRAKRSGSGATNFSLLKQAGDVEENPGPTSMDWIWRILFLVGAATGAHSFEQVQLQQSGSELMMPGASVKISCKATGYTFSNYWIEWVKQRPGHGLEWIGEILPGTGRTIYNEKFKGKATFTADISSNTVQMQLSSLTSEDSAVYYCARRDYYGNFYYAMDYWGQGTSVTVSSTRIQNPDPAVYQLRDSKSSDKSVCLFTDFDSQTNVSQSKDSDVYITDKCVLDMRSMDFKSNSAVAWSNKSDFACANAFNNSIIPEDTFFPSPESSCDVKLVEKSFETDTNLNFQILYEILLGKATLYAVLVSALVLMAMVKRKDSRG

SEQ ID NO: 13706 - protein, 752 aa, synthetic construct
MALPVTALLLPLALLLHAARPEVQLVESGGGLVQPGGSLRLSCAASGFSFSDFWMSWVRQAPGKGLEWVATISQAGSEKDYVDSVKGRFTISRDNAKKSLYLQMNSLRAEDTAVYYCASGVYSFDYRGQGTLVTVSSGTGGGGSGGGGSGGGGSEFDIQMTQSPASLSVSVGETVTITCRASENIYSNLAWYQQKQGKSPQLLVYAATNLADGVPSRFSGSGSGTQYSLKINSLQSEDFGSYYCQHFWGTWTFGGGTTLEIKLEDLKNVFPPEVAVFEPSEAEISHTQKATLVCLATGFYPDHVELSWWVNGKEVHSGVCTDPQPLKEQPALNDSRYCLSSRLRVSATFWQNPRNHFRCQVQFYGLSENDEWTQDRAKPVTQIVSAEAWGRADCGFTSESYQQGVLSATNLSVIGFRILLLKVAGFNLLMTLRLWSSRAKRSGSGATNFSLLKQAGDVEENPGPTSMDWIWRILFLVGAATGAHSFEEVQLQQSGPELVKPGASVKMSCKASGYTFTDYYMKWMKQSHGKSLEWIGDINPNNGGTTYNQKFKGKATLTVDKSSSTAYMQLNSLTSEDSAVYYCARDYGYGYFDYWGQGTTLTVSSTRIQNPDPAVYQLRDSKSSDKSVCLFTDFDSQTNVSQSKDSDVYITDKCVLDMRSMDFKSNSAVAWSNKSDFACANAFNNSIIPEDTFFPSPESSCDVKLVEKSFETDTNLNFQILYEILLGKATLYAVLVSALVLMAMVKRKDSRG

SEQ ID NO: 13707 - protein, 755 aa, synthetic construct
MALPVTALLLPLALLLHAARPEVQLVESGGGLVQPGGSLRLSCAASGFSFSDFWMSWVRQAPGKGLEWVATISQAGSEKDYVDSVKGRFTISRDNAKKSLYLQMNSLRAEDTAVYYCASGVYSFDYRGQGTLVTVSSGTGGGGSGGGGSGGGGSEFEIVLTQSPGTLSLSPGERATLSCRASQSVGGYLAWYQQKPGQAPRLLIYDASNRATGIPARFSGSGSGTDFTLTISSLEPEDFAVYYCQQRNNWPPMYTFGQGTKLEIKRLEDLKNVFPPEVAVFEPSEAEISHTQKATLVCLATGFYPDHVELSWWVNGKEVHSGVCTDPQPLKEQPALNDSRYCLSSRLRVSATFWQNPRNHFRCQVQFYGLSENDEWTQDRAKPVTQIVSAEAWGRADCGFTSESYQQGVLSATNLSVIGFRILLLKVAGFNLLMTLRLWSSRAKRSGSGATNFSLLKQAGDVEENPGPTSMDWIWRILFLVGAATGAHSFEQVQLVQSGAEVKKPGSSVKVSCKASGGTFSSYAISWVRQAPGQGLEWMGGIIPILGTANYAQKFQGRVTITADESTSTAYMELSSLRSEDTAVYYCARWGGGAFDIWGQGTMVTVSSTRIQNPDPAVYQLRDSKSSDKSVCLFTDFDSQTNVSQSKDSDVYITDKCVLDMRSMDFKSNSAVAWSNKSDFACANAFNNSIIPEDTFFPSPESSCDVKLVEKSFETDTNLNFQILYEILLGKATLYAVLVSALVLMAMVKRKDSRG

SEQ ID NO: 13708 - protein, 750 aa, synthetic construct
MALPVTALLLPLALLLHAARPEVQLVESGGGLVQPGGSLRLSCAASGFSFSDFWMSWVRQAPGKGLEWVATISQAGSEKDYVDSVKGRFTISRDNAKKSLYLQMNSLRAEDTAVYYCASGVYSFDYRGQGTLVTVSSGTGGGGSGGGGSGGGGSEFQIVLTQSPALMSASPGEKVTMTCSASSSVRYMYWYQQKPRSSPKPWIHLTSNLASGVPARFSGSGSGTSYSLTISSMEAEDAATYYCQQWSSHPFTFGSGTKLEIKLEDLKNVFPPEVAVFEPSEAEISHTQKATLVCLATGFYPDHVELSWWVNGKEVHSGVCTDPQPLKEQPALNDSRYCLSSRLRVSATFWQNPRNHFRCQVQFYGLSENDEWTQDRAKPVTQIVSAEAWGRADCGFTSESYQQGVLSATNLSVIGFRILLLKVAGFNLLMTLRLWSSRAKRSGSGATNFSLLKQAGDVEENPGPTSMDWIWRILFLVGAATGAHSFEDVQLQESGPGLVKPSQSLSLTCTVTGFSITSDYSWNWIRQFPGNKLEWMGYISYSGHTSYNPSLESRISITRDTSKNQFFLQLNSVTTEDTATYYCTRGNWDVVYWGQGTLVTVSATRIQNPDPAVYQLRDSKSSDKSVCLFTDFDSQTNVSQSKDSDVYITDKCVLDMRSMDFKSNSAVAWSNKSDFACANAFNNSIIPEDTFFPSPESSCDVKLVEKSFETDTNLNFQILYEILLGKATLYAVLVSALVLMAMVKRKDSRG

SEQ ID NO: 13709 - protein, 760 aa, synthetic construct
MALPVTALLLPLALLLHAARPEVQLVESGGGLVQPGGSLRLSCAASGFSFSDFWMSWVRQAPGKGLEWVATISQAGSEKDYVDSVKGRFTISRDNAKKSLYLQMNSLRAEDTAVYYCASGVYSFDYRGQGTLVTVSSGTGGGGSGGGGSGGGGSEFDVVMTQSPLSLPVTLGQPASISCRSSQSIVHSDGNTYLEWYQQRPGQSPRRLIYKVSNRFSGVPDRFSGSGSGTDFTLKISRVEAEDVGVYYCFQGSHAPWTFGGGTKVEIKLEDLKNVFPPEVAVFEPSEAEISHTQKATLVCLATGFYPDHVELSWWVNGKEVHSGVCTDPQPLKEQPALNDSRYCLSSRLRVSATFWQNPRNHFRCQVQFYGLSENDEWTQDRAKPVTQIVSAEAWGRADCGFTSESYQQGVLSATNLSVIGFRILLLKVAGFNLLMTLRLWSSRAKRSGSGATNFSLLKQAGDVEENPGPTSMDWIWRILFLVGAATGAHSFEEVQLVESGGGLVQPGGSLRLSCAASGFTFSSYGMHWVRQAPGKGLEWVAYITTRSSTIYYADSVKGRFTISRDNAKNSLYLQMNSLRAEDTAVYYCTREPLTGYYAMDYWGQGTSVTVSSTRIQNPDPAVYQLRDSKSSDKSVCLFTDFDSQTNVSQSKDSDVYITDKCVLDMRSMDFKSNSAVAWSNKSDFACANAFNNSIIPEDTFFPSPESSCDVKLVEKSFETDTNLNFQILYEILLGKATLYAVLVSALVLMAMVKRKDSRG

SEQ ID NO: 13710 - protein, 752 aa, synthetic construct
MALPVTALLLPLALLLHAARPEVQLVESGGGLVQPGGSLRLSCAASGFSFSDFWMSWVRQAPGKGLEWVATISQAGSEKDYVDSVKGRFTISRDNAKKSLYLQMNSLRAEDTAVYYCASGVYSFDYRGQGTLVTVSSGTGGGGSGGGGSGGGGSEFDIQMTQSPSSLSASVGDRVTITCRASQSISLWLNWYQQKPGKAPKLLIYAASTLQSGVPSRFSGSGSGTDFTLTISSLQPEDFATYYCQQYYTSPYTFGQGTKVEIKRLEDLKNVFPPEVAVFEPSEAEISHTQKATLVCLATGFYPDHVELSWWVNGKEVHSGVCTDPQPLKEQPALNDSRYCLSSRLRVSATFWQNPRNHFRCQVQFYGLSENDEWTQDRAKPVTQIVSAEAWGRADCGFTSESYQQGVLSATNLSVIGFRILLLKVAGFNLLMTLRLWSSRAKRSGSGATNFSLLKQAGDVEENPGPTSMDWIWRILFLVGAATGAHSFEQVQLLESGGGLVQPGGSLRLSCAASGFTFSSYAMSWVRQAPGKGLEWVSVIRSSGSSTYYADSVKGRFTISRDNSKNTLYLQMNSLRAEDTAVYYCARGGGYFDYWGQGTLVTVSSTRIQNPDPAVYQLRDSKSSDKSVCLFTDFDSQTNVSQSKDSDVYITDKCVLDMRSMDFKSNSAVAWSNKSDFACANAFNNSIIPEDTFFPSPESSCDVKLVEKSFETDTNLNFQILYEILLGKATLYAVLVSALVLMAMVKRKDSRG

SEQ ID NO: 13711 - protein, 755 aa, synthetic construct
MALPVTALLLPLALLLHAARPEVQLVESGGGLVQPGGSLRLSCAASGFSFSDFWMSWVRQAPGKGLEWVATISQAGSEKDYVDSVKGRFTISRDNAKKSLYLQMNSLRAEDTAVYYCASGVYSFDYRGQGTLVTVSSGTGGGGSGGGGSGGGGSEFDIQMTQSPSSLSASVGDRVTITCRASQSISSYLNWYQQKPGKAPKLLIYAVSTLQSGVPSRFSGSGSGTDFTLTISSLQPEDFATYYCQQSGTFPPTTFGQGTKVEIKRLEDLKNVFPPEVAVFEPSEAEISHTQKATLVCLATGFYPDHVELSWWVNGKEVHSGVCTDPQPLKEQPALNDSRYCLSSRLRVSATFWQNPRNHFRCQVQFYGLSENDEWTQDRAKPVTQIVSAEAWGRADCGFTSESYQQGVLSATNLSVIGFRILLLKVAGFNLLMTLRLWSSRAKRSGSGATNFSLLKQAGDVEENPGPTSMDWIWRILFLVGAATGAHSFEQVQLLESGGGLVQPGGSLRLSCAASGFTFSSHGMHWVRQAPGKGLEWVSVISGSGSNTGYADSVKGRFTISRDNSKNTLYLQMNSLRAEDTAVYYCARQWGSYAFDSWGQGTLVTVSSTRIQNPDPAVYQLRDSKSSDKSVCLFTDFDSQTNVSQSKDSDVYITDKCVLDMRSMDFKSNSAVAWSNKSDFACANAFNNSIIPEDTFFPSPESSCDVKLVEKSFETDTNLNFQILYEILLGKATLYAVLVSALVLMAMVKRKDSRG

SEQ ID NO: 13712 - protein, 765 aa, synthetic construct
MALPVTALLLPLALLLHAARPEVQLVESGGGLVQPGGSLRLSCAASGFSFSDFWMSWVRQAPGKGLEWVATISQAGSEKDYVDSVKGRFTISRDNAKKSLYLQMNSLRAEDTAVYYCASGVYSFDYRGQGTLVTVSSGTGGGGSGGGGSGGGGSEFDIVMSQSPSSLAVSVGEKVTMSCKSSQSLLHSSNQKNYLAWYQQKPGQSPKVLIYWASTRESGVPDRFTGSGSGTDFTLTITSVKSEDLAVYYCQQYYSYPWTFGGGTRLEIKRLEDLKNVFPPEVAVFEPSEAEISHTQKATLVCLATGFYPDHVELSWWVNGKEVHSGVCTDPQPLKEQPALNDSRYCLSSRLRVSATFWQNPRNHFRCQVQFYGLSENDEWTQDRAKPVTQIVSAEAWGRADCGFTSESYQQGVLSATNLSVIGFRILLLKVAGFNLLMTLRLWSSRAKRSGSGATNFSLLKQAGDVEENPGPTSMDWIWRILFLVGAATGAHSFEEVQLQQSVAELVKPGASVKMSCKVSGYTLTDHTIHWMKQRPEQGLEWIGYIYPRDGITGYNEKFKGKATLTADTSSSTAYMQLNSLTSEDSAVYFCARWGYSYRNYAYYYDYWGQGTTLTVSSTRIQNPDPAVYQLRDSKSSDKSVCLFTDFDSQTNVSQSKDSDVYITDKCVLDMRSMDFKSNSAVAWSNKSDFACANAFNNSIIPEDTFFPSPESSCDVKLVEKSFETDTNLNFQILYEILLGKATLYAVLVSALVLMAMVKRKDSRG

SEQ ID NO: 13713 - protein, 762 aa, synthetic construct
MALPVTALLLPLALLLHAARPEVQLVESGGGLVQPGGSLRLSCAASGFSFSDFWMSWVRQAPGKGLEWVATISQAGSEKDYVDSVKGRFTISRDNAKKSLYLQMNSLRAEDTAVYYCASGVYSFDYRGQGTLVTVSSGTGGGGSGGGGSGGGGSEFEIVLTQSPGTLSLSPGERATLSCRASQSVSSSYLAWYQQKPGQAPRLLIYGTSSRATGIPDRFSGSGSGTDFTLTISRLEPEDFAVYYCQQYGSSPFTFGGGTKVEIKRLEDLKNVFPPEVAVFEPSEAEISHTQKATLVCLATGFYPDHVELSWWVNGKEVHSGVCTDPQPLKEQPALNDSRYCLSSRLRVSATFWQNPRNHFRCQVQFYGLSENDEWTQDRAKPVTQIVSAEAWGRADCGFTSESYQQGVLSATNLSVIGFRILLLKVAGFNLLMTLRLWSSRAKRSGSGATNFSLLKQAGDVEENPGPTSMDWIWRILFLVGAATGAHSFEQVQLQESGPGLAKPSETLSLTCTVSGDSITSYYWSWIRQPPGKGLEWIGYIYYSGSTNYNPSLKSRVTISVDTSKNQFSLKLSSVTAADTAVYYCARDQRRIAAAGTHFYGMDVWGQGTTVTVSSTRIQNPDPAVYQLRDSKSSDKSVCLFTDFDSQTNVSQSKDSDVYITDKCVLDMRSMDFKSNSAVAWSNKSDFACANAFNNSIIPEDTFFPSPESSCDVKLVEKSFETDTNLNFQILYEILLGKATLYAVLVSALVLMAMVKRKDSRG

SEQ ID NO: 13714 - protein, 754 aa, synthetic construct
MALPVTALLLPLALLLHAARPEVQLVESGGGLVQPGGSLRLSCAASGFSFSDFWMSWVRQAPGKGLEWVATISQAGSEKDYVDSVKGRFTISRDNAKKSLYLQMNSLRAEDTAVYYCASGVYSFDYRGQGTLVTVSSGTGGGGSGGGGSGGGGSEFDILLTQSPVILSVSPGERVSFSCRASQSIGTNIHWYQQRTNGSPRLLIKYASESISGIPSRFSGSGSGTDFTLSINSVESEDIADYYCQQNNNWPTTFGAGTKLELKLEDLKNVFPPEVAVFEPSEAEISHTQKATLVCLATGFYPDHVELSWWVNGKEVHSGVCTDPQPLKEQPALNDSRYCLSSRLRVSATFWQNPRNHFRCQVQFYGLSENDEWTQDRAKPVTQIVSAEAWGRADCGFTSESYQQGVLSATNLSVIGFRILLLKVAGFNLLMTLRLWSSRAKRSGSGATNFSLLKQAGDVEENPGPTSMDWIWRILFLVGAATGAHSFEQVQLKQSGPGLVQPSQSLSITCTVSGFSLTNYGVHWVRQSPGKGLEWLGVIWSGGNTDYNTPFTSRLSINKDNSKSQVFFKMNSLQSNDTAIYYCARALTYYDYEFAYWGQGTLVTVSATRIQNPDPAVYQLRDSKSSDKSVCLFTDFDSQTNVSQSKDSDVYITDKCVLDMRSMDFKSNSAVAWSNKSDFACANAFNNSIIPEDTFFPSPESSCDVKLVEKSFETDTNLNFQILYEILLGKATLYAVLVSALVLMAMVKRKDSRG

SEQ ID NO: 13715 - protein, 747 aa, synthetic construct
MALPVTALLLPLALLLHAARPEVQLVESGGGLVQPGGSLRLSCAASGFSFSDFWMSWVRQAPGKGLEWVATISQAGSEKDYVDSVKGRFTISRDNAKKSLYLQMNSLRAEDTAVYYCASGVYSFDYRGQGTLVTVSSGTGGGGSGGGGSGGGGSEFMTQSPKFLLVSAGDRVTLTCKASQSVNNDVYWYQQEPGQSPKLLIYWASTRESGVPDRFTGSGSGTDFTLTISSVQAEDLAVYYCKQSYNLYTFGGGTKLEIKRLEDLKNVFPPEVAVFEPSEAEISHTQKATLVCLATGFYPDHVELSWWVNGKEVHSGVCTDPQPLKEQPALNDSRYCLSSRLRVSATFWQNPRNHFRCQVQFYGLSENDEWTQDRAKPVTQIVSAEAWGRADCGFTSESYQQGVLSATNLSVIGFRILLLKVAGFNLLMTLRLWSSRAKRSGSGATNFSLLKQAGDVEENPGPTSMDWIWRILFLVGAATGAHSFEESGRGLVQPGGSRKLSCAASGFTFSTSGMHWVRQAPEKGLEWVAYISSGSTTIYHADTVKGRFTISRDNPKNTLFLQMTSLRSEDTAMYYCCARSGQFGNYFDYWGQGTTLTVSSTRIQNPDPAVYQLRDSKSSDKSVCLFTDFDSQTNVSQSKDSDVYITDKCVLDMRSMDFKSNSAVAWSNKSDFACANAFNNSIIPEDTFFPSPESSCDVKLVEKSFETDTNLNFQILYEILLGKATLYAVLVSALVLMAMVKRKDSRG

SEQ ID NO: 13716 - protein, 752 aa, synthetic construct
MALPVTALLLPLALLLHAARPEVQLVESGGGLVQPGGSLRLSCAASGFSFSDFWMSWVRQAPGKGLEWVATISQAGSEKDYVDSVKGRFTISRDNAKKSLYLQMNSLRAEDTAVYYCASGVYSFDYRGQGTLVTVSSGTGGGGSGGGGSGGGGSEFQSPSSLAVSAGEKVTMSCKSSQSLLNSRTRKNYLAWYQQKPGQSPKLLIYWASTRESGVPDRFTGSGSGTDFTLTISSVQAEDLAVYYCKQSNLYTFGGGTKLEIKLEDLKNVFPPEVAVFEPSEAEISHTQKATLVCLATGFYPDHVELSWWVNGKEVHSGVCTDPQPLKEQPALNDSRYCLSSRLRVSATFWQNPRNHFRCQVQFYGLSENDEWTQDRAKPVTQIVSAEAWGRADCGFTSESYQQGVLSATNLSVIGFRILLLKVAGFNLLMTLRLWSSRAKRSGSGATNFSLLKQAGDVEENPGPTSMDWIWRILFLVGAATGAHSFEQVQLEESGPELVKPGASVKLSCKASGYTFTEYIIHWVKQRSGQGLEWIGWFYPGSGSIKYNEKFKDKATLTADKSSSTVYMELSGLTSEDSAVYFCARHDGYSYFDYWGQGTTLTVSSTRIQNPDPAVYQLRDSKSSDKSVCLFTDFDSQTNVSQSKDSDVYITDKCVLDMRSMDFKSNSAVAWSNKSDFACANAFNNSIIPEDTFFPSPESSCDVKLVEKSFETDTNLNFQILYEILLGKATLYAVLVSALVLMAMVKRKDSRG

SEQ ID NO: 13717 - protein, 755 aa, synthetic construct
MALPVTALLLPLALLLHAARPEVQLVESGGGLVQPGGSLRLSCAASGFSFSDFWMSWVRQAPGKGLEWVATISQAGSEKDYVDSVKGRFTISRDNAKKSLYLQMNSLRAEDTAVYYCASGVYSFDYRGQGTLVTVSSGTGGGGSGGGGSGGGGSEFDIQMTQSPSSLSASLGERVSLTCRATQELSGYLSWLQQKPDGTIKRLIYAASTLDSGVPKRFSGNRSGSDYSLTISSLESEDFADYYCLQYAIYPYTFGGGTKLEIKLEDLKNVFPPEVAVFEPSEAEISHTQKATLVCLATGFYPDHVELSWWVNGKEVHSGVCTDPQPLKEQPALNDSRYCLSSRLRVSATFWQNPRNHFRCQVQFYGLSENDEWTQDRAKPVTQIVSAEAWGRADCGFTSESYQQGVLSATNLSVIGFRILLLKVAGFNLLMTLRLWSSRAKRSGSGATNFSLLKQAGDVEENPGPTSMDWIWRILFLVGAATGAHSFEEVQLQQSGPELVKPGASVKMSCKASGYTFTSYFIHWVKQKPGQGLEWIGFINPYNDGSKYNEKFKGKATLTSDKSSSTAYMELSSLTSEDSAVYYCTRDDGYYGYAMDYWGQGTSVTVSSTRIQNPDPAVYQLRDSKSSDKSVCLFTDFDSQTNVSQSKDSDVYITDKCVLDMRSMDFKSNSAVAWSNKSDFACANAFNNSIIPEDTFFPSPESSCDVKLVEKSFETDTNLNFQILYEILLGKATLYAVLVSALVLMAMVKRKDSRG

SEQ ID NO: 13718 - protein, 760 aa, synthetic construct
MALPVTALLLPLALLLHAARPEVQLVESGGGLVQPGGSLRLSCAASGFSFSDFWMSWVRQAPGKGLEWVATISQAGSEKDYVDSVKGRFTISRDNAKKSLYLQMNSLRAEDTAVYYCASGVYSFDYRGQGTLVTVSSGTGGGGSGGGGSGGGGSEFDTIVLTQSPASLAVSLGQRATISCRASESVDSYGNSFMHWYQQKPGQPPKLLIYLASNLESGVPARFSGSGSRTDFTLTIDPVEADDAATYYCQQNNYDPWTFGGGTKLEIKLEDLKNVFPPEVAVFEPSEAEISHTQKATLVCLATGFYPDHVELSWWVNGKEVHSGVCTDPQPLKEQPALNDSRYCLSSRLRVSATFWQNPRNHFRCQVQFYGLSENDEWTQDRAKPVTQIVSAEAWGRADCGFTSESYQQGVLSATNLSVIGFRILLLKVAGFNLLMTLRLWSSRAKRSGSGATNFSLLKQAGDVEENPGPTSMDWIWRILFLVGAATGAHSFEEVQLQQSGPELVKPGASVKMSCKASGYTFTSYVMHWVKQKPGQGLEWIGYINPYNDGTKYNEKFKGKATLTSDTSSSTAYMELNSLTSEDSAVYFCARPIYFDNDYFDYWGQGTTLKVSSTRIQNPDPAVYQLRDSKSSDKSVCLFTDFDSQTNVSQSKDSDVYITDKCVLDMRSMDFKSNSAVAWSNKSDFACANAFNNSIIPEDTFFPSPESSCDVKLVEKSFETDTNLNFQILYEILLGKATLYAVLVSALVLMAMVKRKDSRG

SEQ ID NO: 13719 - protein, 755 aa, synthetic construct
MALPVTALLLPLALLLHAARPEVQLVESGGGLVQPGGSLRLSCAASGFSFSDFWMSWVRQAPGKGLEWVATISQAGSEKDYVDSVKGRFTISRDNAKKSLYLQMNSLRAEDTAVYYCASGVYSFDYRGQGTLVTVSSGTGGGGSGGGGSGGGGSEFDIQMTQSPSSLSASVGDRVTITCKASQDVGIAVAWYQQKPGKVPKLLIYWASTRHTGVPDRFSGSGSGTDFTLTISSLQPEDVATYYCQQYSSYPYTFGQGTKVEIKRLEDLKNVFPPEVAVFEPSEAEISHTQKATLVCLATGFYPDHVELSWWVNGKEVHSGVCTDPQPLKEQPALNDSRYCLSSRLRVSATFWQNPRNHFRCQVQFYGLSENDEWTQDRAKPVTQIVSAEAWGRADCGFTSESYQQGVLSATNLSVIGFRILLLKVAGFNLLMTLRLWSSRAKRSGSGATNFSLLKQAGDVEENPGPTSMDWIWRILFLVGAATGAHSFEEVQLVESGGGLVQPGGSLRLSCAASGFDFSRYWMSWVRQAPGKGLEWIGEINPDSSTINYAPSLKDKFIISRDNAKNSLYLQMNSLRAEDTAVYYCARPDGNYWYFDVWGQGTLVTVSSTRIQNPDPAVYQLRDSKSSDKSVCLFTDFDSQTNVSQSKDSDVYITDKCVLDMRSMDFKSNSAVAWSNKSDFACANAFNNSIIPEDTFFPSPESSCDVKLVEKSFETDTNLNFQILYEILLGKATLYAVLVSALVLMAMVKRKDSRG

SEQ ID NO: 13720 - protein, 755 aa, synthetic construct
MALPVTALLLPLALLLHAARPEVQLVESGGGLVQPGGSLRLSCAASGFSFSDFWMSWVRQAPGKGLEWVATISQAGSEKDYVDSVKGRFTISRDNAKKSLYLQMNSLRAEDTAVYYCASGVYSFDYRGQGTLVTVSSGTGGGGSGGGGSGGGGSEFDIVMTQSQKSMSTSVGDRVSITCKASQDVITGVAWYQQKPGQSPKLLIYSASYRYTGVPDRFTGSGSGTDFTFTISNVQAEDLAVYYCQQHYSTPLTFGAGTKLELKLEDLKNVFPPEVAVFEPSEAEISHTQKATLVCLATGFYPDHVELSWWVNGKEVHSGVCTDPQPLKEQPALNDSRYCLSSRLRVSATFWQNPRNHFRCQVQFYGLSENDEWTQDRAKPVTQIVSAEAWGRADCGFTSESYQQGVLSATNLSVIGFRILLLKVAGFNLLMTLRLWSSRAKRSGSGATNFSLLKQAGDVEENPGPTSMDWIWRILFLVGAATGAHSFEQVQLQQPGAELVRPGASVKLSCKASGYSFTTYWMNWVKQRPGQGLEWIGMIHPSDSETRLNQKFKDKATLTVDKSSSTAYMQLSSPTSEDSAVYYCARSTMIATRAMDYWGQGTSVTVSSTRIQNPDPAVYQLRDSKSSDKSVCLFTDFDSQTNVSQSKDSDVYITDKCVLDMRSMDFKSNSAVAWSNKSDFACANAFNNSIIPEDTFFPSPESSCDVKLVEKSFETDTNLNFQILYEILLGKATLYAVLVSALVLMAMVKRKDSRG

SEQ ID NO: 13721 - protein, 761 aa, synthetic construct
MALPVTALLLPLALLLHAARPEVQLVESGGGLVQPGGSLRLSCAASGFSFSDFWMSWVRQAPGKGLEWVATISQAGSEKDYVDSVKGRFTISRDNAKKSLYLQMNSLRAEDTAVYYCASGVYSFDYRGQGTLVTVSSGTGGGGSGGGGSGGGGSEFQSVLTQPPSVSGAPGQRVTISCTGSGSNIGAPYDVSWYQQLPGTAPKLLIYHNNKRPSGVPDRFSGSKSGTSASLAITGLQAEDEADYYCATVEAGLSGSVFGGGTKLTVLGALEDLKNVFPPEVAVFEPSEAEISHTQKATLVCLATGFYPDHVELSWWVNGKEVHSGVCTDPQPLKEQPALNDSRYCLSSRLRVSATFWQNPRNHFRCQVQFYGLSENDEWTQDRAKPVTQIVSAEAWGRADCGFTSESYQQGVLSATNLSVIGFRILLLKVAGFNLLMTLRLWSSRAKRSGSGATNFSLLKQAGDVEENPGPTSMDWIWRILFLVGAATGAHSFEQVQLVQSGAEVKKPGASVKVSCKVSGYTLTELSIHWVRQAPGKGLEWMGGFDPEENEIVYAQRFQGRVTMTEDTSTDTAYMELSSLRSEDTAVYYCAIVGSFSPLTLGLWGQGTMVTVSSTRIQNPDPAVYQLRDSKSSDKSVCLFTDFDSQTNVSQSKDSDVYITDKCVLDMRSMDFKSNSAVAWSNKSDFACANAFNNSIIPEDTFFPSPESSCDVKLVEKSFETDTNLNFQILYEILLGKATLYAVLVSALVLMAMVKRKDSRG

SEQ ID NO: 13722 - protein, 761 aa, synthetic construct
MALPVTALLLPLALLLHAARPEVQLVESGGGLVQPGGSLRLSCAASGFSFSDFWMSWVRQAPGKGLEWVATISQAGSEKDYVDSVKGRFTISRDNAKKSLYLQMNSLRAEDTAVYYCASGVYSFDYRGQGTLVTVSSGTGGGGSGGGGSGGGGSEFQSVLTQPPSVSGAPGQRVTISCTGSGSNIGAPYDVSWYQQLPGTAPKLLIYHNNKRPSGVPDRFSGSKSGTSASLAITGLQAEDEADYYCQSYDSSSISTIFGGGTKLTVLGALEDLKNVFPPEVAVFEPSEAEISHTQKATLVCLATGFYPDHVELSWWVNGKEVHSGVCTDPQPLKEQPALNDSRYCLSSRLRVSATFWQNPRNHFRCQVQFYGLSENDEWTQDRAKPVTQIVSAEAWGRADCGFTSESYQQGVLSATNLSVIGFRILLLKVAGFNLLMTLRLWSSRAKRSGSGATNFSLLKQAGDVEENPGPTSMDWIWRILFLVGAATGAHSFEQVQLVQSGAEVKKPGASVKVSCKVSGYTLTELSIHWVRQAPGKGLEWMGGFDPEENEIVYAQRFQGRVTMTEDTSTDTAYMELSSLRSEDTAVYYCAIVGSFSGIAYRPWGQGTMVTVSSTRIQNPDPAVYQLRDSKSSDKSVCLFTDFDSQTNVSQSKDSDVYITDKCVLDMRSMDFKSNSAVAWSNKSDFACANAFNNSIIPEDTFFPSPESSCDVKLVEKSFETDTNLNFQILYEILLGKATLYAVLVSALVLMAMVKRKDSRG

SEQ ID NO: 13723 - protein, 749 aa, synthetic construct
MALPVTALLLPLALLLHAARPEVQLVESGGGLVQPGGSLRLSCAASGFSFSDFWMSWVRQAPGKGLEWVATISQAGSEKDYVDSVKGRFTISRDNAKKSLYLQMNSLRAEDTAVYYCASGVYSFDYRGQGTLVTVSSGTGGGGSGGGGSGGGGSEFDIQMTQSPSSLSASVGDRVTITCRASQGIRNNLAWYQQKPGKAPKRLIYAASNLQSGVPSRFTGSGSGTEFTLIVSSLQPEDFATYYCLQHHSYPLTSGGGTKVELEDLKNVFPPEVAVFEPSEAEISHTQKATLVCLATGFYPDHVELSWWVNGKEVHSGVCTDPQPLKEQPALNDSRYCLSSRLRVSATFWQNPRNHFRCQVQFYGLSENDEWTQDRAKPVTQIVSAEAWGRADCGFTSESYQQGVLSATNLSVIGFRILLLKVAGFNLLMTLRLWSSRAKRSGSGATNFSLLKQAGDVEENPGPTSMDWIWRILFLVGAATGAHSFEEVQVLESGGGLVQPGGSLRLSCAASGFTFSSYAMSWVRQAPGKGLEWVSAISGSGGSTNYADSVKGRFTISRDNSKNTLYLQMNSLRAEDTAVYYCAGSSGWSEYWGQGTLVTVSSTRIQNPDPAVYQLRDSKSSDKSVCLFTDFDSQTNVSQSKDSDVYITDKCVLDMRSMDFKSNSAVAWSNKSDFACANAFNNSIIPEDTFFPSPESSCDVKLVEKSFETDTNLNFQILYEILLGKATLYAVLVSALVLMAMVKRKDSRG

SEQ ID NO: 13724 - protein, 755 aa, synthetic construct
MALPVTALLLPLALLLHAARPEVQLVESGGGLVQPGGSLRLSCAASGFSFSDFWMSWVRQAPGKGLEWVATISQAGSEKDYVDSVKGRFTISRDNAKKSLYLQMNSLRAEDTAVYYCASGVYSFDYRGQGTLVTVSSGTGGGGSGGGGSGGGGSEFDEIQLVQSGAEVKKPGESLRISCKGSGFNIEDYYIHWVRQMPGKGLEWMGRIDPENDETKYGPIFQGHVTISADTSINTVYLQWSSLKASDTAMYYCAFRGGVYWGQGTTVTVSSLEDLKNVFPPEVAVFEPSEAEISHTQKATLVCLATGFYPDHVELSWWVNGKEVHSGVCTDPQPLKEQPALNDSRYCLSSRLRVSATFWQNPRNHFRCQVQFYGLSENDEWTQDRAKPVTQIVSAEAWGRADCGFTSESYQQGVLSATNLSVIGFRILLLKVAGFNLLMTLRLWSSRAKRSGSGATNFSLLKQAGDVEENPGPTSMDWIWRILFLVGAATGAHSFEDVVMTQSPDSLAVSLGERATINCKSSQSLLDSDGKTYLNWLQQKPGQPPKRLISLVSKLDSGVPDRFSGSGSGTDFTLTISSLQAEDVAVYYCWQGTHFPGTFGGGTKVEIKTRIQNPDPAVYQLRDSKSSDKSVCLFTDFDSQTNVSQSKDSDVYITDKCVLDMRSMDFKSNSAVAWSNKSDFACANAFNNSIIPEDTFFPSPESSCDVKLVEKSFETDTNLNFQILYEILLGKATLYAVLVSALVLMAMVKRKDSRG

SEQ ID NO: 13725 - protein, 762 aa, synthetic construct
MALPVTALLLPLALLLHAARPEVQLVESGGGLVQPGGSLRLSCAASGFSFSDFWMSWVRQAPGKGLEWVATISQAGSEKDYVDSVKGRFTISRDNAKKSLYLQMNSLRAEDTAVYYCASGVYSFDYRGQGTLVTVSSGTGGGGSGGGGSGGGGSEFDELVMTQSPSSLTVTAGEKVTMSCKSSQSLLNSGNQKNYLTWYQQKPGQPPKLLIYWASTRESGVPDRFTGSGSGTDFTLTISSVQAEDLAVYYCQNDYSYPLTFGAGTKLEIKLEDLKNVFPPEVAVFEPSEAEISHTQKATLVCLATGFYPDHVELSWWVNGKEVHSGVCTDPQPLKEQPALNDSRYCLSSRLRVSATFWQNPRNHFRCQVQFYGLSENDEWTQDRAKPVTQIVSAEAWGRADCGFTSESYQQGVLSATNLSVIGFRILLLKVAGFNLLMTLRLWSSRAKRSGSGATNFSLLKQAGDVEENPGPTSMDWIWRILFLVGAATGAHSFEEVQLLEQSGAELVRPGTSVKISCKASGYAFTNYWLGWVKQRPGHGLEWIGDIFPGSGNIHYNEKFKGKATLTADKSSSTAYMQLSSLTFEDSAVYFCARLRNWDEPMDYWGQGTTVTVSSTRIQNPDPAVYQLRDSKSSDKSVCLFTDFDSQTNVSQSKDSDVYITDKCVLDMRSMDFKSNSAVAWSNKSDFACANAFNNSIIPEDTFFPSPESSCDVKLVEKSFETDTNLNFQILYEILLGKATLYAVLVSALVLMAMVKRKDSRG

SEQ ID NO: 13726 - protein, 763 aa, synthetic construct
MALPVTALLLPLALLLHAARPEVQLVESGGGLVQPGGSLRLSCAASGFSFSDFWMSWVRQAPGKGLEWVATISQAGSEKDYVDSVKGRFTISRDNAKKSLYLQMNSLRAEDTAVYYCASGVYSFDYRGQGTLVTVSSGTGGGGSGGGGSGGGGSEFDELQMTQSPSSLSASVGDRVTITCRASQSISSYLNWYQQKPGQPPKLLIYWASTRESGVPDRFSGSESGTNYTLTISSLQPEDFATYFCQQSDSLPITFGQGTRLDIQLEDLKNVFPPEVAVFEPSEAEISHTQKATLVCLATGFYPDHVELSWWVNGKEVHSGVCTDPQPLKEQPALNDSRYCLSSRLRVSATFWQNPRNHFRCQVQFYGLSENDEWTQDRAKPVTQIVSAEAWGRADCGFTSESYQQGVLSATNLSVIGFRILLLKVAGFNLLMTLRLWSSRAKRSGSGATNFSLLKQAGDVEENPGPTSMDWIWRILFLVGAATGAHSFEEVQLLESGGGVVQPGRSLRLSCAASGFTFSSYGMHWVRQAPGKGLEWVAVISYDGSNKYYADSVKGRFTISRDNSKNTLYLQMNSLRAEDTAVYYCAKDMGWGSGWRPYYYYGMDVWGQGTTVTVSSTRIQNPDPAVYQLRDSKSSDKSVCLFTDFDSQTNVSQSKDSDVYITDKCVLDMRSMDFKSNSAVAWSNKSDFACANAFNNSIIPEDTFFPSPESSCDVKLVEKSFETDTNLNFQILYEILLGKATLYAVLVSALVLMAMVKRKDSRG

SEQ ID NO: 13727 - protein, 760 aa, synthetic construct
MALPVTALLLPLALLLHAARPEVQLVESGGGLVQPGGSLRLSCAASGFSFSDFWMSWVRQAPGKGLEWVATISQAGSEKDYVDSVKGRFTISRDNAKKSLYLQMNSLRAEDTAVYYCASGVYSFDYRGQGTLVTVSSGTGGGGSGGGGSGGGGSEFDDIQMTQSPSSLSASVGDRVTITCRASQSISSYLNWYQQKPGKAPKLLIYAASSLQSGVPSRFSGSGSGTDFTLTISSLQPEDLATYYCQQSYSTPFTFGPGTKVDIKLEDLKNVFPPEVAVFEPSEAEISHTQKATLVCLATGFYPDHVELSWWVNGKEVHSGVCTDPQPLKEQPALNDSRYCLSSRLRVSATFWQNPRNHFRCQVQFYGLSENDEWTQDRAKPVTQIVSAEAWGRADCGFTSESYQQGVLSATNLSVIGFRILLLKVAGFNLLMTLRLWSSRAKRSGSGATNFSLLKQAGDVEENPGPTSMDWIWRILFLVGAATGAHSFEVHEVQLVQSGAEVKKPGSSVKVSCKASGGTFSSYAISWVRQAPGQGLEWMGGIIPIFGTANYAQKFQGRVTITADKSTSTAYMELSSLRSEDTAVYYCATFALFGFREQAFDIWGQGTTVTVSSTRIQNPDPAVYQLRDSKSSDKSVCLFTDFDSQTNVSQSKDSDVYITDKCVLDMRSMDFKSNSAVAWSNKSDFACANAFNNSIIPEDTFFPSPESSCDVKLVEKSFETDTNLNFQILYEILLGKATLYAVLVSALVLMAMVKRKDSRG

SEQ ID NO: 13728 - protein, 758 aa, synthetic construct
MALPVTALLLPLALLLHAARPEVQLVESGGGLVQPGGSLRLSCAASGFSFSDFWMSWVRQAPGKGLEWVATISQAGSEKDYVDSVKGRFTISRDNAKKSLYLQMNSLRAEDTAVYYCASGVYSFDYRGQGTLVTVSSGTGGGGSGGGGSGGGGSEFDIVLTQSPLSLAVSLGQPAIISCKASQSVSFAGTSLMHWYHQKPGQQPRLLIYRASNLEAGVPDRFSGSGSKTDFTLTISPVEAEDAATYYCQQSREYPYTFGGGTKLEIKRLEDLKNVFPPEVAVFEPSEAEISHTQKATLVCLATGFYPDHVELSWWVNGKEVHSGVCTDPQPLKEQPALNDSRYCLSSRLRVSATFWQNPRNHFRCQVQFYGLSENDEWTQDRAKPVTQIVSAEAWGRADCGFTSESYQQGVLSATNLSVIGFRILLLKVAGFNLLMTLRLWSSRAKRSGSGATNFSLLKQAGDVEENPGPTSMDWIWRILFLVGAATGAHSFEQVQLVQSGAEVVKPGASVKISCKASGYTFTGYFMNWVKQSPGQSLEWIGRIHPYDGDTFYNQKFQGKATLTVDKSSNTAHMELLSLTSEDFAVYYCTRYDGSRAMDYWGQGTTVTVSSTRIQNPDPAVYQLRDSKSSDKSVCLFTDFDSQTNVSQSKDSDVYITDKCVLDMRSMDFKSNSAVAWSNKSDFACANAFNNSIIPEDTFFPSPESSCDVKLVEKSFETDTNLNFQILYEILLGKATLYAVLVSALVLMAMVKRKDSRG

SEQ ID NO: 13729 - protein, 755 aa, synthetic construct
MALPVTALLLPLALLLHAARPEVQLVESGGGLVQPGGSLRLSCAASGFSFSDFWMSWVRQAPGKGLEWVATISQAGSEKDYVDSVKGRFTISRDNAKKSLYLQMNSLRAEDTAVYYCASGVYSFDYRGQGTLVTVSSGTGGGGSGGGGSGGGGSEFDDVVMTQTPLSLPVTPGEPASISCRSSQSLVHRNGNTYLHWYLQKPGQSPKLLIHKVSNRFSGVPDRFSGSGSGTDFTLKISRVEAEDLGVYFCSQSTHVPPLTFGAGTKLELKLEDLKNVFPPEVAVFEPSEAEISHTQKATLVCLATGFYPDHVELSWWVNGKEVHSGVCTDPQPLKEQPALNDSRYCLSSRLRVSATFWQNPRNHFRCQVQFYGLSENDEWTQDRAKPVTQIVSAEAWGRADCGFTSESYQQGVLSATNLSVIGFRILLLKVAGFNLLMTLRLWSSRAKRSGSGATNFSLLKQAGDVEENPGPTSMDWIWRILFLVGAATGAHSFEEVQLVQSGAEVEKPGASVKISCKASGSSFTGYNMNWVRQNIGKSLEWIGAIDPYYGGTSYNQKFKGRATLTVDKSTSTAYMHLKSLRSEDTAVYYCVSGMEYWGQGTSVTVSSTRIQNPDPAVYQLRDSKSSDKSVCLFTDFDSQTNVSQSKDSDVYITDKCVLDMRSMDFKSNSAVAWSNKSDFACANAFNNSIIPEDTFFPSPESSCDVKLVEKSFETDTNLNFQILYEILLGKATLYAVLVSALVLMAMVKRKDSRG

SEQ ID NO: 13730 - protein, 753 aa, synthetic construct
MALPVTALLLPLALLLHAARPEVQLVESGGGLVQPGGSLRLSCAASGFSFSDFWMSWVRQAPGKGLEWVATISQAGSEKDYVDSVKGRFTISRDNAKKSLYLQMNSLRAEDTAVYYCASGVYSFDYRGQGTLVTVSSGTGGGGSGGGGSGGGGSEFDEIVMTQTPATLSVSAGERVTITCKASQSVSNDVTWYQQKPGQAPRLLIYSASNRYSGVPARFSGSGYGTEFTFTISSVQSEDFAVYFCQQDYSSFGQGTKLEIKRLEDLKNVFPPEVAVFEPSEAEISHTQKATLVCLATGFYPDHVELSWWVNGKEVHSGVCTDPQPLKEQPALNDSRYCLSSRLRVSATFWQNPRNHFRCQVQFYGLSENDEWTQDRAKPVTQIVSAEAWGRADCGFTSESYQQGVLSATNLSVIGFRILLLKVAGFNLLMTLRLWSSRAKRSGSGATNFSLLKQAGDVEENPGPTSMDWIWRILFLVGAATGAHSFEQVQLVESGPGVVQPGRSLRISCAVSGFSVTNYGVHWVRQPPGKGLEWLGVIWAGGITNYNSAFMSRLTISKDNSKNTVYLQMNSLRAEDTAMYYCASRGGHYGYALDYWGQGTLVTVSSTRIQNPDPAVYQLRDSKSSDKSVCLFTDFDSQTNVSQSKDSDVYITDKCVLDMRSMDFKSNSAVAWSNKSDFACANAFNNSIIPEDTFFPSPESSCDVKLVEKSFETDTNLNFQILYEILLGKATLYAVLVSALVLMAMVKRKDSRG

SEQ ID NO: 13731 - protein, 755 aa, synthetic construct
MALPVTALLLPLALLLHAARPEVQLVESGGGLVQPGGSLRLSCAASGFSFSDFWMSWVRQAPGKGLEWVATISQAGSEKDYVDSVKGRFTISRDNAKKSLYLQMNSLRAEDTAVYYCASGVYSFDYRGQGTLVTVSSGTGGGGSGGGGSGGGGSEFDIQMTQTASSLPASLGDRVTISCSASQDISNYLNWYQQKPDGTVKLLIFYSSNLHSGVPSRFSGGGSGTDYSLTISNLEPEDIATYFCHQYSKLPWTFGGGTKLEIKRLEDLKNVFPPEVAVFEPSEAEISHTQKATLVCLATGFYPDHVELSWWVNGKEVHSGVCTDPQPLKEQPALNDSRYCLSSRLRVSATFWQNPRNHFRCQVQFYGLSENDEWTQDRAKPVTQIVSAEAWGRADCGFTSESYQQGVLSATNLSVIGFRILLLKVAGFNLLMTLRLWSSRAKRSGSGATNFSLLKQAGDVEENPGPTSMDWIWRILFLVGAATGAHSFEEVTLVESGGDFVKPGGSLKVSCAASGFAFSHYAMSWVRQTPAKRLEWVAYISSGGSGTYYSDSVKGRFTISRDNAKNTLYLQMRSLRSEDSAMYFCTRVKLGTYYFDSWGQGTTLTVSSTRIQNPDPAVYQLRDSKSSDKSVCLFTDFDSQTNVSQSKDSDVYITDKCVLDMRSMDFKSNSAVAWSNKSDFACANAFNNSIIPEDTFFPSPESSCDVKLVEKSFETDTNLNFQILYEILLGKATLYAVLVSALVLMAMVKRKDSRG

SEQ ID NO: 13732 - protein, 757 aa, synthetic construct
MALPVTALLLPLALLLHAARPEVQLVESGGGLVQPGGSLRLSCAASGFSFSDFWMSWVRQAPGKGLEWVATISQAGSEKDYVDSVKGRFTISRDNAKKSLYLQMNSLRAEDTAVYYCASGVYSFDYRGQGTLVTVSSGTGGGGSGGGGSGGGGSEFQFVLTQSPSASAALGASAKLTCTLSSAHKTYTIDWYQQQKGKAPRYLIQVKSDGTYTKATGVPDRFSGSSSGADRYLIIPSVQADDEADYYCGTDYTGGYVFGGGTQLTVTLEDLKNVFPPEVAVFEPSEAEISHTQKATLVCLATGFYPDHVELSWWVNGKEVHSGVCTDPQPLKEQPALNDSRYCLSSRLRVSATFWQNPRNHFRCQVQFYGLSENDEWTQDRAKPVTQIVSAEAWGRADCGFTSESYQQGVLSATNLSVIGFRILLLKVAGFNLLMTLRLWSSRAKRSGSGATNFSLLKQAGDVEENPGPTSMDWIWRILFLVGAATGAHSFEEQLKESGGGLFKPTDTLTLTCTVSGFSLSYYGVNWVRQAPGNGLEWIGTIGGSGDTYYASWAKSRSTIIRNTNENTVTLKMTSLTAADTATYFCVRYANIGYEYFNVWGPGTLVTVSSTRIQNPDPAVYQLRDSKSSDKSVCLFTDFDSQTNVSQSKDSDVYITDKCVLDMRSMDFKSNSAVAWSNKSDFACANAFNNSIIPEDTFFPSPESSCDVKLVEKSFETDTNLNFQILYEILLGKATLYAVLVSALVLMAMVKRKDSRG

SEQ ID NO: 13733 - protein, 762 aa, synthetic construct
MALPVTALLLPLALLLHAARPEVQLVESGGGLVQPGGSLRLSCAASGFSFSDFWMSWVRQAPGKGLEWVATISQAGSEKDYVDSVKGRFTISRDNAKKSLYLQMNSLRAEDTAVYYCASGVYSFDYRGQGTLVTVSSGTGGGGSGGGGSGGGGSEFQFVLTQSPSVSAALGASAKLTCTLSSAHKTYTIDWYQQQQGEAPRYLMQVKSDGSYTKGTGVPDRFSGSSSGADRYLIIPSVQADDEAGYVCGADDNGGYVFGGGTQLTVTLEDLKNVFPPEVAVFEPSEAEISHTQKATLVCLATGFYPDHVELSWWVNGKEVHSGVCTDPQPLKEQPALNDSRYCLSSRLRVSATFWQNPRNHFRCQVQFYGLSENDEWTQDRAKPVTQIVSAEAWGRADCGFTSESYQQGVLSATNLSVIGFRILLLKVAGFNLLMTLRLWSSRAKRSGSGATNFSLLKQAGDVEENPGPTSMDWIWRILFLVGAATGAHSFEQSVKESEGGLFKPTDTLTLTCTVSGFSLSRHALTWVRQAPGNGLEWIGAIDNAGTTYYASWAKSRSTITRNTDLHTVTLKMTSLTASDTATYFCARVFYDINSGYYLDGMDLWGPGTLVTVSSTRIQNPDPAVYQLRDSKSSDKSVCLFTDFDSQTNVSQSKDSDVYITDKCVLDMRSMDFKSNSAVAWSNKSDFACANAFNNSIIPEDTFFPSPESSCDVKLVEKSFETDTNLNFQILYEILLGKATLYAVLVSALVLMAMVKRKDSRG

SEQ ID NO: 13734 - protein, 756 aa, synthetic construct
MALPVTALLLPLALLLHAARPEVQLVESGGGLVQPGGSLRLSCAASGFSFSDFWMSWVRQAPGKGLEWVATISQAGSEKDYVDSVKGRFTISRDNAKKSLYLQMNSLRAEDTAVYYCASGVYSFDYRGQGTLVTVSSGTGGGGSGGGGSGGGGSEFDIQMTQSPSSLSASVGDRVTITCRASQGISSWLAWYQQKPEKAPKSLIYAASSLQSGVPSRFSGSGSGTDFTLTISSLQPEDFATYYCQQYNSYPPTFGGGTKVEIKLEDLKNVFPPEVAVFEPSEAEISHTQKATLVCLATGFYPDHVELSWWVNGKEVHSGVCTDPQPLKEQPALNDSRYCLSSRLRVSATFWQNPRNHFRCQVQFYGLSENDEWTQDRAKPVTQIVSAEAWGRADCGFTSESYQQGVLSATNLSVIGFRILLLKVAGFNLLMTLRLWSSRAKRSGSGATNFSLLKQAGDVEENPGPTSMDWIWRILFLVGAATGAHSFEEVQLVESGGGLVQPGESLRLSCVASGFTFSRYKMNWVRQAPGKGLEWVSYISRSGRDIYYADSVKGRFTISRDNAKNSLYLQMNSLRDEDTAVYYCAGTVTTYYYFGMDVWGHGTTVTVSSTRIQNPDPAVYQLRDSKSSDKSVCLFTDFDSQTNVSQSKDSDVYITDKCVLDMRSMDFKSNSAVAWSNKSDFACANAFNNSIIPEDTFFPSPESSCDVKLVEKSFETDTNLNFQILYEILLGKATLYAVLVSALVLMAMVKRKDSRG

SEQ ID NO: 13735 - protein, 757 aa, synthetic construct
MALPVTALLLPLALLLHAARPEVQLVESGGGLVQPGGSLRLSCAASGFSFSDFWMSWVRQAPGKGLEWVATISQAGSEKDYVDSVKGRFTISRDNAKKSLYLQMNSLRAEDTAVYYCASGVYSFDYRGQGTLVTVSSGTGGGGSGGGGSGGGGSEFDIQMTQSPSSLSASVGDRVTITCRASQGISSWLAWYQQKPEKAPKSLIYAASSLQSGVPSRFSGSGSGTDFTLTISSLQPEDFATYYCQQYNSYPPTFGGGTKVEIKLEDLKNVFPPEVAVFEPSEAEISHTQKATLVCLATGFYPDHVELSWWVNGKEVHSGVCTDPQPLKEQPALNDSRYCLSSRLRVSATFWQNPRNHFRCQVQFYGLSENDEWTQDRAKPVTQIVSAEAWGRADCGFTSESYQQGVLSATNLSVIGFRILLLKVAGFNLLMTLRLWSSRAKRSGSGATNFSLLKQAGDVEENPGPTSMDWIWRILFLVGAATGAHSFEEVQLVESGGGSVQPGESLRLSCVASGFTFSRYKMNWVRQAPGKGLEWVSYISRSGRDIYYADSVKGRFTISRDNAKNSLYLQMNSLRDEDTAVYYCAGTVTTYYYDFGMDVWGQGTTVTVSSTRIQNPDPAVYQLRDSKSSDKSVCLFTDFDSQTNVSQSKDSDVYITDKCVLDMRSMDFKSNSAVAWSNKSDFACANAFNNSIIPEDTFFPSPESSCDVKLVEKSFETDTNLNFQILYEILLGKATLYAVLVSALVLMAMVKRKDSRG

SEQ ID NO: 13736 - protein, 755 aa, synthetic construct
MALPVTALLLPLALLLHAARPEVQLVESGGGLVQPGGSLRLSCAASGFSFSDFWMSWVRQAPGKGLEWVATISQAGSEKDYVDSVKGRFTISRDNAKKSLYLQMNSLRAEDTAVYYCASGVYSFDYRGQGTLVTVSSGTGGGGSGGGGSGGGGSEFQSVLTQPPSASGTPGQRVTISCSGSRSNVGGNYVFWYQQVPGATPKLLIYRSNQRPSGVPDRFAGSKSGSSASLAISGLRSEDEADYYCATWDDSLSGFVFGTGTKVTVLGLEDLKNVFPPEVAVFEPSEAEISHTQKATLVCLATGFYPDHVELSWWVNGKEVHSGVCTDPQPLKEQPALNDSRYCLSSRLRVSATFWQNPRNHFRCQVQFYGLSENDEWTQDRAKPVTQIVSAEAWGRADCGFTSESYQQGVLSATNLSVIGFRILLLKVAGFNLLMTLRLWSSRAKRSGSGATNFSLLKQAGDVEENPGPTSMDWIWRILFLVGAATGAHSFEVQLVESGGGLVKPGGSLRLSCAASGFTFSDYYMSWIRQAPGKGLEWVSYISSSGSTIYYADSVKGRFTISRDNAKNSLYLQMNSLRAEDTAVYYCARGYGKAYDQWGQGTLVTVSSTRIQNPDPAVYQLRDSKSSDKSVCLFTDFDSQTNVSQSKDSDVYITDKCVLDMRSMDFKSNSAVAWSNKSDFACANAFNNSIIPEDTFFPSPESSCDVKLVEKSFETDTNLNFQILYEILLGKATLYAVLVSALVLMAMVKRKDSRG

SEQ ID NO: 13737 - protein, 754 aa, synthetic construct
MALPVTALLLPLALLLHAARPEVQLVESGGGLVQPGGSLRLSCAASGFSFSDFWMSWVRQAPGKGLEWVATISQAGSEKDYVDSVKGRFTISRDNAKKSLYLQMNSLRAEDTAVYYCASGVYSFDYRGQGTLVTVSSGTGGGGSGGGGSGGGGSEFQSVVTQPPSMSAAPGQQVTISCSGGNSNIERNYVSWYLQLPGTAPKLVIFDNDRRPSGIPDRFSGSKSGTSATLGITGLQTGDEADYYCGTWDSSLRGWVFGGGTKLTVLGLEDLKNVFPPEVAVFEPSEAEISHTQKATLVCLATGFYPDHVELSWWVNGKEVHSGVCTDPQPLKEQPALNDSRYCLSSRLRVSATFWQNPRNHFRCQVQFYGLSENDEWTQDRAKPVTQIVSAEAWGRADCGFTSESYQQGVLSATNLSVIGFRILLLKVAGFNLLMTLRLWSSRAKRSGSGATNFSLLKQAGDVEENPGPTSMDWIWRILFLVGAATGAHSFEVQLVESGGGLIQPGGSLRLSCAASGFTFSNYAMNWVRQAPGKGLEWVSTINGRGSSTIYADSVKGRFTISRDNSKNTLYLQMNSLRAEDTATYYCARYISRGLGDSWGQGTLVTVTRIQNPDPAVYQLRDSKSSDKSVCLFTDFDSQTNVSQSKDSDVYITDKCVLDMRSMDFKSNSAVAWSNKSDFACANAFNNSIIPEDTFFPSPESSCDVKLVEKSFETDTNLNFQILYEILLGKATLYAVLVSALVLMAMVKRKDSRG

SEQ ID NO: 13738 - protein, 755 aa, synthetic construct
MALPVTALLLPLALLLHAARPEVQLVESGGGLVQPGGSLRLSCAASGFSFSDFWMSWVRQAPGKGLEWVATISQAGSEKDYVDSVKGRFTISRDNAKKSLYLQMNSLRAEDTAVYYCASGVYSFDYRGQGTLVTVSSGTGGGGSGGGGSGGGGSEFDVVMTQTPLSLPVSLGDQASISCRSSQSLVHSNGNTYLHWYLQKPGQSPKLLIYKVSNRFSGVPDRFSGSGSGTDFTLKISRVEAEDLGVYFCSQNTPVPPKFGSGTKLEIKLEDLKNVFPPEVAVFEPSEAEISHTQKATLVCLATGFYPDHVELSWWVNGKEVHSGVCTDPQPLKEQPALNDSRYCLSSRLRVSATFWQNPRNHFRCQVQFYGLSENDEWTQDRAKPVTQIVSAEAWGRADCGFTSESYQQGVLSATNLSVIGFRILLLKVAGFNLLMTLRLWSSRAKRSGSGATNFSLLKQAGDVEENPGPTSMDWIWRILFLVGAATGAHSFEQVQLQQSGAELVRPGASVKLSCKASGYTFNDYEMHWVKQTPVHGLKWIGALEPKTGDTAYSQKFKGKATLTADKSSSTAYMELRSLTSEDSAVYYCTSCYYYTYSGQGTLVTVSATRIQNPDPAVYQLRDSKSSDKSVCLFTDFDSQTNVSQSKDSDVYITDKCVLDMRSMDFKSNSAVAWSNKSDFACANAFNNSIIPEDTFFPSPESSCDVKLVEKSFETDTNLNFQILYEILLGKATLYAVLVSALVLMAMVKRKDSRG

SEQ ID NO: 13739 - protein, 754 aa, synthetic construct
MALPVTALLLPLALLLHAARPEVQLVESGGGLVQPGGSLRLSCAASGFSFSDFWMSWVRQAPGKGLEWVATISQAGSEKDYVDSVKGRFTISRDNAKKSLYLQMNSLRAEDTAVYYCASGVYSFDYRGQGTLVTVSSGTGGGGSGGGGSGGGGSEFDIQLTQSPSSLSASVGDRVTITCRASQGIRNDLGWYQQKPGKAPKRLIYAASSLQNGVPSRFSGSGSGTEFTLTISSLQPEDFATYYCLQHNTYPAFGQGTKVEIKRLEDLKNVFPPEVAVFEPSEAEISHTQKATLVCLATGFYPDHVELSWWVNGKEVHSGVCTDPQPLKEQPALNDSRYCLSSRLRVSATFWQNPRNHFRCQVQFYGLSENDEWTQDRAKPVTQIVSAEAWGRADCGFTSESYQQGVLSATNLSVIGFRILLLKVAGFNLLMTLRLWSSRAKRSGSGATNFSLLKQAGDVEENPGPTSMDWIWRILFLVGAATGAHSFEQVQLQESGPGLVKPSQTLSLTCTVSGGSISSFNYYWSWIRHHPGKGLEWIGYIYYSGSTYSNPSLKSRVTISVDTSKNQFSLTLSSVTAADTAVYYCARGYNWNYFDYWGQGTLVTVSSTRIQNPDPAVYQLRDSKSSDKSVCLFTDFDSQTNVSQSKDSDVYITDKCVLDMRSMDFKSNSAVAWSNKSDFACANAFNNSIIPEDTFFPSPESSCDVKLVEKSFETDTNLNFQILYEILLGKATLYAVLVSALVLMAMVKRKDSRG

SEQ ID NO: 13740 - protein, 756 aa, synthetic construct
MALPVTALLLPLALLLHAARPEVQLVESGGGLVQPGGSLRLSCAASGFSFSDFWMSWVRQAPGKGLEWVATISQAGSEKDYVDSVKGRFTISRDNAKKSLYLQMNSLRAEDTAVYYCASGVYSFDYRGQGTLVTVSSGTGGGGSGGGGSGGGGSEFDDIVLTQSPASLAVSLGQSVTISCRASESVEYYGTSLMQWYQQKPGQPPKLLIYATSNVESGVPARFSGSGSGTDFSLNIHPVEEDDIAMYFCQQSRKLPSTFGGGTKLEIKLEDLKNVFPPEVAVFEPSEAEISHTQKATLVCLATGFYPDHVELSWWVNGKEVHSGVCTDPQPLKEQPALNDSRYCLSSRLRVSATFWQNPRNHFRCQVQFYGLSENDEWTQDRAKPVTQIVSAEAWGRADCGFTSESYQQGVLSATNLSVIGFRILLLKVAGFNLLMTLRLWSSRAKRSGSGATNFSLLKQAGDVEENPGPTSMDWIWRILFLVGAATGAHSFEDVRLQESGPGQVKPSQTVSLTCSVTGYSITNGNHWWNWIRQVSGSKLEWIGYISSSGSTDSNPSLKSRISITRDTSKNQLFLQLNSVTTEDIATYYCARGYYFDYWGQGTTLTVSSTRIQNPDPAVYQLRDSKSSDKSVCLFTDFDSQTNVSQSKDSDVYITDKCVLDMRSMDFKSNSAVAWSNKSDFACANAFNNSIIPEDTFFPSPESSCDVKLVEKSFETDTNLNFQILYEILLGKATLYAVLVSALVLMAMVKRKDSRG

SEQ ID NO: 13741 - protein, 755 aa, synthetic construct
MALPVTALLLPLALLLHAARPEVQLVESGGGLVQPGGSLRLSCAASGFSFSDFWMSWVRQAPGKGLEWVATISQAGSEKDYVDSVKGRFTISRDNAKKSLYLQMNSLRAEDTAVYYCASGVYSFDYRGQGTLVTVSSGTGGGGSGGGGSGGGGSEFDIQMTQSPSSLSASVGDRVTITCRASQDVNTAVAWYQQKPGKAPKLLIYSASFLESGVPSRFSGSRSGTDFTLTISSLQPEDFATYYCQQHYTTPPTFGQTKVEIKRLEDLKNVFPPEVAVFEPSEAEISHTQKATLVCLATGFYPDHVELSWWVNGKEVHSGVCTDPQPLKEQPALNDSRYCLSSRLRVSATFWQNPRNHFRCQVQFYGLSENDEWTQDRAKPVTQIVSAEAWGRADCGFTSESYQQGVLSATNLSVIGFRILLLKVAGFNLLMTLRLWSSRAKRSGSGATNFSLLKQAGDVEENPGPTSMDWIWRILFLVGAATGAHSFEEVQLVESGGGLVQPGGSLRLSCAASGFNIKDTYIHWVRQAPGKGLEWVARIYPTNGYTRYADSVKGRFTISADTSKNTAYLQMNSLRAEDTAVYYCSRWGGDGFYAMDVWGQGTLVTVSSTRIQNPDPAVYQLRDSKSSDKSVCLFTDFDSQTNVSQSKDSDVYITDKCVLDMRSMDFKSNSAVAWSNKSDFACANAFNNSIIPEDTFFPSPESSCDVKLVEKSFETDTNLNFQILYEILLGKATLYAVLVSALVLMAMVKRKDSRG

SEQ ID NO: 13742 - protein, 754 aa, synthetic construct
MALPVTALLLPLALLLHAARPEVQLVESGGGLVQPGGSLRLSCAASGFSFSDFWMSWVRQAPGKGLEWVATISQAGSEKDYVDSVKGRFTISRDNAKKSLYLQMNSLRAEDTAVYYCASGVYSFDYRGQGTLVTVSSGTGGGGSGGGGSGGGGSEFDQSVLTQPPSVSVAPGKTARIPCEGNYIGSSNVHWYQQKPGQAPVLVIHFDSDRPSGIPDRFSGSNSGNMATLTISRVEAGDEADYYCQVWENHGWVFGGGTKLTVLSLEDLKNVFPPEVAVFEPSEAEISHTQKATLVCLATGFYPDHVELSWWVNGKEVHSGVCTDPQPLKEQPALNDSRYCLSSRLRVSATFWQNPRNHFRCQVQFYGLSENDEWTQDRAKPVTQIVSAEAWGRADCGFTSESYQQGVLSATNLSVIGFRILLLKVAGFNLLMTLRLWSSRAKRSGSGATNFSLLKQAGDVEENPGPTSMDWIWRILFLVGAATGAHSFEEVQLVETGGGLVQPGESLRLSCAASGFTFSDYEMNWVRQAPGKGLEWVSYISSSGSTIYYADSVKGRFTIYRDNAKNSLYLQMNSLRAEDTALYYCARAWGVGPPDYWGQGTLVTVSSTRIQNPDPAVYQLRDSKSSDKSVCLFTDFDSQTNVSQSKDSDVYITDKCVLDMRSMDFKSNSAVAWSNKSDFACANAFNNSIIPEDTFFPSPESSCDVKLVEKSFETDTNLNFQILYEILLGKATLYAVLVSALVLMAMVKRKDSRG

SEQ ID NO: 13743 - protein, 762 aa, synthetic construct
MALPVTALLLPLALLLHAARPEVQLVESGGGLVQPGGSLRLSCAASGFSFSDFWMSWVRQAPGKGLEWVATISQAGSEKDYVDSVKGRFTISRDNAKKSLYLQMNSLRAEDTAVYYCASGVYSFDYRGQGTLVTVSSGTGGGGSGGGGSGGGGSEFDIQMTQSPSSLSASVGDTVTITCQANGYLNWYQQRRGKAPKLLIYDGSKLERGVPSRFSGRRWGQEYNLTINNLQPEDIATYFCQVYEFVVPGTRLDLKRTVAAPLEDLKNVFPPEVAVFEPSEAEISHTQKATLVCLATGFYPDHVELSWWVNGKEVHSGVCTDPQPLKEQPALNDSRYCLSSRLRVSATFWQNPRNHFRCQVQFYGLSENDEWTQDRAKPVTQIVSAEAWGRADCGFTSESYQQGVLSATNLSVIGFRILLLKVAGFNLLMTLRLWSSRAKRSGSGATNFSLLKQAGDVEENPGPTSMDWIWRILFLVGAATGAHSFEQVQLLQSGAAVTKPGASVRVSCEASGYNIRDYFIHWWRQAPGQGLQWVGWINPKTGQPNNPRQFQGRVSLTRHASWDFDTFSFYMDLKALRSDDTAVYFCARQRSDYWDFDVWGSGTQVTVSSASTKGPTRIQNPDPAVYQLRDSKSSDKSVCLFTDFDSQTNVSQSKDSDVYITDKCVLDMRSMDFKSNSAVAWSNKSDFACANAFNNSIIPEDTFFPSPESSCDVKLVEKSFETDTNLNFQILYEILLGKATLYAVLVSALVLMAMVKRKDSRG

SEQ ID NO: 13744 - protein, 768 aa, synthetic construct
MALPVTALLLPLALLLHAARPEVQLVESGGGLVQPGGSLRLSCAASGFSFSDFWMSWVRQAPGKGLEWVATISQAGSEKDYVDSVKGRFTISRDNAKKSLYLQMNSLRAEDTAVYYCASGVYSFDYRGQGTLVTVSSGTGGGGSGGGGSGGGGSEFQSALTQPPSASGSPGQSITISCTGTSNNFVSWYQQHAGKAPKLVIYDVNKRPSGVPDRFSGSKSGNTASLTVSGLQTDDEAVYYCGSLVGNWDVIFGGGTKLTVLLEDLKNVFPPEVAVFEPSEAEISHTQKATLVCLATGFYPDHVELSWWVNGKEVHSGVCTDPQPLKEQPALNDSRYCLSSRLRVSATFWQNPRNHFRCQVQFYGLSENDEWTQDRAKPVTQIVSAEAWGRADCGFTSESYQQGVLSATNLSVIGFRILLLKVAGFNLLMTLRLWSSRAKRSGSGATNFSLLKQAGDVEENPGPTSMDWIWRILFLVGAATGAHSFEQPQLQESGPTLVEASETLSLTCAVSGDSTAACNSFWGWVRQPPGKGLEWVGSLSHCASYWNRGWTYHNPSLKSRLTLALDTPKNLVFLKLNSVTAADTATYYCARFGGEVLRYTDWPKPAWVDLWGRGTLVTVSSTRIQNPDPAVYQLRDSKSSDKSVCLFTDFDSQTNVSQSKDSDVYITDKCVLDMRSMDFKSNSAVAWSNKSDFACANAFNNSIIPEDTFFPSPESSCDVKLVEKSFETDTNLNFQILYEILLGKATLYAVLVSALVLMAMVKRKDSRG

SEQ ID NO: 13745 - protein, 753 aa, synthetic construct
MALPVTALLLPLALLLHAARPEVQLVESGGGLVQPGGSLRLSCAASGFSFSDFWMSWVRQAPGKGLEWVATISQAGSEKDYVDSVKGRFTISRDNAKKSLYLQMNSLRAEDTAVYYCASGVYSFDYRGQGTLVTVSSGTGGGGSGGGGSGGGGSEFEIVLTQSPGTLSLSPGETAIISCRTSQYGSLAWYQQRPGQAPRLVIYSGSTRAAGIPDRFSGSRWGPDYNLTISNLESGDFGVYYCQQYEFFGQGTKVQVDIKRLEDLKNVFPPEVAVFEPSEAEISHTQKATLVCLATGFYPDHVELSWWVNGKEVHSGVCTDPQPLKEQPALNDSRYCLSSRLRVSATFWQNPRNHFRCQVQFYGLSENDEWTQDRAKPVTQIVSAEAWGRADCGFTSESYQQGVLSATNLSVIGFRILLLKVAGFNLLMTLRLWSSRAKRSGSGATNFSLLKQAGDVEENPGPTSMDWIWRILFLVGAATGAHSFEQVQLVQSGGQMKKPGESMRISCRASGYEFIDCTLNWIRLAPGKRPEWMGWLKPRGGAVNYARPLQGRVTMTRDVYSDTAFLELRSLTVDDTAVYFCTRGKNCDYNWDFEHWGRGTPVIVSSTRIQNPDPAVYQLRDSKSSDKSVCLFTDFDSQTNVSQSKDSDVYITDKCVLDMRSMDFKSNSAVAWSNKSDFACANAFNNSIIPEDTFFPSPESSCDVKLVEKSFETDTNLNFQILYEILLGKATLYAVLVSALVLMAMVKRKDSRG

SEQ ID NO: 13746 - protein, 763 aa, synthetic construct
MALPVTALLLPLALLLHAARPEVQLVESGGGLVQPGGSLRLSCAASGFSFSDFWMSWVRQAPGKGLEWVATISQAGSEKDYVDSVKGRFTISRDNAKKSLYLQMNSLRAEDTAVYYCASGVYSFDYRGQGTLVTVSSGTGGGGSGGGGSGGGGSEFELVLTQSPGTLSLSAGERATLSCRASQSVSSGSLAWYQQKPGQAPRLLIYGASTRATGIPDRFSGSGSGTDFTLTIGRLEPEDLAVYYCQQYGTSPYTFGQGTKLEILEDLKNVFPPEVAVFEPSEAEISHTQKATLVCLATGFYPDHVELSWWVNGKEVHSGVCTDPQPLKEQPALNDSRYCLSSRLRVSATFWQNPRNHFRCQVQFYGLSENDEWTQDRAKPVTQIVSAEAWGRADCGFTSESYQQGVLSATNLSVIGFRILLLKVAGFNLLMTLRLWSSRAKRSGSGATNFSLLKQAGDVEENPGPTSMDWIWRILFLVGAATGAHSFELEQSGAEVKKPGSSVQVSCKASGGTFSMYGFNWVRQAPGHGLEWMGGIIPIFGTSNYAQKFRGRVTFTADQATSTAYMELTNLRSDDTAVYYCARDFGPDWEDGDSYDGSGRGFFDFWGQGTLVTVSSTRIQNPDPAVYQLRDSKSSDKSVCLFTDFDSQTNVSQSKDSDVYITDKCVLDMRSMDFKSNSAVAWSNKSDFACANAFNNSIIPEDTFFPSPESSCDVKLVEKSFETDTNLNFQILYEILLGKATLYAVLVSALVLMAMVKRKDSRG

SEQ ID NO: 13747 - protein, 743 aa, synthetic construct
MALPVTALLLPLALLLHAARPEVQLVESGGGLVQPGGSLRLSCAASGFSFSDFWMSWVRQAPGKGLEWVATISQAGSEKDYVDSVKGRFTISRDNAKKSLYLQMNSLRAEDTAVYYCASGVYSFDYRGQGTLVTVSSGTGGGGSGGGGSGGGGSEFDIQMTQSPSSLSASVGDRVTITCQASQDINNYLNWYQQKPGKAPKLLIYDASNLQTGVPSRFSGSGSGTDFTFTIEDIATYYCQQYTFGPGTKVDIKLEDLKNVFPPEVAVFEPSEAEISHTQKATLVCLATGFYPDHVELSWWVNGKEVHSGVCTDPQPLKEQPALNDSRYCLSSRLRVSATFWQNPRNHFRCQVQFYGLSENDEWTQDRAKPVTQIVSAEAWGRADCGFTSESYQQGVLSATNLSVIGFRILLLKVAGFNLLMTLRLWSSRAKRSGSGATNFSLLKQAGDVEENPGPTSMDWIWRILFLVGAATGAHSFEEVQLLESGGGLVQPGGSLRLSCAASGFTFSWYSMTWVRQAPGKGLEWVSSIVPWGDFTQYADSVKGRFTISRDNSKNTLYLQMNSLRAEDTAVYYCAKGPGWGSFDLWGRGTLVTVSSTRIQNPDPAVYQLRDSKSSDKSVCLFTDFDSQTNVSQSKDSDVYITDKCVLDMRSMDFKSNSAVAWSNKSDFACANAFNNSIIPEDTFFPSPESSCDVKLVEKSFETDTNLNFQILYEILLGKATLYAVLVSALVLMAMVKRKDSRG

SEQ ID NO: 13748 - protein, 753 aa, synthetic construct
MALPVTALLLPLALLLHAARPEVQLVESGGGLVQPGGSLRLSCAASGFSFSDFWMSWVRQAPGKGLEWVATISQAGSEKDYVDSVKGRFTISRDNAKKSLYLQMNSLRAEDTAVYYCASGVYSFDYRGQGTLVTVSSGTGGGGSGGGGSGGGGSEFDIQMTQSPSSLSASVGDRVTITCTASLSVSSTYLHWYQQKPGSSPKLWIYSTSNLASGVPSRFSGSGSGTSYTLTISSLQPEDFATYYCHQYHRSPLTFGGGTKVEIKRLEDLKNVFPPEVAVFEPSEAEISHTQKATLVCLATGFYPDHVELSWWVNGKEVHSGVCTDPQPLKEQPALNDSRYCLSSRLRVSATFWQNPRNHFRCQVQFYGLSENDEWTQDRAKPVTQIVSAEAWGRADCGFTSESYQQGVLSATNLSVIGFRILLLKVAGFNLLMTLRLWSSRAKRSGSGATNFSLLKQAGDVEENPGPTSMDWIWRILFLVGAATGAHSFEEVQLVESGGGLVQPGGSLRLSCAASGFSLTKYGVHWVRQAPGKGLEWVGVKWAGGSTDYNSALMSRFTISKDNAKNSLYLQMNSLRAEDTAVYYCARDHRDAMDYWGQGTLVTVSSTRIQNPDPAVYQLRDSKSSDKSVCLFTDFDSQTNVSQSKDSDVYITDKCVLDMRSMDFKSNSAVAWSNKSDFACANAFNNSIIPEDTFFPSPESSCDVKLVEKSFETDTNLNFQILYEILLGKATLYAVLVSALVLMAMVKRKDSRG

SEQ ID NO: 13749 - protein, 757 aa, synthetic construct
MALPVTALLLPLALLLHAARPEVQLVESGGGLVQPGGSLRLSCAASGFSFSDFWMSWVRQAPGKGLEWVATISQAGSEKDYVDSVKGRFTISRDNAKKSLYLQMNSLRAEDTAVYYCASGVYSFDYRGQGTLVTVSSGTGGGGSGGGGSGGGGSEFDIQMTQSPSSLSASVGDRVTITCKASQDVGTAVAWYQQKPGKAPKLLIYSASYRSTGVPSRFSGSGSGTDFTLTISSLQPEDFATYYCQHHYSAPWTFGGGTKVEIKLEDLKNVFPPEVAVFEPSEAEISHTQKATLVCLATGFYPDHVELSWWVNGKEVHSGVCTDPQPLKEQPALNDSRYCLSSRLRVSATFWQNPRNHFRCQVQFYGLSENDEWTQDRAKPVTQIVSAEAWGRADCGFTSESYQQGVLSATNLSVIGFRILLLKVAGFNLLMTLRLWSSRAKRSGSGATNFSLLKQAGDVEENPGPTSMDWIWRILFLVGAATGAHSFEEVQLVESGGGLVQPGGSLRLSCAASGFTFSRNGMSWVRQAPGKGLEWVATVSSGGSYIYYADSVKGRFTISRDNAKNSLYLQMNSLRAEDTAVYYCARQGTTALATRFFDVWGQGTLVTVSSTRIQNPDPAVYQLRDSKSSDKSVCLFTDFDSQTNVSQSKDSDVYITDKCVLDMRSMDFKSNSAVAWSNKSDFACANAFNNSIIPEDTFFPSPESSCDVKLVEKSFETDTNLNFQILYEILLGKATLYAVLVSALVLMAMVKRKDSRG

SEQ ID NO: 13750 - protein, 753 aa, synthetic construct
MALPVTALLLPLALLLHAARPEVQLVESGGGLVQPGGSLRLSCAASGFSFSDFWMSWVRQAPGKGLEWVATISQAGSEKDYVDSVKGRFTISRDNAKKSLYLQMNSLRAEDTAVYYCASGVYSFDYRGQGTLVTVSSGTGGGGSGGGGSGGGGSEFDIQMTQSPPSLSASVGGKVTITCKASQDIDRYMAWYQDKPGKGPKLLIHDTSTLQPGIPSRFSGSGSGRDYSFSISNLEPEDIATYYCLQYDNLWTFGGGTKLEIKRLEDLKNVFPPEVAVFEPSEAEISHTQKATLVCLATGFYPDHVELSWWVNGKEVHSGVCTDPQPLKEQPALNDSRYCLSSRLRVSATFWQNPRNHFRCQVQFYGLSENDEWTQDRAKPVTQIVSAEAWGRADCGFTSESYQQGVLSATNLSVIGFRILLLKVAGFNLLMTLRLWSSRAKRSGSGATNFSLLKQAGDVEENPGPTSMDWIWRILFLVGAATGAHSFEQVQLVQSGAELVKPGASVKMSCKASGYIFTNYNIHWVKKSPGQGLEWIGAIYPGNGDAPYSQKFQDRATLTADTSSSTTYMELSSLTSEDSAVYYCVRANWDVAFAYWGQGTLVSVSSTRIQNPDPAVYQLRDSKSSDKSVCLFTDFDSQTNVSQSKDSDVYITDKCVLDMRSMDFKSNSAVAWSNKSDFACANAFNNSIIPEDTFFPSPESSCDVKLVEKSFETDTNLNFQILYEILLGKATLYAVLVSALVLMAMVKRKDSRG

SEQ ID NO: 13751 - protein, 754 aa, synthetic construct
MALPVTALLLPLALLLHAARPEVQLVESGGGLVQPGGSLRLSCAASGFSFSDFWMSWVRQAPGKGLEWVATISQAGSEKDYVDSVKGRFTISRDNAKKSLYLQMNSLRAEDTAVYYCASGVYSFDYRGQGTLVTVSSGTGGGGSGGGGSGGGGSEFDIQMTQSPASLSASVGETVTITCRVSGNIHNYLAWYQQKQGKSPQLLVYNAKTLADGVPSRFSGSGSGTQYSLKINSLQPEDFGSYYCQHFWSNPYTFGGGTKLEIKLEDLKNVFPPEVAVFEPSEAEISHTQKATLVCLATGFYPDHVELSWWVNGKEVHSGVCTDPQPLKEQPALNDSRYCLSSRLRVSATFWQNPRNHFRCQVQFYGLSENDEWTQDRAKPVTQIVSAEAWGRADCGFTSESYQQGVLSATNLSVIGFRILLLKVAGFNLLMTLRLWSSRAKRSGSGATNFSLLKQAGDVEENPGPTSMDWIWRILFLVGAATGAHSFEQVQLQQSGASVKVSCKASELVRPGTGYAFTNYLIEWVKQRPGQGLEWIGVINPGSGGTNYNEKFKGKATLTADKSSSTAYMQLSSLTSDDSAVYFCARYRSYDWYFDVWGAGTTVTVSSTRIQNPDPAVYQLRDSKSSDKSVCLFTDFDSQTNVSQSKDSDVYITDKCVLDMRSMDFKSNSAVAWSNKSDFACANAFNNSIIPEDTFFPSPESSCDVKLVEKSFETDTNLNFQILYEILLGKATLYAVLVSALVLMAMVKRKDSRG

SEQ ID NO: 13752 - protein, 753 aa, synthetic construct
MALPVTALLLPLALLLHAARPEVQLVESGGGLVQPGGSLRLSCAASGFSFSDFWMSWVRQAPGKGLEWVATISQAGSEKDYVDSVKGRFTISRDNAKKSLYLQMNSLRAEDTAVYYCASGVYSFDYRGQGTLVTVSSGTGGGGSGGGGSGGGGSEFDIQMTQSFSSLSASVGDRVTITCRASQDISNYLNWYQQKPGKAPKLLIYYTSRLHSGVPSRFSGSGSGTDYTLTISSLQPEDFATYFCQQGNTLPWTFGGGTKLEIKRLEDLKNVFPPEVAVFEPSEAEISHTQKATLVCLATGFYPDHVELSWWVNGKEVHSGVCTDPQPLKEQPALNDSRYCLSSRLRVSATFWQNPRNHFRCQVQFYGLSENDEWTQDRAKPVTQIVSAEAWGRADCGFTSESYQQGVLSATNLSVIGFRILLLKVAGFNLLMTLRLWSSRAKRSGSGATNFSLLKQAGDVEENPGPTSMDWIWRILFLVGAATGAHSFEEVQLVQSGGGLVQSGGSLRLSCRASGYTFTRYWMLWVRQRPGKGLEWVAEINPRNDRTNYNEKFKTRFTISVDRSKNTLYLQMDSLRAEDTAVYFCALGGGYAMDYWGQGTLVTVSSTRIQNPDPAVYQLRDSKSSDKSVCLFTDFDSQTNVSQSKDSDVYITDKCVLDMRSMDFKSNSAVAWSNKSDFACANAFNNSIIPEDTFFPSPESSCDVKLVEKSFETDTNLNFQILYEILLGKATLYAVLVSALVLMAMVKRKDSRG

SEQ ID NO: 13753 - protein, 754 aa, synthetic construct
MALPVTALLLPLALLLHAARPEVQLVESGGGLVQPGGSLRLSCAASGFSFSDFWMSWVRQAPGKGLEWVATISQAGSEKDYVDSVKGRFTISRDNAKKSLYLQMNSLRAEDTAVYYCASGVYSFDYRGQGTLVTVSSGTGGGGSGGGGSGGGGSEFDIQMTQSPASLSASVGETVTIICRASVNIYSYLAWYQQKQGKSPQLLVYNAKILAEGVPSRFSGSGSGTQFSLKINSLQPEDFGSYYCQHHYGTFTFGSGTKLEIKRLEDLKNVFPPEVAVFEPSEAEISHTQKATLVCLATGFYPDHVELSWWVNGKEVHSGVCTDPQPLKEQPALNDSRYCLSSRLRVSATFWQNPRNHFRCQVQFYGLSENDEWTQDRAKPVTQIVSAEAWGRADCGFTSESYQQGVLSATNLSVIGFRILLLKVAGFNLLMTLRLWSSRAKRSGSGATNFSLLKQAGDVEENPGPTSMDWIWRILFLVGAATGAHSFEQVQLKESGPGLVAPSQSLSITCTISGFSLTSYGVHWVRQPPGKGLEWLVVIWSDGSTTYNSALKSRLSISKDNSKSQVFLKMNSLQTDDTAIYYCASHYGSTLAFASWGHGTLVTVSAATRIQNPDPAVYQLRDSKSSDKSVCLFTDFDSQTNVSQSKDSDVYITDKCVLDMRSMDFKSNSAVAWSNKSDFACANAFNNSIIPEDTFFPSPESSCDVKLVEKSFETDTNLNFQILYEILLGKATLYAVLVSALVLMAMVKRKDSRG

SEQ ID NO: 13754 - protein, 762 aa, synthetic construct
MALPVTALLLPLALLLHAARPEVQLVESGGGLVQPGGSLRLSCAASGFSFSDFWMSWVRQAPGKGLEWVATISQAGSEKDYVDSVKGRFTISRDNAKKSLYLQMNSLRAEDTAVYYCASGVYSFDYRGQGTLVTVSSGTGGGGSGGGGSGGGGSEFDIVMTQSHKFMSTSVGDRVSVTCKASQNVGNNVAWYQQKPGQSPKVLIYSASYRYSGVPDRFTGSGSGTDFTLTISNVQSEDLAEYFCQQYNTYPFTFGSGTKLEIKLEDLKNVFPPEVAVFEPSEAEISHTQKATLVCLATGFYPDHVELSWWVNGKEVHSGVCTDPQPLKEQPALNDSRYCLSSRLRVSATFWQNPRNHFRCQVQFYGLSENDEWTQDRAKPVTQIVSAEAWGRADCGFTSESYQQGVLSATNLSVIGFRILLLKVAGFNLLMTLRLWSSRAKRSGSGATNFSLLKQAGDVEENPGPTSMDWIWRILFLVGAATGAHSFEEVQLEESGGGLVQPGGSMKLSCVASGFTFSNYWMNWVRQSPEKGLEWVAEIRFKSHNYATHFAESVKGRFTISRDDSKSSVYLQMNNLRAEDTGIYYCTRRIGNSDYDWWYFDVWGAGTSVTVSSASTRIQNPDPAVYQLRDSKSSDKSVCLFTDFDSQTNVSQSKDSDVYITDKCVLDMRSMDFKSNSAVAWSNKSDFACANAFNNSIIPEDTFFPSPESSCDVKLVEKSFETDTNLNFQILYEILLGKATLYAVLVSALVLMAMVKRKDSRG

SEQ ID NO: 13755 - protein, 755 aa, synthetic construct
MALPVTALLLPLALLLHAARPEVQLVESGGGLVQPGGSLRLSCAASGFSFSDFWMSWVRQAPGKGLEWVATISQAGSEKDYVDSVKGRFTISRDNAKKSLYLQMNSLRAEDTAVYYCASGVYSFDYRGQGTLVTVSSGTGGGGSGGGGSGGGGSEFDQIVLTQSPAIMSASPGEKVTISCSASSSVSYMYWYQQKPGSSPKPWIYRTSNLASGVPARFSGSGSGTSYSLTISNMEAEDAAAYYCQQYHSYPTTFGGGTKLEVKLEDLKNVFPPEVAVFEPSEAEISHTQKATLVCLATGFYPDHVELSWWVNGKEVHSGVCTDPQPLKEQPALNDSRYCLSSRLRVSATFWQNPRNHFRCQVQFYGLSENDEWTQDRAKPVTQIVSAEAWGRADCGFTSESYQQGVLSATNLSVIGFRILLLKVAGFNLLMTLRLWSSRAKRSGSGATNFSLLKQAGDVEENPGPTSMDWIWRILFLVGAATGAHSFEEVQLVESGGGLVQPKGSLKLSCAASGFSFNTYAMNWVRQAPGKGLEWIAHIRSKSNNFATYYADSVKDRFSISRDASENILFLQMNNLKTEDTAMYYCVRQGGDFPMDYWGQGTSVTVSSTRIQNPDPAVYQLRDSKSSDKSVCLFTDFDSQTNVSQSKDSDVYITDKCVLDMRSMDFKSNSAVAWSNKSDFACANAFNNSIIPEDTFFPSPESSCDVKLVEKSFETDTNLNFQILYEILLGKATLYAVLVSALVLMAMVKRKDSRG

SEQ ID NO: 13756 - protein, 754 aa, synthetic construct
MALPVTALLLPLALLLHAARPEVQLVESGGGLVQPGGSLRLSCAASGFSFSDFWMSWVRQAPGKGLEWVATISQAGSEKDYVDSVKGRFTISRDNAKKSLYLQMNSLRAEDTAVYYCASGVYSFDYRGQGTLVTVSSGTGGGGSGGGGSGGGGSEFDDIQMTQSSSSFSVSLGDRVTITCMASEDIYIRLAWYQQKPGNAPRLLISAATSLETGVPSRFSGSGSGKDYTLSITSLQTEDVGTYYCQQYWSSPWTFGGGTKLEINLEDLKNVFPPEVAVFEPSEAEISHTQKATLVCLATGFYPDHVELSWWVNGKEVHSGVCTDPQPLKEQPALNDSRYCLSSRLRVSATFWQNPRNHFRCQVQFYGLSENDEWTQDRAKPVTQIVSAEAWGRADCGFTSESYQQGVLSATNLSVIGFRILLLKVAGFNLLMTLRLWSSRAKRSGSGATNFSLLKQAGDVEENPGPTSMDWIWRILFLVGAATGAHSFEDVQLQESGPGLVKPSQSLSLTCTVTGYSITSDYTWNWIRQFPGNKLEWMGYITYSGSTSYNPSLKSRNSITRDTSKNQFFLQLNSVTTEDTATYYCARLGRRYTMDYWGQGTSVTVSSTRIQNPDPAVYQLRDSKSSDKSVCLFTDFDSQTNVSQSKDSDVYITDKCVLDMRSMDFKSNSAVAWSNKSDFACANAFNNSIIPEDTFFPSPESSCDVKLVEKSFETDTNLNFQILYEILLGKATLYAVLVSALVLMAMVKRKDSRG

SEQ ID NO: 13757 - protein, 757 aa, synthetic construct
MALPVTALLLPLALLLHAARPEVQLVESGGGLVQPGGSLRLSCAASGFSFSDFWMSWVRQAPGKGLEWVATISQAGSEKDYVDSVKGRFTISRDNAKKSLYLQMNSLRAEDTAVYYCASGVYSFDYRGQGTLVTVSSGTGGGGSGGGGSGGGGSEFDDIQMTQSPSSLSASVGDRVTITCRASQSISSYLNWYQQKPGKAPKLLIYDASNLETGVPSRFSGSGSGTDFTFTISSLQPEDIATYYCQQYDNLPLTFGGGTKVDIKRLEDLKNVFPPEVAVFEPSEAEISHTQKATLVCLATGFYPDHVELSWWVNGKEVHSGVCTDPQPLKEQPALNDSRYCLSSRLRVSATFWQNPRNHFRCQVQFYGLSENDEWTQDRAKPVTQIVSAEAWGRADCGFTSESYQQGVLSATNLSVIGFRILLLKVAGFNLLMTLRLWSSRAKRSGSGATNFSLLKQAGDVEENPGPTSMDWIWRILFLVGAATGAHSFEQVQLVESGGGVVQPGRSLRLSCAASGFTFSSYAMHWVRQAPGKGLEWVAVISYDGSNKYYADSVKGRFTISRDNSKNTLYLQMNSLRAEDTAVYYCARAHNSSSWSFDYWGQGTLVTVSSTRIQNPDPAVYQLRDSKSSDKSVCLFTDFDSQTNVSQSKDSDVYITDKCVLDMRSMDFKSNSAVAWSNKSDFACANAFNNSIIPEDTFFPSPESSCDVKLVEKSFETDTNLNFQILYEILLGKATLYAVLVSALVLMAMVKRKDSRG

SEQ ID NO: 13758 - protein, 766 aa, synthetic construct
MALPVTALLLPLALLLHAARPEVQLVESGGGLVQPGGSLRLSCAASGFSFSDFWMSWVRQAPGKGLEWVATISQAGSEKDYVDSVKGRFTISRDNAKKSLYLQMNSLRAEDTAVYYCASGVYSFDYRGQGTLVTVSSGTGGGGSGGGGSGGGGSEFDDVVMTQSPLSLPVSLGDQASISCRSSQRLVHSNGNTYLHWYLQKPGQSPKLLIYRVSNRFPGVPDRFSGSGSGTDFTLKISRVEAEDLGIYFCSQSTHVPYTFGGGTKLEIKRLEDLKNVFPPEVAVFEPSEAEISHTQKATLVCLATGFYPDHVELSWWVNGKEVHSGVCTDPQPLKEQPALNDSRYCLSSRLRVSATFWQNPRNHFRCQVQFYGLSENDEWTQDRAKPVTQIVSAEAWGRADCGFTSESYQQGVLSATNLSVIGFRILLLKVAGFNLLMTLRLWSSRAKRSGSGATNFSLLKQAGDVEENPGPTSMDWIWRILFLVGAATGAHSFEEVRLQQSGPDLIKPGASVKMSCKASGYTFTGYVMHWVKQRPGQGLEWIGFINPYNDDIQSNERFRGKATLTSDKSSTTAYMELSSLTSEDSAVYYCARGAGYNFDGAYRFFDFWGQGTTLTVSSTRIQNPDPAVYQLRDSKSSDKSVCLFTDFDSQTNVSQSKDSDVYITDKCVLDMRSMDFKSNSAVAWSNKSDFACANAFNNSIIPEDTFFPSPESSCDVKLVEKSFETDTNLNFQILYEILLGKATLYAVLVSALVLMAMVKRKDSRG

SEQ ID NO: 13759 - protein, 757 aa, synthetic construct
MALPVTALLLPLALLLHAARPEVQLVESGGGLVQPGGSLRLSCAASGFSFSDFWMSWVRQAPGKGLEWVATISQAGSEKDYVDSVKGRFTISRDNAKKSLYLQMNSLRAEDTAVYYCASGVYSFDYRGQGTLVTVSSGTGGGGSGGGGSGGGGSEFDSYELTQPPSVSVSPGQTATISCSGDQLGGKYGHWYQKKPGQSPVLVLYQDRKRPAGIPERFSGSSSGNTITLTISGTQAVDEADYYCQAWDTNLGGVFGGGTKVTVLGQLEDLKNVFPPEVAVFEPSEAEISHTQKATLVCLATGFYPDHVELSWWVNGKEVHSGVCTDPQPLKEQPALNDSRYCLSSRLRVSATFWQNPRNHFRCQVQFYGLSENDEWTQDRAKPVTQIVSAEAWGRADCGFTSESYQQGVLSATNLSVIGFRILLLKVAGFNLLMTLRLWSSRAKRSGSGATNFSLLKQAGDVEENPGPTSMDWIWRILFLVGAATGAHSFEQVQLVESGAEVKKPGASVKVSCKASGYTFTGYYMHWVRQAPGQGLEWMGRINPNSGGTNYAQKFQGRVTMTRDTSISTAYMELSRLRSDDTAVYYCASPRGRGSAFDIWGQGTLVTVSSTRIQNPDPAVYQLRDSKSSDKSVCLFTDFDSQTNVSQSKDSDVYITDKCVLDMRSMDFKSNSAVAWSNKSDFACANAFNNSIIPEDTFFPSPESSCDVKLVEKSFETDTNLNFQILYEILLGKATLYAVLVSALVLMAMVKRKDSRG

SEQ ID NO: 13760 - protein, 760 aa, synthetic construct
MALPVTALLLPLALLLHAARPEVQLVESGGGLVQPGGSLRLSCAASGFSFSDFWMSWVRQAPGKGLEWVATISQAGSEKDYVDSVKGRFTISRDNAKKSLYLQMNSLRAEDTAVYYCASGVYSFDYRGQGTLVTVSSGTGGGGSGGGGSGGGGSEFDNFMLTQPHSVSESPGKTVTISCTRSSGSIASKYVQWYQQRPGSSPTTVIYEDNQRPSGVPDRFSGSIDTSSNSASLTISGLRTEDEADYYCHSYDSNNHSVFGGGTKVTVLGQLEDLKNVFPPEVAVFEPSEAEISHTQKATLVCLATGFYPDHVELSWWVNGKEVHSGVCTDPQPLKEQPALNDSRYCLSSRLRVSATFWQNPRNHFRCQVQFYGLSENDEWTQDRAKPVTQIVSAEAWGRADCGFTSESYQQGVLSATNLSVIGFRILLLKVAGFNLLMTLRLWSSRAKRSGSGATNFSLLKQAGDVEENPGPTSMDWIWRILFLVGAATGAHSFEEVQLVESGGGVVQPGGSLRLSCAASGFTFSSYAMSWVRQAPGKGLEWVSAISGSGGSTYYADSVKGRFSISRDNSKNTLYLQMNSLRAEDTAVYYCARTRSSGAFDIWGQGTLVTVSSTRIQNPDPAVYQLRDSKSSDKSVCLFTDFDSQTNVSQSKDSDVYITDKCVLDMRSMDFKSNSAVAWSNKSDFACANAFNNSIIPEDTFFPSPESSCDVKLVEKSFETDTNLNFQILYEILLGKATLYAVLVSALVLMAMVKRKDSRG

SEQ ID NO: 13761 - protein, 755 aa, synthetic construct
MALPVTALLLPLALLLHAARPEVQLVESGGGLVQPGGSLRLSCAASGFSFSDFWMSWVRQAPGKGLEWVATISQAGSEKDYVDSVKGRFTISRDNAKKSLYLQMNSLRAEDTAVYYCASGVYSFDYRGQGTLVTVSSGTGGGGSGGGGSGGGGSEFDIQMNQSPSSLSASLGDTITITCHASQNINVWLSWYQQKPGNIPKLLIYKASNLHTGVPSRFSGSGSGTGFTITISSLQPEDIATYYCQQGQSYPWTFGGGTKLEIKRLEDLKNVFPPEVAVFEPSEAEISHTQKATLVCLATGFYPDHVELSWWVNGKEVHSGVCTDPQPLKEQPALNDSRYCLSSRLRVSATFWQNPRNHFRCQVQFYGLSENDEWTQDRAKPVTQIVSAEAWGRADCGFTSESYQQGVLSATNLSVIGFRILLLKVAGFNLLMTLRLWSSRAKRSGSGATNFSLLKQAGDVEENPGPTSMDWIWRILFLVGAATGAHSFEEVQLQQSGPELVKPGASVKISCKASGYSFTGYFMNWVKQSHGKSLEYIGRFNPYNGETLYNQKFKGKATLTVDKSSSTVHMELLSVTSEDSAVYYCGRSGNDDAMDYWGQGTSVTVSSATRIQNPDPAVYQLRDSKSSDKSVCLFTDFDSQTNVSQSKDSDVYITDKCVLDMRSMDFKSNSAVAWSNKSDFACANAFNNSIIPEDTFFPSPESSCDVKLVEKSFETDTNLNFQILYEILLGKATLYAVLVSALVLMAMVKRKDSRG

SEQ ID NO: 13762 - protein, 756 aa, synthetic construct
MALPVTALLLPLALLLHAARPEVQLVESGGGLVQPGGSLRLSCAASGFSFSDFWMSWVRQAPGKGLEWVATISQAGSEKDYVDSVKGRFTISRDNAKKSLYLQMNSLRAEDTAVYYCASGVYSFDYRGQGTLVTVSSGTGGGGSGGGGSGGGGSEFEIVLTQSPATLSLSPGERATLSCRASQSVRSYLAWYQQKPGQAPRLLIYDASNRATGIPARFSGSGSGTDFTLTISSLEPEDFAVYYCQQRSNWPPTFGQGTKVEIKLEDLKNVFPPEVAVFEPSEAEISHTQKATLVCLATGFYPDHVELSWWVNGKEVHSGVCTDPQPLKEQPALNDSRYCLSSRLRVSATFWQNPRNHFRCQVQFYGLSENDEWTQDRAKPVTQIVSAEAWGRADCGFTSESYQQGVLSATNLSVIGFRILLLKVAGFNLLMTLRLWSSRAKRSGSGATNFSLLKQAGDVEENPGPTSMDWIWRILFLVGAATGAHSFEQLQVQESGPGLVKPSETLSLTCTVSGGSISNSYFSWGWIRQPPGKGLEWIGSFYYGEKTYYNPSLKSRATISIDTSKSQFSLKLSSVTAADTAVYYCPRGPTMIRGVIDSWGQGTLVTVSSTRIQNPDPAVYQLRDSKSSDKSVCLFTDFDSQTNVSQSKDSDVYITDKCVLDMRSMDFKSNSAVAWSNKSDFACANAFNNSIIPEDTFFPSPESSCDVKLVEKSFETDTNLNFQILYEILLGKATLYAVLVSALVLMAMVKRKDSRG

SEQ ID NO: 13763 - protein, 765 aa, synthetic construct
MALPVTALLLPLALLLHAARPEVQLVESGGGLVQPGGSLRLSCAASGFSFSDFWMSWVRQAPGKGLEWVATISQAGSEKDYVDSVKGRFTISRDNAKKSLYLQMNSLRAEDTAVYYCASGVYSFDYRGQGTLVTVSSGTGGGGSGGGGSGGGGSEFDIVMTQTPLSLPVTPGEPASISCRSSRSLLDSDDGNTYLDWYLQKPGQSPQLLIYTLSYRASGVPDRFSGSGSGTDFTLKISRVEAEDVGVYYCMQRVEFPITFGQGTRLEIKRLEDLKNVFPPEVAVFEPSEAEISHTQKATLVCLATGFYPDHVELSWWVNGKEVHSGVCTDPQPLKEQPALNDSRYCLSSRLRVSATFWQNPRNHFRCQVQFYGLSENDEWTQDRAKPVTQIVSAEAWGRADCGFTSESYQQGVLSATNLSVIGFRILLLKVAGFNLLMTLRLWSSRAKRSGSGATNFSLLKQAGDVEENPGPTSMDWIWRILFLVGAATGAHSFEQVQLVESGGGVVQPGRSLRLSCAASGFIFSRYGMHWVRQAPGKGLKWVAVIWYDGSNKLYADSVKGRFTISRDNSKNTLYLQMNSLRAEDTAVYYCARDYYDNSRHHWGFDYWGQGTLVTVSSTRIQNPDPAVYQLRDSKSSDKSVCLFTDFDSQTNVSQSKDSDVYITDKCVLDMRSMDFKSNSAVAWSNKSDFACANAFNNSIIPEDTFFPSPESSCDVKLVEKSFETDTNLNFQILYEILLGKATLYAVLVSALVLMAMVKRKDSRG

SEQ ID NO: 13764 - protein, 755 aa, synthetic construct
MALPVTALLLPLALLLHAARPEVQLVESGGGLVQPGGSLRLSCAASGFSFSDFWMSWVRQAPGKGLEWVATISQAGSEKDYVDSVKGRFTISRDNAKKSLYLQMNSLRAEDTAVYYCASGVYSFDYRGQGTLVTVSSGTGGGGSGGGGSGGGGSEFEIQMTQSPSSMSASLGDTITITCQATQDIFKNLNWYQQKPGKPPSLLIYYATELAEGVPSRFSGSGSGSDYSLTISNLESEDFAAYYCLQFFEFPFTFGSGTKLEMKLEDLKNVFPPEVAVFEPSEAEISHTQKATLVCLATGFYPDHVELSWWVNGKEVHSGVCTDPQPLKEQPALNDSRYCLSSRLRVSATFWQNPRNHFRCQVQFYGLSENDEWTQDRAKPVTQIVSAEAWGRADCGFTSESYQQGVLSATNLSVIGFRILLLKVAGFNLLMTLRLWSSRAKRSGSGATNFSLLKQAGDVEENPGPTSMDWIWRILFLVGAATGAHSFEQVQLQQSGAELVRPGTSVKVSCKASGYVFTNYWIEWIKQRPGQGLEWIGVMNPGSGETTYNEKFKGKATLTADKSSSTAYMQLSSLTSVDSAVYFCARDHDRDYYAMDYWGQGTSVTVSSTRIQNPDPAVYQLRDSKSSDKSVCLFTDFDSQTNVSQSKDSDVYITDKCVLDMRSMDFKSNSAVAWSNKSDFACANAFNNSIIPEDTFFPSPESSCDVKLVEKSFETDTNLNFQILYEILLGKATLYAVLVSALVLMAMVKRKDSRG

SEQ ID NO: 13765 - protein, 752 aa, synthetic construct
MALPVTALLLPLALLLHAARPEVQLVESGGGLVQPGGSLRLSCAASGFSFSDFWMSWVRQAPGKGLEWVATISQAGSEKDYVDSVKGRFTISRDNAKKSLYLQMNSLRAEDTAVYYCASGVYSFDYRGQGTLVTVSSGTGGGGSGGGGSGGGGSEFDILLTQSPAILSVSPGERVSFSCRASQNIGTSIHWYQQRTNGSPRLLIKYASESVSGIPSRFSGSGSGTDFTLSINSVESEDIADYYCQHTNSWPTTFGGGTKLEIKRLEDLKNVFPPEVAVFEPSEAEISHTQKATLVCLATGFYPDHVELSWWVNGKEVHSGVCTDPQPLKEQPALNDSRYCLSSRLRVSATFWQNPRNHFRCQVQFYGLSENDEWTQDRAKPVTQIVSAEAWGRADCGFTSESYQQGVLSATNLSVIGFRILLLKVAGFNLLMTLRLWSSRAKRSGSGATNFSLLKQAGDVEENPGPTSMDWIWRILFLVGAATGAHSFEQVQLQQSDAELVKPGASVKISCKASGYTFTDHAIHWVKQKPEQGLEWIGYFSPGNGDIKYNEKFKGKATLTADKSSSTAYMQLNSLTSEDSAVYFCKRSYGNYDYWGQGTTLTVSSTRIQNPDPAVYQLRDSKSSDKSVCLFTDFDSQTNVSQSKDSDVYITDKCVLDMRSMDFKSNSAVAWSNKSDFACANAFNNSIIPEDTFFPSPESSCDVKLVEKSFETDTNLNFQILYEILLGKATLYAVLVSALVLMAMVKRKDSRG

SEQ ID NO: 13766 - protein, 757 aa, synthetic construct
MALPVTALLLPLALLLHAARPEVQLVESGGGLVQPGGSLRLSCAASGFSFSDFWMSWVRQAPGKGLEWVATISQAGSEKDYVDSVKGRFTISRDNAKKSLYLQMNSLRAEDTAVYYCASGVYSFDYRGQGTLVTVSSGTGGGGSGGGGSGGGGSEFDIVMTQSPDSLAVSLGERATINCKSSQSLLNSGDQKNYLTWYQQKPGQPPKLLIYWASTRESGVPDRFSGSGSGTDFTLTISSLQAEDVAVYYCQNDYSYPLTFGQGTKVEIKLEDLKNVFPPEVAVFEPSEAEISHTQKATLVCLATGFYPDHVELSWWVNGKEVHSGVCTDPQPLKEQPALNDSRYCLSSRLRVSATFWQNPRNHFRCQVQFYGLSENDEWTQDRAKPVTQIVSAEAWGRADCGFTSESYQQGVLSATNLSVIGFRILLLKVAGFNLLMTLRLWSSRAKRSGSGATNFSLLKQAGDVEENPGPTSMDWIWRILFLVGAATGAHSFEQVQLVQSGAEVKKTGSSVKVSCKASGYTFTDHAIHVWRQAPGQALEWMGHFSPGNTDIKYNDKFKGRVTLTVDRSMSTAYMELSSLRSEDTAMYYCKTSTFFFDYWGQGTMVTVSSTRIQNPDPAVYQLRDSKSSDKSVCLFTDFDSQTNVSQSKDSDVYITDKCVLDMRSMDFKSNSAVAWSNKSDFACANAFNNSIIPEDTFFPSPESSCDVKLVEKSFETDTNLNFQILYEILLGKATLYAVLVSALVLMAMVKRKDSRG

SEQ ID NO: 13767 - protein, 756 aa, synthetic construct
MALPVTALLLPLALLLHAARPEVQLVESGGGLVQPGGSLRLSCAASGFSFSDFWMSWVRQAPGKGLEWVATISQAGSEKDYVDSVKGRFTISRDNAKKSLYLQMNSLRAEDTAVYYCASGVYSFDYRGQGTLVTVSSGTGGGGSGGGGSGGGGSEFDIQMTQSPSSLSASVGDRVTITCKASQDVSIAVAWYQQKPGKAPKVLIYSASYRYTGVPDRFSGSGSGTDFTFTISSLQPEDIAVYYCQQHYITPLTFGGGTKVEIKLEDLKNVFPPEVAVFEPSEAEISHTQKATLVCLATGFYPDHVELSWWVNGKEVHSGVCTDPQPLKEQPALNDSRYCLSSRLRVSATFWQNPRNHFRCQVQFYGLSENDEWTQDRAKPVTQIVSAEAWGRADCGFTSESYQQGVLSATNLSVIGFRILLLKVAGFNLLMTLRLWSSRAKRSGSGATNFSLLKQAGDVEENPGPTSMDWIWRILFLVGAATGAHSFEQIQLVQSGHEVKKPGASVKVSCKASGYTFTNYGMNWVRQAPGQGLEWMGWINTKTGEPTYAEEFKGRFVFSLETSASTAYLQISSLKAEDTAMYFCGRGGYGSSYWYFDVWGQGTTVTVSSTRIQNPDPAVYQLRDSKSSDKSVCLFTDFDSQTNVSQSKDSDVYITDKCVLDMRSMDFKSNSAVAWSNKSDFACANAFNNSIIPEDTFFPSPESSCDVKLVEKSFETDTNLNFQILYEILLGKATLYAVLVSALVLMAMVKRKDSRG

SEQ ID NO: 13768 - protein, 758 aa, synthetic construct
MALPVTALLLPLALLLHAARPEVQLVESGGGLVQPGGSLRLSCAASGFSFSDFWMSWVRQAPGKGLEWVATISQAGSEKDYVDSVKGRFTISRDNAKKSLYLQMNSLRAEDTAVYYCASGVYSFDYRGQGTLVTVSSGTGGGGSGGGGSGGGGSEFDIVMTQSPDSLAVSLGERATINCRASKSVSTSGYSYMHWYQQKPGQPPKLLIYLASNLESGVPDRFSGSGSGTDFTLTISSLQAEDVAVYYCQHSRELPYTFGQGTKLEIKLEDLKNVFPPEVAVFEPSEAEISHTQKATLVCLATGFYPDHVELSWWVNGKEVHSGVCTDPQPLKEQPALNDSRYCLSSRLRVSATFWQNPRNHFRCQVQFYGLSENDEWTQDRAKPVTQIVSAEAWGRADCGFTSESYQQGVLSATNLSVIGFRILLLKVAGFNLLMTLRLWSSRAKRSGSGATNFSLLKQAGDVEENPGPTSMDWIWRILFLVGAATGAHSFEQVQLQESGPGLVKPSETLSLTCTVSGGSISSYGVHWIRQPPGKGLEWIGVIWTSGVTDYNSALMGRVTISVDTSKNQFSLKLSSVTAADTAVYYCARDGDYDRYTMDYWGQGTLVTVSSTRIQNPDPAVYQLRDSKSSDKSVCLFTDFDSQTNVSQSKDSDVYITDKCVLDMRSMDFKSNSAVAWSNKSDFACANAFNNSIIPEDTFFPSPESSCDVKLVEKSFETDTNLNFQILYEILLGKATLYAVLVSALVLMAMVKRKDSRG

SEQ ID NO: 13769 - protein, 758 aa, synthetic construct
MALPVTALLLPLALLLHAARPEVQLVESGGGLVQPGGSLRLSCAASGFSFSDFWMSWVRQAPGKGLEWVATISQAGSEKDYVDSVKGRFTISRDNAKKSLYLQMNSLRAEDTAVYYCASGVYSFDYRGQGTLVTVSSGTGGGGSGGGGSGGGGSEFDIQMTQSPSSLSASVGDRVTITCRASQSIGTSLHWYQQKPGKAPKLLIKFASRLQSGVPSRFSGSGSGTDFTLTISSLQPEDFATYYCQQSPGFPPTFGQGTKLEIKRLEDLKNVFPPEVAVFEPSEAEISHTQKATLVCLATGFYPDHVELSWWVNGKEVHSGVCTDPQPLKEQPALNDSRYCLSSRLRVSATFWQNPRNHFRCQVQFYGLSENDEWTQDRAKPVTQIVSAEAWGRADCGFTSESYQQGVLSATNLSVIGFRILLLKVAGFNLLMTLRLWSSRAKRSGSGATNFSLLKQAGDVEENPGPTSMDWIWRILFLVGAATGAHSFEQVQLVESGGGLVKPGGSLRLSCAASGFSITTSGYYWTWIRQFPGKGLEWMGYIGYNSKTYYNPALKSRITISRDNAKNSLYLQMNSLRAEDTAVYYCARSLYGGYKDAFDSWGQGTLVTVSSTRIQNPDPAVYQLRDSKSSDKSVCLFTDFDSQTNVSQSKDSDVYITDKCVLDMRSMDFKSNSAVAWSNKSDFACANAFNNSIIPEDTFFPSPESSCDVKLVEKSFETDTNLNFQILYEILLGKATLYAVLVSALVLMAMVKRKDSRG

SEQ ID NO: 13770 - protein, 763 aa, synthetic construct
MALPVTALLLPLALLLHAARPEVQLVESGGGLVQPGGSLRLSCAASGFSFSDFWMSWVRQAPGKGLEWVATISQAGSEKDYVDSVKGRFTISRDNAKKSLYLQMNSLRAEDTAVYYCASGVYSFDYRGQGTLVTVSSGTGGGGSGGGGSGGGGSEFDEIVLTQSPLSLPVTPGEPASISCRSSQSLLHSIGYNYLDWYLQKPGQSPQLLIYLGSNRASGVPDRFSGSGSGTDFTLKISRVEAEDVGVYYCMQALQTPLTFGGGTKVEIKRLEDLKNVFPPEVAVFEPSEAEISHTQKATLVCLATGFYPDHVELSWWVNGKEVHSGVCTDPQPLKEQPALNDSRYCLSSRLRVSATFWQNPRNHFRCQVQFYGLSENDEWTQDRAKPVTQIVSAEAWGRADCGFTSESYQQGVLSATNLSVIGFRILLLKVAGFNLLMTLRLWSSRAKRSGSGATNFSLLKQAGDVEENPGPTSMDWIWRILFLVGAATGAHSFEEVQLVESGGGVVQPGRSLRLSCAASGFTFRSYGMHWVRQAPGKGLEWVAVISYDGSNKYYTDSVNGRFTISRDNSKNTLYLQMNSLRAEDTAVYYCARGGGYYETSGPDYWGQGTLVTVSSTRIQNPDPAVYQLRDSKSSDKSVCLFTDFDSQTNVSQSKDSDVYITDKCVLDMRSMDFKSNSAVAWSNKSDFACANAFNNSIIPEDTFFPSPESSCDVKLVEKSFETDTNLNFQILYEILLGKATLYAVLVSALVLMAMVKRKDSRG

SEQ ID NO: 13771 - protein, 761 aa, synthetic construct
MALPVTALLLPLALLLHAARPEVQLVESGGGLVQPGGSLRLSCAASGFSFSDFWMSWVRQAPGKGLEWVATISQAGSEKDYVDSVKGRFTISRDNAKKSLYLQMNSLRAEDTAVYYCASGVYSFDYRGQGTLVTVSSGTGGGGSGGGGSGGGGSEFDDVVMTQSPLSLPVTPGEPASISCRSSQSLLHSIGYNYLHWFLQKPGQSPQLLIYLGSNRASGVPDRFSGSGSGTDFTLKISRVEAEDVGVYYCMQALQTPPTFGQGTRLEIKRLEDLKNVFPPEVAVFEPSEAEISHTQKATLVCLATGFYPDHVELSWWVNGKEVHSGVCTDPQPLKEQPALNDSRYCLSSRLRVSATFWQNPRNHFRCQVQFYGLSENDEWTQDRAKPVTQIVSAEAWGRADCGFTSESYQQGVLSATNLSVIGFRILLLKVAGFNLLMTLRLWSSRAKRSGSGATNFSLLKQAGDVEENPGPTSMDWIWRILFLVGAATGAHSFEQLQLQESGPGLVKPSGTLSLTCAVSGGSISSSNWWSWVRQPPGKGLEWIGEIYHSGSTNYNPSLKSRVTISVDKSKNQFSLKLSSVTAADTAVYYCVGSPYGDYVLDYWGQGTLVTVSSTRIQNPDPAVYQLRDSKSSDKSVCLFTDFDSQTNVSQSKDSDVYITDKCVLDMRSMDFKSNSAVAWSNKSDFACANAFNNSIIPEDTFFPSPESSCDVKLVEKSFETDTNLNFQILYEILLGKATLYAVLVSALVLMAMVKRKDSRG

SEQ ID NO: 13772 - protein, 759 aa, synthetic construct
MALPVTALLLPLALLLHAARPEVQLVESGGGLVQPGGSLRLSCAASGFSFSDFWMSWVRQAPGKGLEWVATISQAGSEKDYVDSVKGRFTISRDNAKKSLYLQMNSLRAEDTAVYYCASGVYSFDYRGQGTLVTVSSGTGGGGSGGGGSGGGGSEFDEIVLTQSPGTLSLSLGERATLSCRASQSISSSFLAWYQQKPGQAPKLLIYAASTRATGIPDRFSGSGSGTDFTLTISRLEPEDFAVYYCQQYGRSLSFGGGTKVEVKLEDLKNVFPPEVAVFEPSEAEISHTQKATLVCLATGFYPDHVELSWWVNGKEVHSGVCTDPQPLKEQPALNDSRYCLSSRLRVSATFWQNPRNHFRCQVQFYGLSENDEWTQDRAKPVTQIVSAEAWGRADCGFTSESYQQGVLSATNLSVIGFRILLLKVAGFNLLMTLRLWSSRAKRSGSGATNFSLLKQAGDVEENPGPTSMDWIWRILFLVGAATGAHSFEQVQLQQSGPGLVKPSQTLSLTCAISGDSVSGNSATWNWIRQSPSRGLEWLGRTYYRSKWNHDYAESVKSRITINPDTSKNQFSLQLNSVTPEDTAVYYCARGDSSSWYAFDYWGQGTLVTVSSTRIQNPDPAVYQLRDSKSSDKSVCLFTDFDSQTNVSQSKDSDVYITDKCVLDMRSMDFKSNSAVAWSNKSDFACANAFNNSIIPEDTFFPSPESSCDVKLVEKSFETDTNLNFQILYEILLGKATLYAVLVSALVLMAMVKRKDSRG

SEQ ID NO: 13773 - protein, 758 aa, synthetic construct
MALPVTALLLPLALLLHAARPEVQLVESGGGLVQPGGSLRLSCAASGFSFSDFWMSWVRQAPGKGLEWVATISQAGSEKDYVDSVKGRFTISRDNAKKSLYLQMNSLRAEDTAVYYCASGVYSFDYRGQGTLVTVSSGTGGGGSGGGGSGGGGSEFDQSVVTQPPSVSVAPGKTARITCGRNNIGSKSVHWYQQKPGQAPVLVVYDDSDRPSGIPERFSGSNSGNTATLTISRVEAGDEADYYCQVWDSSSDHVVFGGGTKLTVLGLEDLKNVFPPEVAVFEPSEAEISHTQKATLVCLATGFYPDHVELSWWVNGKEVHSGVCTDPQPLKEQPALNDSRYCLSSRLRVSATFWQNPRNHFRCQVQFYGLSENDEWTQDRAKPVTQIVSAEAWGRADCGFTSESYQQGVLSATNLSVIGFRILLLKVAGFNLLMTLRLWSSRAKRSGSGATNFSLLKQAGDVEENPGPTSMDWIWRILFLVGAATGAHSFEVQLVQSGGGVMRPGGSLRLSCAASGFTFDDYGMSWVRQAPGKGLEWVSGINWNGGSTGYADSVRGRFTISRDNAKNSLYLQMNSLRAEDTALYYCARERGYGYHDPHDYWGQGTLVTVSSTRIQNPDPAVYQLRDSKSSDKSVCLFTDFDSQTNVSQSKDSDVYITDKCVLDMRSMDFKSNSAVAWSNKSDFACANAFNNSIIPEDTFFPSPESSCDVKLVEKSFETDTNLNFQILYEILLGKATLYAVLVSALVLMAMVKRKDSRG

SEQ ID NO: 13774 - protein, 771 aa, synthetic construct
MALPVTALLLPLALLLHAARPEVQLVESGGGLVQPGGSLRLSCAASGFSFSDFWMSWVRQAPGKGLEWVATISQAGSEKDYVDSVKGRFTISRDNAKKSLYLQMNSLRAEDTAVYYCASGVYSFDYRGQGTLVTVSSGTGGGGSGGGGSGGGGSEFEQKLISEEDLEFQAVVTQPPSASGTPGQRVTISCSGSSSNIGSNTVNWYQQVPGTAPKLLIYSNNQRPSGVPDRFSGSKSGTSASLAISGLQSEDEADYYCAAWDDSLNGWVFGGGTKLTVLLEDLKNVFPPEVAVFEPSEAEISHTQKATLVCLATGFYPDHVELSWWVNGKEVHSGVCTDPQPLKEQPALNDSRYCLSSRLRVSATFWQNPRNHFRCQVQFYGLSENDEWTQDRAKPVTQIVSAEAWGRADCGFTSESYQQGVLSATNLSVIGFRILLLKVAGFNLLMTLRLWSSRAKRSGSGATNFSLLKQAGDVEENPGPTSMDWIWRILFLVGAATGAHSFEQMQLVQSGAEVKEPGESLRISCKGSGYSFTNFWISWVRQMPGKGLEWMGRVDPGYSYSTYSPSFQGHVTISADKSTSTAYLQWNSLKASDTAMYYCARVQYSGYYDWFDPWGQGTLVTVSSTRIQNPDPAVYQLRDSKSSDKSVCLFTDFDSQTNVSQSKDSDVYITDKCVLDMRSMDFKSNSAVAWSNKSDFACANAFNNSIIPEDTFFPSPESSCDVKLVEKSFETDTNLNFQILYEILLGKATLYAVLVSALVLMAMVKRKDSRG

SEQ ID NO: 13775 - protein, 765 aa, synthetic construct
MALPVTALLLPLALLLHAARPEVQLVESGGGLVQPGGSLRLSCAASGFSFSDFWMSWVRQAPGKGLEWVATISQAGSEKDYVDSVKGRFTISRDNAKKSLYLQMNSLRAEDTAVYYCASGVYSFDYRGQGTLVTVSSGTGGGGSGGGGSGGGGSEFEQKLISEEDLEFDIQMTQSPSTLSASVGDRVTITCRASQNINKWLAWYQQRPGKAPQLLIYKASSLESGVPSRFSGSGSGTEYTLTISSLQPDDFATYYCQQYNSYATFGQGTKVEIKRLEDLKNVFPPEVAVFEPSEAEISHTQKATLVCLATGFYPDHVELSWWVNGKEVHSGVCTDPQPLKEQPALNDSRYCLSSRLRVSATFWQNPRNHFRCQVQFYGLSENDEWTQDRAKPVTQIVSAEAWGRADCGFTSESYQQGVLSATNLSVIGFRILLLKVAGFNLLMTLRLWSSRAKRSGSGATNFSLLKQAGDVEENPGPTSMDWIWRILFLVGAATGAHSFEQVQLVQSGAEVKKPGESLKISCKGSGYNFSNKWIGWVRQLPGRGLEWIAIIYPGYSDITYSPSFQGRVTISADTSINTAYLHWHSLKASDTAMYYCVRHTALAGFDYWGLGTLVTVSSTRIQNPDPAVYQLRDSKSSDKSVCLFTDFDSQTNVSQSKDSDVYITDKCVLDMRSMDFKSNSAVAWSNKSDFACANAFNNSIIPEDTFFPSPESSCDVKLVEKSFETDTNLNFQILYEILLGKATLYAVLVSALVLMAMVKRKDSRG

SEQ ID NO: 13776 - protein, 756 aa, synthetic construct
MALPVTALLLPLALLLHAARPEVQLVESGGGLVQPGGSLRLSCAASGFSFSDFWMSWVRQAPGKGLEWVATISQAGSEKDYVDSVKGRFTISRDNAKKSLYLQMNSLRAEDTAVYYCASGVYSFDYRGQGTLVTVSSGTGGGGSGGGGSGGGGSEFIVLTQSPASLAVSLGQRATISCRASESVDNYGNTFMHWYQQKPGQPPKLLIYRASNLESGIPARFSGSGSRTDFTLTINPVEADDVATYYCQQSNEDPPTFGAGTKLELKLEDLKNVFPPEVAVFEPSEAEISHTQKATLVCLATGFYPDHVELSWWVNGKEVHSGVCTDPQPLKEQPALNDSRYCLSSRLRVSATFWQNPRNHFRCQVQFYGLSENDEWTQDRAKPVTQIVSAEAWGRADCGFTSESYQQGVLSATNLSVIGFRILLLKVAGFNLLMTLRLWSSRAKRSGSGATNFSLLKQAGDVEENPGPTSMDWIWRILFLVGAATGAHSFEQIQLVQSGPELKKPGETVKISCKASGYIFTNYGMNWVKQAPGKSFKWMGWINTYTGESTYSADFKGRFAFSLETSASTAYLHINDLKNEDTATYFCARSGGYDPMDYWGQGTSVTVSSTRIQNPDPAVYQLRDSKSSDKSVCLFTDFDSQTNVSQSKDSDVYITDKCVLDMRSMDFKSNSAVAWSNKSDFACANAFNNSIIPEDTFFPSPESSCDVKLVEKSFETDTNLNFQILYEILLGKATLYAVLVSALVLMAMVKRKDSRG

SEQ ID NO: 13777 - protein, 755 aa, synthetic construct
MALPVTALLLPLALLLHAARPEVQLVESGGGLVQPGGSLRLSCAASGFSFSDFWMSWVRQAPGKGLEWVATISQAGSEKDYVDSVKGRFTISRDNAKKSLYLQMNSLRAEDTAVYYCASGVYSFDYRGQGTLVTVSSGTGGGGSGGGGSGGGGSEFEIVLTQSPGTLSLSPGERATLSCRASQSVSNTYLAWYHQRPGQAPRLLIYGASSRATGIPDRFSGSGSGTDFALTISSLEPEDFAVYYCQQYSNSWTFGQGTKVEIKRLEDLKNVFPPEVAVFEPSEAEISHTQKATLVCLATGFYPDHVELSWWVNGKEVHSGVCTDPQPLKEQPALNDSRYCLSSRLRVSATFWQNPRNHFRCQVQFYGLSENDEWTQDRAKPVTQIVSAEAWGRADCGFTSESYQQGVLSATNLSVIGFRILLLKVAGFNLLMTLRLWSSRAKRSGSGATNFSLLKQAGDVEENPGPTSMDWIWRILFLVGAATGAHSFEQVQLVESGGGVVQPGRSLRLSCAASGFTFSSYDMHWVRQAPGKGLEWVAVISYDGTNEYYADSVKGRFTISRDTSKNTLYLQMNSLRAEDTAVYYCARERYFDWSFDYWGQGTLVSVSSTRIQNPDPAVYQLRDSKSSDKSVCLFTDFDSQTNVSQSKDSDVYITDKCVLDMRSMDFKSNSAVAWSNKSDFACANAFNNSIIPEDTFFPSPESSCDVKLVEKSFETDTNLNFQILYEILLGKATLYAVLVSALVLMAMVKRKDSRG

SEQ ID NO: 13778 - protein, 754 aa, synthetic construct
MALPVTALLLPLALLLHAARPEVQLVESGGGLVQPGGSLRLSCAASGFSFSDFWMSWVRQAPGKGLEWVATISQAGSEKDYVDSVKGRFTISRDNAKKSLYLQMNSLRAEDTAVYYCASGVYSFDYRGQGTLVTVSSGTGGGGSGGGGSGGGGSEFELTQDPAVSVALGQTVRITCQGDSLRSNYANWYQQKPGQAPVLVIYGQNNRPSGIPDRFSGSSSGNTASLTITGAQAADEADYYCDSRVSTGNHVVFGGGTKLTVLGQLEDLKNVFPPEVAVFEPSEAEISHTQKATLVCLATGFYPDHVELSWWVNGKEVHSGVCTDPQPLKEQPALNDSRYCLSSRLRVSATFWQNPRNHFRCQVQFYGLSENDEWTQDRAKPVTQIVSAEAWGRADCGFTSESYQQGVLSATNLSVIGFRILLLKVAGFNLLMTLRLWSSRAKRSGSGATNFSLLKQAGDVEENPGPTSMDWIWRILFLVGAATGAHSFEEVQLVQSGAEVKKPGASVKVSCKASGYTFTSYAMHWVRQAPGQRLEWMGWINAGNGNTKYSQKFQGRVTITRDTSASTAYMELSSLRSEDTAVYYCARDISYGSFDYWGQGTLVTVSSTRIQNPDPAVYQLRDSKSSDKSVCLFTDFDSQTNVSQSKDSDVYITDKCVLDMRSMDFKSNSAVAWSNKSDFACANAFNNSIIPEDTFFPSPESSCDVKLVEKSFETDTNLNFQILYEILLGKATLYAVLVSALVLMAMVKRKDSRG

SEQ ID NO: 13779 - protein, 756 aa, synthetic construct
MALPVTALLLPLALLLHAARPEVQLVESGGGLVQPGGSLRLSCAASGFSFSDFWMSWVRQAPGKGLEWVATISQAGSEKDYVDSVKGRFTISRDNAKKSLYLQMNSLRAEDTAVYYCASGVYSFDYRGQGTLVTVSSGTGGGGSGGGGSGGGGSEFDIVLTQTPATLSVTPGDSVSLSCRASQSISNNLHWYQQKSHESPRLLIKNASQSISGIPSKFSGSGSGTDFTLRINSVETEDFGMYFCQQSNSWPYTFGSGTKLEIKLEDLKNVFPPEVAVFEPSEAEISHTQKATLVCLATGFYPDHVELSWWVNGKEVHSGVCTDPQPLKEQPALNDSRYCLSSRLRVSATFWQNPRNHFRCQVQFYGLSENDEWTQDRAKPVTQIVSAEAWGRADCGFTSESYQQGVLSATNLSVIGFRILLLKVAGFNLLMTLRLWSSRAKRSGSGATNFSLLKQAGDVEENPGPTSMDWIWRILFLVGAATGAHSFEQVKLQQSGPELVKPGASVKISCKASGYSFTGYYMHWVKQSHGNILDWIGYIYPYNGVSSYNQKFKGKATLTVDKSSSTAYMELRSLTSEDSAVYYCARERGLYQLRAMDYWGQGTSVTVSSTRIQNPDPAVYQLRDSKSSDKSVCLFTDFDSQTNVSQSKDSDVYITDKCVLDMRSMDFKSNSAVAWSNKSDFACANAFNNSIIPEDTFFPSPESSCDVKLVEKSFETDTNLNFQILYEILLGKATLYAVLVSALVLMAMVKRKDSRG

SEQ ID NO: 13780 - protein, 747 aa, synthetic construct
MALPVTALLLPLALLLHAARPEVQLVESGGGLVQPGGSLRLSCAASGFSFSDFWMSWVRQAPGKGLEWVATISQAGSEKDYVDSVKGRFTISRDNAKKSLYLQMNSLRAEDTAVYYCASGVYSFDYRGQGTLVTVSSGTGGGGSGGGGSGGGGSEFDIVMTQTPAIMSASPGQKVTITCSASSSVNYMHWYQQKLGSSPKLWIYDTSKLAPGVPARFSGSGSGTSYSLTISSMEAEDAASYFCHQWSSYPYTFGSGTKLEIKLEDLKNVFPPEVAVFEPSEAEISHTQKATLVCLATGFYPDHVELSWWVNGKEVHSGVCTDPQPLKEQPALNDSRYCLSSRLRVSATFWQNPRNHFRCQVQFYGLSENDEWTQDRAKPVTQIVSAEAWGRADCGFTSESYQQGVLSATNLSVIGFRILLLKVAGFNLLMTLRLWSSRAKRSGSGATNFSLLKQAGDVEENPGPTSMDWIWRILFLVGAATGAHSFEEVQLQESGPDLVKPSQSLSLTCTVTGYSITSGYGWHWIRQFPGNKLEWMGYIHYSGSTTYNPSLKSRISISRDTSKNQFFLQLNSVTTEDTATYYCARSLRYWGQGTTLTVSSTRIQNPDPAVYQLRDSKSSDKSVCLFTDFDSQTNVSQSKDSDVYITDKCVLDMRSMDFKSNSAVAWSNKSDFACANAFNNSIIPEDTFFPSPESSCDVKLVEKSFETDTNLNFQILYEILLGKATLYAVLVSALVLMAMVKRKDSRG

SEQ ID NO: 13781 - protein, 750 aa, synthetic construct
MALPVTALLLPLALLLHAARPEVQLVESGGGLVQPGGSLRLSCAASGFSFSDFWMSWVRQAPGKGLEWVATISQAGSEKDYVDSVKGRFTISRDNAKKSLYLQMNSLRAEDTAVYYCASGVYSFDYRGQGTLVTVSSGTGGGGSGGGGSGGGGSEFDIQMTQSPSSLSASVGDRVTITCSATSSISYMHWYQQKPGKAPKGWIYDTSKLAHGVPSRFSGSGSGTDFTLTISSLQPEDFATYYCHQRRSYPFTFGQGTKVEIKLEDLKNVFPPEVAVFEPSEAEISHTQKATLVCLATGFYPDHVELSWWVNGKEVHSGVCTDPQPLKEQPALNDSRYCLSSRLRVSATFWQNPRNHFRCQVQFYGLSENDEWTQDRAKPVTQIVSAEAWGRADCGFTSESYQQGVLSATNLSVIGFRILLLKVAGFNLLMTLRLWSSRAKRSGSGATNFSLLKQAGDVEENPGPTSMDWIWRILFLVGAATGAHSFEEVQLVQSGAEVKKPGASVKVSCKASGYTFTNFWIHWVRQAPGQGLEWIGEIDPSDSYTNYNQKFKGRVTITRDTSTSTAYLELSSLRSEDTAVYYCAREITTVDYWGQGTLVTVSSTRIQNPDPAVYQLRDSKSSDKSVCLFTDFDSQTNVSQSKDSDVYITDKCVLDMRSMDFKSNSAVAWSNKSDFACANAFNNSIIPEDTFFPSPESSCDVKLVEKSFETDTNLNFQILYEILLGKATLYAVLVSALVLMAMVKRKDSRG

SEQ ID NO: 13782 - protein, 757 aa, synthetic construct
MALPVTALLLPLALLLHAARPEVQLVESGGGLVQPGGSLRLSCAASGFSFSDFWMSWVRQAPGKGLEWVATISQAGSEKDYVDSVKGRFTISRDNAKKSLYLQMNSLRAEDTAVYYCASGVYSFDYRGQGTLVTVSSGTGGGGSGGGGSGGGGSEFDIQMTQSPSSLSASVGDRVTITCKASQGFNKYVAWYQQKPGKAPKLLIYYTSTLQPGVPSRFSGSGSGRDYTLTISSLQPEDFATYYCLQYGNLLYAFGQGTKVEIKRLEDLKNVFPPEVAVFEPSEAEISHTQKATLVCLATGFYPDHVELSWWVNGKEVHSGVCTDPQPLKEQPALNDSRYCLSSRLRVSATFWQNPRNHFRCQVQFYGLSENDEWTQDRAKPVTQIVSAEAWGRADCGFTSESYQQGVLSATNLSVIGFRILLLKVAGFNLLMTLRLWSSRAKRSGSGATNFSLLKQAGDVEENPGPTSMDWIWRILFLVGAATGAHSFEEVQLVQSGAEVKKPGASVKVSCKASGYTFTSYWIGWVRQAPGQGLEWIGDIYPGGGYTNYNEKFKGRVTITRDTSTSTAYLELSSLRSEDTAVYYCARLDGSSYRGAMDSWGQGTLVTVSSTRIQNPDPAVYQLRDSKSSDKSVCLFTDFDSQTNVSQSKDSDVYITDKCVLDMRSMDFKSNSAVAWSNKSDFACANAFNNSIIPEDTFFPSPESSCDVKLVEKSFETDTNLNFQILYEILLGKATLYAVLVSALVLMAMVKRKDSRG

SEQ ID NO: 13783 - protein, 753 aa, synthetic construct
MALPVTALLLPLALLLHAARPEVQLVESGGGLVQPGGSLRLSCAASGFSFSDFWMSWVRQAPGKGLEWVATISQAGSEKDYVDSVKGRFTISRDNAKKSLYLQMNSLRAEDTAVYYCASGVYSFDYRGQGTLVTVSSGTGGGGSGGGGSGGGGSEFDIQMTQSPSSLSASVGDRVTITCRASQDIRYYLNWYQQKPGKAPKLLIYVASSLQSGVPSRFSGSGSGTEFTLTVSSLQPEDFATYYCLQVYSTPRTFGQGTKVEIKLEDLKNVFPPEVAVFEPSEAEISHTQKATLVCLATGFYPDHVELSWWVNGKEVHSGVCTDPQPLKEQPALNDSRYCLSSRLRVSATFWQNPRNHFRCQVQFYGLSENDEWTQDRAKPVTQIVSAEAWGRADCGFTSESYQQGVLSATNLSVIGFRILLLKVAGFNLLMTLRLWSSRAKRSGSGATNFSLLKQAGDVEENPGPTSMDWIWRILFLVGAATGAHSFEEVQLVESGGGLAKPGGSLRLSCAASGFRFTFNNYYMDWVRQAPGQGLEWVSRISSSGDPTWYADSVKGRFTISRENAKNTLFLQMNSLRAEDTAVYYCASLTTGSDSWGQGVLVTVSSTRIQNPDPAVYQLRDSKSSDKSVCLFTDFDSQTNVSQSKDSDVYITDKCVLDMRSMDFKSNSAVAWSNKSDFACANAFNNSIIPEDTFFPSPESSCDVKLVEKSFETDTNLNFQILYEILLGKATLYAVLVSALVLMAMVKRKDSRG

SEQ ID NO: 13784 - protein, 754 aa, synthetic construct
MALPVTALLLPLALLLHAARPEVQLVESGGGLVQPGGSLRLSCAASGFSFSDFWMSWVRQAPGKGLEWVATISQAGSEKDYVDSVKGRFTISRDNAKKSLYLQMNSLRAEDTAVYYCASGVYSFDYRGQGTLVTVSSGTGGGGSGGGGSGGGGSEFEIVMTQSPATLSVSPGERATLSCRASQSVSRNLAWYQQKPGQAPRLLIYGASTRATGIPARFSGSGSGTEFTLTIGSLQSEDFAVYYCQQYKTWPRTFGQGTNVEIKLEDLKNVFPPEVAVFEPSEAEISHTQKATLVCLATGFYPDHVELSWWVNGKEVHSGVCTDPQPLKEQPALNDSRYCLSSRLRVSATFWQNPRNHFRCQVQFYGLSENDEWTQDRAKPVTQIVSAEAWGRADCGFTSESYQQGVLSATNLSVIGFRILLLKVAGFNLLMTLRLWSSRAKRSGSGATNFSLLKQAGDVEENPGPTSMDWIWRILFLVGAATGAHSFEQVQLQQWGAGLLKPSETLSLTCAVFGGSFSGYYWSWIRQPPGKGLEWIGEINHRGNTNDNPSLKSRVTISVDTSKNQFALKLSSVTAADTAVYYCARERGYTYGNFDHWGQGTLVTVSSTRIQNPDPAVYQLRDSKSSDKSVCLFTDFDSQTNVSQSKDSDVYITDKCVLDMRSMDFKSNSAVAWSNKSDFACANAFNNSIIPEDTFFPSPESSCDVKLVEKSFETDTNLNFQILYEILLGKATLYAVLVSALVLMAMVKRKDSRG

SEQ ID NO: 13785 - protein, 755 aa, synthetic construct
MALPVTALLLPLALLLHAARPEVQLVESGGGLVQPGGSLRLSCAASGFSFSDFWMSWVRQAPGKGLEWVATISQAGSEKDYVDSVKGRFTISRDNAKKSLYLQMNSLRAEDTAVYYCASGVYSFDYRGQGTLVTVSSGTGGGGSGGGGSGGGGSEFEIVMTPSSATLSVSPGERATLSCRASQSVSRNLAWYQQKPGQAPRLLIYGASTRATGIPARFSGSGSGTEFTLTISSLQSEDFAVYYCHQYSNWMCSFGQGTKLEIKLEDLKNVFPPEVAVFEPSEAEISHTQKATLVCLATGFYPDHVELSWWVNGKEVHSGVCTDPQPLKEQPALNDSRYCLSSRLRVSATFWQNPRNHFRCQVQFYGLSENDEWTQDRAKPVTQIVSAEAWGRADCGFTSESYQQGVLSATNLSVIGFRILLLKVAGFNLLMTLRLWSSRAKRSGSGATNFSLLKQAGDVEENPGPTSMDWIWRILFLVGAATGAHSFEEVQLLESGGGLVQPGGSLRLSCAASGFTFSRYAMNWVRQAPGKGLEWVSGISGSGGRTYYADSVKGRFTISRDNSKNTLYLQMNSLRAEDTAVYYCAKDRDFWSGPFDYWGQGTLVTVSSTRIQNPDPAVYQLRDSKSSDKSVCLFTDFDSQTNVSQSKDSDVYITDKCVLDMRSMDFKSNSAVAWSNKSDFACANAFNNSIIPEDTFFPSPESSCDVKLVEKSFETDTNLNFQILYEILLGKATLYAVLVSALVLMAMVKRKDSRG

SEQ ID NO: 13786 - protein, 760 aa, synthetic construct
MALPVTALLLPLALLLHAARPEVQLVESGGGLVQPGGSLRLSCAASGFSFSDFWMSWVRQAPGKGLEWVATISQAGSEKDYVDSVKGRFTISRDNAKKSLYLQMNSLRAEDTAVYYCASGVYSFDYRGQGTLVTVSSGTGGGGSGGGGSGGGGSEFDIQMTQSPSSLSASVGDRVTITCKASKNIRSYLAWYQQKPGKAPKLLIYSGSTLHSGVPSRFSGSGSGTDFTLTISSLQPEDFATYYCQQHHEYPLTFGQGTKVEIKRLEDLKNVFPPEVAVFEPSEAEISHTQKATLVCLATGFYPDHVELSWWVNGKEVHSGVCTDPQPLKEQPALNDSRYCLSSRLRVSATFWQNPRNHFRCQVQFYGLSENDEWTQDRAKPVTQIVSAEAWGRADCGFTSESYQQGVLSATNLSVIGFRILLLKVAGFNLLMTLRLWSSRAKRSGSGATNFSLLKQAGDVEENPGPTSMDWIWRILFLVGAATGAHSFEQVQLQESGPGLVKPSETLSLTCTVSGYTITSGYDWSWIRQPPGKGLEWIGYINYGGSTNYKPSLGSRVTISVDTSKNQFSLKLSSVTAADTAVYYCARYNEYKSYIYDWYFDFWGQGTLVTVSSTRIQNPDPAVYQLRDSKSSDKSVCLFTDFDSQTNVSQSKDSDVYITDKCVLDMRSMDFKSNSAVAWSNKSDFACANAFNNSIIPEDTFFPSPESSCDVKLVEKSFETDTNLNFQILYEILLGKATLYAVLVSALVLMAMVKRKDSRG

SEQ ID NO: 13787 - protein, 762 aa, synthetic construct
MALPVTALLLPLALLLHAARPEVQLVESGGGLVQPGGSLRLSCAASGFSFSDFWMSWVRQAPGKGLEWVATISQAGSEKDYVDSVKGRFTISRDNAKKSLYLQMNSLRAEDTAVYYCASGVYSFDYRGQGTLVTVSSGTGGGGSGGGGSGGGGSEFQSVVTQPPSVSAAPGQKVTISCSGSSSNIGNNYVSWYQQLPGTAPKLLIYDNNKRPSGIPDRFSGSKSGTSATLGITGLQTGDEADYYCGTWDGSLYTMLFGGGTKLTVLLEDLKNVFPPEVAVFEPSEAEISHTQKATLVCLATGFYPDHVELSWWVNGKEVHSGVCTDPQPLKEQPALNDSRYCLSSRLRVSATFWQNPRNHFRCQVQFYGLSENDEWTQDRAKPVTQIVSAEAWGRADCGFTSESYQQGVLSATNLSVIGFRILLLKVAGFNLLMTLRLWSSRAKRSGSGATNFSLLKQAGDVEENPGPTSMDWIWRILFLVGAATGAHSFEEVQLVESGGGLVKPGGSLRLSCAASGFTFSNAWMSWVRQAPGKGLEWVGFIRSKAYGGTTEYAASVKGRFTISRDDSKSIAYLQMNNLKTEDTAVYYCARDGLYSSSWYDSDYWGQGTLVTVSSTRIQNPDPAVYQLRDSKSSDKSVCLFTDFDSQTNVSQSKDSDVYITDKCVLDMRSMDFKSNSAVAWSNKSDFACANAFNNSIIPEDTFFPSPESSCDVKLVEKSFETDTNLNFQILYEILLGKATLYAVLVSALVLMAMVKRKDSRG

SEQ ID NO: 13788 - protein, 767 aa, synthetic construct
MALPVTALLLPLALLLHAARPEVQLVESGGGLVQPGGSLRLSCAASGFSFSDFWMSWVRQAPGKGLEWVATISQAGSEKDYVDSVKGRFTISRDNAKKSLYLQMNSLRAEDTAVYYCASGVYSFDYRGQGTLVTVSSGTGGGGSGGGGSGGGGSEFQSVLTQPPSVSGAPGQRVTISCTGSSSNIGAGYDVHWYQQLPGTAPKLLIFGNSNRPSGVPDRFSGFKSGTSASLAITGLQAEDEADYFCQSYDSSLSGSGVFGTGTKVTVLGLEDLKNVFPPEVAVFEPSEAEISHTQKATLVCLATGFYPDHVELSWWVNGKEVHSGVCTDPQPLKEQPALNDSRYCLSSRLRVSATFWQNPRNHFRCQVQFYGLSENDEWTQDRAKPVTQIVSAEAWGRADCGFTSESYQQGVLSATNLSVIGFRILLLKVAGFNLLMTLRLWSSRAKRSGSGATNFSLLKQAGDVEENPGPTSMDWIWRILFLVGAATGAHSFEQMQLVQSGGGLVQPGRSLRLSCAASGFTFDDYAMHWVRQAPGKGLEWVSGISWNSGSIGYADSVKGRFTISRDNAKNSLYLQMNSLRAEDTALYYCAKDIHSGSYYGLLYYAMDVWGQGTTVTVSSTRIQNPDPAVYQLRDSKSSDKSVCLFTDFDSQTNVSQSKDSDVYITDKCVLDMRSMDFKSNSAVAWSNKSDFACANAFNNSIIPEDTFFPSPESSCDVKLVEKSFETDTNLNFQILYEILLGKATLYAVLVSALVLMAMVKRKDSRG

SEQ ID NO: 13789 - protein, 767 aa, synthetic construct
MALPVTALLLPLALLLHAARPEVQLVESGGGLVQPGGSLRLSCAASGFSFSDFWMSWVRQAPGKGLEWVATISQAGSEKDYVDSVKGRFTISRDNAKKSLYLQMNSLRAEDTAVYYCASGVYSFDYRGQGTLVTVSSGTGGGGSGGGGSGGGGSEFLPVLTQPPSASGTPGQRVTISCSGRSSNIGSNSVNWYRQLPGAAPKLLIYSNNQRPPGVPVRFSGSKSGTSASLAISGLQSEDEATYYCATWDDNLNVHYVFGTGTKVTVLGSRLEDLKNVFPPEVAVFEPSEAEISHTQKATLVCLATGFYPDHVELSWWVNGKEVHSGVCTDPQPLKEQPALNDSRYCLSSRLRVSATFWQNPRNHFRCQVQFYGLSENDEWTQDRAKPVTQIVSAEAWGRADCGFTSESYQQGVLSATNLSVIGFRILLLKVAGFNLLMTLRLWSSRAKRSGSGATNFSLLKQAGDVEENPGPTSMDWIWRILFLVGAATGAHSFELEMAQVQLVQSGAEVKKPGSSVKVSCKASGGTFSSYAISWVRQAPGQGLEWMGRIIPILGIANYAQKFQGRVTITADKSTSTAYMELSSLRSEDTAVYYCARGGYYSHDMWSEDWGQGTLVTVSSTRIQNPDPAVYQLRDSKSSDKSVCLFTDFDSQTNVSQSKDSDVYITDKCVLDMRSMDFKSNSAVAWSNKSDFACANAFNNSIIPEDTFFPSPESSCDVKLVEKSFETDTNLNFQILYEILLGKATLYAVLVSALVLMAMVKRKDSRG

SEQ ID NO: 13790 - protein, 761 aa, synthetic construct
MALPVTALLLPLALLLHAARPEVQLVESGGGLVQPGGSLRLSCAASGFSFSDFWMSWVRQAPGKGLEWVATISQAGSEKDYVDSVKGRFTISRDNAKKSLYLQMNSLRAEDTAVYYCASGVYSFDYRGQGTLVTVSSGTGGGGSGGGGSGGGGSEFDFVMTQSPDSLAVSLGERVTMSCKSSQSLLNSGNQKNYLTWYQQKPGQPPKLLIYWASTRESGVPDRFSGSGSGTDFTLTISSLQAEDVAVYYCQNDYSYPYTFGQGTKLEIKLEDLKNVFPPEVAVFEPSEAEISHTQKATLVCLATGFYPDHVELSWWVNGKEVHSGVCTDPQPLKEQPALNDSRYCLSSRLRVSATFWQNPRNHFRCQVQFYGLSENDEWTQDRAKPVTQIVSAEAWGRADCGFTSESYQQGVLSATNLSVIGFRILLLKVAGFNLLMTLRLWSSRAKRSGSGATNFSLLKQAGDVEENPGPTSMDWIWRILFLVGAATGAHSFEEVQLVQSGAELKKPGASVKVSCKASGYTFTDYYMKWVRQAPGQGLEWIGDIIPSNGATFYNQKFKGRVTITVDKSTSTAYMELSSLRSEDTAVYYCARSHLLRASWFAYWGQGTLVTVSSTRIQNPDPAVYQLRDSKSSDKSVCLFTDFDSQTNVSQSKDSDVYITDKCVLDMRSMDFKSNSAVAWSNKSDFACANAFNNSIIPEDTFFPSPESSCDVKLVEKSFETDTNLNFQILYEILLGKATLYAVLVSALVLMAMVKRKDSRG

SEQ ID NO: 13791 - protein, 761 aa, synthetic construct
MALPVTALLLPLALLLHAARPEVQLVESGGGLVQPGGSLRLSCAASGFSFSDFWMSWVRQAPGKGLEWVATISQAGSEKDYVDSVKGRFTISRDNAKKSLYLQMNSLRAEDTAVYYCASGVYSFDYRGQGTLVTVSSGTGGGGSGGGGSGGGGSEFDFVMTQSPDSLAVSLGERVTMSCKSSQSLLNSGNQKNYLTWYQQKPGQPPKLLIYWASTRESGVPDRFSGSGSGTDFTLTISSLQAEDVAVYYCQNDYSYPYTFGQGTKLEIKLEDLKNVFPPEVAVFEPSEAEISHTQKATLVCLATGFYPDHVELSWWVNGKEVHSGVCTDPQPLKEQPALNDSRYCLSSRLRVSATFWQNPRNHFRCQVQFYGLSENDEWTQDRAKPVTQIVSAEAWGRADCGFTSESYQQGVLSATNLSVIGFRILLLKVAGFNLLMTLRLWSSRAKRSGSGATNFSLLKQAGDVEENPGPTSMDWIWRILFLVGAATGAHSFEQVQLVQSGAELKKPGASVKVSCKASGYTFTDYYMKWVRQAPGQGLEWIGDIIPSNGATFYNQKFKGRVTITVDKSTSTAYMELSSLRSEDTAVYYCARSHLLRASWFAYWGQGTLVTVSSTRIQNPDPAVYQLRDSKSSDKSVCLFTDFDSQTNVSQSKDSDVYITDKCVLDMRSMDFKSNSAVAWSNKSDFACANAFNNSIIPEDTFFPSPESSCDVKLVEKSFETDTNLNFQILYEILLGKATLYAVLVSALVLMAMVKRKDSRG

SEQ ID NO: 13792 - protein, 751 aa, synthetic construct
MALPVTALLLPLALLLHAARPEVQLVESGGGLVQPGGSLRLSCAASGFSFSDFWMSWVRQAPGKGLEWVATISQAGSEKDYVDSVKGRFTISRDNAKKSLYLQMNSLRAEDTAVYYCASGVYSFDYRGQGTLVTVSSGTGGGGSGGGGSGGGGSEFDVQITQSPSYLAASPGETITINCRASKSISKDLAWYQEKPGKTNKLLIYSGSTLQSGIPSRFSGSGSGTDFTLTISSLEPEDFAMYYCQQHNKYPYTFGGGTKLEIKRLEDLKNVFPPEVAVFEPSEAEISHTQKATLVCLATGFYPDHVELSWWVNGKEVHSGVCTDPQPLKEQPALNDSRYCLSSRLRVSATFWQNPRNHFRCQVQFYGLSENDEWTQDRAKPVTQIVSAEAWGRADCGFTSESYQQGVLSATNLSVIGFRILLLKVAGFNLLMTLRLWSSRAKRSGSGATNFSLLKQAGDVEENPGPTSMDWIWRILFLVGAATGAHSFEQVQLQQPGAELVRPGASVKLSCKASGYTFTSYWMNWVKQRPDQGLEWIGRIDPYDSETHYNQKFKDKAILTVDKSSSTAYMQLSSLTSEDSAVYYCARGNWDDYWGQGTTLTVSSTRIQNPDPAVYQLRDSKSSDKSVCLFTDFDSQTNVSQSKDSDVYITDKCVLDMRSMDFKSNSAVAWSNKSDFACANAFNNSIIPEDTFFPSPESSCDVKLVEKSFETDTNLNFQILYEILLGKATLYAVLVSALVLMAMVKRKDSRG

SEQ ID NO: 13793 - protein, 753 aa, synthetic construct
MALPVTALLLPLALLLHAARPEVQLVESGGGLVQPGGSLRLSCAASGFSFSDFWMSWVRQAPGKGLEWVATISQAGSEKDYVDSVKGRFTISRDNAKKSLYLQMNSLRAEDTAVYYCASGVYSFDYRGQGTLVTVSSGTGGGGSGGGGSGGGGSEFEIVLTQSPTSMTASPGEQVTITCRASSSINYMHWYQQKPGASPRPWIYETSKLASGVPDRFSGSASGTSYSLTINNMEAEDAATYYCQQWNYPSWTFGGGTKLELKLEDLKNVFPPEVAVFEPSEAEISHTQKATLVCLATGFYPDHVELSWWVNGKEVHSGVCTDPQPLKEQPALNDSRYCLSSRLRVSATFWQNPRNHFRCQVQFYGLSENDEWTQDRAKPVTQIVSAEAWGRADCGFTSESYQQGVLSATNLSVIGFRILLLKVAGFNLLMTLRLWSSRAKRSGSGATNFSLLKQAGDVEENPGPTSMDWIWRILFLVGAATGAHSFEEVQLVESGGGLVQPGRSLKLSCAASGFTFSDYNMAWVRQAPKKGLEWVATILYDGGRTYYRGSVKGRFTISRDNAKSTLYLRMDSLRSEDTATYYCATHSRGTDYFDYWGQGVMVTVSSTRIQNPDPAVYQLRDSKSSDKSVCLFTDFDSQTNVSQSKDSDVYITDKCVLDMRSMDFKSNSAVAWSNKSDFACANAFNNSIIPEDTFFPSPESSCDVKLVEKSFETDTNLNFQILYEILLGKATLYAVLVSALVLMAMVKRKDSRG

SEQ ID NO: 13794 - protein, 762 aa, synthetic construct
MALPVTALLLPLALLLHAARPEVQLVESGGGLVQPGGSLRLSCAASGFSFSDFWMSWVRQAPGKGLEWVATISQAGSEKDYVDSVKGRFTISRDNAKKSLYLQMNSLRAEDTAVYYCASGVYSFDYRGQGTLVTVSSGTGGGGSGGGGSGGGGSEFDIVMTQSPSSLAVSEGETVTINCKSSQSFLSSGDGKNYVAWYQYKPGQSPKLLIYWASTRQSGVPDRFIGSGSGTDFTLTISTVQAEDLAIYYCQQYYDTPLTFGSGTKLEIKLEDLKNVFPPEVAVFEPSEAEISHTQKATLVCLATGFYPDHVELSWWVNGKEVHSGVCTDPQPLKEQPALNDSRYCLSSRLRVSATFWQNPRNHFRCQVQFYGLSENDEWTQDRAKPVTQIVSAEAWGRADCGFTSESYQQGVLSATNLSVIGFRILLLKVAGFNLLMTLRLWSSRAKRSGSGATNFSLLKQAGDVEENPGPTSMDWIWRILFLVGAATGAHSFEEVKLQESGPSLVQSSQTLSLTCTVSGFSLTSYHIHWVRQTPGKGLEWMGVMWSDGDTSYNSALKSRLSISRDTSQSQVFLKMNSLQTEDTATYYCARGYYSSYLYLWFAYWGQGTLVTVSSTRIQNPDPAVYQLRDSKSSDKSVCLFTDFDSQTNVSQSKDSDVYITDKCVLDMRSMDFKSNSAVAWSNKSDFACANAFNNSIIPEDTFFPSPESSCDVKLVEKSFETDTNLNFQILYEILLGKATLYAVLVSALVLMAMVKRKDSRG

SEQ ID NO: 13795 - protein, 766 aa, synthetic construct
MALPVTALLLPLALLLHAARPEVQLVESGGGLVQPGGSLRLSCAASGFSFSDFWMSWVRQAPGKGLEWVATISQAGSEKDYVDSVKGRFTISRDNAKKSLYLQMNSLRAEDTAVYYCASGVYSFDYRGQGTLVTVSSGTGGGGSGGGGSGGGGSEFDVLMTQTPVSLPVSLGGQVSISCRSSQSLVHSDGDTYLHWYLQKPGQSPQLLIYRVSNRFSGVPDRFSGSGSGTDFTLKISRVEPEDLGLYYCLQTTHFPPWTFGGGTKLEMKLEDLKNVFPPEVAVFEPSEAEISHTQKATLVCLATGFYPDHVELSWWVNGKEVHSGVCTDPQPLKEQPALNDSRYCLSSRLRVSATFWQNPRNHFRCQVQFYGLSENDEWTQDRAKPVTQIVSAEAWGRADCGFTSESYQQGVLSATNLSVIGFRILLLKVAGFNLLMTLRLWSSRAKRSGSGATNFSLLKQAGDVEENPGPTSMDWIWRILFLVGAATGAHSFEQVQLQQSGPELRRPGSSVRLSCKASGYRIKDFLIHWIKNRPEHGLEWIGWIDPEDGETKYAQKFQTKATLTADTSSNTAYMQLSSLTSEDTATYFCARWGDVYYGLMRGHVMDAWGQGTSVTVSSTRIQNPDPAVYQLRDSKSSDKSVCLFTDFDSQTNVSQSKDSDVYITDKCVLDMRSMDFKSNSAVAWSNKSDFACANAFNNSIIPEDTFFPSPESSCDVKLVEKSFETDTNLNFQILYEILLGKATLYAVLVSALVLMAMVKRKDSRG

SEQ ID NO: 13796 - protein, 761 aa, synthetic construct
MALPVTALLLPLALLLHAARPEVQLVESGGGLVQPGGSLRLSCAASGFSFSDFWMSWVRQAPGKGLEWVATISQAGSEKDYVDSVKGRFTISRDNAKKSLYLQMNSLRAEDTAVYYCASGVYSFDYRGQGTLVTVSSGTGGGGSGGGGSGGGGSEFDIVMTQSPATLSLSPGERATLSCRSSKSLQNVNGNTYLYWFQQKPGQSPQLLIYRMSNLNSGVPDRFSGSGSGTEFTLTISSLEPEDFAVYYCMQHLEYPITFGAGTKLEIKLEDLKNVFPPEVAVFEPSEAEISHTQKATLVCLATGFYPDHVELSWWVNGKEVHSGVCTDPQPLKEQPALNDSRYCLSSRLRVSATFWQNPRNHFRCQVQFYGLSENDEWTQDRAKPVTQIVSAEAWGRADCGFTSESYQQGVLSATNLSVIGFRILLLKVAGFNLLMTLRLWSSRAKRSGSGATNFSLLKQAGDVEENPGPTSMDWIWRILFLVGAATGAHSFEEVQLVESGGGLVKPGGSLKLSCAASGYTFTSYVMHWVRQAPGKGLEWIGYINPYNDGTKYNEKFQGRVTISSDKSISTAYMELSSLRSEDTAMYYCARGTYYYGTRVFDYWGQGTLVTVSSTRIQNPDPAVYQLRDSKSSDKSVCLFTDFDSQTNVSQSKDSDVYITDKCVLDMRSMDFKSNSAVAWSNKSDFACANAFNNSIIPEDTFFPSPESSCDVKLVEKSFETDTNLNFQILYEILLGKATLYAVLVSALVLMAMVKRKDSRG

SEQ ID NO: 13797 - protein, 757 aa, synthetic construct
MALPVTALLLPLALLLHAARPEVQLVESGGGLVQPGGSLRLSCAASGFSFSDFWMSWVRQAPGKGLEWVATISQAGSEKDYVDSVKGRFTISRDNAKKSLYLQMNSLRAEDTAVYYCASGVYSFDYRGQGTLVTVSSGTGGGGSGGGGSGGGGSEFDIQMTQSPSSLSASVGDRVTITCKASDHINNWLAWYQQKPGQAPKLLIYGATTLETGVPSRFSGSGSGTDYTLTISSLQPEDFATYYCQQSWNTPWTFGQGTKLEIKRLEDLKNVFPPEVAVFEPSEAEISHTQKATLVCLATGFYPDHVELSWWVNGKEVHSGVCTDPQPLKEQPALNDSRYCLSSRLRVSATFWQNPRNHFRCQVQFYGLSENDEWTQDRAKPVTQIVSAEAWGRADCGFTSESYQQGVLSATNLSVIGFRILLLKVAGFNLLMTLRLWSSRAKRSGSGATNFSLLKQAGDVEENPGPTSMDWIWRILFLVGAATGAHSFEQVQLQQPGAELVKPGASVKMSCKASGYAFSSYWINWMKQKPGQGLEWIGQIYPGDGDTNYNGKFKGRATLTADTSSSTAYMQLSSLTSEDSAVYFCARSITTVVGCAMDYWGQGTSVTVSSTRIQNPDPAVYQLRDSKSSDKSVCLFTDFDSQTNVSQSKDSDVYITDKCVLDMRSMDFKSNSAVAWSNKSDFACANAFNNSIIPEDTFFPSPESSCDVKLVEKSFETDTNLNFQILYEILLGKATLYAVLVSALVLMAMVKRKDSRG

SEQ ID NO: 13798 - protein, 759 aa, synthetic construct
MALPVTALLLPLALLLHAARPEVQLVESGGGLVQPGGSLRLSCAASGFSFSDFWMSWVRQAPGKGLEWVATISQAGSEKDYVDSVKGRFTISRDNAKKSLYLQMNSLRAEDTAVYYCASGVYSFDYRGQGTLVTVSSGTGGGGSGGGGSGGGGSEFQIVLSQSPAILSASPGEKVTMTCRASSSVSYMHWYQQKPGSSPKPWIYATSNLASGVPARFSGSGSGTSYSFTISRVEAEDAATYYCQQWTFNPPTFGGGTRLEIKRTVAALEDLKNVFPPEVAVFEPSEAEISHTQKATLVCLATGFYPDHVELSWWVNGKEVHSGVCTDPQPLKEQPALNDSRYCLSSRLRVSATFWQNPRNHFRCQVQFYGLSENDEWTQDRAKPVTQIVSAEAWGRADCGFTSESYQQGVLSATNLSVIGFRILLLKVAGFNLLMTLRLWSSRAKRSGSGATNFSLLKQAGDVEENPGPTSMDWIWRILFLVGAATGAHSFEQAYLQQSGAELVRPGASVKMSCKASGYTFTSYNMHWVKQTPRQGLEWIGGIYPGNGDTSYNQKFKGKATLTVGKSSSTAYMQLSSLTSEDSAVYFCARYDYNYAMDYWGQGTSVTVSSASTRIQNPDPAVYQLRDSKSSDKSVCLFTDFDSQTNVSQSKDSDVYITDKCVLDMRSMDFKSNSAVAWSNKSDFACANAFNNSIIPEDTFFPSPESSCDVKLVEKSFETDTNLNFQILYEILLGKATLYAVLVSALVLMAMVKRKDSRG

SEQ ID NO: 13799 - protein, 757 aa, synthetic construct
MALPVTALLLPLALLLHAARPEVQLVESGGGLVQPGGSLRLSCAASGFSFSDFWMSWVRQAPGKGLEWVATISQAGSEKDYVDSVKGRFTISRDNAKKSLYLQMNSLRAEDTAVYYCASGVYSFDYRGQGTLVTVSSGTGGGGSGGGGSGGGGSEFEIVLTQSPATLSLSPGERATLSCRASQSVSSYLAWYQQKPGQAPRLLIYDASNRATGIPARFSGSGSGTDFTLTISSLEPEDFAVYYCQQRSNWPITFGQGTRLEIKLEDLKNVFPPEVAVFEPSEAEISHTQKATLVCLATGFYPDHVELSWWVNGKEVHSGVCTDPQPLKEQPALNDSRYCLSSRLRVSATFWQNPRNHFRCQVQFYGLSENDEWTQDRAKPVTQIVSAEAWGRADCGFTSESYQQGVLSATNLSVIGFRILLLKVAGFNLLMTLRLWSSRAKRSGSGATNFSLLKQAGDVEENPGPTSMDWIWRILFLVGAATGAHSFEEVQLVESGGGLVQPDRSLRLSCAASGFTFHDYAMHWVRQAPGKGLEWVSTISWNSGTIGYADSVKGRFTISRDNAKNSLYLQMNSLRAEDTALYYCAKDIQYGNYYYGMDVWGQGTTVTVSSTRIQNPDPAVYQLRDSKSSDKSVCLFTDFDSQTNVSQSKDSDVYITDKCVLDMRSMDFKSNSAVAWSNKSDFACANAFNNSIIPEDTFFPSPESSCDVKLVEKSFETDTNLNFQILYEILLGKATLYAVLVSALVLMAMVKRKDSRG

SEQ ID NO: 13800 - protein, 752 aa, synthetic construct
MALPVTALLLPLALLLHAARPEVQLVESGGGLVQPGGSLRLSCAASGFSFSDFWMSWVRQAPGKGLEWVATISQAGSEKDYVDSVKGRFTISRDNAKKSLYLQMNSLRAEDTAVYYCASGVYSFDYRGQGTLVTVSSGTGGGGSGGGGSGGGGSEFDIQMTQSPSSLSASVGDRVTINCKASQDINSYLSWFQQKPGKAPKTLIYRANRLVDGVPSRFSGSGSGQDYTLTISSLQPEDFATYYCLQYDEFPLTFGGGTKVEIKLEDLKNVFPPEVAVFEPSEAEISHTQKATLVCLATGFYPDHVELSWWVNGKEVHSGVCTDPQPLKEQPALNDSRYCLSSRLRVSATFWQNPRNHFRCQVQFYGLSENDEWTQDRAKPVTQIVSAEAWGRADCGFTSESYQQGVLSATNLSVIGFRILLLKVAGFNLLMTLRLWSSRAKRSGSGATNFSLLKQAGDVEENPGPTSMDWIWRILFLVGAATGAHSFEQVQLVQSGAEVKKPGASVKVSCKASGYTFTNYDINWVRQAPGQGLEWIGWIYPGDGSTKYNEKFKAKATLTADTSTSTAYMELRSLRSDDTAVYYCASGYEDAMDYWGQGTTVTVSSTRIQNPDPAVYQLRDSKSSDKSVCLFTDFDSQTNVSQSKDSDVYITDKCVLDMRSMDFKSNSAVAWSNKSDFACANAFNNSIIPEDTFFPSPESSCDVKLVEKSFETDTNLNFQILYEILLGKATLYAVLVSALVLMAMVKRKDSRG

SEQ ID NO: 13801 - protein, 754 aa, synthetic construct
MALPVTALLLPLALLLHAARPEVQLVESGGGLVQPGGSLRLSCAASGFSFSDFWMSWVRQAPGKGLEWVATISQAGSEKDYVDSVKGRFTISRDNAKKSLYLQMNSLRAEDTAVYYCASGVYSFDYRGQGTLVTVSSGTGGGGSGGGGSGGGGSEFDIVMTQTPLSLSVTPGQPASISCKSSQSLLDGDGKTYLNWLLQKPGQSPQRLIYLVSKLDSGVPDRFSGSGSGTDFTLKISRVEAEDVGVYYCWQGTHFPRTFGQGTKLEIKLEDLKNVFPPEVAVFEPSEAEISHTQKATLVCLATGFYPDHVELSWWVNGKEVHSGVCTDPQPLKEQPALNDSRYCLSSRLRVSATFWQNPRNHFRCQVQFYGLSENDEWTQDRAKPVTQIVSAEAWGRADCGFTSESYQQGVLSATNLSVIGFRILLLKVAGFNLLMTLRLWSSRAKRSGSGATNFSLLKQAGDVEENPGPTSMDWIWRILFLVGAATGAHSFEQVQLVQSGAEVKKPGASVKVSCKASGYTFKDTYIHWVRQAPGQGLEWMGRIDPANGNTKYDPKFQGRVTMTRDTSISTAYMELSRLRSDDTAVYYCARRGGVDWGQGTLVTVSSTRIQNPDPAVYQLRDSKSSDKSVCLFTDFDSQTNVSQSKDSDVYITDKCVLDMRSMDFKSNSAVAWSNKSDFACANAFNNSIIPEDTFFPSPESSCDVKLVEKSFETDTNLNFQILYEILLGKATLYAVLVSALVLMAMVKRKDSRG

SEQ ID NO: 13802 - protein, 755 aa, synthetic construct
MALPVTALLLPLALLLHAARPEVQLVESGGGLVQPGGSLRLSCAASGFSFSDFWMSWVRQAPGKGLEWVATISQAGSEKDYVDSVKGRFTISRDNAKKSLYLQMNSLRAEDTAVYYCASGVYSFDYRGQGTLVTVSSGTGGGGSGGGGSGGGGSEFDIQMTQSPSSLSASVGDRVTITCKASQDVSTAVAWFQQKPGKAPKLLIYSPSYRYTGVPSRFSGSGSGTDFTLTISSLQPEDFTYYCQQLYSTPYTFGQGTKVEIKLEDLKNVFPPEVAVFEPSEAEISHTQKATLVCLATGFYPDHVELSWWVNGKEVHSGVCTDPQPLKEQPALNDSRYCLSSRLRVSATFWQNPRNHFRCQVQFYGLSENDEWTQDRAKPVTQIVSAEAWGRADCGFTSESYQQGVLSATNLSVIGFRILLLKVAGFNLLMTLRLWSSRAKRSGSGATNFSLLKQAGDVEENPGPTSMDWIWRILFLVGAATGAHSFEEVQLVQSGAEVKKPGASVKVSCKASGYTFTDYYLDVVVRQAPGQGLEWIGRVNPYNGGTIYNQKFKGRVTLTRDTSTSTAYLELSSLRSEDTAVYYCARDHYRYDPLLDYWGQGTLVTVSSTRIQNPDPAVYQLRDSKSSDKSVCLFTDFDSQTNVSQSKDSDVYITDKCVLDMRSMDFKSNSAVAWSNKSDFACANAFNNSIIPEDTFFPSPESSCDVKLVEKSFETDTNLNFQILYEILLGKATLYAVLVSALVLMAMVKRKDSRG

SEQ ID NO: 13803 - protein, 761 aa, synthetic construct
MALPVTALLLPLALLLHAARPEVQLVESGGGLVQPGGSLRLSCAASGFSFSDFWMSWVRQAPGKGLEWVATISQAGSEKDYVDSVKGRFTISRDNAKKSLYLQMNSLRAEDTAVYYCASGVYSFDYRGQGTLVTVSSGTGGGGSGGGGSGGGGSEFDIQMTQSPSSLSASVGDRVTITCRASQSVSTSSYNYMHWYQQKPGKPPKLLIKYASNLESGVPSRFSGSGSGTDFTLTISSLQPEDFATYYCQHSWEIPLTFGQGTKVEIKLEDLKNVFPPEVAVFEPSEAEISHTQKATLVCLATGFYPDHVELSWWVNGKEVHSGVCTDPQPLKEQPALNDSRYCLSSRLRVSATFWQNPRNHFRCQVQFYGLSENDEWTQDRAKPVTQIVSAEAWGRADCGFTSESYQQGVLSATNLSVIGFRILLLKVAGFNLLMTLRLWSSRAKRSGSGATNFSLLKQAGDVEENPGPTSMDWIWRILFLVGAATGAHSFEEVQLVQSGAEVKKPGASVKVSCKASGYSFTDYYMHWVRQAPGQGLEWIGRINPYNGAAFYSQNFKDRVTLTVDTSTSTAYLELSSLRSEDTAVYYCAIERGADLEGYAMDYWGQGTLVTVSSTRIQNPDPAVYQLRDSKSSDKSVCLFTDFDSQTNVSQSKDSDVYITDKCVLDMRSMDFKSNSAVAWSNKSDFACANAFNNSIIPEDTFFPSPESSCDVKLVEKSFETDTNLNFQILYEILLGKATLYAVLVSALVLMAMVKRKDSRG

SEQ ID NO: 13804 - protein, 759 aa, synthetic construct
MALPVTALLLPLALLLHAARPEVQLVESGGGLVQPGGSLRLSCAASGFSFSDFWMSWVRQAPGKGLEWVATISQAGSEKDYVDSVKGRFTISRDNAKKSLYLQMNSLRAEDTAVYYCASGVYSFDYRGQGTLVTVSSGTGGGGSGGGGSGGGGSEFEIVLTQSPATLSASPGERVTLTCRASSNVISSYVHWYQQKPGSSPRLFLYSTSNLASGVPSRFSGSGSGTDFTFTISSLEAEDAATYYCQQYSGYPLTFGQGTRLEIKLEDLKNVFPPEVAVFEPSEAEISHTQKATLVCLATGFYPDHVELSWWVNGKEVHSGVCTDPQPLKEQPALNDSRYCLSSRLRVSATFWQNPRNHFRCQVQFYGLSENDEWTQDRAKPVTQIVSAEAWGRADCGFTSESYQQGVLSATNLSVIGFRILLLKVAGFNLLMTLRLWSSRAKRSGSGATNFSLLKQAGDVEENPGPTSMDWIWRILFLVGAATGAHSFEQVQLQESGPGLVKPSETLSLTCAVSGYSITSAYYWNWIRQPPGKGLEWIGYISYDGRNNYNPSLKNRITINPDTSKNQFSLQLNSVTPEDTAVYYCAREGDYDVGNYYAMDYWGQGTLVTVSSTRIQNPDPAVYQLRDSKSSDKSVCLFTDFDSQTNVSQSKDSDVYITDKCVLDMRSMDFKSNSAVAWSNKSDFACANAFNNSIIPEDTFFPSPESSCDVKLVEKSFETDTNLNFQILYEILLGKATLYAVLVSALVLMAMVKRKDSRG

SEQ ID NO: 13805 - protein, 759 aa, synthetic construct
MALPVTALLLPLALLLHAARPEVQLVESGGGLVQPGGSLRLSCAASGFSFSDFWMSWVRQAPGKGLEWVATISQAGSEKDYVDSVKGRFTISRDNAKKSLYLQMNSLRAEDTAVYYCASGVYSFDYRGQGTLVTVSSGTGGGGSGGGGSGGGGSEFEIVLTQSPATLSLSPGERATLSCRASSNVISSYVHWYQQKPGQAPRLLIYSTSNLASGIPARFSGSGSGTDFTLTISSLEPEDFAVYYCQQYSGYPLTFGQGTRLEIKLEDLKNVFPPEVAVFEPSEAEISHTQKATLVCLATGFYPDHVELSWWVNGKEVHSGVCTDPQPLKEQPALNDSRYCLSSRLRVSATFWQNPRNHFRCQVQFYGLSENDEWTQDRAKPVTQIVSAEAWGRADCGFTSESYQQGVLSATNLSVIGFRILLLKVAGFNLLMTLRLWSSRAKRSGSGATNFSLLKQAGDVEENPGPTSMDWIWRILFLVGAATGAHSFEEVQLVESGGGLVQPGRSLRLSCAASGYSITSAYYWNWVRQAPGKGLEWVSYISYDGRNNYNPSLKNRFTISRDNAKKSLYLQMNSLRAEDTALYYCAKEGDYDVGNYYAMDYWGQGTTVTVSSTRIQNPDPAVYQLRDSKSSDKSVCLFTDFDSQTNVSQSKDSDVYITDKCVLDMRSMDFKSNSAVAWSNKSDFACANAFNNSIIPEDTFFPSPESSCDVKLVEKSFETDTNLNFQILYEILLGKATLYAVLVSALVLMAMVKRKDSRG

SEQ ID NO: 13806 - protein, 758 aa, synthetic construct
MALPVTALLLPLALLLHAARPEVQLVESGGGLVQPGGSLRLSCAASGFSFSDFWMSWVRQAPGKGLEWVATISQAGSEKDYVDSVKGRFTISRDNAKKSLYLQMNSLRAEDTAVYYCASGVYSFDYRGQGTLVTVSSGTGGGGSGGGGSGGGGSEFDVVMTQTPLSLPVSLGDQASISCRSSQSLVHSNGNTYLRWYLQKPGQSPKVLIYKVSNRVSGVPDRFSGSGSGTDFTLKINRVEAEDLGVYFCSQSTHVPWTFGGGTKLEIKLEDLKNVFPPEVAVFEPSEAEISHTQKATLVCLATGFYPDHVELSWWVNGKEVHSGVCTDPQPLKEQPALNDSRYCLSSRLRVSATFWQNPRNHFRCQVQFYGLSENDEWTQDRAKPVTQIVSAEAWGRADCGFTSESYQQGVLSATNLSVIGFRILLLKVAGFNLLMTLRLWSSRAKRSGSGATNFSLLKQAGDVEENPGPTSMDWIWRILFLVGAATGAHSFEGVKLDETGGGLVQPGGAMKLSCVTSGFTFGHYWMNWVRQSPEKGLEWVAQFRNKPYNYETYYSDSVKGRFTISRDDSKSSVYLQMNNLRVEDTGIYYCTGASYGMEYLGQGTSVTVSTTRIQNPDPAVYQLRDSKSSDKSVCLFTDFDSQTNVSQSKDSDVYITDKCVLDMRSMDFKSNSAVAWSNKSDFACANAFNNSIIPEDTFFPSPESSCDVKLVEKSFETDTNLNFQILYEILLGKATLYAVLVSALVLMAMVKRKDSRG

SEQ ID NO: 13807 - protein, 764 aa, synthetic construct
MALPVTALLLPLALLLHAARPEVQLVESGGGLVQPGGSLRLSCAASGFSFSDFWMSWVRQAPGKGLEWVATISQAGSEKDYVDSVKGRFTISRDNAKKSLYLQMNSLRAEDTAVYYCASGVYSFDYRGQGTLVTVSSGTGGGGSGGGGSGGGGSEFQVQLVESGGNLVQPGGSLRLSCAASGFTFGSFSMSWVRQAPGGGLEWVAGLSARSSLTHYADSVKGRFTISRDNAKNSVYLQMNSLRVEDTAVYYCARRSYDSSGYWGHFYSYMDVWGQGTLVTVSLEDLKNVFPPEVAVFEPSEAEISHTQKATLVCLATGFYPDHVELSWWVNGKEVHSGVCTDPQPLKEQPALNDSRYCLSSRLRVSATFWQNPRNHFRCQVQFYGLSENDEWTQDRAKPVTQIVSAEAWGRADCGFTSESYQQGVLSATNLSVIGFRILLLKVAGFNLLMTLRLWSSRAKRSGSGATNFSLLKQAGDVEENPGPTSMDWIWRILFLVGAATGAHSFESVLTQPSSVSAAPGQKVTISCSGSTSNIGNNYVSWYQQHPGKAPKLMIYDVSKRPSGVPDRFSGSKSGNSASLDISGLQSEDEADYYCAAWDDSLSEFLFGTGTKLTVLGTRIQNPDPAVYQLRDSKSSDKSVCLFTDFDSQTNVSQSKDSDVYITDKCVLDMRSMDFKSNSAVAWSNKSDFACANAFNNSIIPEDTFFPSPESSCDVKLVEKSFETDTNLNFQILYEILLGKATLYAVLVSALVLMAMVKRKDSRG

SEQ ID NO: 13808 - protein, 759 aa, synthetic construct
MALPVTALLLPLALLLHAARPEVQLVESGGGLVQPGGSLRLSCAASGFSFSDFWMSWVRQAPGKGLEWVATISQAGSEKDYVDSVKGRFTISRDNAKKSLYLQMNSLRAEDTAVYYCASGVYSFDYRGQGTLVTVSSGTGGGGSGGGGSGGGGSEFDVVMTQSPSSLSASVGDRVTITCQSSLDISHYLNWYQQKPGKAPKLLIYDASNLETGVPSRFSGSGSGTHFTFTISSLQPEDFATYYCQQYDNLPLTFGGGTKLEIKRLEDLKNVFPPEVAVFEPSEAEISHTQKATLVCLATGFYPDHVELSWWVNGKEVHSGVCTDPQPLKEQPALNDSRYCLSSRLRVSATFWQNPRNHFRCQVQFYGLSENDEWTQDRAKPVTQIVSAEAWGRADCGFTSESYQQGVLSATNLSVIGFRILLLKVAGFNLLMTLRLWSSRAKRSGSGATNFSLLKQAGDVEENPGPTSMDWIWRILFLVGAATGAHSFEQVQLVQSGGGVVQPGGSLRVSCAASGVTLSDYGMHWVRQAPGKGLEWVAFIRNDGSDKYYADSVKGRFTISRDNSEKTVSLQMSSLRAEDTAVYYCAKNGESGPLDYWYLDLWGRGTLVTVSSTRIQNPDPAVYQLRDSKSSDKSVCLFTDFDSQTNVSQSKDSDVYITDKCVLDMRSMDFKSNSAVAWSNKSDFACANAFNNSIIPEDTFFPSPESSCDVKLVEKSFETDTNLNFQILYEILLGKATLYAVLVSALVLMAMVKRKDSRG

SEQ ID NO: 13809 - protein, 763 aa, synthetic construct
MALPVTALLLPLALLLHAARPEVQLVESGGGLVQPGGSLRLSCAASGFSFSDFWMSWVRQAPGKGLEWVATISQAGSEKDYVDSVKGRFTISRDNAKKSLYLQMNSLRAEDTAVYYCASGVYSFDYRGQGTLVTVSSGTGGGGSGGGGSGGGGSEFSYELTQPPSVSGTPGQRVAISCSGSSSNIGTRMVTWYQHVPGTAPKLLIFNNNQRPSGVPDRFSASKSGTSASLAIIGLQSDDEADYYCATWDDNVKSYVFGTGTKVTVLGSRLEDLKNVFPPEVAVFEPSEAEISHTQKATLVCLATGFYPDHVELSWWVNGKEVHSGVCTDPQPLKEQPALNDSRYCLSSRLRVSATFWQNPRNHFRCQVQFYGLSENDEWTQDRAKPVTQIVSAEAWGRADCGFTSESYQQGVLSATNLSVIGFRILLLKVAGFNLLMTLRLWSSRAKRSGSGATNFSLLKQAGDVEENPGPTSMDWIWRILFLVGAATGAHSFELEMAQVQLQQWGAGLLKPSETLSLTCAVYGGSFSGYYWSWIRQPPGKGLEWIGEINHSGSTNYNPSLKSRVTISVDTSKNQFSLKLSSVTAADTAVYYCARAPQSWYVGDVWGQGTLVTVSSTRIQNPDPAVYQLRDSKSSDKSVCLFTDFDSQTNVSQSKDSDVYITDKCVLDMRSMDFKSNSAVAWSNKSDFACANAFNNSIIPEDTFFPSPESSCDVKLVEKSFETDTNLNFQILYEILLGKATLYAVLVSALVLMAMVKRKDSRG

SEQ ID NO: 13810 - protein, 760 aa, synthetic construct
MALPVTALLLPLALLLHAARPEVQLVESGGGLVQPGGSLRLSCAASGFSFSDFWMSWVRQAPGKGLEWVATISQAGSEKDYVDSVKGRFTISRDNAKKSLYLQMNSLRAEDTAVYYCASGVYSFDYRGQGTLVTVSSGTGGGGSGGGGSGGGGSEFQSVLTQPPSLSVAPGKTASITCGGNNIGMKSVHWYQQRPGQAPVLVIYYDSDRPSGIPGRFSGSNSGNTATLTISRVEAGDEADYYCQVWDTTGDHPGYVFGTGTKVTVLLEDLKNVFPPEVAVFEPSEAEISHTQKATLVCLATGFYPDHVELSWWVNGKEVHSGVCTDPQPLKEQPALNDSRYCLSSRLRVSATFWQNPRNHFRCQVQFYGLSENDEWTQDRAKPVTQIVSAEAWGRADCGFTSESYQQGVLSATNLSVIGFRILLLKVAGFNLLMTLRLWSSRAKRSGSGATNFSLLKQAGDVEENPGPTSMDWIWRILFLVGAATGAHSFEQVQLVQSGAEVKKPGSSVKVSCKASGGTFSSYAISWVRQAPGQGLEWMGGIIPIFGTANYAQKFQGRVTITADESTSTAYMELSSLRSEDTAVYYCARGVYGYSGSAPYDEWGQGTLVTVSSTRIQNPDPAVYQLRDSKSSDKSVCLFTDFDSQTNVSQSKDSDVYITDKCVLDMRSMDFKSNSAVAWSNKSDFACANAFNNSIIPEDTFFPSPESSCDVKLVEKSFETDTNLNFQILYEILLGKATLYAVLVSALVLMAMVKRKDSRG

SEQ ID NO: 13811 - protein, 758 aa, synthetic construct
MALPVTALLLPLALLLHAARPEVQLVESGGGLVQPGGSLRLSCAASGFSFSDFWMSWVRQAPGKGLEWVATISQAGSEKDYVDSVKGRFTISRDNAKKSLYLQMNSLRAEDTAVYYCASGVYSFDYRGQGTLVTVSSGTGGGGSGGGGSGGGGSEFEVQLVESGGGLVQPGRSLRLSCAASGFTFDDYAMHWVRQAPGKGLEWVSGISWNSGSIGYADSVKGRFTISRDNAKNSLYLQMNSLRAEDTALYYCAKDKGGGYYDFWSGSDYWGQGTLVTVSSLEDLKNVFPPEVAVFEPSEAEISHTQKATLVCLATGFYPDHVELSWWVNGKEVHSGVCTDPQPLKEQPALNDSRYCLSSRLRVSATFWQNPRNHFRCQVQFYGLSENDEWTQDRAKPVTQIVSAEAWGRADCGFTSESYQQGVLSATNLSVIGFRILLLKVAGFNLLMTLRLWSSRAKRSGSGATNFSLLKQAGDVEENPGPTSMDWIWRILFLVGAATGAHSFESSELTQDPAVSVALGQTVRITCQGDSLRSYYASWYQQKPGQAPVLVIYGKNNRPSGIPDRFSGSSSGNTASLTITGAQAEDEADYYCNSRDSSGWVFGGGTKLTVLTRIQNPDPAVYQLRDSKSSDKSVCLFTDFDSQTNVSQSKDSDVYITDKCVLDMRSMDFKSNSAVAWSNKSDFACANAFNNSIIPEDTFFPSPESSCDVKLVEKSFETDTNLNFQILYEILLGKATLYAVLVSALVLMAMVKRKDSRG

SEQ ID NO: 13812 - protein, 767 aa, synthetic construct
MALPVTALLLPLALLLHAARPEVQLVESGGGLVQPGGSLRLSCAASGFSFSDFWMSWVRQAPGKGLEWVATISQAGSEKDYVDSVKGRFTISRDNAKKSLYLQMNSLRAEDTAVYYCASGVYSFDYRGQGTLVTVSSGTGGGGSGGGGSGGGGSEFEVQLQQSGPGLVKPSQTLSLTCAISGDSVLSNSDTWNWIRQSPSRGLEWLGRTYHRSTWYDDYASSVRGRVSINVDTSKNQYSLQLNAVTPEDTGVYYCARDRLQDGNSWSDAFDVWGQGTMVTVSSLEDLKNVFPPEVAVFEPSEAEISHTQKATLVCLATGFYPDHVELSWWVNGKEVHSGVCTDPQPLKEQPALNDSRYCLSSRLRVSATFWQNPRNHFRCQVQFYGLSENDEWTQDRAKPVTQIVSAEAWGRADCGFTSESYQQGVLSATNLSVIGFRILLLKVAGFNLLMTLRLWSSRAKRSGSGATNFSLLKQAGDVEENPGPTSMDWIWRILFLVGAATGAHSFEQSALTQPASVSGSPGQSITISCTGTSSDVGGYNYVSWYQQHPGKAPKLMIYDVSNRPSGVSNRFSGSKSGNTASLTISGLQAEDEADYYCSSYTSSSTLVYVFGTGTKVTVLTRIQNPDPAVYQLRDSKSSDKSVCLFTDFDSQTNVSQSKDSDVYITDKCVLDMRSMDFKSNSAVAWSNKSDFACANAFNNSIIPEDTFFPSPESSCDVKLVEKSFETDTNLNFQILYEILLGKATLYAVLVSALVLMAMVKRKDSRG

SEQ ID NO: 13813 - protein, 745 aa, synthetic construct
MALPVTALLLPLALLLHAARPEVQLVESGGGLVQPGGSLRLSCAASGFSFSDFWMSWVRQAPGKGLEWVATISQAGSEKDYVDSVKGRFTISRDNAKKSLYLQMNSLRAEDTAVYYCASGVYSFDYRGQGTLVTVSSGTGGGGSGGGGSGGGGSEFQVQLVQSGAEVKKPGASVKVSCKASGYTFTSYDINWVRQATGQGLEWMGWMNPNSGNTGYAQKFQGRVTMTRNTSISTAYMELSSLRSEDTAVYYCARGDSTKVEIKLEDLKNVFPPEVAVFEPSEAEISHTQKATLVCLATGFYPDHVELSWWVNGKEVHSGVCTDPQPLKEQPALNDSRYCLSSRLRVSATFWQNPRNHFRCQVQFYGLSENDEWTQDRAKPVTQIVSAEAWGRADCGFTSESYQQGVLSATNLSVIGFRILLLKVAGFNLLMTLRLWSSRAKRSGSGATNFSLLKQAGDVEENPGPTSMDWIWRILFLVGAATGAHSFEQSVLTQPRSVSGSPGQSVTISCTGTSSDVGGYNYVSWYQQHPGEAPKLIIYDADKRPSGISNRFSSGKSGNTASLTISGLQVEDEADYYCCSYAGGSTWVFGGGTKVTVLTRIQNPDPAVYQLRDSKSSDKSVCLFTDFDSQTNVSQSKDSDVYITDKCVLDMRSMDFKSNSAVAWSNKSDFACANAFNNSIIPEDTFFPSPESSCDVKLVEKSFETDTNLNFQILYEILLGKATLYAVLVSALVLMAMVKRKDSRG

SEQ ID NO: 13814 - protein, 767 aa, synthetic construct
MALPVTALLLPLALLLHAARPEVQLVESGGGLVQPGGSLRLSCAASGFSFSDFWMSWVRQAPGKGLEWVATISQAGSEKDYVDSVKGRFTISRDNAKKSLYLQMNSLRAEDTAVYYCASGVYSFDYRGQGTLVTVSSGTGGGGSGGGGSGGGGSEFEVQLQQSGPGLVKPSQTLSLTCAISGDSVSSNSAAWNWIRQSPSRGLEWLGRTYYRSKWYSDYAVSVKSRITINPDTSKNQFSLQLNSVTPEDTAVYYCARDPYDFWSGYPDAFDIWGQGTMVTVSSLEDLKNVFPPEVAVFEPSEAEISHTQKATLVCLATGFYPDHVELSWWVNGKEVHSGVCTDPQPLKEQPALNDSRYCLSSRLRVSATFWQNPRNHFRCQVQFYGLSENDEWTQDRAKPVTQIVSAEAWGRADCGFTSESYQQGVLSATNLSVIGFRILLLKVAGFNLLMTLRLWSSRAKRSGSGATNFSLLKQAGDVEENPGPTSMDWIWRILFLVGAATGAHSFEQSALTQPASVSGSPGQSITISCTGTSSDVGGYNYVSWYQQHPGKAPKVIISEVNNRPSGVSHRFSGSKSGNTASLTISGLQAEDEADYFCSSYTSGRTLYVFGTGSKVTVLGTRIQNPDPAVYQLRDSKSSDKSVCLFTDFDSQTNVSQSKDSDVYITDKCVLDMRSMDFKSNSAVAWSNKSDFACANAFNNSIIPEDTFFPSPESSCDVKLVEKSFETDTNLNFQILYEILLGKATLYAVLVSALVLMAMVKRKDSRG

SEQ ID NO: 13815 - protein, 766 aa, synthetic construct
MALPVTALLLPLALLLHAARPEVQLVESGGGLVQPGGSLRLSCAASGFSFSDFWMSWVRQAPGKGLEWVATISQAGSEKDYVDSVKGRFTISRDNAKKSLYLQMNSLRAEDTAVYYCASGVYSFDYRGQGTLVTVSSGTGGGGSGGGGSGGGGSEFQSALTQPASASGSPGQSVTISCTGTSSDVGGYNYVSWYQQHPGKAPKLMIYDVSNRPSGVSNRFSGSKSGNTASLTISGLQAEDEADYYCSSYTSSSTLYVFGTGTQLTVLLEDLKNVFPPEVAVFEPSEAEISHTQKATLVCLATGFYPDHVELSWWVNGKEVHSGVCTDPQPLKEQPALNDSRYCLSSRLRVSATFWQNPRNHFRCQVQFYGLSENDEWTQDRAKPVTQIVSAEAWGRADCGFTSESYQQGVLSATNLSVIGFRILLLKVAGFNLLMTLRLWSSRAKRSGSGATNFSLLKQAGDVEENPGPTSMDWIWRILFLVGAATGAHSFEEVQLQQSGPGLVKPSQTLSLTCAISGDSMLSNSDTWNWIRQSPSRGLEWLGRTYHRSTWYDDYASSVRGRVSINVDTSKNQYSLQLNAVTPEDTGVYYCARVRLQDGNSWSDAFDVWGQGTMVTVSSTRIQNPDPAVYQLRDSKSSDKSVCLFTDFDSQTNVSQSKDSDVYITDKCVLDMRSMDFKSNSAVAWSNKSDFACANAFNNSIIPEDTFFPSPESSCDVKLVEKSFETDTNLNFQILYEILLGKATLYAVLVSALVLMAMVKRKDSRG

SEQ ID NO: 13816 - protein, 766 aa, synthetic construct
MALPVTALLLPLALLLHAARPEVQLVESGGGLVQPGGSLRLSCAASGFSFSDFWMSWVRQAPGKGLEWVATISQAGSEKDYVDSVKGRFTISRDNAKKSLYLQMNSLRAEDTAVYYCASGVYSFDYRGQGTLVTVSSGTGGGGSGGGGSGGGGSEFDVMLTQTPLSLPVSLGDQASISCRSSQSILHSTGDTYLEWYLQKPGQSPKLLINKVSNRLSGVPDRFSGSGSGTDFTLKISRVEAEDLGVYYCFQGSHVPWTFGGGTKLEIKRADAAPTVSIFPLEDLKNVFPPEVAVFEPSEAEISHTQKATLVCLATGFYPDHVELSWWVNGKEVHSGVCTDPQPLKEQPALNDSRYCLSSRLRVSATFWQNPRNHFRCQVQFYGLSENDEWTQDRAKPVTQIVSAEAWGRADCGFTSESYQQGVLSATNLSVIGFRILLLKVAGFNLLMTLRLWSSRAKRSGSGATNFSLLKQAGDVEENPGPTSMDWIWRILFLVGAATGAHSFEQVKLQQSGPSLVKPGASVKMSCKASGYTFTDFYMKWVKQSHGKSLEWIGDINPNIGDTFYNQKFKGKATLTVDKSSSTAYMQLNSLTSEDSAVYFCSVGYFDVWGAGTTVTVSSTRIQNPDPAVYQLRDSKSSDKSVCLFTDFDSQTNVSQSKDSDVYITDKCVLDMRSMDFKSNSAVAWSNKSDFACANAFNNSIIPEDTFFPSPESSCDVKLVEKSFETDTNLNFQILYEILLGKATLYAVLVSALVLMAMVKRKDSRG

SEQ ID NO: 13817 - protein, 762 aa, synthetic construct
MALPVTALLLPLALLLHAARPEVQLVESGGGLVQPGGSLRLSCAASGFSFSDFWMSWVRQAPGKGLEWVATISQAGSEKDYVDSVKGRFTISRDNAKKSLYLQMNSLRAEDTAVYYCASGVYSFDYRGQGTLVTVSSGTGGGGSGGGGSGGGGSEFEIVLTQSPATLSLSPGERATLSCRASQSVSIYLAWYQQKPGQAPRLLIYDASNRATGIPARFSGSGSGTDFTLTISSLEPEDFAVYYCQQRSNWPPFTFGPGTKVDIKLEDLKNVFPPEVAVFEPSEAEISHTQKATLVCLATGFYPDHVELSWWVNGKEVHSGVCTDPQPLKEQPALNDSRYCLSSRLRVSATFWQNPRNHFRCQVQFYGLSENDEWTQDRAKPVTQIVSAEAWGRADCGFTSESYQQGVLSATNLSVIGFRILLLKVAGFNLLMTLRLWSSRAKRSGSGATNFSLLKQAGDVEENPGPTSMDWIWRILFLVGAATGAHSFEQVQLVESGGGVVQPGRSLRLSCAASGFTFSSYGMHWVRQAPGKGLEWVAVIWDDGSNKYYVDSVKGRFTISRDNSKNTLYLQMNSLRAEDTAVYYCARDDYYGSGSFNSYYGTDVWGQGTTVTVSSTRIQNPDPAVYQLRDSKSSDKSVCLFTDFDSQTNVSQSKDSDVYITDKCVLDMRSMDFKSNSAVAWSNKSDFACANAFNNSIIPEDTFFPSPESSCDVKLVEKSFETDTNLNFQILYEILLGKATLYAVLVSALVLMAMVKRKDSRG

SEQ ID NO: 13818 - protein, 747 aa, synthetic construct
MALPVTALLLPLALLLHAARPEVQLVESGGGLVQPGGSLRLSCAASGFSFSDFWMSWVRQAPGKGLEWVATISQAGSEKDYVDSVKGRFTISRDNAKKSLYLQMNSLRAEDTAVYYCASGVYSFDYRGQGTLVTVSSGTGGGGSGGGGSGGGGSEFDIQMTQSPSSLSASVGDRVTITCRASQGISSWLAWYQQKPEKAPKSLIYAASSLQSGVPSRFSGSGSGTDFTLTISSLQPEDFATYYCQQYNSYPYTFGQGTKLEIKLEDLKNVFPPEVAVFEPSEAEISHTQKATLVCLATGFYPDHVELSWWVNGKEVHSGVCTDPQPLKEQPALNDSRYCLSSRLRVSATFWQNPRNHFRCQVQFYGLSENDEWTQDRAKPVTQIVSAEAWGRADCGFTSESYQQGVLSATNLSVIGFRILLLKVAGFNLLMTLRLWSSRAKRSGSGATNFSLLKQAGDVEENPGPTSMDWIWRILFLVGAATGAHSFEEVQLVQSGGGLVHPGGSLRLSCAGSGFTFSTYLMYWVRQAPGKTLEWVSAIGSGGDTYYADSVKGRFTISRDNAKNSLYLQMNSLRAEDMAVYYCARGLGYWGQGTLVTVSSTRIQNPDPAVYQLRDSKSSDKSVCLFTDFDSQTNVSQSKDSDVYITDKCVLDMRSMDFKSNSAVAWSNKSDFACANAFNNSIIPEDTFFPSPESSCDVKLVEKSFETDTNLNFQILYEILLGKATLYAVLVSALVLMAMVKRKDSRG

SEQ ID NO: 13819 - protein, 766 aa, synthetic construct
MALPVTALLLPLALLLHAARPEVQLVESGGGLVQPGGSLRLSCAASGFSFSDFWMSWVRQAPGKGLEWVATISQAGSEKDYVDSVKGRFTISRDNAKKSLYLQMNSLRAEDTAVYYCASGVYSFDYRGQGTLVTVSSGTGGGGSGGGGSGGGGSEFLPVLTQPPSVSVAPGKTARITCGGNNIGSKSVHWYQQKPGQAPVLVVYDDSDRPSGIPERFSGSNSGNTATLTISRVEAGDEADYYCQVWDSSSDYVVFGGGTKLTVLLEDLKNVFPPEVAVFEPSEAEISHTQKATLVCLATGFYPDHVELSWWVNGKEVHSGVCTDPQPLKEQPALNDSRYCLSSRLRVSATFWQNPRNHFRCQVQFYGLSENDEWTQDRAKPVTQIVSAEAWGRADCGFTSESYQQGVLSATNLSVIGFRILLLKVAGFNLLMTLRLWSSRAKRSGSGATNFSLLKQAGDVEENPGPTSMDWIWRILFLVGAATGAHSFEEVQLVQSGAEVKKPGESLKISCKGSGYSFTSYWIGWVRQMPGKGLEWMGIIYPGDSDTRYSPSFQGQVTISADKSISTAYLQWSSLKASDTAMYYCARQVWGWQGGMYPRSNWWYNLDSWGQGTLVTVSSTRIQNPDPAVYQLRDSKSSDKSVCLFTDFDSQTNVSQSKDSDVYITDKCVLDMRSMDFKSNSAVAWSNKSDFACANAFNNSIIPEDTFFPSPESSCDVKLVEKSFETDTNLNFQILYEILLGKATLYAVLVSALVLMAMVKRKDSRG

SEQ ID NO: 13820 - protein, 759 aa, synthetic construct
MALPVTALLLPLALLLHAARPEVQLVESGGGLVQPGGSLRLSCAASGFSFSDFWMSWVRQAPGKGLEWVATISQAGSEKDYVDSVKGRFTISRDNAKKSLYLQMNSLRAEDTAVYYCASGVYSFDYRGQGTLVTVSSGTGGGGSGGGGSGGGGSEFELVMTQSPASLAVSLGQRATISCRASESVDSYGKSFMHWYQLKPGQPPKLLIYRASNLESGVPARFSGSGSRTDFTLTIDPVEADDAATYYCQQNNEDPWTFGGGTKLEIKLEDLKNVFPPEVAVFEPSEAEISHTQKATLVCLATGFYPDHVELSWWVNGKEVHSGVCTDPQPLKEQPALNDSRYCLSSRLRVSATFWQNPRNHFRCQVQFYGLSENDEWTQDRAKPVTQIVSAEAWGRADCGFTSESYQQGVLSATNLSVIGFRILLLKVAGFNLLMTLRLWSSRAKRSGSGATNFSLLKQAGDVEENPGPTSMDWIWRILFLVGAATGAHSFEEVQLEQSGPELVKPGASVKMSCKASGYTFTNYYMKWVKQSHGKSLEWIGDLNPNNGDTFYNQKFKGKATLTVDKSSNTAYMQLNSLTSEDSAVYYCARTGRYEENAMDYWGQGTSVTVSSTRIQNPDPAVYQLRDSKSSDKSVCLFTDFDSQTNVSQSKDSDVYITDKCVLDMRSMDFKSNSAVAWSNKSDFACANAFNNSIIPEDTFFPSPESSCDVKLVEKSFETDTNLNFQILYEILLGKATLYAVLVSALVLMAMVKRKDSRG

SEQ ID NO: 13821 - protein, 753 aa, synthetic construct
MALPVTALLLPLALLLHAARPEVQLVESGGGLVQPGGSLRLSCAASGFSFSDFWMSWVRQAPGKGLEWVATISQAGSEKDYVDSVKGRFTISRDNAKKSLYLQMNSLRAEDTAVYYCASGVYSFDYRGQGTLVTVSSGTGGGGSGGGGSGGGGSEFDVVMTQSPSSLSASVGDRVTITCMASEDIYIRLAWYQQKPGNAPKLLIYAATSLETGVPSRFSGSGSGTDFTLTISSLQPEDFATYYCQQYWSSPWTFGGGTKVEIKLEDLKNVFPPEVAVFEPSEAEISHTQKATLVCLATGFYPDHVELSWWVNGKEVHSGVCTDPQPLKEQPALNDSRYCLSSRLRVSATFWQNPRNHFRCQVQFYGLSENDEWTQDRAKPVTQIVSAEAWGRADCGFTSESYQQGVLSATNLSVIGFRILLLKVAGFNLLMTLRLWSSRAKRSGSGATNFSLLKQAGDVEENPGPTSMDWIWRILFLVGAATGAHSFEQVQLQESGPGLVKPSQTLSLTCTVSGYSITSDYTWNWIRQPPGNGLEWIGYITYSGSTSYNPSLKSRVLISVDTSKNQVSLKLSSVTAADTAVYYCARLGRRYTMDYWGQGTTVTVSSTRIQNPDPAVYQLRDSKSSDKSVCLFTDFDSQTNVSQSKDSDVYITDKCVLDMRSMDFKSNSAVAWSNKSDFACANAFNNSIIPEDTFFPSPESSCDVKLVEKSFETDTNLNFQILYEILLGKATLYAVLVSALVLMAMVKRKDSRG

SEQ ID NO: 13822 - protein, 757 aa, synthetic construct; identical to SEQ ID NO: 13685

SEQ ID NO: 13823 - protein, 757 aa, synthetic construct
MALPVTALLLPLALLLHAARPEVQLVESGGGLVQPGGSLRLSCAASGFSFSDFWMSWVRQAPGKGLEWVATISQAGSEKDYVDSVKGRFTISRDNAKKSLYLQMNSLRAEDTAVYYCASGVYSFDYRGQGTLVTVSSGTGGGGSGGGGSGGGGSEFDIVLTQSPATLSLSPGDRATLSCRASESVTILGSHLIYWYQQKPGQAPRLLIQLASNVQTGIPARFSGSGSRTDFTLTISSLEPEDFAVYYCLQSRTIPRTFGQGTKLEIKRLEDLKNVFPPEVAVFEPSEAEISHTQKATLVCLATGFYPDHVELSWWVNGKEVHSGVCTDPQPLKEQPALNDSRYCLSSRLRVSATFWQNPRNHFRCQVQFYGLSENDEWTQDRAKPVTQIVSAEAWGRADCGFTSESYQQGVLSATNLSVIGFRILLLKVAGFNLLMTLRLWSSRAKRSGSGATNFSLLKQAGDVEENPGPTSMDWIWRILFLVGAATGAHSFEQVQLVQSGSELKKPGESVKISCKASGYTFTHYSMNWVRQAPGQGLEWMGRINTETGEPLYADDFKGRFVFSLDTSASTAYLQISSLKAEDTAVYYCSNDYLYSLDYWGQGTLVTVSSTRIQNPDPAVYQLRDSKSSDKSVCLFTDFDSQTNVSQSKDSDVYITDKCVLDMRSMDFKSNSAVAWSNKSDFACANAFNNSIIPEDTFFPSPESSCDVKLVEKSFETDTNLNFQILYEILLGKATLYAVLVSALVLMAMVKRKDSRG

SEQ ID NO: 13824 - protein, 758 aa, synthetic construct
MALPVTALLLPLALLLHAARPEVQLVESGGGLVQPGGSLRLSCAASGFSFSDFWMSWVRQAPGKGLEWVATISQAGSEKDYVDSVKGRFTISRDNAKKSLYLQMNSLRAEDTAVYYCASGVYSFDYRGQGTLVTVSSGTGGGGSGGGGSGGGGSEFDIQLTQSPSFLSASVGDRVTITCRASQGISTDLNWYQQKPGKAPKLLIYAASNLESGVPSRFSGSGSGTEFTLTISSLQPEDFATYYCQQSYNWPYTFGGGTKVEIKRLEDLKNVFPPEVAVFEPSEAEISHTQKATLVCLATGFYPDHVELSWWVNGKEVHSGVCTDPQPLKEQPALNDSRYCLSSRLRVSATFWQNPRNHFRCQVQFYGLSENDEWTQDRAKPVTQIVSAEAWGRADCGFTSESYQQGVLSATNLSVIGFRILLLKVAGFNLLMTLRLWSSRAKRSGSGATNFSLLKQAGDVEENPGPTSMDWIWRILFLVGAATGAHSFEEVQLVESGGGLVKPGGSLRLSCAASGFTFSNFEMNWVRQAPGKGLEWVSGISSNGRYINYADSVKGRFTISRDNAKNSLYLQMNSLRAEDTAVYYCARVVDFDQDYNGFDYWGQGTLVTVSSTRIQNPDPAVYQLRDSKSSDKSVCLFTDFDSQTNVSQSKDSDVYITDKCVLDMRSMDFKSNSAVAWSNKSDFACANAFNNSIIPEDTFFPSPESSCDVKLVEKSFETDTNLNFQILYEILLGKATLYAVLVSALVLMAMVKRKDSRG

SEQ ID NO: 13825 - protein, 756 aa, synthetic construct
MALPVTALLLPLALLLHAARPEVQLVESGGGLVQPGGSLRLSCAASGFSFSDFWMSWVRQAPGKGLEWVATISQAGSEKDYVDSVKGRFTISRDNAKKSLYLQMNSLRAEDTAVYYCASGVYSFDYRGQGTLVTVSSGTGGGGSGGGGSGGGGSEFDIQLTQSPSFLSASVGDRVTITCSLSLGISTWRDWFPPRLGRGLEPLTYAASTLQSGVPSRFSGSGSGTEFTLTISSLQPEDFATYYCQQLNSYPLTFGGGTKVEIKRLEDLKNVFPPEVAVFEPSEAEISHTQKATLVCLATGFYPDHVELSWWVNGKEVHSGVCTDPQPLKEQPALNDSRYCLSSRLRVSATFWQNPRNHFRCQVQFYGLSENDEWTQDRAKPVTQIVSAEAWGRADCGFTSESYQQGVLSATNLSVIGFRILLLKVAGFNLLMTLRLWSSRAKRSGSGATNFSLLKQAGDVEENPGPTSMDWIWRILFLVGAATGAHSFEEVQLVESGGGLVKPGGSLRLSCAASGFTFSTYGMSWVRQAPGKGLEWVAYINNGSGYIYYADSVKGRFTISRDNAKNSLYLQMNSLRAEDTAVYYCARGQWWSGGDFDYWGQGTLVTVSSTRIQNPDPAVYQLRDSKSSDKSVCLFTDFDSQTNVSQSKDSDVYITDKCVLDMRSMDFKSNSAVAWSNKSDFACANAFNNSIIPEDTFFPSPESSCDVKLVEKSFETDTNLNFQILYEILLGKATLYAVLVSALVLMAMVKRKDSRG

SEQ ID NO: 13826 - protein, 757 aa, synthetic construct
MALPVTALLLPLALLLHAARPEVQLVESGGGLVQPGGSLRLSCAASGFSFSDFWMSWVRQAPGKGLEWVATISQAGSEKDYVDSVKGRFTISRDNAKKSLYLQMNSLRAEDTAVYYCASGVYSFDYRGQGTLVTVSSGTGGGGSGGGGSGGGGSEFEIVLTQSPATLSLSPGERATLSCSASSSVSYMYWYQQKPGQAPRLLIYRTSNLASGIPARFSGSGSGTDFTLTISSLEPEDFAVYYCQQYHSYPTTFGQGTKVEIKRTVLEDLKNVFPPEVAVFEPSEAEISHTQKATLVCLATGFYPDHVELSWWVNGKEVHSGVCTDPQPLKEQPALNDSRYCLSSRLRVSATFWQNPRNHFRCQVQFYGLSENDEWTQDRAKPVTQIVSAEAWGRADCGFTSESYQQGVLSATNLSVIGFRILLLKVAGFNLLMTLRLWSSRAKRSGSGATNFSLLKQAGDVEENPGPTSMDWIWRILFLVGAATGAHSFEEVQLVESGGGLVQPGGSLRLSCAASGFSFNTYAMNWVRQAPGKGLEWVSHIRSKSNNFATYYADSVKDRFTISRDNAKNSLYLQMNSLRAEDTAVYYCARQGGDFPMDYWGQGTLVTVSSTRIQNPDPAVYQLRDSKSSDKSVCLFTDFDSQTNVSQSKDSDVYITDKCVLDMRSMDFKSNSAVAWSNKSDFACANAFNNSIIPEDTFFPSPESSCDVKLVEKSFETDTNLNFQILYEILLGKATLYAVLVSALVLMAMVKRKDSRG

SEQ ID NO: 13827 - protein, 753 aa, synthetic construct
MALPVTALLLPLALLLHAARPEVQLVESGGGLVQPGGSLRLSCAASGFSFSDFWMSWVRQAPGKGLEWVATISQAGSEKDYVDSVKGRFTISRDNAKKSLYLQMNSLRAEDTAVYYCASGVYSFDYRGQGTLVTVSSGTGGGGSGGGGSGGGGSEFDVVMTQSPSSLSASVGDRVTITCKASEDIYIRLAWYQQKPGKAPKLLIYAATSLETGVPSRFSGSGSGTDFTLTISSLQPEDFATYYCQQYWTTPWTFGGGTKVEIKLEDLKNVFPPEVAVFEPSEAEISHTQKATLVCLATGFYPDHVELSWWVNGKEVHSGVCTDPQPLKEQPALNDSRYCLSSRLRVSATFWQNPRNHFRCQVQFYGLSENDEWTQDRAKPVTQIVSAEAWGRADCGFTSESYQQGVLSATNLSVIGFRILLLKVAGFNLLMTLRLWSSRAKRSGSGATNFSLLKQAGDVEENPGPTSMDWIWRILFLVGAATGAHSFEQVQLQESGPGLVKPSQTLSLTCTVSGYSITIDYTWNWIRQPPGKGLEWIGYITYSGSTDYNPSLKSRVLISVDTSKNQVSLKLSSVTAADTAVYYCARLGRRYALDYWGQGTTVTVSSTRIQNPDPAVYQLRDSKSSDKSVCLFTDFDSQTNVSQSKDSDVYITDKCVLDMRSMDFKSNSAVAWSNKSDFACANAFNNSIIPEDTFFPSPESSCDVKLVEKSFETDTNLNFQILYEILLGKATLYAVLVSALVLMAMVKRKDSRG

SEQ ID NO: 13828 - protein, 758 aa, synthetic construct
MALPVTALLLPLALLLHAARPEVQLVESGGGLVQPGGSLRLSCAASGFSFSDFWMSWVRQAPGKGLEWVATISQAGSEKDYVDSVKGRFTISRDNAKKSLYLQMNSLRAEDTAVYYCASGVYSFDYRGQGTLVTVSSGTGGGGSGGGGSGGGGSEFDIQMTQTTSSLSASLGDRVTISCRASQDISNYLNWYQQKPDGTVKLLIYYTSILHSGVPSRFSGSGSGTDYSLTISNLEQEDFATYFCQQGNTLPWTFGGGTKLEIKALEDLKNVFPPEVAVFEPSEAEISHTQKATLVCLATGFYPDHVELSWWVNGKEVHSGVCTDPQPLKEQPALNDSRYCLSSRLRVSATFWQNPRNHFRCQVQFYGLSENDEWTQDRAKPVTQIVSAEAWGRADCGFTSESYQQGVLSATNLSVIGFRILLLKVAGFNLLMTLRLWSSRAKRSGSGATNFSLLKQAGDVEENPGPTSMDWIWRILFLVGAATGAHSFEEVQLVESGGGLVKPGGSLKLSCAASGFAFSIYDMSWVRQTPEKRLEWVAYISSGGGTYYPDTVKGRFTISRDNAKNTLYLQMSSLKSEDTAMYYCARHSGYGTHWGVLFAYWGQGTLVTVSATRIQNPDPAVYQLRDSKSSDKSVCLFTDFDSQTNVSQSKDSDVYITDKCVLDMRSMDFKSNSAVAWSNKSDFACANAFNNSIIPEDTFFPSPESSCDVKLVEKSFETDTNLNFQILYEILLGKATLYAVLVSALVLMAMVKRKDSRG

SEQ ID NO: 13829 - protein, 768 aa, synthetic construct
MALPVTALLLPLALLLHAARPEVQLVESGGGLVQPGGSLRLSCAASGFSFSDFWMSWVRQAPGKGLEWVATISQAGSEKDYVDSVKGRFTISRDNAKKSLYLQMNSLRAEDTAVYYCASGVYSFDYRGQGTLVTVSSGTGGGGSGGGGSGGGGSEFDIVMTQSPDSLAVSLGERATINCKSSQSLLYRSNQKNYLAWYQQKPGQPPKLLIYWASTRESGVPDRFSGSGSGTDFTLTISSLQAEDVAVYYCQQYYNYPRTFGQGTKVEIKRTVLEDLKNVFPPEVAVFEPSEAEISHTQKATLVCLATGFYPDHVELSWWVNGKEVHSGVCTDPQPLKEQPALNDSRYCLSSRLRVSATFWQNPRNHFRCQVQFYGLSENDEWTQDRAKPVTQIVSAEAWGRADCGFTSESYQQGVLSATNLSVIGFRILLLKVAGFNLLMTLRLWSSRAKRSGSGATNFSLLKQAGDVEENPGPTSMDWIWRILFLVGAATGAHSFEEVQLLESGGGLVQPGGSLRLSCAASGYSITSDYAWNWVRQAPGKGLEWVSYISNSGSTSYNPSLKSRFTISRDNSKNTLYLQMNSLRAEDTAVYYCAKERNYDYDDYYYAMDYWGQGTLVTVSSTRIQNPDPAVYQLRDSKSSDKSVCLFTDFDSQTNVSQSKDSDVYITDKCVLDMRSMDFKSNSAVAWSNKSDFACANAFNNSIIPEDTFFPSPESSCDVKLVEKSFETDTNLNFQILYEILLGKATLYAVLVSALVLMAMVKRKDSRG

SEQ ID NO: 13830 - protein, 761 aa, synthetic construct
MALPVTALLLPLALLLHAARPEVQLVESGGGLVQPGGSLRLSCAASGFSFSDFWMSWVRQAPGKGLEWVATISQAGSEKDYVDSVKGRFTISRDNAKKSLYLQMNSLRAEDTAVYYCASGVYSFDYRGQGTLVTVSSGTGGGGSGGGGSGGGGSEFDVVMTQSPLSLPVTLGQPASISCRSSQSLLHSSGNTYLEWYQQRPGQSPRPLIYKISTRFSGVPDRFSGSGSGTDFTLKISRVEAEDVGVYYCFQGSHVPYTFGGGTKVEIKRLEDLKNVFPPEVAVFEPSEAEISHTQKATLVCLATGFYPDHVELSWWVNGKEVHSGVCTDPQPLKEQPALNDSRYCLSSRLRVSATFWQNPRNHFRCQVQFYGLSENDEWTQDRAKPVTQIVSAEAWGRADCGFTSESYQQGVLSATNLSVIGFRILLLKVAGFNLLMTLRLWSSRAKRSGSGATNFSLLKQAGDVEENPGPTSMDWIWRILFLVGAATGAHSFEQVQLVQSGAEVKKPGASVKVSCKASGLTIEDYYMHWVRQAPGQGLEWMGWIDPENGDTEYGPKFQGRVTMTRDTSINTAYMELSRLRSDDTAVYYCAVHNAHYGTWFAYWGQGTLVTVSSTRIQNPDPAVYQLRDSKSSDKSVCLFTDFDSQTNVSQSKDSDVYITDKCVLDMRSMDFKSNSAVAWSNKSDFACANAFNNSIIPEDTFFPSPESSCDVKLVEKSFETDTNLNFQILYEILLGKATLYAVLVSALVLMAMVKRKDSRG

SEQ ID NO: 13831 - protein, 753 aa, synthetic construct
MALPVTALLLPLALLLHAARPEVQLVESGGGLVQPGGSLRLSCAASGFSFSDFWMSWVRQAPGKGLEWVATISQAGSEKDYVDSVKGRFTISRDNAKKSLYLQMNSLRAEDTAVYYCASGVYSFDYRGQGTLVTVSSGTGGGGSGGGGSGGGGSEFDIQMTQSPSSLSASVGDRVTITCRASENIYSNLAWYQQKPGKAPKLLIYAATNLADGVPSRFSGSGSGTDFTLTISSLQPEDFATYYCQHFWGTPTFGQGTKVEIKRTVLEDLKNVFPPEVAVFEPSEAEISHTQKATLVCLATGFYPDHVELSWWVNGKEVHSGVCTDPQPLKEQPALNDSRYCLSSRLRVSATFWQNPRNHFRCQVQFYGLSENDEWTQDRAKPVTQIVSAEAWGRADCGFTSESYQQGVLSATNLSVIGFRILLLKVAGFNLLMTLRLWSSRAKRSGSGATNFSLLKQAGDVEENPGPTSMDWIWRILFLVGAATGAHSFEEVQLVESGGGLVQPGGSLRLSCAASGFSLTNYGVHWVRQAPGKGLEWVSVIWSGGSTDYNAAFISRFTISADTSKNTAYLQMNSLRAEDTAVYYCARELIHAMDNWGQGTLVTVSSTRIQNPDPAVYQLRDSKSSDKSVCLFTDFDSQTNVSQSKDSDVYITDKCVLDMRSMDFKSNSAVAWSNKSDFACANAFNNSIIPEDTFFPSPESSCDVKLVEKSFETDTNLNFQILYEILLGKATLYAVLVSALVLMAMVKRKDSRG

SEQ ID NO: 13832 - protein, 760 aa, synthetic construct
MALPVTALLLPLALLLHAARPEVQLVESGGGLVQPGGSLRLSCAASGFSFSDFWMSWVRQAPGKGLEWVATISQAGSEKDYVDSVKGRFTISRDNAKKSLYLQMNSLRAEDTAVYYCASGVYSFDYRGQGTLVTVSSGTGGGGSGGGGSGGGGSEFDFVMTQSPLSLPVTPGEPASISCRSSQSIVHSNGNTYLEWYLQKPGQSPQLLIYKVSNRFSGVPDRFSGSGSGTDFTLKISRVEAEDVGVYYCFQGSHVPLTFGQGTKLEIKRLEDLKNVFPPEVAVFEPSEAEISHTQKATLVCLATGFYPDHVELSWWVNGKEVHSGVCTDPQPLKEQPALNDSRYCLSSRLRVSATFWQNPRNHFRCQVQFYGLSENDEWTQDRAKPVTQIVSAEAWGRADCGFTSESYQQGVLSATNLSVIGFRILLLKVAGFNLLMTLRLWSSRAKRSGSGATNFSLLKQAGDVEENPGPTSMDWIWRILFLVGAATGAHSFEEVQLVESGAEVKKPGASVKVSCKASGYTFTSYWIHWVRQAPGQGLEWMGENDPSNGRTNYNEKFKNRVTLTVDTSISTAYMELSRLRSDDTAVYYCARGPNYFYSMDYWGQGTMVTVSSTRIQNPDPAVYQLRDSKSSDKSVCLFTDFDSQTNVSQSKDSDVYITDKCVLDMRSMDFKSNSAVAWSNKSDFACANAFNNSIIPEDTFFPSPESSCDVKLVEKSFETDTNLNFQILYEILLGKATLYAVLVSALVLMAMVKRKDSRG

SEQ ID NO: 13833 - protein, 753 aa, synthetic construct
MALPVTALLLPLALLLHAARPEVQLVESGGGLVQPGGSLRLSCAASGFSFSDFWMSWVRQAPGKGLEWVATISQAGSEKDYVDSVKGRFTISRDNAKKSLYLQMNSLRAEDTAVYYCASGVYSFDYRGQGTLVTVSSGTGGGGSGGGGSGGGGSEFDIQLTQSPSFLSASVGDRVTITCSARSSISFMYWYQQKPGKAPKLLIYDTSNLASGVPSRFSGSGSGTEFTLTISSLEAEDAATYYCQQWSSYPLTFGQGTKLEIKLEDLKNVFPPEVAVFEPSEAEISHTQKATLVCLATGFYPDHVELSWWVNGKEVHSGVCTDPQPLKEQPALNDSRYCLSSRLRVSATFWQNPRNHFRCQVQFYGLSENDEWTQDRAKPVTQIVSAEAWGRADCGFTSESYQQGVLSATNLSVIGFRILLLKVAGFNLLMTLRLWSSRAKRSGSGATNFSLLKQAGDVEENPGPTSMDWIWRILFLVGAATGAHSFEQVQLVQSGAEVKKPGASVKVSCKASGYTFTGSWMNWVRQAPGQGLEWIGRIYPGDGETNYNGKFKDRVTITADKSTSTAYMELSSLRSEDTAVYYCARIYGNNVYFDVWGQGTTVTVSSTRIQNPDPAVYQLRDSKSSDKSVCLFTDFDSQTNVSQSKDSDVYITDKCVLDMRSMDFKSNSAVAWSNKSDFACANAFNNSIIPEDTFFPSPESSCDVKLVEKSFETDTNLNFQILYEILLGKATLYAVLVSALVLMAMVKRKDSRG

SEQ ID NO: 13834 - protein, 761 aa, synthetic construct
MALPVTALLLPLALLLHAARPEVQLVESGGGLVQPGGSLRLSCAASGFSFSDFWMSWVRQAPGKGLEWVATISQAGSEKDYVDSVKGRFTISRDNAKKSLYLQMNSLRAEDTAVYYCASGVYSFDYRGQGTLVTVSSGTGGGGSGGGGSGGGGSEFQLVLTQSPSASASLGSSVKLTCTLSSGHKTDTIDWYQQQPGKAPRYLMKLEGSGSYNKGSGVPDRFSGSSSGADWYLTISSLQSEDEADYYCGTDYPGNYLFGGGTQLTVLGLEDLKNVFPPEVAVFEPSEAEISHTQKATLVCLATGFYPDHVELSWWVNGKEVHSGVCTDPQPLKEQPALNDSRYCLSSRLRVSATFWQNPRNHFRCQVQFYGLSENDEWTQDRAKPVTQIVSAEAWGRADCGFTSESYQQGVLSATNLSVIGFRILLLKVAGFNLLMTLRLWSSRAKRSGSGATNFSLLKQAGDVEENPGPTSMDWIWRILFLVGAATGAHSFEQEQLVESGGGLVQPGGSLRLSCAASGFTFSDYYMSWIRQAPGKGLEWVATIYPSSGKTYYADSAKGRLTISSDNAKDSLYLQMNSLRAEDTAVYYCTRDSYADDAALFDIWGQGTTVTVSSTRIQNPDPAVYQLRDSKSSDKSVCLFTDFDSQTNVSQSKDSDVYITDKCVLDMRSMDFKSNSAVAWSNKSDFACANAFNNSIIPEDTFFPSPESSCDVKLVEKSFETDTNLNFQILYEILLGKATLYAVLVSALVLMAMVKRKDSRG

SEQ ID NO: 13835 - protein, 753 aa, synthetic construct; identical to SEQ ID NO: 13831

SEQ ID NO: 13836 - protein, 760 aa, synthetic construct; identical to SEQ ID NO: 13832

SEQ ID NO: 13837 - protein, 753 aa, synthetic construct; identical to SEQ ID NO: 13833

SEQ ID NO: 13838 - protein, 761 aa, synthetic construct; identical to SEQ ID NO: 13834

SEQ ID NO: 13839 - protein, 760 aa, synthetic construct
MALPVTALLLPLALLLHAARPEVQLVESGGGLVQPGGSLRLSCAASGFSFSDFWMSWVRQAPGKGLEWVATISQAGSEKDYVDSVKGRFTISRDNAKKSLYLQMNSLRAEDTAVYYCASGVYSFDYRGQGTLVTVSSGTGGGGSGGGGSGGGGSEFDIQLTQSPSSLSASVGDRVSFTCQASQDINNFLNWYQQKPGKAPKLLIYDASNLETGVPSRFSGSGSGTDFTFTISSLQPEDIATYYCQQYGNLPFTFGGGTKVEIKRLEDLKNVFPPEVAVFEPSEAEISHTQKATLVCLATGFYPDHVELSWWVNGKEVHSGVCTDPQPLKEQPALNDSRYCLSSRLRVSATFWQNPRNHFRCQVQFYGLSENDEWTQDRAKPVTQIVSAEAWGRADCGFTSESYQQGVLSATNLSVIGFRILLLKVAGFNLLMTLRLWSSRAKRSGSGATNFSLLKQAGDVEENPGPTSMDWIWRILFLVGAATGAHSFEQVQLQESGPGLVKPSQTLSLTCTVSGGSISSGGFYWSWIRQHPGKGLEWIGYIHHSGSTHYNPSLKSRVTISIDTSKNLFSLRLSSVTAADTAVYYCASLVYCGGDCYSGFDYWGQGTLVTVSSTRIQNPDPAVYQLRDSKSSDKSVCLFTDFDSQTNVSQSKDSDVYITDKCVLDMRSMDFKSNSAVAWSNKSDFACANAFNNSIIPEDTFFPSPESSCDVKLVEKSFETDTNLNFQILYEILLGKATLYAVLVSALVLMAMVKRKDSRG

SEQ ID NO: 13840 - protein, 756 aa, synthetic construct
MALPVTALLLPLALLLHAARPEVQLVESGGGLVQPGGSLRLSCAASGFSFSDFWMSWVRQAPGKGLEWVATISQAGSEKDYVDSVKGRFTISRDNAKKSLYLQMNSLRAEDTAVYYCASGVYSFDYRGQGTLVTVSSGTGGGGSGGGGSGGGGSEFDIQMTQSPSSLSASVGDRVTITCKSSQSVLYSSNQKNYLAWFQQKPGKAPKLLIYWASTRESGVPSRFSGSGSGTDFTLTISSLQPEDFATYFCHQYLSSYTFGQGTKVEIKRLEDLKNVFPPEVAVFEPSEAEISHTQKATLVCLATGFYPDHVELSWWVNGKEVHSGVCTDPQPLKEQPALNDSRYCLSSRLRVSATFWQNPRNHFRCQVQFYGLSENDEWTQDRAKPVTQIVSAEAWGRADCGFTSESYQQGVLSATNLSVIGFRILLLKVAGFNLLMTLRLWSSRAKRSGSGATNFSLLKQAGDVEENPGPTSMDWIWRILFLVGAATGAHSFEEVQLVESGGGLVQPGGSLRLSCAASGYTFTTYWMHWVRQAPGKGLEWVGYIRPSTGYTEYNQKFKDRFTISADTSKNTAYLQMNSLRAEDTAVYYCARSRWLLDYWGQGTLVTVSTRIQNPDPAVYQLRDSKSSDKSVCLFTDFDSQTNVSQSKDSDVYITDKCVLDMRSMDFKSNSAVAWSNKSDFACANAFNNSIIPEDTFFPSPESSCDVKLVEKSFETDTNLNFQILYEILLGKATLYAVLVSALVLMAMVKRKDSRG

SEQ ID NO: 13841 - protein, 753 aa, synthetic construct
MALPVTALLLPLALLLHAARPEVQLVESGGGLVQPGGSLRLSCAASGFSFSDFWMSWVRQAPGKGLEWVATISQAGSEKDYVDSVKGRFTISRDNAKKSLYLQMNSLRAEDTAVYYCASGVYSFDYRGQGTLVTVSSGTGGGGSGGGGSGGGGSEFDIQMTQSPSSLSASVGDRVTITCRASQDISNYLNWYQQKPGKAPKLLIYYTSRLHSGVPSRFSGSGSGTDFTLTISSLQPEDFATYYCQQGNTLPYTFGQGTKVEIKRLEDLKNVFPPEVAVFEPSEAEISHTQKATLVCLATGFYPDHVELSWWVNGKEVHSGVCTDPQPLKEQPALNDSRYCLSSRLRVSATFWQNPRNHFRCQVQFYGLSENDEWTQDRAKPVTQIVSAEAWGRADCGFTSESYQQGVLSATNLSVIGFRILLLKVAGFNLLMTLRLWSSRAKRSGSGATNFSLLKQAGDVEENPGPTSMDWIWRILFLVGAATGAHSFEEVQLVESGGGLVQPGGSLRLSCAASGFTFSDYFMSWVRQAPGKGLEWVATISNGGTYTYYPDSVKGRFTISRDNSKNTLYLQMNSLRAEDTAVYYCARFDGYIFDYWGQGTLVTVSSTRIQNPDPAVYQLRDSKSSDKSVCLFTDFDSQTNVSQSKDSDVYITDKCVLDMRSMDFKSNSAVAWSNKSDFACANAFNNSIIPEDTFFPSPESSCDVKLVEKSFETDTNLNFQILYEILLGKATLYAVLVSALVLMAMVKRKDSRG

SEQ ID NO: 13842 - protein, 758 aa, synthetic construct
MALPVTALLLPLALLLHAARPEVQLVESGGGLVQPGGSLRLSCAASGFSFSDFWMSWVRQAPGKGLEWVATISQAGSEKDYVDSVKGRFTISRDNAKKSLYLQMNSLRAEDTAVYYCASGVYSFDYRGQGTLVTVSSGTGGGGSGGGGSGGGGSEFDIQMTQTTSSLSASLGDRVTISCRASQDISKYLNWYQQKPDGTVKLLIYHTSRLHSGVPSRFSGSGSGTDYSLTISNLEQEDIATYFCQQGNTLPYTFGGGTKLEITLEIQNPDPAVYQLRDSKSSDKSVCLFTDFDSQTNVSQSKDSDVYITDKCVLDMRSMDFKSNSAVAWSNKSDFACANAFNNSIIPEDTFFPSPESSCDVKLVEKSFETDTNLNFQILYEILLGKATLYAVLVSALVLMAMVKRKDSRGRAKRSGSGVKQTLNFDLLKLAGDVESNPGPTSMDWIWRILFLVGAATGAHSFEVKLQESGPGLVAPSQSLSVTCTVSGVSLPDYGVSWIRQPPRKGLEWLGVIWGSETTYYNSALKSRLTIIKDNSKSQVFLKMNSLQTDDTAIYYCAKHYYYGGSYAMDYWGQGTSVTVSSTREDLKNVFPPEVAVFEPSEAEISHTQKATLVCLATGFYPDHVELSWWVNGKEVHSGVCTDPQPLKEQPALNDSRYCLSSRLRVSATFWQNPRNHFRCQVQFYGLSENDEWTQDRAKPVTQIVSAEAWGRADCGFTSESYQQGVLSATNLSVIGFRILLLKVAGFNLLMTLRLWSS

SEQ ID NO: 13843 - protein, 759 aa, synthetic construct
MALPVTALLLPLALLLHAARPEVQLVESGGGLVQPGGSLRLSCAASGFSFSDFWMSWVRQAPGKGLEWVATISQAGSEKDYVDSVKGRFTISRDNAKKSLYLQMNSLRAEDTAVYYCASGVYSFDYRGQGTLVTVSSGTGGGGSGGGGSGGGGSEFEIVMTQSPATLSLSPGERATLSCRASQDISKYLNWYQQKPGQAPRLLIYHTSRLHSGIPARFSGSGSGTDYTLTISSLQPEDFAVYFCQQGNTLPYTFGQGTKLEIKLEIQNPDPAVYQLRDSKSSDKSVCLFTDFDSQTNVSQSKDSDVYITDKCVLDMRSMDFKSNSAVAWSNKSDFACANAFNNSIIPEDTFFPSPESSCDVKLVEKSFETDTNLNFQILYEILLGKATLYAVLVSALVLMAMVKRKDSRGRAKRSGSGVKQTLNFDLLKLAGDVESNPGPTSMDWIWRILFLVGAATGAHSFEQVQLQESGPGLVKPSETLSLTCTVSGVSLPDYGVSWIRQPPGKGLEWIGVIWGSETTYYNSSLKSRVTISKDNSKNQVSLKLSSVTAADTAVYYCAKHYYYGGSYAMDYWGQGTLVTVSSTREDLKNVFPPEVAVFEPSEAEISHTQKATLVCLATGFYPDHVELSWWVNGKEVHSGVCTDPQPLKEQPALNDSRYCLSSRLRVSATFWQNPRNHFRCQVQFYGLSENDEWTQDRAKPVTQIVSAEAWGRADCGFTSESYQQGVLSATNLSVIGFRILLLKVAGFNLLMTLRLWSS

SEQ ID NO: 13844 - protein, 760 aa, synthetic construct
MALPVTALLLPLALLLHAARPEVQLVESGGGLVQPGGSLRLSCAASGFSFSDFWMSWVRQAPGKGLEWVATISQAGSEKDYVDSVKGRFTISRDNAKKSLYLQMNSLRAEDTAVYYCASGVYSFDYRGQGTLVTVSSGTGGGGSGGGGSGGGGSEFDEIVLTQSPATLSLSPGERATLSCSASSSVSYMHWYQQKPGQAPRLLIYDTSKLASGIPARFSGSGSGTDFTLTISSLEPEDVAVYYCFQGSVYPFTFGQGTKLEIKRLEIQNPDPAVYQLRDSKSSDKSVCLFTDFDSQTNVSQSKDSDVYITDKCVLDMRSMDFKSNSAVAWSNKSDFACANAFNNSIIPEDTFFPSPESSCDVKLVEKSFETDTNLNFQILYEILLGKATLYAVLVSALVLMAMVKRKDSRGRAKRSGSGVKQTLNFDLLKLAGDVESNPGPTSMDWIWRILFLVGAATGAHSFEQVQLQESGPGLVKPSQTLSLTCTVSGGSISTSGMGVGWIRQHPGKGLEWIGHIWWDDDKRYNPALKSRVTISVDTSKNQFSLKLSSVTAADTAVYYCARMELWSYYFDYWGQGTLVTVSSTREDLKNVFPPEVAVFEPSEAEISHTQKATLVCLATGFYPDHVELSWWVNGKEVHSGVCTDPQPLKEQPALNDSRYCLSSRLRVSATFWQNPRNHFRCQVQFYGLSENDEWTQDRAKPVTQIVSAEAWGRADCGFTSESYQQGVLSATNLSVIGFRILLLKVAGFNLLMTLRLWSS

SEQ ID NO: 13845 - protein, 758 aa, synthetic construct
MALPVTALLLPLALLLHAARPEVQLVESGGGLVQPGGSLRLSCAASGFSFSDFWMSWVRQAPGKGLEWVATISQAGSEKDYVDSVKGRFTISRDNAKKSLYLQMNSLRAEDTAVYYCASGVYSFDYRGQGTLVTVSSGTGGGGSGGGGSGGGGSEFDYIHVTQSPSSLSVSIGDRVTINCQTSQGVGSDLHWYQHKPGRAPKLLIHHASSVEDGVPSRFSGTGFHTSFNLTINDLQADDIGTYYCQVLQSFGRGSRLDTKLEIQNPDPAVYQLRDSKSSDKSVCLFTDFDSQTNVSQSKDSDVYITDKCVLDMRSMDFKSNSAVAWSNKSDFACANAFNNSIIPEDTFFPSPESSCDVKLVEKSFETDTNLNFQILYEILLGKATLYAVLVSALVLMAMVKRKDSRGRAKRSGSGVKQTLNFDLLKLAGDVESNPGPTSMDWIWRILFLVGAATGAHSFERAHLVQSGTAMKKPGASVRVSCQTSGYTFTAHILFWFRQAPGRGLEWVGWIKPQYGAVNFGGGFRDRVTLTRDVYREIAYMDIRGLKPDDTAVYYCARDRSYGDSSWALDAWGQGTTVVVSATREDLKNVFPPEVAVFEPSEAEISHTQKATLVCLATGFYPDHVELSWWVNGKEVHSGVCTDPQPLKEQPALNDSRYCLSSRLRVSATFWQNPRNHFRCQVQFYGLSENDEWTQDRAKPVTQIVSAEAWGRADCGFTSESYQQGVLSATNLSVIGFRILLLKVAGFNLLMTLRLWSS

SEQ ID NO: 13846 - protein, 768 aa, synthetic construct
MALPVTALLLPLALLLHAARPEVQLVESGGGLVQPGGSLRLSCAASGFSFSDFWMSWVRQAPGKGLEWVATISQAGSEKDYVDSVKGRFTISRDNAKKSLYLQMNSLRAEDTAVYYCASGVYSFDYRGQGTLVTVSSGTGGGGSGGGGSGGGGSEFDVQMIQTPDSLAVSLGQRATISCRASESVDNYGISFMHWYQQKPGQSPKLLIYRASNLESGIPARFSGSGSRTDFTLTINPVETDDVATYYCQQNNKDPPTFGGGTKLEIKLEIQNPDPAVYQLRDSKSSDKSVCLFTDFDSQTNVSQSKDSDVYITDKCVLDMRSMDFKSNSAVAWSNKSDFACANAFNNSIIPEDTFFPSPESSCDVKLVEKSFETDTNLNFQILYEILLGKATLYAVLVSALVLMAMVKRKDSRGRAKRSGSGVKQTLNFDLLKLAGDVESNPGPTSMDWIWRILFLVGAATGAHSFEGGGGSQVQLQQSGAELVKPGASVKISCKASGYAFSSYWMNWVKQRPGKGLEWIGQIYPGDGDTTYNGKFKGKATLTADKSSSTVYMQLNSLTSEDSAVYFCVRYYYGSSGYFDYWGQGTTLTVSSTREDLKNVFPPEVAVFEPSEAEISHTQKATLVCLATGFYPDHVELSWWVNGKEVHSGVCTDPQPLKEQPALNDSRYCLSSRLRVSATFWQNPRNHFRCQVQFYGLSENDEWTQDRAKPVTQIVSAEAWGRADCGFTSESYQQGVLSATNLSVIGFRILLLKVAGFNLLMTLRLWSS

SEQ ID NO: 13847 - protein, 759 aa, synthetic construct
MALPVTALLLPLALLLHAARPEVQLVESGGGLVQPGGSLRLSCAASGFSFSDFWMSWVRQAPGKGLEWVATISQAGSEKDYVDSVKGRFTISRDNAKKSLYLQMNSLRAEDTAVYYCASGVYSFDYRGQGTLVTVSSGTGGGGSGGGGSGGGGSEFDVQMIQTPSSLSASLGDRVTISCRASQDIGNYLNWYQQKPDGTVKLLIYYTSRLHSGVPSRFSGSGSGTEYSLTISNLEQEDIATYFCQQGSALPPTFGGGTKLEINLEIQNPDPAVYQLRDSKSSDKSVCLFTDFDSQTNVSQSKDSDVYITDKCVLDMRSMDFKSNSAVAWSNKSDFACANAFNNSIIPEDTFFPSPESSCDVKLVEKSFETDTNLNFQILYEILLGKATLYAVLVSALVLMAMVKRKDSRGRAKRSGSGVKQTLNFDLLKLAGDVESNPGPTSMDWIWRILFLVGAATGAHSFEALQLQQSGAELVRPGASVTLSCKASGYTFTDYEMHWVKQTPVHGLEWIGAIDPETGGTAYNQKFEGKAILTADKSSSTAYMELRSLTSEDSPVYYCARRRYYGSSSFDYWGQGTTLTVSSTREDLKNVFPPEVAVFEPSEAEISHTQKATLVCLATGFYPDHVELSWWVNGKEVHSGVCTDPQPLKEQPALNDSRYCLSSRLRVSATFWQNPRNHFRCQVQFYGLSENDEWTQDRAKPVTQIVSAEAWGRADCGFTSESYQQGVLSATNLSVIGFRILLLKVAGFNLLMTLRLWSS

SEQ ID NO: 13848 - protein, 763 aa, synthetic construct
MALPVTALLLPLALLLHAARPEVQLVESGGGLVQPGGSLRLSCAASGFSFSDFWMSWVRQAPGKGLEWVATISQAGSEKDYVDSVKGRFTISRDNAKKSLYLQMNSLRAEDTAVYYCASGVYSFDYRGQGTLVTVSSGTGGGGSGGGGSGGGGSEFDIVLTQSPASLAVSLGQRATISCRASKSVSTSGYSYLHWYQQKPGQPPKLLIYLASNLESGVPARFSGSGSGTDFTLNIHPVEEEDAATYYCQHSRELPFTFGSGTKLEIKLEIQNPDPAVYQLRDSKSSDKSVCLFTDFDSQTNVSQSKDSDVYITDKCVLDMRSMDFKSNSAVAWSNKSDFACANAFNNSIIPEDTFFPSPESSCDVKLVEKSFETDTNLNFQILYEILLGKATLYAVLVSALVLMAMVKRKDSRGRAKRSGSGVKQTLNFDLLKLAGDVESNPGPTSMDWIWRILFLVGAATGAHSFEQVQLVESGGGLVQPGGSLKLSCAASGFDFSRYWMSWVRQAPGKGLEWIGEINPTSSTINFTPSLKDKVFISRDNAKNTLYLQMSKVRSEDTALYYCARGNYYRYGDAMDYWGQGTSVTVSTREDLKNVFPPEVAVFEPSEAEISHTQKATLVCLATGFYPDHVELSWWVNGKEVHSGVCTDPQPLKEQPALNDSRYCLSSRLRVSATFWQNPRNHFRCQVQFYGLSENDEWTQDRAKPVTQIVSAEAWGRADCGFTSESYQQGVLSATNLSVIGFRILLLKVAGFNLLMTLRLWSS

SEQ ID NO: 13849 - protein, 761 aa, synthetic construct
MALPVTALLLPLALLLHAARPEVQLVESGGGLVQPGGSLRLSCAASGFSFSDFWMSWVRQAPGKGLEWVATISQAGSEKDYVDSVKGRFTISRDNAKKSLYLQMNSLRAEDTAVYYCASGVYSFDYRGQGTLVTVSSGTGGGGSGGGGSGGGGSEFDIQMTQSPSSLSASVGDRVTITCSASQDISNYLNWYQQKPGKAPKLLIYYTSNLHSGVPSRFSGSGSGTDFTLTISSLQPEDFATYYCQQYRKLPWTFGQGTKLEIKRLEIQNPDPAVYQLRDSKSSDKSVCLFTDFDSQTNVSQSKDSDVYITDKCVLDMRSMDFKSNSAVAWSNKSDFACANAFNNSIIPEDTFFPSPESSCDVKLVEKSFETDTNLNFQILYEILLGKATLYAVLVSALVLMAMVKRKDSRGRAKRSGSGVKQTLNFDLLKLAGDVESNPGPTSMDWIWRILFLVGAATGAHSFEQVQLVQSGAEVKKPGSSVKVSCKASGGTFSNYWMHWVRQAPGQGLEWMGATYRGHSDTYYNQKFKGRVTITADKSTSTAYMELSSLRSEDTAVYYCARGAIYDGYDVLDNWGQGTLVTVSSTREDLKNVFPPEVAVFEPSEAEISHTQKATLVCLATGFYPDHVELSWWVNGKEVHSGVCTDPQPLKEQPALNDSRYCLSSRLRVSATFWQNPRNHFRCQVQFYGLSENDEWTQDRAKPVTQIVSAEAWGRADCGFTSESYQQGVLSATNLSVIGFRILLLKVAGFNLLMTLRLWSS

SEQ ID NO: 13850 - protein, 761 aa, synthetic construct
MALPVTALLLPLALLLHAARPEVQLVESGGGLVQPGGSLRLSCAASGFSFSDFWMSWVRQAPGKGLEWVATISQAGSEKDYVDSVKGRFTISRDNAKKSLYLQMNSLRAEDTAVYYCASGVYSFDYRGQGTLVTVSSGTGGGGSGGGGSGGGGSEFDIVLTQSPATLSLSPGDRATISCRASESVTILGSHLIYWYQQKPGQPPRLLIQLASNVQTGVPARFSGSGSRTDFTLTISSVEPEDFAVYYCLQSRTIPRTFGQGTKLEIKRLEIQNPDPAVYQLRDSKSSDKSVCLFTDFDSQTNVSQSKDSDVYITDKCVLDMRSMDFKSNSAVAWSNKSDFACANAFNNSIIPEDTFFPSPESSCDVKLVEKSFETDTNLNFQILYEILLGKATLYAVLVSALVLMAMVKRKDSRGRAKRSGSGVKQTLNFDLLKLAGDVESNPGPTSMDWIWRILFLVGAATGAHSFEQVQLVQSGPEVKKPGESVKISCKASGYTFRHYSMNWVKQAPGQGLKWMGRINTESGVPIYADDFKGRFSFTVDTSASTAYLEISSLTSEDTAVYFCSNDYLYSLDFWGQGTTLTVSSTREDLKNVFPPEVAVFEPSEAEISHTQKATLVCLATGFYPDHVELSWWVNGKEVHSGVCTDPQPLKEQPALNDSRYCLSSRLRVSATFWQNPRNHFRCQVQFYGLSENDEWTQDRAKPVTQIVSAEAWGRADCGFTSESYQQGVLSATNLSVIGFRILLLKVAGFNLLMTLRLWSS

SEQ ID NO: 13851 - protein, 762 aa, synthetic construct
MALPVTALLLPLALLLHAARPEVQLVESGGGLVQPGGSLRLSCAASGFSFSDFWMSWVRQAPGKGLEWVATISQAGSEKDYVDSVKGRFTISRDNAKKSLYLQMNSLRAEDTAVYYCASGVYSFDYRGQGTLVTVSSGTGGGGSGGGGSGGGGSEFQSVLTQPPSVSGAPGQRVTISCTGSSSNIGAGFDVHWYQQLPGTAPKLLIYGNSNRPSGVPDRFSGSKSGTSASLAITGLQAEDEADYYCQSYDSSLSGYVFGTGTKVTVLGLEIQNPDPAVYQLRDSKSSDKSVCLFTDFDSQTNVSQSKDSDVYITDKCVLDMRSMDFKSNSAVAWSNKSDFACANAFNNSIIPEDTFFPSPESSCDVKLVEKSFETDTNLNFQILYEILLGKATLYAVLVSALVLMAMVKRKDSRGRAKRSGSGVKQTLNFDLLKLAGDVESNPGPTSMDWIWRILFLVGAATGAHSFEQVQLVQSGAEVKKPGASVKVSCKASGYTFTDYYMHWVRQAPGQRLEWMGWINPNSGGTNYAQKFQDRITVTRDTSSNTGYMELTRLRSDDTAVYYCARSPYSGVLDKWGQGTLVTVSSTREDLKNVFPPEVAVFEPSEAEISHTQKATLVCLATGFYPDHVELSWWVNGKEVHSGVCTDPQPLKEQPALNDSRYCLSSRLRVSATFWQNPRNHFRCQVQFYGLSENDEWTQDRAKPVTQIVSAEAWGRADCGFTSESYQQGVLSATNLSVIGFRILLLKVAGFNLLMTLRLWSS

SEQ ID NO: 13852 - protein, 759 aa, synthetic construct
MALPVTALLLPLALLLHAARPEVQLVESGGGLVQPGGSLRLSCAASGFSFSDFWMSWVRQAPGKGLEWVATISQAGSEKDYVDSVKGRFTISRDNAKKSLYLQMNSLRAEDTAVYYCASGVYSFDYRGQGTLVTVSSGTGGGGSGGGGSGGGGSEFQAVLTQPPSASGTPGQRVTISCSGSSSNIGSYTVSWYQQLPGTAPKFLIYSNNQRPSGVPDRFSGSKSGTSASLAISGLQSEDEADYYCAAWDDSLNGYVFGTGTKVTVLGLEIQNPDPAVYQLRDSKSSDKSVCLFTDFDSQTNVSQSKDSDVYITDKCVLDMRSMDFKSNSAVAWSNKSDFACANAFNNSIIPEDTFFPSPESSCDVKLVEKSFETDTNLNFQILYEILLGKATLYAVLVSALVLMAMVKRKDSRGRAKRSGSGVKQTLNFDLLKLAGDVESNPGPTSMDWIWRILFLVGAATGAHSFEVQLVQSGAEVKKPGESLKISCKGSGYDFTTYWIGWVRQMPGKGLEWMGIIYPGDSDTRYSPSVRGRVTISADKSINTAYLQWSSLEASDTAMYYCARMWTFSQDGWGQGTLVTVSSTREDLKNVFPPEVAVFEPSEAEISHTQKATLVCLATGFYPDHVELSWWVNGKEVHSGVCTDPQPLKEQPALNDSRYCLSSRLRVSATFWQNPRNHFRCQVQFYGLSENDEWTQDRAKPVTQIVSAEAWGRADCGFTSESYQQGVLSATNLSVIGFRILLLKVAGFNLLMTLRLWSS

SEQ ID NO: 13853 - protein, 762 aa, synthetic construct
MALPVTALLLPLALLLHAARPEVQLVESGGGLVQPGGSLRLSCAASGFSFSDFWMSWVRQAPGKGLEWVATISQAGSEKDYVDSVKGRFTISRDNAKKSLYLQMNSLRAEDTAVYYCASGVYSFDYRGQGTLVTVSSGTGGGGSGGGGSGGGGSEFDIVMTQSPDSLAVSLGERATINCKSSQSILYSSNQKNYLAWYQQKPGQSPKLLIYWASTRESGVPDRFSGSGSGTDFTLTISSLQAEDVAVYYCHQYISSYTFGQGTKLEIKLEIQNPDPAVYQLRDSKSSDKSVCLFTDFDSQTNVSQSKDSDVYITDKCVLDMRSMDFKSNSAVAWSNKSDFACANAFNNSIIPEDTFFPSPESSCDVKLVEKSFETDTNLNFQILYEILLGKATLYAVLVSALVLMAMVKRKDSRGRAKRSGSGVKQTLNFDLLKLAGDVESNPGPTSMDWIWRILFLVGAATGAHSFEQVQLVQSGAEVKKPGASVKVSCKASGYTFASQWMHWMRQAPGQGLEWIGWINPGNVNTKYNEKFKGRATLTVDTSTNTAYMELSSLRSEDTAVYYCARSTWYRPLDYWGQGTLVTVSSTREDLKNVFPPEVAVFEPSEAEISHTQKATLVCLATGFYPDHVELSWWVNGKEVHSGVCTDPQPLKEQPALNDSRYCLSSRLRVSATFWQNPRNHFRCQVQFYGLSENDEWTQDRAKPVTQIVSAEAWGRADCGFTSESYQQGVLSATNLSVIGFRILLLKVAGFNLLMTLRLWSS

SEQ ID NO: 13854 - protein, 762 aa, synthetic construct
MALPVTALLLPLALLLHAARPEVQLVESGGGLVQPGGSLRLSCAASGFSFSDFWMSWVRQAPGKGLEWVATISQAGSEKDYVDSVKGRFTISRDNAKKSLYLQMNSLRAEDTAVYYCASGVYSFDYRGQGTLVTVSSGTGGGGSGGGGSGGGGSEFDHIVLTQSPSSLSASLGDRVTISCRASQDISTYLNWYQQKPDGTVKLLIFYTSRLHAGVPSRFSGSGSGTHHSLTISNLEQEDIATYFCQQGNSLPFTFGSGTKLEIKRLEIQNPDPAVYQLRDSKSSDKSVCLFTDFDSQTNVSQSKDSDVYITDKCVLDMRSMDFKSNSAVAWSNKSDFACANAFNNSIIPEDTFFPSPESSCDVKLVEKSFETDTNLNFQILYEILLGKATLYAVLVSALVLMAMVKRKDSRGRAKRSGSGVKQTLNFDLLKLAGDVESNPGPTSMDWIWRILFLVGAATGAHSFEQVQLKESGPELEKPGASVKISCKASGYSFTAYSMNWVKQNNGMSLEWIGSIDPYYGDTKYAQKFKGKATLTVDKASSTAYLQLKSLTSEDSAVYYCARRMITTGDWYFDVWGAGTTVTVSSTREDLKNVFPPEVAVFEPSEAEISHTQKATLVCLATGFYPDHVELSWWVNGKEVHSGVCTDPQPLKEQPALNDSRYCLSSRLRVSATFWQNPRNHFRCQVQFYGLSENDEWTQDRAKPVTQIVSAEAWGRADCGFTSESYQQGVLSATNLSVIGFRILLLKVAGFNLLMTLRLWSS

SEQ ID NO: 13855 - protein, 762 aa, synthetic construct; identical to SEQ ID NO: 13854

SEQ ID NO: 13856 - protein, 762 aa, synthetic construct
MALPVTALLLPLALLLHAARPEVQLVESGGGLVQPGGSLRLSCAASGFSFSDFWMSWVRQAPGKGLEWVATISQAGSEKDYVDSVKGRFTISRDNAKKSLYLQMNSLRAEDTAVYYCASGVYSFDYRGQGTLVTVSSGTGGGGSGGGGSGGGGSEFDEIVLTQSPATLSLSPGERATLSCRASQSVSSYLAWYQQKPGQAPRLLIYDASNRATGIPARFSGSGSGTDFTLTISSLEPEDFAVYYCQQRSNWPITFGQGTRLEIKLEIQNPDPAVYQLRDSKSSDKSVCLFTDFDSQTNVSQSKDSDVYITDKCVLDMRSMDFKSNSAVAWSNKSDFACANAFNNSIIPEDTFFPSPESSCDVKLVEKSFETDTNLNFQILYEILLGKATLYAVLVSALVLMAMVKRKDSRGRAKRSGSGVKQTLNFDLLKLAGDVESNPGPTSMDWIWRILFLVGAATGAHSFEEVQLVESGGGLVQPGRSLRLSCAASGFTFNDYAMHWVRQAPGKGLEWVSTISWNSGSIGYADSVKGRFTISRDNAKKSLYLQMNSLRAEDTALYYCAKDIQYGNYYYGMDVWGQGTTVTVSSTREDLKNVFPPEVAVFEPSEAEISHTQKATLVCLATGFYPDHVELSWWVNGKEVHSGVCTDPQPLKEQPALNDSRYCLSSRLRVSATFWQNPRNHFRCQVQFYGLSENDEWTQDRAKPVTQIVSAEAWGRADCGFTSESYQQGVLSATNLSVIGFRILLLKVAGFNLLMTLRLWSS

SEQ ID NO: 13857 - protein, 764 aa, synthetic construct
MALPVTALLLPLALLLHAARPEVQLVESGGGLVQPGGSLRLSCAASGFSFSDFWMSWVRQAPGKGLEWVATISQAGSEKDYVDSVKGRFTISRDNAKKSLYLQMNSLRAEDTAVYYCASGVYSFDYRGQGTLVTVSSGTGGGGSGGGGSGGGGSEFDIVMTQTPLSLPVTPGEPASISCRSSKSLLHSNGITYLYWYLQKPGQSPQLLIYQMSNLVSGVPDRFSGSGSGTDFTLKISRVEAEDVGVYYCAQNLELPYTFGGGTKVEIKRLEIQNPDPAVYQLRDSKSSDKSVCLFTDFDSQTNVSQSKDSDVYITDKCVLDMRSMDFKSNSAVAWSNKSDFACANAFNNSIIPEDTFFPSPESSCDVKLVEKSFETDTNLNFQILYEILLGKATLYAVLVSALVLMAMVKRKDSRGRAKRSGSGVKQTLNFDLLKLAGDVESNPGPTSMDWIWRILFLVGAATGAHSFEQVQLVQSGAEVKKPGSSVKVSCKASGYAFSYSWINWVRQAPGQGLEWMGRIFPGDGDTDYNGKFKGRVTITADKSTSTAYMELSSLRSEDTAVYYCARNVFDGYWLVYWGQGTLVTVSSTREDLKNVFPPEVAVFEPSEAEISHTQKATLVCLATGFYPDHVELSWWVNGKEVHSGVCTDPQPLKEQPALNDSRYCLSSRLRVSATFWQNPRNHFRCQVQFYGLSENDEWTQDRAKPVTQIVSAEAWGRADCGFTSESYQQGVLSATNLSVIGFRILLLKVAGFNLLMTLRLWSS

SEQ ID NO: 13858 - protein, 765 aa, synthetic construct
MALPVTALLLPLALLLHAARPEVQLVESGGGLVQPGGSLRLSCAASGFSFSDFWMSWVRQAPGKGLEWVATISQAGSEKDYVDSVKGRFTISRDNAKKSLYLQMNSLRAEDTAVYYCASGVYSFDYRGQGTLVTVSSGTGGGGSGGGGSGGGGSEFDIQMTQSPSSLSASVGDRVTITCRSSQSIVHSVGNTFLEWYQQKPGKAPKLLIYKVSNRFSGVPSRFSGSGSGTDFTLTISSLQPEDFATYYCFQGSQFPYTFGQGTKVEIKRLEIQNPDPAVYQLRDSKSSDKSVCLFTDFDSQTNVSQSKDSDVYITDKCVLDMRSMDFKSNSAVAWSNKSDFACANAFNNSIIPEDTFFPSPESSCDVKLVEKSFETDTNLNFQILYEILLGKATLYAVLVSALVLMAMVKRKDSRGRAKRSGSGVKQTLNFDLLKLAGDVESNPGPTSMDWIWRILFLVGAATGAHSFEEVQLVESGGGLVQPGGSLRLSCAASGYEFSRSWMNWVRQAPGKGLEWVGRIYPGDGDTNYSGKFKGRFTISADTSKNTAYLQMNSLRAEDTAVYYCARDGSSWDWYFDVWGQGTLVTVSSTREDLKNVFPPEVAVFEPSEAEISHTQKATLVCLATGFYPDHVELSWWVNGKEVHSGVCTDPQPLKEQPALNDSRYCLSSRLRVSATFWQNPRNHFRCQVQFYGLSENDEWTQDRAKPVTQIVSAEAWGRADCGFTSESYQQGVLSATNLSVIGFRILLLKVAGFNLLMTLRLWSS

SEQ ID NO: 13859 - protein, 763 aa, synthetic construct
MALPVTALLLPLALLLHAARPEVQLVESGGGLVQPGGSLRLSCAASGFSFSDFWMSWVRQAPGKGLEWVATISQAGSEKDYVDSVKGRFTISRDNAKKSLYLQMNSLRAEDTAVYYCASGVYSFDYRGQGTLVTVSSGTGGGGSGGGGSGGGGSEFDIQMTQSPSSLSASVGDRVTITCRASQTIWSYLNWYQQRPGKAPNLLIYAASSLQSGVPSRFSGRGSGTDFTLTISSLQAEDFATYYCQQSYSIPQIFGQGTKLEIKLEIQNPDPAVYQLRDSKSSDKSVCLFTDFDSQTNVSQSKDSDVYITDKCVLDMRSMDFKSNSAVAWSNKSDFACANAFNNSIIPEDTFFPSPESSCDVKLVEKSFETDTNLNFQILYEILLGKATLYAVLVSALVLMAMVKRKDSRGRAKRSGSGVKQTLNFDLLKLAGDVESNPGPTSMDWIWRILFLVGAATGAHSFEQVQLQQSGPGLVKPSQTLSLTCAISGDSVSSNSAAWNWIRQSPSRGLEWLGRTYYRSKWYNDYAVSVKSRITINPDTSKNQFSLQLNSVTPEDTAVYYCAREVTGDLEDAFDIWGQGTMVTVSSTREDLKNVFPPEVAVFEPSEAEISHTQKATLVCLATGFYPDHVELSWWVNGKEVHSGVCTDPQPLKEQPALNDSRYCLSSRLRVSATFWQNPRNHFRCQVQFYGLSENDEWTQDRAKPVTQIVSAEAWGRADCGFTSESYQQGVLSATNLSVIGFRILLLKVAGFNLLMTLRLWSS

SEQ ID NO: 13860 - protein, 756 aa, synthetic construct
MALPVTALLLPLALLLHAARPEVQLVESGGGLVQPGGSLRLSCAASGFSFSDFWMSWVRQAPGKGLEWVATISQAGSEKDYVDSVKGRFTISRDNAKKSLYLQMNSLRAEDTAVYYCASGVYSFDYRGQGTLVTVSSGTGGGGSGGGGSGGGGSEFDIQMTQSPATIENTSLSASVGDRVTITCRASQGISSWLTWYQQKPEKAPKSLIYAASSLQSGVPSRFSGSGSGTDFTLTISSLQPEDFATYYCQQYDSYPITFGQGTRLEIKLEIQNPDPAVYQLRDSKSSDKSVCLFTDFDSQTNVSQSKDSDVYITDKCVLDMRSMDFKSNSAVAWSNKSDFACANAFNNSIIPEDTFFPSPESSCDVKLVEKSFETDTNLNFQILYEILLGKATLYAVLVSALVLMAMVKRKDSRGRAKRSGSGVKQTLNFDLLKLAGDVESNPGPTSMDWIWRILFLVGAATGAHSFEQVQLQQWGAGLLKPSETLSLTCAVYGGSFSAYYWSWIRQPPGKGLEWIGDINHGGGTNYNPSLKSRVTISVDTSKNQFSLKLNSVTAADTAVYYCASLTAYWGQGSLVTVSSTREDLKNVFPPEVAVFEPSEAEISHTQKATLVCLATGFYPDHVELSWWVNGKEVHSGVCTDPQPLKEQPALNDSRYCLSSRLRVSATFWQNPRNHFRCQVQFYGLSENDEWTQDRAKPVTQIVSAEAWGRADCGFTSESYQQGVLSATNLSVIGFRILLLKVAGFNLLMTLRLWSS

SEQ ID NO: 13861 - protein, 761 aa, synthetic construct
MALPVTALLLPLALLLHAARPEVQLVESGGGLVQPGGSLRLSCAASGFSFSDFWMSWVRQAPGKGLEWVATISQAGSEKDYVDSVKGRFTISRDNAKKSLYLQMNSLRAEDTAVYYCASGVYSFDYRGQGTLVTVSSGTGGGGSGGGGSGGGGSEFDEIVLTQSPDSLAVSLGERATINCKASQSVDFDGDSYLNWYQQKPGQPPKVLIYAASTLQSGVPSRFSGSGSGTDFTLTINSLEAEDAATYYCQQSNEDPWTFGGGTKVEIKLEIQNPDPAVYQLRDSKSSDKSVCLFTDFDSQTNVSQSKDSDVYITDKCVLDMRSMDFKSNSAVAWSNKSDFACANAFNNSIIPEDTFFPSPESSCDVKLVEKSFETDTNLNFQILYEILLGKATLYAVLVSALVLMAMVKRKDSRGRAKRSGSGVKQTLNFDLLKLAGDVESNPGPTSMDWIWRILFLVGAATGAHSFEQVQLVQSGAEVKKPGASVKVSCKVSGYTFTDYYITWVRQAPGQALEWMGWIYPGSGNTKYSQKFQGRFVFSVDTSASTAYLQLSSLKAEDTAVYYCANYGNYWFAYWGQGTLVTVSSTREDLKNVFPPEVAVFEPSEAEISHTQKATLVCLATGFYPDHVELSWWVNGKEVHSGVCTDPQPLKEQPALNDSRYCLSSRLRVSATFWQNPRNHFRCQVQFYGLSENDEWTQDRAKPVTQIVSAEAWGRADCGFTSESYQQGVLSATNLSVIGFRILLLKVAGFNLLMTLRLWSS

SEQ ID NO: 13862 - protein, 758 aa, synthetic construct
MALPVTALLLPLALLLHAARPEVQLVESGGGLVQPGGSLRLSCAASGFSFSDFWMSWVRQAPGKGLEWVATISQAGSEKDYVDSVKGRFTISRDNAKKSLYLQMNSLRAEDTAVYYCASGVYSFDYRGQGTLVTVSSGTGGGGSGGGGSGGGGSEFDIQMTQSPSSLSASVGDRVTITCRASQGISSWLAWYQQKPEKAPKSLIYAASSLQSGVPSRFSGSGSGTDFTLTISSLQPEDFATYYCQQYNSYPPTFGGGTKVEIKLEIQNPDPAVYQLRDSKSSDKSVCLFTDFDSQTNVSQSKDSDVYITDKCVLDMRSMDFKSNSAVAWSNKSDFACANAFNNSIIPEDTFFPSPESSCDVKLVEKSFETDTNLNFQILYEILLGKATLYAVLVSALVLMAMVKRKDSRGRAKRSGSGVKQTLNFDLLKLAGDVESNPGPTSMDWIWRILFLVGAATGAHSFEEVQLVQSGGGLVHPGGSLRLSCAGSGFAFSSSTMHWIRQAPGKGLEWISLIGSGGGIYYGDSVKGRFTISRDNAKNSLYLQMNSLRAEDMAVYYCVRGYFDWVDYFDYWGQGTLVTVSSTREDLKNVFPPEVAVFEPSEAEISHTQKATLVCLATGFYPDHVELSWWVNGKEVHSGVCTDPQPLKEQPALNDSRYCLSSRLRVSATFWQNPRNHFRCQVQFYGLSENDEWTQDRAKPVTQIVSAEAWGRADCGFTSESYQQGVLSATNLSVIGFRILLLKVAGFNLLMTLRLWSS

SEQ ID NO: 13863 - protein, 768 aa, synthetic construct
MALPVTALLLPLALLLHAARPEVQLVESGGGLVQPGGSLRLSCAASGFSFSDFWMSWVRQAPGKGLEWVATISQAGSEKDYVDSVKGRFTISRDNAKKSLYLQMNSLRAEDTAVYYCASGVYSFDYRGQGTLVTVSSGTGGGGSGGGGSGGGGSEFDDIVMTQSPDSLTVSLGERTTINCKSSQSVLDSSKNKNSLAWYQQKPGQPPKLLLSWASTRESGIPDRFSGSGSGTDFTLTIDSLQPEDSATYYCQQSAHFPITFGQGTRLEIKLEIQNPDPAVYQLRDSKSSDKSVCLFTDFDSQTNVSQSKDSDVYITDKCVLDMRSMDFKSNSAVAWSNKSDFACANAFNNSIIPEDTFFPSPESSCDVKLVEKSFETDTNLNFQILYEILLGKATLYAVLVSALVLMAMVKRKDSRGRAKRSGSGVKQTLNFDLLKLAGDVESNPGPTSMDWIWRILFLVGAATGAHSFEQVQLVQSGAEVKKPGASVKVSCKASGYTFTNYGMNWVKQAPGQGLKWMGWINTYTGEPTYADDFKGRVTMTSDTSTSTAYLELHNLRSDDTAVYYCARWSWSDGYYVYFDYWGQGTTVTVSSTREDLKNVFPPEVAVFEPSEAEISHTQKATLVCLATGFYPDHVELSWWVNGKEVHSGVCTDPQPLKEQPALNDSRYCLSSRLRVSATFWQNPRNHFRCQVQFYGLSENDEWTQDRAKPVTQIVSAEAWGRADCGFTSESYQQGVLSATNLSVIGFRILLLKVAGFNLLMTLRLWSS

SEQ ID NO: 13864 - protein, 764 aa, synthetic construct
MALPVTALLLPLALLLHAARPEVQLVESGGGLVQPGGSLRLSCAASGFSFSDFWMSWVRQAPGKGLEWVATISQAGSEKDYVDSVKGRFTISRDNAKKSLYLQMNSLRAEDTAVYYCASGVYSFDYRGQGTLVTVSSGTGGGGSGGGGSGGGGSEFDEIVLTQSPGSLAVSPGERVTMSCKSSQSVFFSSSQKNYLAWYQQIPGQSPRLLIYWASTRESGVPDRFTGSGSGTDFTLTISSVQPEDLAIYYCHQYLSSRTFGQGTKLEIKRLEIQNPDPAVYQLRDSKSSDKSVCLFTDFDSQTNVSQSKDSDVYITDKCVLDMRSMDFKSNSAVAWSNKSDFACANAFNNSIIPEDTFFPSPESSCDVKLVEKSFETDTNLNFQILYEILLGKATLYAVLVSALVLMAMVKRKDSRGRAKRSGSGVKQTLNFDLLKLAGDVESNPGPTSMDWIWRILFLVGAATGAHSFEQVQLQQPGAEVVKPGASVKMSCKASGYTFTSYYIHWIKQTPGQGLEWVGVIYPGNDDISYNQKFQGKATLTADKSSTTAYMQLSSLTSEDSAVYYCAREVRLRYFDVWGQGTTVTVSSTREDLKNVFPPEVAVFEPSEAEISHTQKATLVCLATGFYPDHVELSWWVNGKEVHSGVCTDPQPLKEQPALNDSRYCLSSRLRVSATFWQNPRNHFRCQVQFYGLSENDEWTQDRAKPVTQIVSAEAWGRADCGFTSESYQQGVLSATNLSVIGFRILLLKVAGFNLLMTLRLWSS

SEQ ID NO: 13865 - protein, 768 aa, synthetic construct
MALPVTALLLPLALLLHAARPEVQLVESGGGLVQPGGSLRLSCAASGFSFSDFWMSWVRQAPGKGLEWVATISQAGSEKDYVDSVKGRFTISRDNAKKSLYLQMNSLRAEDTAVYYCASGVYSFDYRGQGTLVTVSSGTGGGGSGGGGSGGGGSEFDVLLTQSPLSLPVTLGQPASISCRSSQTIVHSNGNTYLEWFQQRPGQSPRLLIYQVSNRFSGVPDRFSGSGSGTDFTLKISRVEAEDVGVYYCFQGSHVPRTFGGGTKVEIKRALEIQNPDPAVYQLRDSKSSDKSVCLFTDFDSQTNVSQSKDSDVYITDKCVLDMRSMDFKSNSAVAWSNKSDFACANAFNNSIIPEDTFFPSPESSCDVKLVEKSFETDTNLNFQILYEILLGKATLYAVLVSALVLMAMVKRKDSRGRAKRSGSGVKQTLNFDLLKLAGDVESNPGPTSMDWIWRILFLVGAATGAHSFEQIQLVQSGSELKKPGASVKVSCKASGYTFTNYGMNWVRQAPGQGLKWMGWINTNTGEPKYAEEFKGRFALSLDTSVSTAYLQINSLKAEDTAVYFCARGYGNYARGAWLAYWGQGTLVTVSSTREDLKNVFPPEVAVFEPSEAEISHTQKATLVCLATGFYPDHVELSWWVNGKEVHSGVCTDPQPLKEQPALNDSRYCLSSRLRVSATFWQNPRNHFRCQVQFYGLSENDEWTQDRAKPVTQIVSAEAWGRADCGFTSESYQQGVLSATNLSVIGFRILLLKVAGFNLLMTLRLWSS

SEQ ID NO: 13866 - protein, 753 aa, synthetic construct
MALPVTALLLPLALLLHAARPEVQLVESGGGLVQPGGSLRLSCAASGFSFSDFWMSWVRQAPGKGLEWVATISQAGSEKDYVDSVKGRFTISRDNAKKSLYLQMNSLRAEDTAVYYCASGVYSFDYRGQGTLVTVSSGTGGGGSGGGGSGGGGSEFDEIVLTQSPATLSLSPGERATLSCSASSSINYIYWLQQKPGQAPRILIYLTSNLASGVPARFSGSGSGTDFTLTISSLEPEDFAVYYCLQWSSNPLTFGGGTKVEIKLEIQNPDPAVYQLRDSKSSDKSVCLFTDFDSQTNVSQSKDSDVYITDKCVLDMRSMDFKSNSAVAWSNKSDFACANAFNNSIIPEDTFFPSPESSCDVKLVEKSFETDTNLNFQILYEILLGKATLYAVLVSALVLMAMVKRKDSRGRAKRSGSGVKQTLNFDLLKLAGDVESNPGPTSMDWIWRILFLVGAATGAHSFEEVQLVESGGGLVKPGGSLRLSCAASGFTFSSYDMSWVRQAPGKGLEWVSTISSGGSYTYYLDSIKGRFTISRDNAKNSLYLQMNSLRAEDTAVYYCARQGLDYWGRGTLVTVSSTREDLKNVFPPEVAVFEPSEAEISHTQKATLVCLATGFYPDHVELSWWVNGKEVHSGVCTDPQPLKEQPALNDSRYCLSSRLRVSATFWQNPRNHFRCQVQFYGLSENDEWTQDRAKPVTQIVSAEAWGRADCGFTSESYQQGVLSATNLSVIGFRILLLKVAGFNLLMTLRLWSS

SEQ ID NO: 13867 - protein, 762 aa, synthetic construct
MALPVTALLLPLALLLHAARPEVQLVESGGGLVQPGGSLRLSCAASGFSFSDFWMSWVRQAPGKGLEWVATISQAGSEKDYVDSVKGRFTISRDNAKKSLYLQMNSLRAEDTAVYYCASGVYSFDYRGQGTLVTVSSGTGGGGSGGGGSGGGGSEFDIVMTQSPDSLAVSLGERATINCRASKSVSTSGYSFMHWYQQKPGQPPKLLIYLASNLESGVPDRFSGSGSGTDFTLTISSLQAEDVAVYYCQHSREVPWTFGQGTKVEIKRLEIQNPDPAVYQLRDSKSSDKSVCLFTDFDSQTNVSQSKDSDVYITDKCVLDMRSMDFKSNSAVAWSNKSDFACANAFNNSIIPEDTFFPSPESSCDVKLVEKSFETDTNLNFQILYEILLGKATLYAVLVSALVLMAMVKRKDSRGRAKRSGSGVKQTLNFDLLKLAGDVESNPGPTSMDWIWRILFLVGAATGAHSFEQVQLVQSGAEVKKPGASVKVSCKASGYTFTNYGMNWVRQAPGQGLEWMGWINTYTGEPTYADAFKGRFAFSLDTSTSTAYLQINSLRSDDTAVYYCARDYGDYGMDYWGQGTTVTVSSTREDLKNVFPPEVAVFEPSEAEISHTQKATLVCLATGFYPDHVELSWWVNGKEVHSGVCTDPQPLKEQPALNDSRYCLSSRLRVSATFWQNPRNHFRCQVQFYGLSENDEWTQDRAKPVTQIVSAEAWGRADCGFTSESYQQGVLSATNLSVIGFRILLLKVAGFNLLMTLRLWSS

SEQ ID NO: 13868 - protein, 758 aa, synthetic construct
MALPVTALLLPLALLLHAARPEVQLVESGGGLVQPGGSLRLSCAASGFSFSDFWMSWVRQAPGKGLEWVATISQAGSEKDYVDSVKGRFTISRDNAKKSLYLQMNSLRAEDTAVYYCASGVYSFDYRGQGTLVTVSSGTGGGGSGGGGSGGGGSEFDIVMTQTPLTLSVTIGQPASISCKSSQSLLDSDGKTYLNWLLQRPGQSPERLIYLVSKLDSGVPDRFTGSGSGTDFTLKISRVEAEDLGVYCCWQGTHFPYTFGGGTKVEIKGLEIQNPDPAVYQLRDSKSSDKSVCLFTDFDSQTNVSQSKDSDVYITDKCVLDMRSMDFKSNSAVAWSNKSDFACANAFNNSIIPEDTFFPSPESSCDVKLVEKSFETDTNLNFQILYEILLGKATLYAVLVSALVLMAMVKRKDSRGRAKRSGSGVKQTLNFDLLKLAGDVESNPGPTSMDWIWRILFLVGAATGAHSFEQVQLQQPGAELVRPGASVKLSCKASGYTFTSYWMNWVKQRPGQGLEWIGMIDPSDSETHYNHIFKDKATLTVDKSSSTAYLQLSSLTSEDSAVYYCARNLYLWGQGTSVTVSSTREDLKNVFPPEVAVFEPSEAEISHTQKATLVCLATGFYPDHVELSWWVNGKEVHSGVCTDPQPLKEQPALNDSRYCLSSRLRVSATFWQNPRNHFRCQVQFYGLSENDEWTQDRAKPVTQIVSAEAWGRADCGFTSESYQQGVLSATNLSVIGFRILLLKVAGFNLLMTLRLWSS

SEQ ID NO: 13869 - protein, 766 aa, synthetic construct
MALPVTALLLPLALLLHAARPEVQLVESGGGLVQPGGSLRLSCAASGFSFSDFWMSWVRQAPGKGLEWVATISQAGSEKDYVDSVKGRFTISRDNAKKSLYLQMNSLRAEDTAVYYCASGVYSFDYRGQGTLVTVSSGTGGGGSGGGGSGGGGSEFDIVMTQSPDSLAVSLGERATINCESSQSLLNSGNQKNYLTWYQQKPGQPPKPLIYWASTRESGVPDRFSGSGSGTDFTLTISSLQAEDVAVYYCQNDYSYPYTFGQGTKLEIKRLEIQNPDPAVYQLRDSKSSDKSVCLFTDFDSQTNVSQSKDSDVYITDKCVLDMRSMDFKSNSAVAWSNKSDFACANAFNNSIIPEDTFFPSPESSCDVKLVEKSFETDTNLNFQILYEILLGKATLYAVLVSALVLMAMVKRKDSRGRAKRSGSGVKQTLNFDLLKLAGDVESNPGPTSMDWIWRILFLVGAATGAHSFEEVQLVQSGAEVKKPGESLKISCKGSGYSFTDYYMKWARQMPGKGLEWMGDIIPSNGATFYNQKFKGQVTISADKSISTTYLQWSSLKASDTAMYYCARSHLLRASWFAYWGQGTMVTVSSTREDLKNVFPPEVAVFEPSEAEISHTQKATLVCLATGFYPDHVELSWWVNGKEVHSGVCTDPQPLKEQPALNDSRYCLSSRLRVSATFWQNPRNHFRCQVQFYGLSENDEWTQDRAKPVTQIVSAEAWGRADCGFTSESYQQGVLSATNLSVIGFRILLLKVAGFNLLMTLRLWSS

SEQ ID NO: 13870 - protein, 761 aa, synthetic construct
MALPVTALLLPLALLLHAARPEVQLVESGGGLVQPGGSLRLSCAASGFSFSDFWMSWVRQAPGKGLEWVATISQAGSEKDYVDSVKGRFTISRDNAKKSLYLQMNSLRAEDTAVYYCASGVYSFDYRGQGTLVTVSSGTGGGGSGGGGSGGGGSEFDIQMTQSTSSLSASLGDRVTISCSASQGINNYLNWYQQKPDGTVELLIYYTSTLQSGVPSRFSGSGSGTDYSLTISNLEPEDIGTYYCQQYSKLPRTFGGGTKLEIKLEIQNPDPAVYQLRDSKSSDKSVCLFTDFDSQTNVSQSKDSDVYITDKCVLDMRSMDFKSNSAVAWSNKSDFACANAFNNSIIPEDTFFPSPESSCDVKLVEKSFETDTNLNFQILYEILLGKATLYAVLVSALVLMAMVKRKDSRGRAKRSGSGVKQTLNFDLLKLAGDVESNPGPTSMDWIWRILFLVGAATGAHSFEQVQLQQSGSELMMPGASVKISCKATGYTFSNYWIEWVKQRPGHGLEWIGEILPGTGRTIYNEKFKGKATFTADISSNTVQMQLSSLTSEDSAVYYCARRDYYGNFYYAMDYWGQGTSVTVSSTREDLKNVFPPEVAVFEPSEAEISHTQKATLVCLATGFYPDHVELSWWVNGKEVHSGVCTDPQPLKEQPALNDSRYCLSSRLRVSATFWQNPRNHFRCQVQFYGLSENDEWTQDRAKPVTQIVSAEAWGRADCGFTSESYQQGVLSATNLSVIGFRILLLKVAGFNLLMTLRLWSS

SEQ ID NO: 13871 - protein, 756 aa, synthetic construct
MALPVTALLLPLALLLHAARPEVQLVESGGGLVQPGGSLRLSCAASGFSFSDFWMSWVRQAPGKGLEWVATISQAGSEKDYVDSVKGRFTISRDNAKKSLYLQMNSLRAEDTAVYYCASGVYSFDYRGQGTLVTVSSGTGGGGSGGGGSGGGGSEFDIQMTQSPASLSVSVGETVTITCRASENIYSNLAWYQQKQGKSPQLLVYAATNLADGVPSRFSGSGSGTQYSLKINSLQSEDFGSYYCQHFWGTWTFGGGTTLEIKLEIQNPDPAVYQLRDSKSSDKSVCLFTDFDSQTNVSQSKDSDVYITDKCVLDMRSMDFKSNSAVAWSNKSDFACANAFNNSIIPEDTFFPSPESSCDVKLVEKSFETDTNLNFQILYEILLGKATLYAVLVSALVLMAMVKRKDSRGRAKRSGSGVKQTLNFDLLKLAGDVESNPGPTSMDWIWRILFLVGAATGAHSFEEVQLQQSGPELVKPGASVKMSCKASGYTFTDYYMKWMKQSHGKSLEWIGDINPNNGGTTYNQKFKGKATLTVDKSSSTAYMQLNSLTSEDSAVYYCARDYGYGYFDYWGQGTTLTVSSTREDLKNVFPPEVAVFEPSEAEISHTQKATLVCLATGFYPDHVELSWWVNGKEVHSGVCTDPQPLKEQPALNDSRYCLSSRLRVSATFWQNPRNHFRCQVQFYGLSENDEWTQDRAKPVTQIVSAEAWGRADCGFTSESYQQGVLSATNLSVIGFRILLLKVAGFNLLMTLRLWSS

SEQ ID NO: 13872 - protein, 759 aa, synthetic construct
MALPVTALLLPLALLLHAARPEVQLVESGGGLVQPGGSLRLSCAASGFSFSDFWMSWVRQAPGKGLEWVATISQAGSEKDYVDSVKGRFTISRDNAKKSLYLQMNSLRAEDTAVYYCASGVYSFDYRGQGTLVTVSSGTGGGGSGGGGSGGGGSEFEIVLTQSPGTLSLSPGERATLSCRASQSVGGYLAWYQQKPGQAPRLLIYDASNRATGIPARFSGSGSGTDFTLTISSLEPEDFAVYYCQQRNNWPPMYTFGQGTKLEIKRLEIQNPDPAVYQLRDSKSSDKSVCLFTDFDSQTNVSQSKDSDVYITDKCVLDMRSMDFKSNSAVAWSNKSDFACANAFNNSIIPEDTFFPSPESSCDVKLVEKSFETDTNLNFQILYEILLGKATLYAVLVSALVLMAMVKRKDSRGRAKRSGSGVKQTLNFDLLKLAGDVESNPGPTSMDWIWRILFLVGAATGAHSFEQVQLVQSGAEVKKPGSSVKVSCKASGGTFSSYAISWVRQAPGQGLEWMGGIIPILGTANYAQKFQGRVTITADESTSTAYMELSSLRSEDTAVYYCARWGGGAFDIWGQGTMVTVSSTREDLKNVFPPEVAVFEPSEAEISHTQKATLVCLATGFYPDHVELSWWVNGKEVHSGVCTDPQPLKEQPALNDSRYCLSSRLRVSATFWQNPRNHFRCQVQFYGLSENDEWTQDRAKPVTQIVSAEAWGRADCGFTSESYQQGVLSATNLSVIGFRILLLKVAGFNLLMTLRLWSS

SEQ ID NO: 13873 - protein, 754 aa, synthetic construct
MALPVTALLLPLALLLHAARPEVQLVESGGGLVQPGGSLRLSCAASGFSFSDFWMSWVRQAPGKGLEWVATISQAGSEKDYVDSVKGRFTISRDNAKKSLYLQMNSLRAEDTAVYYCASGVYSFDYRGQGTLVTVSSGTGGGGSGGGGSGGGGSEFQIVLTQSPALMSASPGEKVTMTCSASSSVRYMYWYQQKPRSSPKPWIHLTSNLASGVPARFSGSGSGTSYSLTISSMEAEDAATYYCQQWSSHPFTFGSGTKLEIKLEIQNPDPAVYQLRDSKSSDKSVCLFTDFDSQTNVSQSKDSDVYITDKCVLDMRSMDFKSNSAVAWSNKSDFACANAFNNSIIPEDTFFPSPESSCDVKLVEKSFETDTNLNFQILYEILLGKATLYAVLVSALVLMAMVKRKDSRGRAKRSGSGVKQTLNFDLLKLAGDVESNPGPTSMDWIWRILFLVGAATGAHSFEDVQLQESGPGLVKPSQSLSLTCTVTGFSITSDYSWNWIRQFPGNKLEWMGYISYSGHTSYNPSLESRISITRDTSKNQFFLQLNSVTTEDTATYYCTRGNWDVVYWGQGTLVTVSATREDLKNVFPPEVAVFEPSEAEISHTQKATLVCLATGFYPDHVELSWWVNGKEVHSGVCTDPQPLKEQPALNDSRYCLSSRLRVSATFWQNPRNHFRCQVQFYGLSENDEWTQDRAKPVTQIVSAEAWGRADCGFTSESYQQGVLSATNLSVIGFRILLLKVAGFNLLMTLRLWSS

SEQ ID NO: 13874 - protein, 764 aa, synthetic construct
MALPVTALLLPLALLLHAARPEVQLVESGGGLVQPGGSLRLSCAASGFSFSDFWMSWVRQAPGKGLEWVATISQAGSEKDYVDSVKGRFTISRDNAKKSLYLQMNSLRAEDTAVYYCASGVYSFDYRGQGTLVTVSSGTGGGGSGGGGSGGGGSEFDVVMTQSPLSLPVTLGQPASISCRSSQSIVHSDGNTYLEWYQQRPGQSPRRLIYKVSNRFSGVPDRFSGSGSGTDFTLKISRVEAEDVGVYYCFQGSHAPWTFGGGTKVEIKLEIQNPDPAVYQLRDSKSSDKSVCLFTDFDSQTNVSQSKDSDVYITDKCVLDMRSMDFKSNSAVAWSNKSDFACANAFNNSIIPEDTFFPSPESSCDVKLVEKSFETDTNLNFQILYEILLGKATLYAVLVSALVLMAMVKRKDSRGRAKRSGSGVKQTLNFDLLKLAGDVESNPGPTSMDWIWRILFLVGAATGAHSFEEVQLVESGGGLVQPGGSLRLSCAASGFTFSSYGMHWVRQAPGKGLEWVAYITTRSSTIYYADSVKGRFTISRDNAKNSLYLQMNSLRAEDTAVYYCTREPLTGYYAMDYWGQGTSVTVSSTREDLKNVFPPEVAVFEPSEAEISHTQKATLVCLATGFYPDHVELSWWVNGKEVHSGVCTDPQPLKEQPALNDSRYCLSSRLRVSATFWQNPRNHFRCQVQFYGLSENDEWTQDRAKPVTQIVSAEAWGRADCGFTSESYQQGVLSATNLSVIGFRILLLKVAGFNLLMTLRLWSS

SEQ ID NO: 13875 - protein, 756 aa, synthetic construct
MALPVTALLLPLALLLHAARPEVQLVESGGGLVQPGGSLRLSCAASGFSFSDFWMSWVRQAPGKGLEWVATISQAGSEKDYVDSVKGRFTISRDNAKKSLYLQMNSLRAEDTAVYYCASGVYSFDYRGQGTLVTVSSGTGGGGSGGGGSGGGGSEFDIQMTQSPSSLSASVGDRVTITCRASQSISLWLNWYQQKPGKAPKLLIYAASTLQSGVPSRFSGSGSGTDFTLTISSLQPEDFATYYCQQYYTSPYTFGQGTKVEIKRLEIQNPDPAVYQLRDSKSSDKSVCLFTDFDSQTNVSQSKDSDVYITDKCVLDMRSMDFKSNSAVAWSNKSDFACANAFNNSIIPEDTFFPSPESSCDVKLVEKSFETDTNLNFQILYEILLGKATLYAVLVSALVLMAMVKRKDSRGRAKRSGSGVKQTLNFDLLKLAGDVESNPGPTSMDWIWRILFLVGAATGAHSFEQVQLLESGGGLVQPGGSLRLSCAASGFTFSSYAMSWVRQAPGKGLEWVSVIRSSGSSTYYADSVKGRFTISRDNSKNTLYLQMNSLRAEDTAVYYCARGGGYFDYWGQGTLVTVSSTREDLKNVFPPEVAVFEPSEAEISHTQKATLVCLATGFYPDHVELSWWVNGKEVHSGVCTDPQPLKEQPALNDSRYCLSSRLRVSATFWQNPRNHFRCQVQFYGLSENDEWTQDRAKPVTQIVSAEAWGRADCGFTSESYQQGVLSATNLSVIGFRILLLKVAGFNLLMTLRLWSS

SEQ ID NO: 13876 - protein, 759 aa, synthetic construct
MALPVTALLLPLALLLHAARPEVQLVESGGGLVQPGGSLRLSCAASGFSFSDFWMSWVRQAPGKGLEWVATISQAGSEKDYVDSVKGRFTISRDNAKKSLYLQMNSLRAEDTAVYYCASGVYSFDYRGQGTLVTVSSGTGGGGSGGGGSGGGGSEFDIQMTQSPSSLSASVGDRVTITCRASQSISSYLNWYQQKPGKAPKLLIYAVSTLQSGVPSRFSGSGSGTDFTLTISSLQPEDFATYYCQQSGTFPPTTFGQGTKVEIKRLEIQNPDPAVYQLRDSKSSDKSVCLFTDFDSQTNVSQSKDSDVYITDKCVLDMRSMDFKSNSAVAWSNKSDFACANAFNNSIIPEDTFFPSPESSCDVKLVEKSFETDTNLNFQILYEILLGKATLYAVLVSALVLMAMVKRKDSRGRAKRSGSGVKQTLNFDLLKLAGDVESNPGPTSMDWIWRILFLVGAATGAHSFEQVQLLESGGGLVQPGGSLRLSCAASGFTFSSHGMHWVRQAPGKGLEWVSVISGSGSNTGYADSVKGRFTISRDNSKNTLYLQMNSLRAEDTAVYYCARQWGSYAFDSWGQGTLVTVSSTREDLKNVFPPEVAVFEPSEAEISHTQKATLVCLATGFYPDHVELSWWVNGKEVHSGVCTDPQPLKEQPALNDSRYCLSSRLRVSATFWQNPRNHFRCQVQFYGLSENDEWTQDRAKPVTQIVSAEAWGRADCGFTSESYQQGVLSATNLSVIGFRILLLKVAGFNLLMTLRLWSS

SEQ ID NO: 13877 - protein, 769 aa, synthetic construct
MALPVTALLLPLALLLHAARPEVQLVESGGGLVQPGGSLRLSCAASGFSFSDFWMSWVRQAPGKGLEWVATISQAGSEKDYVDSVKGRFTISRDNAKKSLYLQMNSLRAEDTAVYYCASGVYSFDYRGQGTLVTVSSGTGGGGSGGGGSGGGGSEFDIVMSQSPSSLAVSVGEKVTMSCKSSQSLLHSSNQKNYLAWYQQKPGQSPKVLIYWASTRESGVPDRFTGSGSGTDFTLTITSVKSEDLAVYYCQQYYSYPWTFGGGTRLEIKRLEIQNPDPAVYQLRDSKSSDKSVCLFTDFDSQTNVSQSKDSDVYITDKCVLDMRSMDFKSNSAVAWSNKSDFACANAFNNSIIPEDTFFPSPESSCDVKLVEKSFETDTNLNFQILYEILLGKATLYAVLVSALVLMAMVKRKDSRGRAKRSGSGVKQTLNFDLLKLAGDVESNPGPTSMDWIWRILFLVGAATGAHSFEEVQLQQSVAELVKPGASVKMSCKVSGYTLTDHTIHWMKQRPEQGLEWIGYIYPRDGITGYNEKFKGKATLTADTSSSTAYMQLNSLTSEDSAVYFCARWGYSYRNYAYYYDYWGQGTTLTVSSTREDLKNVFPPEVAVFEPSEAEISHTQKATLVCLATGFYPDHVELSWWVNGKEVHSGVCTDPQPLKEQPALNDSRYCLSSRLRVSATFWQNPRNHFRCQVQFYGLSENDEWTQDRAKPVTQIVSAEAWGRADCGFTSESYQQGVLSATNLSVIGFRILLLKVAGFNLLMTLRLWSS

SEQ ID NO: 13878 - protein, 766 aa, synthetic construct
MALPVTALLLPLALLLHAARPEVQLVESGGGLVQPGGSLRLSCAASGFSFSDFWMSWVRQAPGKGLEWVATISQAGSEKDYVDSVKGRFTISRDNAKKSLYLQMNSLRAEDTAVYYCASGVYSFDYRGQGTLVTVSSGTGGGGSGGGGSGGGGSEFEIVLTQSPGTLSLSPGERATLSCRASQSVSSSYLAWYQQKPGQAPRLLIYGTSSRATGIPDRFSGSGSGTDFTLTISRLEPEDFAVYYCQQYGSSPFTFGGGTKVEIKRLEIQNPDPAVYQLRDSKSSDKSVCLFTDFDSQTNVSQSKDSDVYITDKCVLDMRSMDFKSNSAVAWSNKSDFACANAFNNSIIPEDTFFPSPESSCDVKLVEKSFETDTNLNFQILYEILLGKATLYAVLVSALVLMAMVKRKDSRGRAKRSGSGVKQTLNFDLLKLAGDVESNPGPTSMDWIWRILFLVGAATGAHSFEQVQLQESGPGLAKPSETLSLTCTVSGDSITSYYWSWIRQPPGKGLEWIGYIYYSGSTNYNPSLKSRVTISVDTSKNQFSLKLSSVTAADTAVYYCARDQRRIAAAGTHFYGMDVWGQGTTVTVSSTREDLKNVFPPEVAVFEPSEAEISHTQKATLVCLATGFYPDHVELSWWVNGKEVHSGVCTDPQPLKEQPALNDSRYCLSSRLRVSATFWQNPRNHFRCQVQFYGLSENDEWTQDRAKPVTQIVSAEAWGRADCGFTSESYQQGVLSATNLSVIGFRILLLKVAGFNLLMTLRLWSS

SEQ ID NO: 13879 - protein, 758 aa, synthetic construct
MALPVTALLLPLALLLHAARPEVQLVESGGGLVQPGGSLRLSCAASGFSFSDFWMSWVRQAPGKGLEWVATISQAGSEKDYVDSVKGRFTISRDNAKKSLYLQMNSLRAEDTAVYYCASGVYSFDYRGQGTLVTVSSGTGGGGSGGGGSGGGGSEFDILLTQSPVILSVSPGERVSFSCRASQSIGTNIHWYQQRTNGSPRLLIKYASESISGIPSRFSGSGSGTDFTLSINSVESEDIADYYCQQNNNWPTTFGAGTKLELKLEIQNPDPAVYQLRDSKSSDKSVCLFTDFDSQTNVSQSKDSDVYITDKCVLDMRSMDFKSNSAVAWSNKSDFACANAFNNSIIPEDTFFPSPESSCDVKLVEKSFETDTNLNFQILYEILLGKATLYAVLVSALVLMAMVKRKDSRGRAKRSGSGVKQTLNFDLLKLAGDVESNPGPTSMDWIWRILFLVGAATGAHSFEQVQLKQSGPGLVQPSQSLSITCTVSGFSLTNYGVHWVRQSPGKGLEWLGVIWSGGNTDYNTPFTSRLSINKDNSKSQVFFKMNSLQSNDTAIYYCARALTYYDYEFAYWGQGTLVTVSATREDLKNVFPPEVAVFEPSEAEISHTQKATLVCLATGFYPDHVELSWWVNGKEVHSGVCTDPQPLKEQPALNDSRYCLSSRLRVSATFWQNPRNHFRCQVQFYGLSENDEWTQDRAKPVTQIVSAEAWGRADCGFTSESYQQGVLSATNLSVIGFRILLLKVAGFNLLMTLRLWSS

SEQ ID NO: 13880 - protein, 751 aa, synthetic construct
MALPVTALLLPLALLLHAARPEVQLVESGGGLVQPGGSLRLSCAASGFSFSDFWMSWVRQAPGKGLEWVATISQAGSEKDYVDSVKGRFTISRDNAKKSLYLQMNSLRAEDTAVYYCASGVYSFDYRGQGTLVTVSSGTGGGGSGGGGSGGGGSEFMTQSPKFLLVSAGDRVTLTCKASQSVNNDVYWYQQEPGQSPKLLIYWASTRESGVPDRFTGSGSGTDFTLTISSVQAEDLAVYYCKQSYNLYTFGGGTKLEIKRLEIQNPDPAVYQLRDSKSSDKSVCLFTDFDSQTNVSQSKDSDVYITDKCVLDMRSMDFKSNSAVAWSNKSDFACANAFNNSIIPEDTFFPSPESSCDVKLVEKSFETDTNLNFQILYEILLGKATLYAVLVSALVLMAMVKRKDSRGRAKRSGSGVKQTLNFDLLKLAGDVESNPGPTSMDWIWRILFLVGAATGAHSFEESGRGLVQPGGSRKLSCAASGFTFSTSGMHWVRQAPEKGLEWVAYISSGSTTIYHADTVKGRFTISRDNPKNTLFLQMTSLRSEDTAMYYCCARSGQFGNYFDYWGQGTTLTVSSTREDLKNVFPPEVAVFEPSEAEISHTQKATLVCLATGFYPDHVELSWWVNGKEVHSGVCTDPQPLKEQPALNDSRYCLSSRLRVSATFWQNPRNHFRCQVQFYGLSENDEWTQDRAKPVTQIVSAEAWGRADCGFTSESYQQGVLSATNLSVIGFRILLLKVAGFNLLMTLRLWSS

SEQ ID NO: 13881 - protein, 756 aa, synthetic construct
MALPVTALLLPLALLLHAARPEVQLVESGGGLVQPGGSLRLSCAASGFSFSDFWMSWVRQAPGKGLEWVATISQAGSEKDYVDSVKGRFTISRDNAKKSLYLQMNSLRAEDTAVYYCASGVYSFDYRGQGTLVTVSSGTGGGGSGGGGSGGGGSEFQSPSSLAVSAGEKVTMSCKSSQSLLNSRTRKNYLAWYQQKPGQSPKLLIYWASTRESGVPDRFTGSGSGTDFTLTISSVQAEDLAVYYCKQSNLYTFGGGTKLEIKLEIQNPDPAVYQLRDSKSSDKSVCLFTDFDSQTNVSQSKDSDVYITDKCVLDMRSMDFKSNSAVAWSNKSDFACANAFNNSIIPEDTFFPSPESSCDVKLVEKSFETDTNLNFQILYEILLGKATLYAVLVSALVLMAMVKRKDSRGRAKRSGSGVKQTLNFDLLKLAGDVESNPGPTSMDWIWRILFLVGAATGAHSFEQVQLEESGPELVKPGASVKLSCKASGYTFTEYIIHWVKQRSGQGLEWIGWFYPGSGSIKYNEKFKDKATLTADKSSSTVYMELSGLTSEDSAVYFCARHDGYSYFDYWGQGTTLTVSSTREDLKNVFPPEVAVFEPSEAEISHTQKATLVCLATGFYPDHVELSWWVNGKEVHSGVCTDPQPLKEQPALNDSRYCLSSRLRVSATFWQNPRNHFRCQVQFYGLSENDEWTQDRAKPVTQIVSAEAWGRADCGFTSESYQQGVLSATNLSVIGFRILLLKVAGFNLLMTLRLWSS

SEQ ID NO: 13882 - protein, 759 aa, synthetic construct
MALPVTALLLPLALLLHAARPEVQLVESGGGLVQPGGSLRLSCAASGFSFSDFWMSWVRQAPGKGLEWVATISQAGSEKDYVDSVKGRFTISRDNAKKSLYLQMNSLRAEDTAVYYCASGVYSFDYRGQGTLVTVSSGTGGGGSGGGGSGGGGSEFDIQMTQSPSSLSASLGERVSLTCRATQELSGYLSWLQQKPDGTIKRLIYAASTLDSGVPKRFSGNRSGSDYSLTISSLESEDFADYYCLQYAIYPYTFGGGTKLEIKLEIQNPDPAVYQLRDSKSSDKSVCLFTDFDSQTNVSQSKDSDVYITDKCVLDMRSMDFKSNSAVAWSNKSDFACANAFNNSIIPEDTFFPSPESSCDVKLVEKSFETDTNLNFQILYEILLGKATLYAVLVSALVLMAMVKRKDSRGRAKRSGSGVKQTLNFDLLKLAGDVESNPGPTSMDWIWRILFLVGAATGAHSFEEVQLQQSGPELVKPGASVKMSCKASGYTFTSYFIHWVKQKPGQGLEWIGFINPYNDGSKYNEKFKGKATLTSDKSSSTAYMELSSLTSEDSAVYYCTRDDGYYGYAMDYWGQGTSVTVSSTREDLKNVFPPEVAVFEPSEAEISHTQKATLVCLATGFYPDHVELSWWVNGKEVHSGVCTDPQPLKEQPALNDSRYCLSSRLRVSATFWQNPRNHFRCQVQFYGLSENDEWTQDRAKPVTQIVSAEAWGRADCGFTSESYQQGVLSATNLSVIGFRILLLKVAGFNLLMTLRLWSS

SEQ ID NO: 13883 - protein, 764 aa, synthetic construct
MALPVTALLLPLALLLHAARPEVQLVESGGGLVQPGGSLRLSCAASGFSFSDFWMSWVRQAPGKGLEWVATISQAGSEKDYVDSVKGRFTISRDNAKKSLYLQMNSLRAEDTAVYYCASGVYSFDYRGQGTLVTVSSGTGGGGSGGGGSGGGGSEFDTIVLTQSPASLAVSLGQRATISCRASESVDSYGNSFMHWYQQKPGQPPKLLIYLASNLESGVPARFSGSGSRTDFTLTIDPVEADDAATYYCQQNNYDPWTFGGGTKLEIKLEIQNPDPAVYQLRDSKSSDKSVCLFTDFDSQTNVSQSKDSDVYITDKCVLDMRSMDFKSNSAVAWSNKSDFACANAFNNSIIPEDTFFPSPESSCDVKLVEKSFETDTNLNFQILYEILLGKATLYAVLVSALVLMAMVKRKDSRGRAKRSGSGVKQTLNFDLLKLAGDVESNPGPTSMDWIWRILFLVGAATGAHSFEEVQLQQSGPELVKPGASVKMSCKASGYTFTSYVMHWVKQKPGQGLEWIGYINPYNDGTKYNEKFKGKATLTSDTSSSTAYMELNSLTSEDSAVYFCARPIYFDNDYFDYWGQGTTLKVSSTREDLKNVFPPEVAVFEPSEAEISHTQKATLVCLATGFYPDHVELSWWVNGKEVHSGVCTDPQPLKEQPALNDSRYCLSSRLRVSATFWQNPRNHFRCQVQFYGLSENDEWTQDRAKPVTQIVSAEAWGRADCGFTSESYQQGVLSATNLSVIGFRILLLKVAGFNLLMTLRLWSS

SEQ ID NO: 13884 - protein, 759 aa, synthetic construct
MALPVTALLLPLALLLHAARPEVQLVESGGGLVQPGGSLRLSCAASGFSFSDFWMSWVRQAPGKGLEWVATISQAGSEKDYVDSVKGRFTISRDNAKKSLYLQMNSLRAEDTAVYYCASGVYSFDYRGQGTLVTVSSGTGGGGSGGGGSGGGGSEFDIQMTQSPSSLSASVGDRVTITCKASQDVGIAVAWYQQKPGKVPKLLIYWASTRHTGVPDRFSGSGSGTDFTLTISSLQPEDVATYYCQQYSSYPYTFGQGTKVEIKRLEIQNPDPAVYQLRDSKSSDKSVCLFTDFDSQTNVSQSKDSDVYITDKCVLDMRSMDFKSNSAVAWSNKSDFACANAFNNSIIPEDTFFPSPESSCDVKLVEKSFETDTNLNFQILYEILLGKATLYAVLVSALVLMAMVKRKDSRGRAKRSGSGVKQTLNFDLLKLAGDVESNPGPTSMDWIWRILFLVGAATGAHSFEEVQLVESGGGLVQPGGSLRLSCAASGFDFSRYWMSWVRQAPGKGLEWIGEINPDSSTINYAPSLKDKFIISRDNAKNSLYLQMNSLRAEDTAVYYCARPDGNYWYFDVWGQGTLVTVSSTREDLKNVFPPEVAVFEPSEAEISHTQKATLVCLATGFYPDHVELSWWVNGKEVHSGVCTDPQPLKEQPALNDSRYCLSSRLRVSATFWQNPRNHFRCQVQFYGLSENDEWTQDRAKPVTQIVSAEAWGRADCGFTSESYQQGVLSATNLSVIGFRILLLKVAGFNLLMTLRLWSS

SEQ ID NO: 13885 - protein, 759 aa, synthetic construct
MALPVTALLLPLALLLHAARPEVQLVESGGGLVQPGGSLRLSCAASGFSFSDFWMSWVRQAPGKGLEWVATISQAGSEKDYVDSVKGRFTISRDNAKKSLYLQMNSLRAEDTAVYYCASGVYSFDYRGQGTLVTVSSGTGGGGSGGGGSGGGGSEFDIVMTQSQKSMSTSVGDRVSITCKASQDVITGVAWYQQKPGQSPKLLIYSASYRYTGVPDRFTGSGSGTDFTFTISNVQAEDLAVYYCQQHYSTPLTFGAGTKLELKLEIQNPDPAVYQLRDSKSSDKSVCLFTDFDSQTNVSQSKDSDVYITDKCVLDMRSMDFKSNSAVAWSNKSDFACANAFNNSIIPEDTFFPSPESSCDVKLVEKSFETDTNLNFQILYEILLGKATLYAVLVSALVLMAMVKRKDSRGRAKRSGSGVKQTLNFDLLKLAGDVESNPGPTSMDWIWRILFLVGAATGAHSFEQVQLQQPGAELVRPGASVKLSCKASGYSFTTYWMNWVKQRPGQGLEWIGMIHPSDSETRLNQKFKDKATLTVDKSSSTAYMQLSSPTSEDSAVYYCARSTMIATRAMDYWGQGTSVTVSSTREDLKNVFPPEVAVFEPSEAEISHTQKATLVCLATGFYPDHVELSWWVNGKEVHSGVCTDPQPLKEQPALNDSRYCLSSRLRVSATFWQNPRNHFRCQVQFYGLSENDEWTQDRAKPVTQIVSAEAWGRADCGFTSESYQQGVLSATNLSVIGFRILLLKVAGFNLLMTLRLWSS

SEQ ID NO: 13886 - protein, 765 aa, synthetic construct
MALPVTALLLPLALLLHAARPEVQLVESGGGLVQPGGSLRLSCAASGFSFSDFWMSWVRQAPGKGLEWVATISQAGSEKDYVDSVKGRFTISRDNAKKSLYLQMNSLRAEDTAVYYCASGVYSFDYRGQGTLVTVSSGTGGGGSGGGGSGGGGSEFQSVLTQPPSVSGAPGQRVTISCTGSGSNIGAPYDVSWYQQLPGTAPKLLIYHNNKRPSGVPDRFSGSKSGTSASLAITGLQAEDEADYYCATVEAGLSGSVFGGGTKLTVLGALEIQNPDPAVYQLRDSKSSDKSVCLFTDFDSQTNVSQSKDSDVYITDKCVLDMRSMDFKSNSAVAWSNKSDFACANAFNNSIIPEDTFFPSPESSCDVKLVEKSFETDTNLNFQILYEILLGKATLYAVLVSALVLMAMVKRKDSRGRAKRSGSGVKQTLNFDLLKLAGDVESNPGPTSMDWIWRILFLVGAATGAHSFEQVQLVQSGAEVKKPGASVKVSCKVSGYTLTELSIHWVRQAPGKGLEWMGGFDPEENEIVYAQRFQGRVTMTEDTSTDTAYMELSSLRSEDTAVYYCAIVGSFSPLTLGLWGQGTMVTVSSTREDLKNVFPPEVAVFEPSEAEISHTQKATLVCLATGFYPDHVELSWWVNGKEVHSGVCTDPQPLKEQPALNDSRYCLSSRLRVSATFWQNPRNHFRCQVQFYGLSENDEWTQDRAKPVTQIVSAEAWGRADCGFTSESYQQGVLSATNLSVIGFRILLLKVAGFNLLMTLRLWSS

SEQ ID NO: 13887 - protein, 765 aa, synthetic construct
MALPVTALLLPLALLLHAARPEVQLVESGGGLVQPGGSLRLSCAASGFSFSDFWMSWVRQAPGKGLEWVATISQAGSEKDYVDSVKGRFTISRDNAKKSLYLQMNSLRAEDTAVYYCASGVYSFDYRGQGTLVTVSSGTGGGGSGGGGSGGGGSEFQSVLTQPPSVSGAPGQRVTISCTGSGSNIGAPYDVSWYQQLPGTAPKLLIYHNNKRPSGVPDRFSGSKSGTSASLAITGLQAEDEADYYCQSYDSSSISTIFGGGTKLTVLGALEIQNPDPAVYQLRDSKSSDKSVCLFTDFDSQTNVSQSKDSDVYITDKCVLDMRSMDFKSNSAVAWSNKSDFACANAFNNSIIPEDTFFPSPESSCDVKLVEKSFETDTNLNFQILYEILLGKATLYAVLVSALVLMAMVKRKDSRGRAKRSGSGVKQTLNFDLLKLAGDVESNPGPTSMDWIWRILFLVGAATGAHSFEQVQLVQSGAEVKKPGASVKVSCKVSGYTLTELSIHWVRQAPGKGLEWMGGFDPEENEIVYAQRFQGRVTMTEDTSTDTAYMELSSLRSEDTAVYYCAIVGSFSGIAYRPWGQGTMVTVSSTREDLKNVFPPEVAVFEPSEAEISHTQKATLVCLATGFYPDHVELSWWVNGKEVHSGVCTDPQPLKEQPALNDSRYCLSSRLRVSATFWQNPRNHFRCQVQFYGLSENDEWTQDRAKPVTQIVSAEAWGRADCGFTSESYQQGVLSATNLSVIGFRILLLKVAGFNLLMTLRLWSS

SEQ ID NO: 13888 - protein, 753 aa, synthetic construct
MALPVTALLLPLALLLHAARPEVQLVESGGGLVQPGGSLRLSCAASGFSFSDFWMSWVRQAPGKGLEWVATISQAGSEKDYVDSVKGRFTISRDNAKKSLYLQMNSLRAEDTAVYYCASGVYSFDYRGQGTLVTVSSGTGGGGSGGGGSGGGGSEFDIQMTQSPSSLSASVGDRVTITCRASQGIRNNLAWYQQKPGKAPKRLIYAASNLQSGVPSRFTGSGSGTEFTLIVSSLQPEDFATYYCLQHHSYPLTSGGGTKVELEIQNPDPAVYQLRDSKSSDKSVCLFTDFDSQTNVSQSKDSDVYITDKCVLDMRSMDFKSNSAVAWSNKSDFACANAFNNSIIPEDTFFPSPESSCDVKLVEKSFETDTNLNFQILYEILLGKATLYAVLVSALVLMAMVKRKDSRGRAKRSGSGVKQTLNFDLLKLAGDVESNPGPTSMDWIWRILFLVGAATGAHSFEEVQVLESGGGLVQPGGSLRLSCAASGFTFSSYAMSWVRQAPGKGLEWVSAISGSGGSTNYADSVKGRFTISRDNSKNTLYLQMNSLRAEDTAVYYCAGSSGWSEYWGQGTLVTVSSTREDLKNVFPPEVAVFEPSEAEISHTQKATLVCLATGFYPDHVELSWWVNGKEVHSGVCTDPQPLKEQPALNDSRYCLSSRLRVSATFWQNPRNHFRCQVQFYGLSENDEWTQDRAKPVTQIVSAEAWGRADCGFTSESYQQGVLSATNLSVIGFRILLLKVAGFNLLMTLRLWSS

SEQ ID NO: 13889 - protein, 759 aa, synthetic construct
MALPVTALLLPLALLLHAARPEVQLVESGGGLVQPGGSLRLSCAASGFSFSDFWMSWVRQAPGKGLEWVATISQAGSEKDYVDSVKGRFTISRDNAKKSLYLQMNSLRAEDTAVYYCASGVYSFDYRGQGTLVTVSSGTGGGGSGGGGSGGGGSEFDEIQLVQSGAEVKKPGESLRISCKGSGFNIEDYYIHWVRQMPGKGLEWMGRIDPENDETKYGPIFQGHVTISADTSINTVYLQWSSLKASDTAMYYCAFRGGVYWGQGTTVTVSSLEIQNPDPAVYQLRDSKSSDKSVCLFTDFDSQTNVSQSKDSDVYITDKCVLDMRSMDFKSNSAVAWSNKSDFACANAFNNSIIPEDTFFPSPESSCDVKLVEKSFETDTNLNFQILYEILLGKATLYAVLVSALVLMAMVKRKDSRGRAKRSGSGVKQTLNFDLLKLAGDVESNPGPTSMDWIWRILFLVGAATGAHSFEDVVMTQSPDSLAVSLGERATINCKSSQSLLDSDGKTYLNWLQQKPGQPPKRLISLVSKLDSGVPDRFSGSGSGTDFTLTISSLQAEDVAVYYCWQGTHFPGTFGGGTKVEIKTREDLKNVFPPEVAVFEPSEAEISHTQKATLVCLATGFYPDHVELSWWVNGKEVHSGVCTDPQPLKEQPALNDSRYCLSSRLRVSATFWQNPRNHFRCQVQFYGLSENDEWTQDRAKPVTQIVSAEAWGRADCGFTSESYQQGVLSATNLSVIGFRILLLKVAGFNLLMTLRLWSS

SEQ ID NO: 13890 - protein, 766 aa, synthetic construct
MALPVTALLLPLALLLHAARPEVQLVESGGGLVQPGGSLRLSCAASGFSFSDFWMSWVRQAPGKGLEWVATISQAGSEKDYVDSVKGRFTISRDNAKKSLYLQMNSLRAEDTAVYYCASGVYSFDYRGQGTLVTVSSGTGGGGSGGGGSGGGGSEFDELVMTQSPSSLTVTAGEKVTMSCKSSQSLLNSGNQKNYLTWYQQKPGQPPKLLIYWASTRESGVPDRFTGSGSGTDFTLTISSVQAEDLAVYYCQNDYSYPLTFGAGTKLEIKLEIQNPDPAVYQLRDSKSSDKSVCLFTDFDSQTNVSQSKDSDVYITDKCVLDMRSMDFKSNSAVAWSNKSDFACANAFNNSIIPEDTFFPSPESSCDVKLVEKSFETDTNLNFQILYEILLGKATLYAVLVSALVLMAMVKRKDSRGRAKRSGSGVKQTLNFDLLKLAGDVESNPGPTSMDWIWRILFLVGAATGAHSFEEVQLLEQSGAELVRPGTSVKISCKASGYAFTNYWLGWVKQRPGHGLEWIGDIFPGSGNIHYNEKFKGKATLTADKSSSTAYMQLSSLTFEDSAVYFCARLRNWDEPMDYWGQGTTVTVSSTREDLKNVFPPEVAVFEPSEAEISHTQKATLVCLATGFYPDHVELSWWVNGKEVHSGVCTDPQPLKEQPALNDSRYCLSSRLRVSATFWQNPRNHFRCQVQFYGLSENDEWTQDRAKPVTQIVSAEAWGRADCGFTSESYQQGVLSATNLSVIGFRILLLKVAGFNLLMTLRLWSS

SEQ ID NO: 13891 - protein, 767 aa, synthetic construct
MALPVTALLLPLALLLHAARPEVQLVESGGGLVQPGGSLRLSCAASGFSFSDFWMSWVRQAPGKGLEWVATISQAGSEKDYVDSVKGRFTISRDNAKKSLYLQMNSLRAEDTAVYYCASGVYSFDYRGQGTLVTVSSGTGGGGSGGGGSGGGGSEFDELQMTQSPSSLSASVGDRVTITCRASQSISSYLNWYQQKPGQPPKLLIYWASTRESGVPDRFSGSESGTNYTLTISSLQPEDFATYFCQQSDSLPITFGQGTRLDIQLEIQNPDPAVYQLRDSKSSDKSVCLFTDFDSQTNVSQSKDSDVYITDKCVLDMRSMDFKSNSAVAWSNKSDFACANAFNNSIIPEDTFFPSPESSCDVKLVEKSFETDTNLNFQILYEILLGKATLYAVLVSALVLMAMVKRKDSRGRAKRSGSGVKQTLNFDLLKLAGDVESNPGPTSMDWIWRILFLVGAATGAHSFEEVQLLESGGGVVQPGRSLRLSCAASGFTFSSYGMHWVRQAPGKGLEWVAVISYDGSNKYYADSVKGRFTISRDNSKNTLYLQMNSLRAEDTAVYYCAKDMGWGSGWRPYYYYGMDVWGQGTTVTVSSTREDLKNVFPPEVAVFEPSEAEISHTQKATLVCLATGFYPDHVELSWWVNGKEVHSGVCTDPQPLKEQPALNDSRYCLSSRLRVSATFWQNPRNHFRCQVQFYGLSENDEWTQDRAKPVTQIVSAEAWGRADCGFTSESYQQGVLSATNLSVIGFRILLLKVAGFNLLMTLRLWSS

SEQ ID NO: 13892 - protein, 764 aa, synthetic construct
MALPVTALLLPLALLLHAARPEVQLVESGGGLVQPGGSLRLSCAASGFSFSDFWMSWVRQAPGKGLEWVATISQAGSEKDYVDSVKGRFTISRDNAKKSLYLQMNSLRAEDTAVYYCASGVYSFDYRGQGTLVTVSSGTGGGGSGGGGSGGGGSEFDDIQMTQSPSSLSASVGDRVTITCRASQSISSYLNWYQQKPGKAPKLLIYAASSLQSGVPSRFSGSGSGTDFTLTISSLQPEDLATYYCQQSYSTPFTFGPGTKVDIKLEIQNPDPAVYQLRDSKSSDKSVCLFTDFDSQTNVSQSKDSDVYITDKCVLDMRSMDFKSNSAVAWSNKSDFACANAFNNSIIPEDTFFPSPESSCDVKLVEKSFETDTNLNFQILYEILLGKATLYAVLVSALVLMAMVKRKDSRGRAKRSGSGVKQTLNFDLLKLAGDVESNPGPTSMDWIWRILFLVGAATGAHSFEVHEVQLVQSGAEVKKPGSSVKVSCKASGGTFSSYAISWVRQAPGQGLEWMGGIIPIFGTANYAQKFQGRVTITADKSTSTAYMELSSLRSEDTAVYYCATFALFGFREQAFDIWGQGTTVTVSSTREDLKNVFPPEVAVFEPSEAEISHTQKATLVCLATGFYPDHVELSWWVNGKEVHSGVCTDPQPLKEQPALNDSRYCLSSRLRVSATFWQNPRNHFRCQVQFYGLSENDEWTQDRAKPVTQIVSAEAWGRADCGFTSESYQQGVLSATNLSVIGFRILLLKVAGFNLLMTLRLWSS

SEQ ID NO: 13893 - protein, 762 aa, synthetic construct
MALPVTALLLPLALLLHAARPEVQLVESGGGLVQPGGSLRLSCAASGFSFSDFWMSWVRQAPGKGLEWVATISQAGSEKDYVDSVKGRFTISRDNAKKSLYLQMNSLRAEDTAVYYCASGVYSFDYRGQGTLVTVSSGTGGGGSGGGGSGGGGSEFDIVLTQSPLSLAVSLGQPAIISCKASQSVSFAGTSLMHWYHQKPGQQPRLLIYRASNLEAGVPDRFSGSGSKTDFTLTISPVEAEDAATYYCQQSREYPYTFGGGTKLEIKRLEIQNPDPAVYQLRDSKSSDKSVCLFTDFDSQTNVSQSKDSDVYITDKCVLDMRSMDFKSNSAVAWSNKSDFACANAFNNSIIPEDTFFPSPESSCDVKLVEKSFETDTNLNFQILYEILLGKATLYAVLVSALVLMAMVKRKDSRGRAKRSGSGVKQTLNFDLLKLAGDVESNPGPTSMDWIWRILFLVGAATGAHSFEQVQLVQSGAEVVKPGASVKISCKASGYTFTGYFMNWVKQSPGQSLEWIGRIHPYDGDTFYNQKFQGKATLTVDKSSNTAHMELLSLTSEDFAVYYCTRYDGSRAMDYWGQGTTVTVSSTREDLKNVFPPEVAVFEPSEAEISHTQKATLVCLATGFYPDHVELSWWVNGKEVHSGVCTDPQPLKEQPALNDSRYCLSSRLRVSATFWQNPRNHFRCQVQFYGLSENDEWTQDRAKPVTQIVSAEAWGRADCGFTSESYQQGVLSATNLSVIGFRILLLKVAGFNLLMTLRLWSS

SEQ ID NO: 13894 - protein, 759 aa, synthetic construct
MALPVTALLLPLALLLHAARPEVQLVESGGGLVQPGGSLRLSCAASGFSFSDFWMSWVRQAPGKGLEWVATISQAGSEKDYVDSVKGRFTISRDNAKKSLYLQMNSLRAEDTAVYYCASGVYSFDYRGQGTLVTVSSGTGGGGSGGGGSGGGGSEFDDVVMTQTPLSLPVTPGEPASISCRSSQSLVHRNGNTYLHWYLQKPGQSPKLLIHKVSNRFSGVPDRFSGSGSGTDFTLKISRVEAEDLGVYFCSQSTHVPPLTFGAGTKLELKLEIQNPDPAVYQLRDSKSSDKSVCLFTDFDSQTNVSQSKDSDVYITDKCVLDMRSMDFKSNSAVAWSNKSDFACANAFNNSIIPEDTFFPSPESSCDVKLVEKSFETDTNLNFQILYEILLGKATLYAVLVSALVLMAMVKRKDSRGRAKRSGSGVKQTLNFDLLKLAGDVESNPGPTSMDWIWRILFLVGAATGAHSFEEVQLVQSGAEVEKPGASVKISCKASGSSFTGYNMNWVRQNIGKSLEWIGAIDPYYGGTSYNQKFKGRATLTVDKSTSTAYMHLKSLRSEDTAVYYCVSGMEYWGQGTSVTVSSTREDLKNVFPPEVAVFEPSEAEISHTQKATLVCLATGFYPDHVELSWWVNGKEVHSGVCTDPQPLKEQPALNDSRYCLSSRLRVSATFWQNPRNHFRCQVQFYGLSENDEWTQDRAKPVTQIVSAEAWGRADCGFTSESYQQGVLSATNLSVIGFRILLLKVAGFNLLMTLRLWSS

SEQ ID NO: 13895 - protein, 757 aa, synthetic construct
MALPVTALLLPLALLLHAARPEVQLVESGGGLVQPGGSLRLSCAASGFSFSDFWMSWVRQAPGKGLEWVATISQAGSEKDYVDSVKGRFTISRDNAKKSLYLQMNSLRAEDTAVYYCASGVYSFDYRGQGTLVTVSSGTGGGGSGGGGSGGGGSEFDEIVMTQTPATLSVSAGERVTITCKASQSVSNDVTWYQQKPGQAPRLLIYSASNRYSGVPARFSGSGYGTEFTFTISSVQSEDFAVYFCQQDYSSFGQGTKLEIKRLEIQNPDPAVYQLRDSKSSDKSVCLFTDFDSQTNVSQSKDSDVYITDKCVLDMRSMDFKSNSAVAWSNKSDFACANAFNNSIIPEDTFFPSPESSCDVKLVEKSFETDTNLNFQILYEILLGKATLYAVLVSALVLMAMVKRKDSRGRAKRSGSGVKQTLNFDLLKLAGDVESNPGPTSMDWIWRILFLVGAATGAHSFEQVQLVESGPGVVQPGRSLRISCAVSGFSVTNYGVHWVRQPPGKGLEWLGVIWAGGITNYNSAFMSRLTISKDNSKNTVYLQMNSLRAEDTAMYYCASRGGHYGYALDYWGQGTLVTVSSTREDLKNVFPPEVAVFEPSEAEISHTQKATLVCLATGFYPDHVELSWWVNGKEVHSGVCTDPQPLKEQPALNDSRYCLSSRLRVSATFWQNPRNHFRCQVQFYGLSENDEWTQDRAKPVTQIVSAEAWGRADCGFTSESYQQGVLSATNLSVIGFRILLLKVAGFNLLMTLRLWSS

SEQ ID NO: 13896 - protein, 759 aa, synthetic construct
MALPVTALLLPLALLLHAARPEVQLVESGGGLVQPGGSLRLSCAASGFSFSDFWMSWVRQAPGKGLEWVATISQAGSEKDYVDSVKGRFTISRDNAKKSLYLQMNSLRAEDTAVYYCASGVYSFDYRGQGTLVTVSSGTGGGGSGGGGSGGGGSEFDIQMTQTASSLPASLGDRVTISCSASQDISNYLNWYQQKPDGTVKLLIFYSSNLHSGVPSRFSGGGSGTDYSLTISNLEPEDIATYFCHQYSKLPWTFGGGTKLEIKRLEIQNPDPAVYQLRDSKSSDKSVCLFTDFDSQTNVSQSKDSDVYITDKCVLDMRSMDFKSNSAVAWSNKSDFACANAFNNSIIPEDTFFPSPESSCDVKLVEKSFETDTNLNFQILYEILLGKATLYAVLVSALVLMAMVKRKDSRGRAKRSGSGVKQTLNFDLLKLAGDVESNPGPTSMDWIWRILFLVGAATGAHSFEEVTLVESGGDFVKPGGSLKVSCAASGFAFSHYAMSWVRQTPAKRLEWVAYISSGGSGTYYSDSVKGRFTISRDNAKNTLYLQMRSLRSEDSAMYFCTRVKLGTYYFDSWGQGTTLTVSSTREDLKNVFPPEVAVFEPSEAEISHTQKATLVCLATGFYPDHVELSWWVNGKEVHSGVCTDPQPLKEQPALNDSRYCLSSRLRVSATFWQNPRNHFRCQVQFYGLSENDEWTQDRAKPVTQIVSAEAWGRADCGFTSESYQQGVLSATNLSVIGFRILLLKVAGFNLLMTLRLWSS

SEQ ID NO: 13897 - protein, 761 aa, synthetic construct
MALPVTALLLPLALLLHAARPEVQLVESGGGLVQPGGSLRLSCAASGFSFSDFWMSWVRQAPGKGLEWVATISQAGSEKDYVDSVKGRFTISRDNAKKSLYLQMNSLRAEDTAVYYCASGVYSFDYRGQGTLVTVSSGTGGGGSGGGGSGGGGSEFQFVLTQSPSASAALGASAKLTCTLSSAHKTYTIDWYQQQKGKAPRYLIQVKSDGTYTKATGVPDRFSGSSSGADRYLIIPSVQADDEADYYCGTDYTGGYVFGGGTQLTVTLEIQNPDPAVYQLRDSKSSDKSVCLFTDFDSQTNVSQSKDSDVYITDKCVLDMRSMDFKSNSAVAWSNKSDFACANAFNNSIIPEDTFFPSPESSCDVKLVEKSFETDTNLNFQILYEILLGKATLYAVLVSALVLMAMVKRKDSRGRAKRSGSGVKQTLNFDLLKLAGDVESNPGPTSMDWIWRILFLVGAATGAHSFEEQLKESGGGLFKPTDTLTLTCTVSGFSLSYYGVNWVRQAPGNGLEWIGTIGGSGDTYYASWAKSRSTIIRNTNENTVTLKMTSLTAADTATYFCVRYANIGYEYFNVWGPGTLVTVSSTREDLKNVFPPEVAVFEPSEAEISHTQKATLVCLATGFYPDHVELSWWVNGKEVHSGVCTDPQPLKEQPALNDSRYCLSSRLRVSATFWQNPRNHFRCQVQFYGLSENDEWTQDRAKPVTQIVSAEAWGRADCGFTSESYQQGVLSATNLSVIGFRILLLKVAGFNLLMTLRLWSS

SEQ ID NO: 13898 - protein, 766 aa, synthetic construct
MALPVTALLLPLALLLHAARPEVQLVESGGGLVQPGGSLRLSCAASGFSFSDFWMSWVRQAPGKGLEWVATISQAGSEKDYVDSVKGRFTISRDNAKKSLYLQMNSLRAEDTAVYYCASGVYSFDYRGQGTLVTVSSGTGGGGSGGGGSGGGGSEFQFVLTQSPSVSAALGASAKLTCTLSSAHKTYTIDWYQQQQGEAPRYLMQVKSDGSYTKGTGVPDRFSGSSSGADRYLIIPSVQADDEAGYVCGADDNGGYVFGGGTQLTVTLEIQNPDPAVYQLRDSKSSDKSVCLFTDFDSQTNVSQSKDSDVYITDKCVLDMRSMDFKSNSAVAWSNKSDFACANAFNNSIIPEDTFFPSPESSCDVKLVEKSFETDTNLNFQILYEILLGKATLYAVLVSALVLMAMVKRKDSRGRAKRSGSGVKQTLNFDLLKLAGDVESNPGPTSMDWIWRILFLVGAATGAHSFEQSVKESEGGLFKPTDTLTLTCTVSGFSLSRHALTWVRQAPGNGLEWIGAIDNAGTTYYASWAKSRSTITRNTDLHTVTLKMTSLTASDTATYFCARVFYDINSGYYLDGMDLWGPGTLVTVSSTREDLKNVFPPEVAVFEPSEAEISHTQKATLVCLATGFYPDHVELSWWVNGKEVHSGVCTDPQPLKEQPALNDSRYCLSSRLRVSATFWQNPRNHFRCQVQFYGLSENDEWTQDRAKPVTQIVSAEAWGRADCGFTSESYQQGVLSATNLSVIGFRILLLKVAGFNLLMTLRLWSS

SEQ ID NO: 13899 - protein, 760 aa, synthetic construct
MALPVTALLLPLALLLHAARPEVQLVESGGGLVQPGGSLRLSCAASGFSFSDFWMSWVRQAPGKGLEWVATISQAGSEKDYVDSVKGRFTISRDNAKKSLYLQMNSLRAEDTAVYYCASGVYSFDYRGQGTLVTVSSGTGGGGSGGGGSGGGGSEFDIQMTQSPSSLSASVGDRVTITCRASQGISSWLAWYQQKPEKAPKSLIYAASSLQSGVPSRFSGSGSGTDFTLTISSLQPEDFATYYCQQYNSYPPTFGGGTKVEIKLEIQNPDPAVYQLRDSKSSDKSVCLFTDFDSQTNVSQSKDSDVYITDKCVLDMRSMDFKSNSAVAWSNKSDFACANAFNNSIIPEDTFFPSPESSCDVKLVEKSFETDTNLNFQILYEILLGKATLYAVLVSALVLMAMVKRKDSRGRAKRSGSGVKQTLNFDLLKLAGDVESNPGPTSMDWIWRILFLVGAATGAHSFEEVQLVESGGGLVQPGESLRLSCVASGFTFSRYKMNWVRQAPGKGLEWVSYISRSGRDIYYADSVKGRFTISRDNAKNSLYLQMNSLRDEDTAVYYCAGTVTTYYYFGMDVWGHGTTVTVSSTREDLKNVFPPEVAVFEPSEAEISHTQKATLVCLATGFYPDHVELSWWVNGKEVHSGVCTDPQPLKEQPALNDSRYCLSSRLRVSATFWQNPRNHFRCQVQFYGLSENDEWTQDRAKPVTQIVSAEAWGRADCGFTSESYQQGVLSATNLSVIGFRILLLKVAGFNLLMTLRLWSS

SEQ ID NO: 13900 - protein, 761 aa, synthetic construct
MALPVTALLLPLALLLHAARPEVQLVESGGGLVQPGGSLRLSCAASGFSFSDFWMSWVRQAPGKGLEWVATISQAGSEKDYVDSVKGRFTISRDNAKKSLYLQMNSLRAEDTAVYYCASGVYSFDYRGQGTLVTVSSGTGGGGSGGGGSGGGGSEFDIQMTQSPSSLSASVGDRVTITCRASQGISSWLAWYQQKPEKAPKSLIYAASSLQSGVPSRFSGSGSGTDFTLTISSLQPEDFATYYCQQYNSYPPTFGGGTKVEIKLEIQNPDPAVYQLRDSKSSDKSVCLFTDFDSQTNVSQSKDSDVYITDKCVLDMRSMDFKSNSAVAWSNKSDFACANAFNNSIIPEDTFFPSPESSCDVKLVEKSFETDTNLNFQILYEILLGKATLYAVLVSALVLMAMVKRKDSRGRAKRSGSGVKQTLNFDLLKLAGDVESNPGPTSMDWIWRILFLVGAATGAHSFEEVQLVESGGGSVQPGESLRLSCVASGFTFSRYKMNWVRQAPGKGLEWVSYISRSGRDIYYADSVKGRFTISRDNAKNSLYLQMNSLRDEDTAVYYCAGTVTTYYYDFGMDVWGQGTTVTVSSTREDLKNVFPPEVAVFEPSEAEISHTQKATLVCLATGFYPDHVELSWWVNGKEVHSGVCTDPQPLKEQPALNDSRYCLSSRLRVSATFWQNPRNHFRCQVQFYGLSENDEWTQDRAKPVTQIVSAEAWGRADCGFTSESYQQGVLSATNLSVIGFRILLLKVAGFNLLMTLRLWSS

SEQ ID NO: 13901 - protein, 759 aa, synthetic construct
MALPVTALLLPLALLLHAARPEVQLVESGGGLVQPGGSLRLSCAASGFSFSDFWMSWVRQAPGKGLEWVATISQAGSEKDYVDSVKGRFTISRDNAKKSLYLQMNSLRAEDTAVYYCASGVYSFDYRGQGTLVTVSSGTGGGGSGGGGSGGGGSEFQSVLTQPPSASGTPGQRVTISCSGSRSNVGGNYVFWYQQVPGATPKLLIYRSNQRPSGVPDRFAGSKSGSSASLAISGLRSEDEADYYCATWDDSLSGFVFGTGTKVTVLGLEIQNPDPAVYQLRDSKSSDKSVCLFTDFDSQTNVSQSKDSDVYITDKCVLDMRSMDFKSNSAVAWSNKSDFACANAFNNSIIPEDTFFPSPESSCDVKLVEKSFETDTNLNFQILYEILLGKATLYAVLVSALVLMAMVKRKDSRGRAKRSGSGVKQTLNFDLLKLAGDVESNPGPTSMDWIWRILFLVGAATGAHSFEVQLVESGGGLVKPGGSLRLSCAASGFTFSDYYMSWIRQAPGKGLEWVSYISSSGSTIYYADSVKGRFTISRDNAKNSLYLQMNSLRAEDTAVYYCARGYGKAYDQWGQGTLVTVSSTREDLKNVFPPEVAVFEPSEAEISHTQKATLVCLATGFYPDHVELSWWVNGKEVHSGVCTDPQPLKEQPALNDSRYCLSSRLRVSATFWQNPRNHFRCQVQFYGLSENDEWTQDRAKPVTQIVSAEAWGRADCGFTSESYQQGVLSATNLSVIGFRILLLKVAGFNLLMTLRLWSS

SEQ ID NO: 13902 - protein, 758 aa, synthetic construct
MALPVTALLLPLALLLHAARPEVQLVESGGGLVQPGGSLRLSCAASGFSFSDFWMSWVRQAPGKGLEWVATISQAGSEKDYVDSVKGRFTISRDNAKKSLYLQMNSLRAEDTAVYYCASGVYSFDYRGQGTLVTVSSGTGGGGSGGGGSGGGGSEFQSVVTQPPSMSAAPGQQVTISCSGGNSNIERNYVSWYLQLPGTAPKLVIFDNDRRPSGIPDRFSGSKSGTSATLGITGLQTGDEADYYCGTWDSSLRGWVFGGGTKLTVLGLEIQNPDPAVYQLRDSKSSDKSVCLFTDFDSQTNVSQSKDSDVYITDKCVLDMRSMDFKSNSAVAWSNKSDFACANAFNNSIIPEDTFFPSPESSCDVKLVEKSFETDTNLNFQILYEILLGKATLYAVLVSALVLMAMVKRKDSRGRAKRSGSGVKQTLNFDLLKLAGDVESNPGPTSMDWIWRILFLVGAATGAHSFEVQLVESGGGLIQPGGSLRLSCAASGFTFSNYAMNWVRQAPGKGLEWVSTINGRGSSTIYADSVKGRFTISRDNSKNTLYLQMNSLRAEDTATYYCARYISRGLGDSWGQGTLVTVTREDLKNVFPPEVAVFEPSEAEISHTQKATLVCLATGFYPDHVELSWWVNGKEVHSGVCTDPQPLKEQPALNDSRYCLSSRLRVSATFWQNPRNHFRCQVQFYGLSENDEWTQDRAKPVTQIVSAEAWGRADCGFTSESYQQGVLSATNLSVIGFRILLLKVAGFNLLMTLRLWSS

SEQ ID NO: 13903 - protein, 759 aa, synthetic construct
MALPVTALLLPLALLLHAARPEVQLVESGGGLVQPGGSLRLSCAASGFSFSDFWMSWVRQAPGKGLEWVATISQAGSEKDYVDSVKGRFTISRDNAKKSLYLQMNSLRAEDTAVYYCASGVYSFDYRGQGTLVTVSSGTGGGGSGGGGSGGGGSEFDVVMTQTPLSLPVSLGDQASISCRSSQSLVHSNGNTYLHWYLQKPGQSPKLLIYKVSNRFSGVPDRFSGSGSGTDFTLKISRVEAEDLGVYFCSQNTPVPPKFGSGTKLEIKLEIQNPDPAVYQLRDSKSSDKSVCLFTDFDSQTNVSQSKDSDVYITDKCVLDMRSMDFKSNSAVAWSNKSDFACANAFNNSIIPEDTFFPSPESSCDVKLVEKSFETDTNLNFQILYEILLGKATLYAVLVSALVLMAMVKRKDSRGRAKRSGSGVKQTLNFDLLKLAGDVESNPGPTSMDWIWRILFLVGAATGAHSFEQVQLQQSGAELVRPGASVKLSCKASGYTFNDYEMHWVKQTPVHGLKWIGALEPKTGDTAYSQKFKGKATLTADKSSSTAYMELRSLTSEDSAVYYCTSCYYYTYSGQGTLVTVSATREDLKNVFPPEVAVFEPSEAEISHTQKATLVCLATGFYPDHVELSWWVNGKEVHSGVCTDPQPLKEQPALNDSRYCLSSRLRVSATFWQNPRNHFRCQVQFYGLSENDEWTQDRAKPVTQIVSAEAWGRADCGFTSESYQQGVLSATNLSVIGFRILLLKVAGFNLLMTLRLWSS

SEQ ID NO: 13904 - protein, 758 aa, synthetic construct
MALPVTALLLPLALLLHAARPEVQLVESGGGLVQPGGSLRLSCAASGFSFSDFWMSWVRQAPGKGLEWVATISQAGSEKDYVDSVKGRFTISRDNAKKSLYLQMNSLRAEDTAVYYCASGVYSFDYRGQGTLVTVSSGTGGGGSGGGGSGGGGSEFDIQLTQSPSSLSASVGDRVTITCRASQGIRNDLGWYQQKPGKAPKRLIYAASSLQNGVPSRFSGSGSGTEFTLTISSLQPEDFATYYCLQHNTYPAFGQGTKVEIKRLEIQNPDPAVYQLRDSKSSDKSVCLFTDFDSQTNVSQSKDSDVYITDKCVLDMRSMDFKSNSAVAWSNKSDFACANAFNNSIIPEDTFFPSPESSCDVKLVEKSFETDTNLNFQILYEILLGKATLYAVLVSALVLMAMVKRKDSRGRAKRSGSGVKQTLNFDLLKLAGDVESNPGPTSMDWIWRILFLVGAATGAHSFEQVQLQESGPGLVKPSQTLSLTCTVSGGSISSFNYYWSWIRHHPGKGLEWIGYIYYSGSTYSNPSLKSRVTISVDTSKNQFSLTLSSVTAADTAVYYCARGYNWNYFDYWGQGTLVTVSSTREDLKNVFPPEVAVFEPSEAEISHTQKATLVCLATGFYPDHVELSWWVNGKEVHSGVCTDPQPLKEQPALNDSRYCLSSRLRVSATFWQNPRNHFRCQVQFYGLSENDEWTQDRAKPVTQIVSAEAWGRADCGFTSESYQQGVLSATNLSVIGFRILLLKVAGFNLLMTLRLWSS

SEQ ID NO: 13905 - protein, 760 aa, synthetic construct
MALPVTALLLPLALLLHAARPEVQLVESGGGLVQPGGSLRLSCAASGFSFSDFWMSWVRQAPGKGLEWVATISQAGSEKDYVDSVKGRFTISRDNAKKSLYLQMNSLRAEDTAVYYCASGVYSFDYRGQGTLVTVSSGTGGGGSGGGGSGGGGSEFDDIVLTQSPASLAVSLGQSVTISCRASESVEYYGTSLMQWYQQKPGQPPKLLIYATSNVESGVPARFSGSGSGTDFSLNIHPVEEDDIAMYFCQQSRKLPSTFGGGTKLEIKLEIQNPDPAVYQLRDSKSSDKSVCLFTDFDSQTNVSQSKDSDVYITDKCVLDMRSMDFKSNSAVAWSNKSDFACANAFNNSIIPEDTFFPSPESSCDVKLVEKSFETDTNLNFQILYEILLGKATLYAVLVSALVLMAMVKRKDSRGRAKRSGSGVKQTLNFDLLKLAGDVESNPGPTSMDWIWRILFLVGAATGAHSFEDVRLQESGPGQVKPSQTVSLTCSVTGYSITNGNHWWNWIRQVSGSKLEWIGYISSSGSTDSNPSLKSRISITRDTSKNQLFLQLNSVTTEDIATYYCARGYYFDYWGQGTTLTVSSTREDLKNVFPPEVAVFEPSEAEISHTQKATLVCLATGFYPDHVELSWWVNGKEVHSGVCTDPQPLKEQPALNDSRYCLSSRLRVSATFWQNPRNHFRCQVQFYGLSENDEWTQDRAKPVTQIVSAEAWGRADCGFTSESYQQGVLSATNLSVIGFRILLLKVAGFNLLMTLRLWSS

SEQ ID NO: 13906 - protein, 759 aa, synthetic construct
MALPVTALLLPLALLLHAARPEVQLVESGGGLVQPGGSLRLSCAASGFSFSDFWMSWVRQAPGKGLEWVATISQAGSEKDYVDSVKGRFTISRDNAKKSLYLQMNSLRAEDTAVYYCASGVYSFDYRGQGTLVTVSSGTGGGGSGGGGSGGGGSEFDIQMTQSPSSLSASVGDRVTITCRASQDVNTAVAWYQQKPGKAPKLLIYSASFLESGVPSRFSGSRSGTDFTLTISSLQPEDFATYYCQQHYTTPPTFGQTKVEIKRLEIQNPDPAVYQLRDSKSSDKSVCLFTDFDSQTNVSQSKDSDVYITDKCVLDMRSMDFKSNSAVAWSNKSDFACANAFNNSIIPEDTFFPSPESSCDVKLVEKSFETDTNLNFQILYEILLGKATLYAVLVSALVLMAMVKRKDSRGRAKRSGSGVKQTLNFDLLKLAGDVESNPGPTSMDWIWRILFLVGAATGAHSFEEVQLVESGGGLVQPGGSLRLSCAASGFNIKDTYIHWVRQAPGKGLEWVARIYPTNGYTRYADSVKGRFTISADTSKNTAYLQMNSLRAEDTAVYYCSRWGGDGFYAMDVWGQGTLVTVSSTREDLKNVFPPEVAVFEPSEAEISHTQKATLVCLATGFYPDHVELSWWVNGKEVHSGVCTDPQPLKEQPALNDSRYCLSSRLRVSATFWQNPRNHFRCQVQFYGLSENDEWTQDRAKPVTQIVSAEAWGRADCGFTSESYQQGVLSATNLSVIGFRILLLKVAGFNLLMTLRLWSS

SEQ ID NO: 13907 - protein, 758 aa, synthetic construct
MALPVTALLLPLALLLHAARPEVQLVESGGGLVQPGGSLRLSCAASGFSFSDFWMSWVRQAPGKGLEWVATISQAGSEKDYVDSVKGRFTISRDNAKKSLYLQMNSLRAEDTAVYYCASGVYSFDYRGQGTLVTVSSGTGGGGSGGGGSGGGGSEFDQSVLTQPPSVSVAPGKTARIPCEGNYIGSSNVHWYQQKPGQAPVLVIHFDSDRPSGIPDRFSGSNSGNMATLTISRVEAGDEADYYCQVWENHGWVFGGGTKLTVLSLEIQNPDPAVYQLRDSKSSDKSVCLFTDFDSQTNVSQSKDSDVYITDKCVLDMRSMDFKSNSAVAWSNKSDFACANAFNNSIIPEDTFFPSPESSCDVKLVEKSFETDTNLNFQILYEILLGKATLYAVLVSALVLMAMVKRKDSRGRAKRSGSGVKQTLNFDLLKLAGDVESNPGPTSMDWIWRILFLVGAATGAHSFEEVQLVETGGGLVQPGESLRLSCAASGFTFSDYEMNWVRQAPGKGLEWVSYISSSGSTIYYADSVKGRFTIYRDNAKNSLYLQMNSLRAEDTALYYCARAWGVGPPDYWGQGTLVTVSSTREDLKNVFPPEVAVFEPSEAEISHTQKATLVCLATGFYPDHVELSWWVNGKEVHSGVCTDPQPLKEQPALNDSRYCLSSRLRVSATFWQNPRNHFRCQVQFYGLSENDEWTQDRAKPVTQIVSAEAWGRADCGFTSESYQQGVLSATNLSVIGFRILLLKVAGFNLLMTLRLWSS

SEQ ID NO: 13908 - protein, 766 aa, synthetic construct
MALPVTALLLPLALLLHAARPEVQLVESGGGLVQPGGSLRLSCAASGFSFSDFWMSWVRQAPGKGLEWVATISQAGSEKDYVDSVKGRFTISRDNAKKSLYLQMNSLRAEDTAVYYCASGVYSFDYRGQGTLVTVSSGTGGGGSGGGGSGGGGSEFDIQMTQSPSSLSASVGDTVTITCQANGYLNWYQQRRGKAPKLLIYDGSKLERGVPSRFSGRRWGQEYNLTINNLQPEDIATYFCQVYEFVVPGTRLDLKRTVAAPLEIQNPDPAVYQLRDSKSSDKSVCLFTDFDSQTNVSQSKDSDVYITDKCVLDMRSMDFKSNSAVAWSNKSDFACANAFNNSIIPEDTFFPSPESSCDVKLVEKSFETDTNLNFQILYEILLGKATLYAVLVSALVLMAMVKRKDSRGRAKRSGSGVKQTLNFDLLKLAGDVESNPGPTSMDWIWRILFLVGAATGAHSFEQVQLLQSGAAVTKPGASVRVSCEASGYNIRDYFIHWWRQAPGQGLQWVGWINPKTGQPNNPRQFQGRVSLTRHASWDFDTFSFYMDLKALRSDDTAVYFCARQRSDYWDFDVWGSGTQVTVSSASTKGPTREDLKNVFPPEVAVFEPSEAEISHTQKATLVCLATGFYPDHVELSWWVNGKEVHSGVCTDPQPLKEQPALNDSRYCLSSRLRVSATFWQNPRNHFRCQVQFYGLSENDEWTQDRAKPVTQIVSAEAWGRADCGFTSESYQQGVLSATNLSVIGFRILLLKVAGFNLLMTLRLWSS

SEQ ID NO: 13909 - protein, 772 aa, synthetic construct
MALPVTALLLPLALLLHAARPEVQLVESGGGLVQPGGSLRLSCAASGFSFSDFWMSWVRQAPGKGLEWVATISQAGSEKDYVDSVKGRFTISRDNAKKSLYLQMNSLRAEDTAVYYCASGVYSFDYRGQGTLVTVSSGTGGGGSGGGGSGGGGSEFQSALTQPPSASGSPGQSITISCTGTSNNFVSWYQQHAGKAPKLVIYDVNKRPSGVPDRFSGSKSGNTASLTVSGLQTDDEAVYYCGSLVGNWDVIFGGGTKLTVLLEIQNPDPAVYQLRDSKSSDKSVCLFTDFDSQTNVSQSKDSDVYITDKCVLDMRSMDFKSNSAVAWSNKSDFACANAFNNSIIPEDTFFPSPESSCDVKLVEKSFETDTNLNFQILYEILLGKATLYAVLVSALVLMAMVKRKDSRGRAKRSGSGVKQTLNFDLLKLAGDVESNPGPTSMDWIWRILFLVGAATGAHSFEQPQLQESGPTLVEASETLSLTCAVSGDSTAACNSFWGWVRQPPGKGLEWVGSLSHCASYWNRGWTYHNPSLKSRLTLALDTPKNLVFLKLNSVTAADTATYYCARFGGEVLRYTDWPKPAWVDLWGRGTLVTVSSTREDLKNVFPPEVAVFEPSEAEISHTQKATLVCLATGFYPDHVELSWWVNGKEVHSGVCTDPQPLKEQPALNDSRYCLSSRLRVSATFWQNPRNHFRCQVQFYGLSENDEWTQDRAKPVTQIVSAEAWGRADCGFTSESYQQGVLSATNLSVIGFRILLLKVAGFNLLMTLRLWSS

SEQ ID NO: 13910 - protein, 757 aa, synthetic construct
MALPVTALLLPLALLLHAARPEVQLVESGGGLVQPGGSLRLSCAASGFSFSDFWMSWVRQAPGKGLEWVATISQAGSEKDYVDSVKGRFTISRDNAKKSLYLQMNSLRAEDTAVYYCASGVYSFDYRGQGTLVTVSSGTGGGGSGGGGSGGGGSEFEIVLTQSPGTLSLSPGETAIISCRTSQYGSLAWYQQRPGQAPRLVIYSGSTRAAGIPDRFSGSRWGPDYNLTISNLESGDFGVYYCQQYEFFGQGTKVQVDIKRLEIQNPDPAVYQLRDSKSSDKSVCLFTDFDSQTNVSQSKDSDVYITDKCVLDMRSMDFKSNSAVAWSNKSDFACANAFNNSIIPEDTFFPSPESSCDVKLVEKSFETDTNLNFQILYEILLGKATLYAVLVSALVLMAMVKRKDSRGRAKRSGSGVKQTLNFDLLKLAGDVESNPGPTSMDWIWRILFLVGAATGAHSFEQVQLVQSGGQMKKPGESMRISCRASGYEFIDCTLNWIRLAPGKRPEWMGWLKPRGGAVNYARPLQGRVTMTRDVYSDTAFLELRSLTVDDTAVYFCTRGKNCDYNWDFEHWGRGTPVIVSSTREDLKNVFPPEVAVFEPSEAEISHTQKATLVCLATGFYPDHVELSWWVNGKEVHSGVCTDPQPLKEQPALNDSRYCLSSRLRVSATFWQNPRNHFRCQVQFYGLSENDEWTQDRAKPVTQIVSAEAWGRADCGFTSESYQQGVLSATNLSVIGFRILLLKVAGFNLLMTLRLWSS

SEQ ID NO: 13911 - protein, 767 aa, synthetic construct
MALPVTALLLPLALLLHAARPEVQLVESGGGLVQPGGSLRLSCAASGFSFSDFWMSWVRQAPGKGLEWVATISQAGSEKDYVDSVKGRFTISRDNAKKSLYLQMNSLRAEDTAVYYCASGVYSFDYRGQGTLVTVSSGTGGGGSGGGGSGGGGSEFELVLTQSPGTLSLSAGERATLSCRASQSVSSGSLAWYQQKPGQAPRLLIYGASTRATGIPDRFSGSGSGTDFTLTIGRLEPEDLAVYYCQQYGTSPYTFGQGTKLEILEIQNPDPAVYQLRDSKSSDKSVCLFTDFDSQTNVSQSKDSDVYITDKCVLDMRSMDFKSNSAVAWSNKSDFACANAFNNSIIPEDTFFPSPESSCDVKLVEKSFETDTNLNFQILYEILLGKATLYAVLVSALVLMAMVKRKDSRGRAKRSGSGVKQTLNFDLLKLAGDVESNPGPTSMDWIWRILFLVGAATGAHSFELEQSGAEVKKPGSSVQVSCKASGGTFSMYGFNWVRQAPGHGLEWMGGIIPIFGTSNYAQKFRGRVTFTADQATSTAYMELTNLRSDDTAVYYCARDFGPDWEDGDSYDGSGRGFFDFWGQGTLVTVSSTREDLKNVFPPEVAVFEPSEAEISHTQKATLVCLATGFYPDHVELSWWVNGKEVHSGVCTDPQPLKEQPALNDSRYCLSSRLRVSATFWQNPRNHFRCQVQFYGLSENDEWTQDRAKPVTQIVSAEAWGRADCGFTSESYQQGVLSATNLSVIGFRILLLKVAGFNLLMTLRLWSS

SEQ ID NO: 13912 - protein, 747 aa, synthetic construct
MALPVTALLLPLALLLHAARPEVQLVESGGGLVQPGGSLRLSCAASGFSFSDFWMSWVRQAPGKGLEWVATISQAGSEKDYVDSVKGRFTISRDNAKKSLYLQMNSLRAEDTAVYYCASGVYSFDYRGQGTLVTVSSGTGGGGSGGGGSGGGGSEFDIQMTQSPSSLSASVGDRVTITCQASQDINNYLNWYQQKPGKAPKLLIYDASNLQTGVPSRFSGSGSGTDFTFTIEDIATYYCQQYTFGPGTKVDIKLEIQNPDPAVYQLRDSKSSDKSVCLFTDFDSQTNVSQSKDSDVYITDKCVLDMRSMDFKSNSAVAWSNKSDFACANAFNNSIIPEDTFFPSPESSCDVKLVEKSFETDTNLNFQILYEILLGKATLYAVLVSALVLMAMVKRKDSRGRAKRSGSGVKQTLNFDLLKLAGDVESNPGPTSMDWIWRILFLVGAATGAHSFEEVQLLESGGGLVQPGGSLRLSCAASGFTFSWYSMTWVRQAPGKGLEWVSSIVPWGDFTQYADSVKGRFTISRDNSKNTLYLQMNSLRAEDTAVYYCAKGPGWGSFDLWGRGTLVTVSSTREDLKNVFPPEVAVFEPSEAEISHTQKATLVCLATGFYPDHVELSWWVNGKEVHSGVCTDPQPLKEQPALNDSRYCLSSRLRVSATFWQNPRNHFRCQVQFYGLSENDEWTQDRAKPVTQIVSAEAWGRADCGFTSESYQQGVLSATNLSVIGFRILLLKVAGFNLLMTLRLWSS

SEQ ID NO: 13913 - protein, 757 aa, synthetic construct
MALPVTALLLPLALLLHAARPEVQLVESGGGLVQPGGSLRLSCAASGFSFSDFWMSWVRQAPGKGLEWVATISQAGSEKDYVDSVKGRFTISRDNAKKSLYLQMNSLRAEDTAVYYCASGVYSFDYRGQGTLVTVSSGTGGGGSGGGGSGGGGSEFDIQMTQSPSSLSASVGDRVTITCTASLSVSSTYLHWYQQKPGSSPKLWIYSTSNLASGVPSRFSGSGSGTSYTLTISSLQPEDFATYYCHQYHRSPLTFGGGTKVEIKRLEIQNPDPAVYQLRDSKSSDKSVCLFTDFDSQTNVSQSKDSDVYITDKCVLDMRSMDFKSNSAVAWSNKSDFACANAFNNSIIPEDTFFPSPESSCDVKLVEKSFETDTNLNFQILYEILLGKATLYAVLVSALVLMAMVKRKDSRGRAKRSGSGVKQTLNFDLLKLAGDVESNPGPTSMDWIWRILFLVGAATGAHSFEEVQLVESGGGLVQPGGSLRLSCAASGFSLTKYGVHWVRQAPGKGLEWVGVKWAGGSTDYNSALMSRFTISKDNAKNSLYLQMNSLRAEDTAVYYCARDHRDAMDYWGQGTLVTVSSTREDLKNVFPPEVAVFEPSEAEISHTQKATLVCLATGFYPDHVELSWWVNGKEVHSGVCTDPQPLKEQPALNDSRYCLSSRLRVSATFWQNPRNHFRCQVQFYGLSENDEWTQDRAKPVTQIVSAEAWGRADCGFTSESYQQGVLSATNLSVIGFRILLLKVAGFNLLMTLRLWSS

SEQ ID NO: 13914 - protein, 761 aa, synthetic construct
MALPVTALLLPLALLLHAARPEVQLVESGGGLVQPGGSLRLSCAASGFSFSDFWMSWVRQAPGKGLEWVATISQAGSEKDYVDSVKGRFTISRDNAKKSLYLQMNSLRAEDTAVYYCASGVYSFDYRGQGTLVTVSSGTGGGGSGGGGSGGGGSEFDIQMTQSPSSLSASVGDRVTITCKASQDVGTAVAWYQQKPGKAPKLLIYSASYRSTGVPSRFSGSGSGTDFTLTISSLQPEDFATYYCQHHYSAPWTFGGGTKVEIKLEIQNPDPAVYQLRDSKSSDKSVCLFTDFDSQTNVSQSKDSDVYITDKCVLDMRSMDFKSNSAVAWSNKSDFACANAFNNSIIPEDTFFPSPESSCDVKLVEKSFETDTNLNFQILYEILLGKATLYAVLVSALVLMAMVKRKDSRGRAKRSGSGVKQTLNFDLLKLAGDVESNPGPTSMDWIWRILFLVGAATGAHSFEEVQLVESGGGLVQPGGSLRLSCAASGFTFSRNGMSWVRQAPGKGLEWVATVSSGGSYIYYADSVKGRFTISRDNAKNSLYLQMNSLRAEDTAVYYCARQGTTALATRFFDVWGQGTLVTVSSTREDLKNVFPPEVAVFEPSEAEISHTQKATLVCLATGFYPDHVELSWWVNGKEVHSGVCTDPQPLKEQPALNDSRYCLSSRLRVSATFWQNPRNHFRCQVQFYGLSENDEWTQDRAKPVTQIVSAEAWGRADCGFTSESYQQGVLSATNLSVIGFRILLLKVAGFNLLMTLRLWSS

SEQ ID NO: 13915 - protein, 757 aa, synthetic construct
MALPVTALLLPLALLLHAARPEVQLVESGGGLVQPGGSLRLSCAASGFSFSDFWMSWVRQAPGKGLEWVATISQAGSEKDYVDSVKGRFTISRDNAKKSLYLQMNSLRAEDTAVYYCASGVYSFDYRGQGTLVTVSSGTGGGGSGGGGSGGGGSEFDIQMTQSPPSLSASVGGKVTITCKASQDIDRYMAWYQDKPGKGPKLLIHDTSTLQPGIPSRFSGSGSGRDYSFSISNLEPEDIATYYCLQYDNLWTFGGGTKLEIKRLEIQNPDPAVYQLRDSKSSDKSVCLFTDFDSQTNVSQSKDSDVYITDKCVLDMRSMDFKSNSAVAWSNKSDFACANAFNNSIIPEDTFFPSPESSCDVKLVEKSFETDTNLNFQILYEILLGKATLYAVLVSALVLMAMVKRKDSRGRAKRSGSGVKQTLNFDLLKLAGDVESNPGPTSMDWIWRILFLVGAATGAHSFEQVQLVQSGAELVKPGASVKMSCKASGYIFTNYNIHWVKKSPGQGLEWIGAIYPGNGDAPYSQKFQDRATLTADTSSSTTYMELSSLTSEDSAVYYCVRANWDVAFAYWGQGTLVSVSSTREDLKNVFPPEVAVFEPSEAEISHTQKATLVCLATGFYPDHVELSWWVNGKEVHSGVCTDPQPLKEQPALNDSRYCLSSRLRVSATFWQNPRNHFRCQVQFYGLSENDEWTQDRAKPVTQIVSAEAWGRADCGFTSESYQQGVLSATNLSVIGFRILLLKVAGFNLLMTLRLWSS

SEQ ID NO: 13916 - protein, 758 aa, synthetic construct
MALPVTALLLPLALLLHAARPEVQLVESGGGLVQPGGSLRLSCAASGFSFSDFWMSWVRQAPGKGLEWVATISQAGSEKDYVDSVKGRFTISRDNAKKSLYLQMNSLRAEDTAVYYCASGVYSFDYRGQGTLVTVSSGTGGGGSGGGGSGGGGSEFDIQMTQSPASLSASVGETVTITCRVSGNIHNYLAWYQQKQGKSPQLLVYNAKTLADGVPSRFSGSGSGTQYSLKINSLQPEDFGSYYCQHFWSNPYTFGGGTKLEIKLEIQNPDPAVYQLRDSKSSDKSVCLFTDFDSQTNVSQSKDSDVYITDKCVLDMRSMDFKSNSAVAWSNKSDFACANAFNNSIIPEDTFFPSPESSCDVKLVEKSFETDTNLNFQILYEILLGKATLYAVLVSALVLMAMVKRKDSRGRAKRSGSGVKQTLNFDLLKLAGDVESNPGPTSMDWIWRILFLVGAATGAHSFEQVQLQQSGASVKVSCKASELVRPGTGYAFTNYLIEWVKQRPGQGLEWIGVINPGSGGTNYNEKFKGKATLTADKSSSTAYMQLSSLTSDDSAVYFCARYRSYDWYFDVWGAGTTVTVSSTREDLKNVFPPEVAVFEPSEAEISHTQKATLVCLATGFYPDHVELSWWVNGKEVHSGVCTDPQPLKEQPALNDSRYCLSSRLRVSATFWQNPRNHFRCQVQFYGLSENDEWTQDRAKPVTQIVSAEAWGRADCGFTSESYQQGVLSATNLSVIGFRILLLKVAGFNLLMTLRLWSS

SEQ ID NO: 13917 - protein, 757 aa, synthetic construct
MALPVTALLLPLALLLHAARPEVQLVESGGGLVQPGGSLRLSCAASGFSFSDFWMSWVRQAPGKGLEWVATISQAGSEKDYVDSVKGRFTISRDNAKKSLYLQMNSLRAEDTAVYYCASGVYSFDYRGQGTLVTVSSGTGGGGSGGGGSGGGGSEFDIQMTQSFSSLSASVGDRVTITCRASQDISNYLNWYQQKPGKAPKLLIYYTSRLHSGVPSRFSGSGSGTDYTLTISSLQPEDFATYFCQQGNTLPWTFGGGTKLEIKRLEIQNPDPAVYQLRDSKSSDKSVCLFTDFDSQTNVSQSKDSDVYITDKCVLDMRSMDFKSNSAVAWSNKSDFACANAFNNSIIPEDTFFPSPESSCDVKLVEKSFETDTNLNFQILYEILLGKATLYAVLVSALVLMAMVKRKDSRGRAKRSGSGVKQTLNFDLLKLAGDVESNPGPTSMDWIWRILFLVGAATGAHSFEEVQLVQSGGGLVQSGGSLRLSCRASGYTFTRYWMLWVRQRPGKGLEWVAEINPRNDRTNYNEKFKTRFTISVDRSKNTLYLQMDSLRAEDTAVYFCALGGGYAMDYWGQGTLVTVSSTREDLKNVFPPEVAVFEPSEAEISHTQKATLVCLATGFYPDHVELSWWVNGKEVHSGVCTDPQPLKEQPALNDSRYCLSSRLRVSATFWQNPRNHFRCQVQFYGLSENDEWTQDRAKPVTQIVSAEAWGRADCGFTSESYQQGVLSATNLSVIGFRILLLKVAGFNLLMTLRLWSS

SEQ ID NO: 13918 - protein, 758 aa, synthetic construct
MALPVTALLLPLALLLHAARPEVQLVESGGGLVQPGGSLRLSCAASGFSFSDFWMSWVRQAPGKGLEWVATISQAGSEKDYVDSVKGRFTISRDNAKKSLYLQMNSLRAEDTAVYYCASGVYSFDYRGQGTLVTVSSGTGGGGSGGGGSGGGGSEFDIQMTQSPASLSASVGETVTIICRASVNIYSYLAWYQQKQGKSPQLLVYNAKILAEGVPSRFSGSGSGTQFSLKINSLQPEDFGSYYCQHHYGTFTFGSGTKLEIKRLEIQNPDPAVYQLRDSKSSDKSVCLFTDFDSQTNVSQSKDSDVYITDKCVLDMRSMDFKSNSAVAWSNKSDFACANAFNNSIIPEDTFFPSPESSCDVKLVEKSFETDTNLNFQILYEILLGKATLYAVLVSALVLMAMVKRKDSRGRAKRSGSGVKQTLNFDLLKLAGDVESNPGPTSMDWIWRILFLVGAATGAHSFEQVQLKESGPGLVAPSQSLSITCTISGFSLTSYGVHWVRQPPGKGLEWLVVIWSDGSTTYNSALKSRLSISKDNSKSQVFLKMNSLQTDDTAIYYCASHYGSTLAFASWGHGTLVTVSAATREDLKNVFPPEVAVFEPSEAEISHTQKATLVCLATGFYPDHVELSWWVNGKEVHSGVCTDPQPLKEQPALNDSRYCLSSRLRVSATFWQNPRNHFRCQVQFYGLSENDEWTQDRAKPVTQIVSAEAWGRADCGFTSESYQQGVLSATNLSVIGFRILLLKVAGFNLLMTLRLWSS

SEQ ID NO: 13919 - protein, 766 aa, synthetic construct
MALPVTALLLPLALLLHAARPEVQLVESGGGLVQPGGSLRLSCAASGFSFSDFWMSWVRQAPGKGLEWVATISQAGSEKDYVDSVKGRFTISRDNAKKSLYLQMNSLRAEDTAVYYCASGVYSFDYRGQGTLVTVSSGTGGGGSGGGGSGGGGSEFDIVMTQSHKFMSTSVGDRVSVTCKASQNVGNNVAWYQQKPGQSPKVLIYSASYRYSGVPDRFTGSGSGTDFTLTISNVQSEDLAEYFCQQYNTYPFTFGSGTKLEIKLEIQNPDPAVYQLRDSKSSDKSVCLFTDFDSQTNVSQSKDSDVYITDKCVLDMRSMDFKSNSAVAWSNKSDFACANAFNNSIIPEDTFFPSPESSCDVKLVEKSFETDTNLNFQILYEILLGKATLYAVLVSALVLMAMVKRKDSRGRAKRSGSGVKQTLNFDLLKLAGDVESNPGPTSMDWIWRILFLVGAATGAHSFEEVQLEESGGGLVQPGGSMKLSCVASGFTFSNYWMNWVRQSPEKGLEWVAEIRFKSHNYATHFAESVKGRFTISRDDSKSSVYLQMNNLRAEDTGIYYCTRRIGNSDYDWWYFDVWGAGTSVTVSSASTREDLKNVFPPEVAVFEPSEAEISHTQKATLVCLATGFYPDHVELSWWVNGKEVHSGVCTDPQPLKEQPALNDSRYCLSSRLRVSATFWQNPRNHFRCQVQFYGLSENDEWTQDRAKPVTQIVSAEAWGRADCGFTSESYQQGVLSATNLSVIGFRILLLKVAGFNLLMTLRLWSS

SEQ ID NO: 13920 - protein, 759 aa, synthetic construct
MALPVTALLLPLALLLHAARPEVQLVESGGGLVQPGGSLRLSCAASGFSFSDFWMSWVRQAPGKGLEWVATISQAGSEKDYVDSVKGRFTISRDNAKKSLYLQMNSLRAEDTAVYYCASGVYSFDYRGQGTLVTVSSGTGGGGSGGGGSGGGGSEFDQIVLTQSPAIMSASPGEKVTISCSASSSVSYMYWYQQKPGSSPKPWIYRTSNLASGVPARFSGSGSGTSYSLTISNMEAEDAAAYYCQQYHSYPTTFGGGTKLEVKLEIQNPDPAVYQLRDSKSSDKSVCLFTDFDSQTNVSQSKDSDVYITDKCVLDMRSMDFKSNSAVAWSNKSDFACANAFNNSIIPEDTFFPSPESSCDVKLVEKSFETDTNLNFQILYEILLGKATLYAVLVSALVLMAMVKRKDSRGRAKRSGSGVKQTLNFDLLKLAGDVESNPGPTSMDWIWRILFLVGAATGAHSFEEVQLVESGGGLVQPKGSLKLSCAASGFSFNTYAMNWVRQAPGKGLEWIAHIRSKSNNFATYYADSVKDRFSISRDASENILFLQMNNLKTEDTAMYYCVRQGGDFPMDYWGQGTSVTVSSTREDLKNVFPPEVAVFEPSEAEISHTQKATLVCLATGFYPDHVELSWWVNGKEVHSGVCTDPQPLKEQPALNDSRYCLSSRLRVSATFWQNPRNHFRCQVQFYGLSENDEWTQDRAKPVTQIVSAEAWGRADCGFTSESYQQGVLSATNLSVIGFRILLLKVAGFNLLMTLRLWSS

SEQ ID NO: 13921 - protein, 758 aa, synthetic construct
MALPVTALLLPLALLLHAARPEVQLVESGGGLVQPGGSLRLSCAASGFSFSDFWMSWVRQAPGKGLEWVATISQAGSEKDYVDSVKGRFTISRDNAKKSLYLQMNSLRAEDTAVYYCASGVYSFDYRGQGTLVTVSSGTGGGGSGGGGSGGGGSEFDDIQMTQSSSSFSVSLGDRVTITCMASEDIYIRLAWYQQKPGNAPRLLISAATSLETGVPSRFSGSGSGKDYTLSITSLQTEDVGTYYCQQYWSSPWTFGGGTKLEINLEIQNPDPAVYQLRDSKSSDKSVCLFTDFDSQTNVSQSKDSDVYITDKCVLDMRSMDFKSNSAVAWSNKSDFACANAFNNSIIPEDTFFPSPESSCDVKLVEKSFETDTNLNFQILYEILLGKATLYAVLVSALVLMAMVKRKDSRGRAKRSGSGVKQTLNFDLLKLAGDVESNPGPTSMDWIWRILFLVGAATGAHSFEDVQLQESGPGLVKPSQSLSLTCTVTGYSITSDYTWNWIRQFPGNKLEWMGYITYSGSTSYNPSLKSRNSITRDTSKNQFFLQLNSVTTEDTATYYCARLGRRYTMDYWGQGTSVTVSSTREDLKNVFPPEVAVFEPSEAEISHTQKATLVCLATGFYPDHVELSWWVNGKEVHSGVCTDPQPLKEQPALNDSRYCLSSRLRVSATFWQNPRNHFRCQVQFYGLSENDEWTQDRAKPVTQIVSAEAWGRADCGFTSESYQQGVLSATNLSVIGFRILLLKVAGFNLLMTLRLWSS

SEQ ID NO: 13922 - protein, 761 aa, synthetic construct
MALPVTALLLPLALLLHAARPEVQLVESGGGLVQPGGSLRLSCAASGFSFSDFWMSWVRQAPGKGLEWVATISQAGSEKDYVDSVKGRFTISRDNAKKSLYLQMNSLRAEDTAVYYCASGVYSFDYRGQGTLVTVSSGTGGGGSGGGGSGGGGSEFDDIQMTQSPSSLSASVGDRVTITCRASQSISSYLNWYQQKPGKAPKLLIYDASNLETGVPSRFSGSGSGTDFTFTISSLQPEDIATYYCQQYDNLPLTFGGGTKVDIKRLEIQNPDPAVYQLRDSKSSDKSVCLFTDFDSQTNVSQSKDSDVYITDKCVLDMRSMDFKSNSAVAWSNKSDFACANAFNNSIIPEDTFFPSPESSCDVKLVEKSFETDTNLNFQILYEILLGKATLYAVLVSALVLMAMVKRKDSRGRAKRSGSGVKQTLNFDLLKLAGDVESNPGPTSMDWIWRILFLVGAATGAHSFEQVQLVESGGGVVQPGRSLRLSCAASGFTFSSYAMHWVRQAPGKGLEWVAVISYDGSNKYYADSVKGRFTISRDNSKNTLYLQMNSLRAEDTAVYYCARAHNSSSWSFDYWGQGTLVTVSSTREDLKNVFPPEVAVFEPSEAEISHTQKATLVCLATGFYPDHVELSWWVNGKEVHSGVCTDPQPLKEQPALNDSRYCLSSRLRVSATFWQNPRNHFRCQVQFYGLSENDEWTQDRAKPVTQIVSAEAWGRADCGFTSESYQQGVLSATNLSVIGFRILLLKVAGFNLLMTLRLWSS

SEQ ID NO: 13923 - protein, 770 aa, synthetic construct
MALPVTALLLPLALLLHAARPEVQLVESGGGLVQPGGSLRLSCAASGFSFSDFWMSWVRQAPGKGLEWVATISQAGSEKDYVDSVKGRFTISRDNAKKSLYLQMNSLRAEDTAVYYCASGVYSFDYRGQGTLVTVSSGTGGGGSGGGGSGGGGSEFDDVVMTQSPLSLPVSLGDQASISCRSSQRLVHSNGNTYLHWYLQKPGQSPKLLIYRVSNRFPGVPDRFSGSGSGTDFTLKISRVEAEDLGIYFCSQSTHVPYTFGGGTKLEIKRLEIQNPDPAVYQLRDSKSSDKSVCLFTDFDSQTNVSQSKDSDVYITDKCVLDMRSMDFKSNSAVAWSNKSDFACANAFNNSIIPEDTFFPSPESSCDVKLVEKSFETDTNLNFQILYEILLGKATLYAVLVSALVLMAMVKRKDSRGRAKRSGSGVKQTLNFDLLKLAGDVESNPGPTSMDWIWRILFLVGAATGAHSFEEVRLQQSGPDLIKPGASVKMSCKASGYTFTGYVMHWVKQRPGQGLEWIGFINPYNDDIQSNERFRGKATLTSDKSSTTAYMELSSLTSEDSAVYYCARGAGYNFDGAYRFFDFWGQGTTLTVSSTREDLKNVFPPEVAVFEPSEAEISHTQKATLVCLATGFYPDHVELSWWVNGKEVHSGVCTDPQPLKEQPALNDSRYCLSSRLRVSATFWQNPRNHFRCQVQFYGLSENDEWTQDRAKPVTQIVSAEAWGRADCGFTSESYQQGVLSATNLSVIGFRILLLKVAGFNLLMTLRLWSS

SEQ ID NO: 13924 - protein, 761 aa, synthetic construct
MALPVTALLLPLALLLHAARPEVQLVESGGGLVQPGGSLRLSCAASGFSFSDFWMSWVRQAPGKGLEWVATISQAGSEKDYVDSVKGRFTISRDNAKKSLYLQMNSLRAEDTAVYYCASGVYSFDYRGQGTLVTVSSGTGGGGSGGGGSGGGGSEFDSYELTQPPSVSVSPGQTATISCSGDQLGGKYGHWYQKKPGQSPVLVLYQDRKRPAGIPERFSGSSSGNTITLTISGTQAVDEADYYCQAWDTNLGGVFGGGTKVTVLGQLEIQNPDPAVYQLRDSKSSDKSVCLFTDFDSQTNVSQSKDSDVYITDKCVLDMRSMDFKSNSAVAWSNKSDFACANAFNNSIIPEDTFFPSPESSCDVKLVEKSFETDTNLNFQILYEILLGKATLYAVLVSALVLMAMVKRKDSRGRAKRSGSGVKQTLNFDLLKLAGDVESNPGPTSMDWIWRILFLVGAATGAHSFEQVQLVESGAEVKKPGASVKVSCKASGYTFTGYYMHWVRQAPGQGLEWMGRINPNSGGTNYAQKFQGRVTMTRDTSISTAYMELSRLRSDDTAVYYCASPRGRGSAFDIWGQGTLVTVSSTREDLKNVFPPEVAVFEPSEAEISHTQKATLVCLATGFYPDHVELSWWVNGKEVHSGVCTDPQPLKEQPALNDSRYCLSSRLRVSATFWQNPRNHFRCQVQFYGLSENDEWTQDRAKPVTQIVSAEAWGRADCGFTSESYQQGVLSATNLSVIGFRILLLKVAGFNLLMTLRLWSS

SEQ ID NO: 13925 - protein, 764 aa, synthetic construct
MALPVTALLLPLALLLHAARPEVQLVESGGGLVQPGGSLRLSCAASGFSFSDFWMSWVRQAPGKGLEWVATISQAGSEKDYVDSVKGRFTISRDNAKKSLYLQMNSLRAEDTAVYYCASGVYSFDYRGQGTLVTVSSGTGGGGSGGGGSGGGGSEFDNFMLTQPHSVSESPGKTVTISCTRSSGSIASKYVQWYQQRPGSSPTTVIYEDNQRPSGVPDRFSGSIDTSSNSASLTISGLRTEDEADYYCHSYDSNNHSVFGGGTKVTVLGQLEIQNPDPAVYQLRDSKSSDKSVCLFTDFDSQTNVSQSKDSDVYITDKCVLDMRSMDFKSNSAVAWSNKSDFACANAFNNSIIPEDTFFPSPESSCDVKLVEKSFETDTNLNFQILYEILLGKATLYAVLVSALVLMAMVKRKDSRGRAKRSGSGVKQTLNFDLLKLAGDVESNPGPTSMDWIWRILFLVGAATGAHSFEEVQLVESGGGVVQPGGSLRLSCAASGFTFSSYAMSWVRQAPGKGLEWVSAISGSGGSTYYADSVKGRFSISRDNSKNTLYLQMNSLRAEDTAVYYCARTRSSGAFDIWGQGTLVTVSSTREDLKNVFPPEVAVFEPSEAEISHTQKATLVCLATGFYPDHVELSWWVNGKEVHSGVCTDPQPLKEQPALNDSRYCLSSRLRVSATFWQNPRNHFRCQVQFYGLSENDEWTQDRAKPVTQIVSAEAWGRADCGFTSESYQQGVLSATNLSVIGFRILLLKVAGFNLLMTLRLWSS

SEQ ID NO: 13926 - protein, 759 aa, synthetic construct
MALPVTALLLPLALLLHAARPEVQLVESGGGLVQPGGSLRLSCAASGFSFSDFWMSWVRQAPGKGLEWVATISQAGSEKDYVDSVKGRFTISRDNAKKSLYLQMNSLRAEDTAVYYCASGVYSFDYRGQGTLVTVSSGTGGGGSGGGGSGGGGSEFDIQMNQSPSSLSASLGDTITITCHASQNINVWLSWYQQKPGNIPKLLIYKASNLHTGVPSRFSGSGSGTGFTITISSLQPEDIATYYCQQGQSYPWTFGGGTKLEIKRLEIQNPDPAVYQLRDSKSSDKSVCLFTDFDSQTNVSQSKDSDVYITDKCVLDMRSMDFKSNSAVAWSNKSDFACANAFNNSIIPEDTFFPSPESSCDVKLVEKSFETDTNLNFQILYEILLGKATLYAVLVSALVLMAMVKRKDSRGRAKRSGSGVKQTLNFDLLKLAGDVESNPGPTSMDWIWRILFLVGAATGAHSFEEVQLQQSGPELVKPGASVKISCKASGYSFTGYFMNWVKQSHGKSLEYIGRFNPYNGETLYNQKFKGKATLTVDKSSSTVHMELLSVTSEDSAVYYCGRSGNDDAMDYWGQGTSVTVSSATREDLKNVFPPEVAVFEPSEAEISHTQKATLVCLATGFYPDHVELSWWVNGKEVHSGVCTDPQPLKEQPALNDSRYCLSSRLRVSATFWQNPRNHFRCQVQFYGLSENDEWTQDRAKPVTQIVSAEAWGRADCGFTSESYQQGVLSATNLSVIGFRILLLKVAGFNLLMTLRLWSS

SEQ ID NO: 13927 - protein, 760 aa, synthetic construct
MALPVTALLLPLALLLHAARPEVQLVESGGGLVQPGGSLRLSCAASGFSFSDFWMSWVRQAPGKGLEWVATISQAGSEKDYVDSVKGRFTISRDNAKKSLYLQMNSLRAEDTAVYYCASGVYSFDYRGQGTLVTVSSGTGGGGSGGGGSGGGGSEFEIVLTQSPATLSLSPGERATLSCRASQSVRSYLAWYQQKPGQAPRLLIYDASNRATGIPARFSGSGSGTDFTLTISSLEPEDFAVYYCQQRSNWPPTFGQGTKVEIKLEIQNPDPAVYQLRDSKSSDKSVCLFTDFDSQTNVSQSKDSDVYITDKCVLDMRSMDFKSNSAVAWSNKSDFACANAFNNSIIPEDTFFPSPESSCDVKLVEKSFETDTNLNFQILYEILLGKATLYAVLVSALVLMAMVKRKDSRGRAKRSGSGVKQTLNFDLLKLAGDVESNPGPTSMDWIWRILFLVGAATGAHSFEQLQVQESGPGLVKPSETLSLTCTVSGGSISNSYFSWGWIRQPPGKGLEWIGSFYYGEKTYYNPSLKSRATISIDTSKSQFSLKLSSVTAADTAVYYCPRGPTMIRGVIDSWGQGTLVTVSSTREDLKNVFPPEVAVFEPSEAEISHTQKATLVCLATGFYPDHVELSWWVNGKEVHSGVCTDPQPLKEQPALNDSRYCLSSRLRVSATFWQNPRNHFRCQVQFYGLSENDEWTQDRAKPVTQIVSAEAWGRADCGFTSESYQQGVLSATNLSVIGFRILLLKVAGFNLLMTLRLWSS

SEQ ID NO: 13928 - protein, 769 aa, synthetic construct
MALPVTALLLPLALLLHAARPEVQLVESGGGLVQPGGSLRLSCAASGFSFSDFWMSWVRQAPGKGLEWVATISQAGSEKDYVDSVKGRFTISRDNAKKSLYLQMNSLRAEDTAVYYCASGVYSFDYRGQGTLVTVSSGTGGGGSGGGGSGGGGSEFDIVMTQTPLSLPVTPGEPASISCRSSRSLLDSDDGNTYLDWYLQKPGQSPQLLIYTLSYRASGVPDRFSGSGSGTDFTLKISRVEAEDVGVYYCMQRVEFPITFGQGTRLEIKRLEIQNPDPAVYQLRDSKSSDKSVCLFTDFDSQTNVSQSKDSDVYITDKCVLDMRSMDFKSNSAVAWSNKSDFACANAFNNSIIPEDTFFPSPESSCDVKLVEKSFETDTNLNFQILYEILLGKATLYAVLVSALVLMAMVKRKDSRGRAKRSGSGVKQTLNFDLLKLAGDVESNPGPTSMDWIWRILFLVGAATGAHSFEQVQLVESGGGVVQPGRSLRLSCAASGFIFSRYGMHWVRQAPGKGLKWVAVIWYDGSNKLYADSVKGRFTISRDNSKNTLYLQMNSLRAEDTAVYYCARDYYDNSRHHWGFDYWGQGTLVTVSSTREDLKNVFPPEVAVFEPSEAEISHTQKATLVCLATGFYPDHVELSWWVNGKEVHSGVCTDPQPLKEQPALNDSRYCLSSRLRVSATFWQNPRNHFRCQVQFYGLSENDEWTQDRAKPVTQIVSAEAWGRADCGFTSESYQQGVLSATNLSVIGFRILLLKVAGFNLLMTLRLWSS

SEQ ID NO: 13929 - protein, 759 aa, synthetic construct
MALPVTALLLPLALLLHAARPEVQLVESGGGLVQPGGSLRLSCAASGFSFSDFWMSWVRQAPGKGLEWVATISQAGSEKDYVDSVKGRFTISRDNAKKSLYLQMNSLRAEDTAVYYCASGVYSFDYRGQGTLVTVSSGTGGGGSGGGGSGGGGSEFEIQMTQSPSSMSASLGDTITITCQATQDIFKNLNWYQQKPGKPPSLLIYYATELAEGVPSRFSGSGSGSDYSLTISNLESEDFAAYYCLQFFEFPFTFGSGTKLEMKLEIQNPDPAVYQLRDSKSSDKSVCLFTDFDSQTNVSQSKDSDVYITDKCVLDMRSMDFKSNSAVAWSNKSDFACANAFNNSIIPEDTFFPSPESSCDVKLVEKSFETDTNLNFQILYEILLGKATLYAVLVSALVLMAMVKRKDSRGRAKRSGSGVKQTLNFDLLKLAGDVESNPGPTSMDWIWRILFLVGAATGAHSFEQVQLQQSGAELVRPGTSVKVSCKASGYVFTNYWIEWIKQRPGQGLEWIGVMNPGSGETTYNEKFKGKATLTADKSSSTAYMQLSSLTSVDSAVYFCARDHDRDYYAMDYWGQGTSVTVSSTREDLKNVFPPEVAVFEPSEAEISHTQKATLVCLATGFYPDHVELSWWVNGKEVHSGVCTDPQPLKEQPALNDSRYCLSSRLRVSATFWQNPRNHFRCQVQFYGLSENDEWTQDRAKPVTQIVSAEAWGRADCGFTSESYQQGVLSATNLSVIGFRILLLKVAGFNLLMTLRLWSS

SEQ ID NO: 13930 - protein, 756 aa, synthetic construct
MALPVTALLLPLALLLHAARPEVQLVESGGGLVQPGGSLRLSCAASGFSFSDFWMSWVRQAPGKGLEWVATISQAGSEKDYVDSVKGRFTISRDNAKKSLYLQMNSLRAEDTAVYYCASGVYSFDYRGQGTLVTVSSGTGGGGSGGGGSGGGGSEFDILLTQSPAILSVSPGERVSFSCRASQNIGTSIHWYQQRTNGSPRLLIKYASESVSGIPSRFSGSGSGTDFTLSINSVESEDIADYYCQHTNSWPTTFGGGTKLEIKRLEIQNPDPAVYQLRDSKSSDKSVCLFTDFDSQTNVSQSKDSDVYITDKCVLDMRSMDFKSNSAVAWSNKSDFACANAFNNSIIPEDTFFPSPESSCDVKLVEKSFETDTNLNFQILYEILLGKATLYAVLVSALVLMAMVKRKDSRGRAKRSGSGVKQTLNFDLLKLAGDVESNPGPTSMDWIWRILFLVGAATGAHSFEQVQLQQSDAELVKPGASVKISCKASGYTFTDHAIHWVKQKPEQGLEWIGYFSPGNGDIKYNEKFKGKATLTADKSSSTAYMQLNSLTSEDSAVYFCKRSYGNYDYWGQGTTLTVSSTREDLKNVFPPEVAVFEPSEAEISHTQKATLVCLATGFYPDHVELSWWVNGKEVHSGVCTDPQPLKEQPALNDSRYCLSSRLRVSATFWQNPRNHFRCQVQFYGLSENDEWTQDRAKPVTQIVSAEAWGRADCGFTSESYQQGVLSATNLSVIGFRILLLKVAGFNLLMTLRLWSS

SEQ ID NO: 13931 - protein, 761 aa, synthetic construct
MALPVTALLLPLALLLHAARPEVQLVESGGGLVQPGGSLRLSCAASGFSFSDFWMSWVRQAPGKGLEWVATISQAGSEKDYVDSVKGRFTISRDNAKKSLYLQMNSLRAEDTAVYYCASGVYSFDYRGQGTLVTVSSGTGGGGSGGGGSGGGGSEFDIVMTQSPDSLAVSLGERATINCKSSQSLLNSGDQKNYLTWYQQKPGQPPKLLIYWASTRESGVPDRFSGSGSGTDFTLTISSLQAEDVAVYYCQNDYSYPLTFGQGTKVEIKLEIQNPDPAVYQLRDSKSSDKSVCLFTDFDSQTNVSQSKDSDVYITDKCVLDMRSMDFKSNSAVAWSNKSDFACANAFNNSIIPEDTFFPSPESSCDVKLVEKSFETDTNLNFQILYEILLGKATLYAVLVSALVLMAMVKRKDSRGRAKRSGSGVKQTLNFDLLKLAGDVESNPGPTSMDWIWRILFLVGAATGAHSFEQVQLVQSGAEVKKTGSSVKVSCKASGYTFTDHAIHVWRQAPGQALEWMGHFSPGNTDIKYNDKFKGRVTLTVDRSMSTAYMELSSLRSEDTAMYYCKTSTFFFDYWGQGTMVTVSSTREDLKNVFPPEVAVFEPSEAEISHTQKATLVCLATGFYPDHVELSWWVNGKEVHSGVCTDPQPLKEQPALNDSRYCLSSRLRVSATFWQNPRNHFRCQVQFYGLSENDEWTQDRAKPVTQIVSAEAWGRADCGFTSESYQQGVLSATNLSVIGFRILLLKVAGFNLLMTLRLWSS

SEQ ID NO: 13932 - protein, 760 aa, synthetic construct
MALPVTALLLPLALLLHAARPEVQLVESGGGLVQPGGSLRLSCAASGFSFSDFWMSWVRQAPGKGLEWVATISQAGSEKDYVDSVKGRFTISRDNAKKSLYLQMNSLRAEDTAVYYCASGVYSFDYRGQGTLVTVSSGTGGGGSGGGGSGGGGSEFDIQMTQSPSSLSASVGDRVTITCKASQDVSIAVAWYQQKPGKAPKVLIYSASYRYTGVPDRFSGSGSGTDFTFTISSLQPEDIAVYYCQQHYITPLTFGGGTKVEIKLEIQNPDPAVYQLRDSKSSDKSVCLFTDFDSQTNVSQSKDSDVYITDKCVLDMRSMDFKSNSAVAWSNKSDFACANAFNNSIIPEDTFFPSPESSCDVKLVEKSFETDTNLNFQILYEILLGKATLYAVLVSALVLMAMVKRKDSRGRAKRSGSGVKQTLNFDLLKLAGDVESNPGPTSMDWIWRILFLVGAATGAHSFEQIQLVQSGHEVKKPGASVKVSCKASGYTFTNYGMNWVRQAPGQGLEWMGWINTKTGEPTYAEEFKGRFVFSLETSASTAYLQISSLKAEDTAMYFCGRGGYGSSYWYFDVWGQGTTVTVSSTREDLKNVFPPEVAVFEPSEAEISHTQKATLVCLATGFYPDHVELSWWVNGKEVHSGVCTDPQPLKEQPALNDSRYCLSSRLRVSATFWQNPRNHFRCQVQFYGLSENDEWTQDRAKPVTQIVSAEAWGRADCGFTSESYQQGVLSATNLSVIGFRILLLKVAGFNLLMTLRLWSS

SEQ ID NO: 13933 - protein, 762 aa, synthetic construct
MALPVTALLLPLALLLHAARPEVQLVESGGGLVQPGGSLRLSCAASGFSFSDFWMSWVRQAPGKGLEWVATISQAGSEKDYVDSVKGRFTISRDNAKKSLYLQMNSLRAEDTAVYYCASGVYSFDYRGQGTLVTVSSGTGGGGSGGGGSGGGGSEFDIVMTQSPDSLAVSLGERATINCRASKSVSTSGYSYMHWYQQKPGQPPKLLIYLASNLESGVPDRFSGSGSGTDFTLTISSLQAEDVAVYYCQHSRELPYTFGQGTKLEIKLEIQNPDPAVYQLRDSKSSDKSVCLFTDFDSQTNVSQSKDSDVYITDKCVLDMRSMDFKSNSAVAWSNKSDFACANAFNNSIIPEDTFFPSPESSCDVKLVEKSFETDTNLNFQILYEILLGKATLYAVLVSALVLMAMVKRKDSRGRAKRSGSGVKQTLNFDLLKLAGDVESNPGPTSMDWIWRILFLVGAATGAHSFEQVQLQESGPGLVKPSETLSLTCTVSGGSISSYGVHWIRQPPGKGLEWIGVIWTSGVTDYNSALMGRVTISVDTSKNQFSLKLSSVTAADTAVYYCARDGDYDRYTMDYWGQGTLVTVSSTREDLKNVFPPEVAVFEPSEAEISHTQKATLVCLATGFYPDHVELSWWVNGKEVHSGVCTDPQPLKEQPALNDSRYCLSSRLRVSATFWQNPRNHFRCQVQFYGLSENDEWTQDRAKPVTQIVSAEAWGRADCGFTSESYQQGVLSATNLSVIGFRILLLKVAGFNLLMTLRLWSS

SEQ ID NO: 13934 - protein, 762 aa, synthetic construct
MALPVTALLLPLALLLHAARPEVQLVESGGGLVQPGGSLRLSCAASGFSFSDFWMSWVRQAPGKGLEWVATISQAGSEKDYVDSVKGRFTISRDNAKKSLYLQMNSLRAEDTAVYYCASGVYSFDYRGQGTLVTVSSGTGGGGSGGGGSGGGGSEFDIQMTQSPSSLSASVGDRVTITCRASQSIGTSLHWYQQKPGKAPKLLIKFASRLQSGVPSRFSGSGSGTDFTLTISSLQPEDFATYYCQQSPGFPPTFGQGTKLEIKRLEIQNPDPAVYQLRDSKSSDKSVCLFTDFDSQTNVSQSKDSDVYITDKCVLDMRSMDFKSNSAVAWSNKSDFACANAFNNSIIPEDTFFPSPESSCDVKLVEKSFETDTNLNFQILYEILLGKATLYAVLVSALVLMAMVKRKDSRGRAKRSGSGVKQTLNFDLLKLAGDVESNPGPTSMDWIWRILFLVGAATGAHSFEQVQLVESGGGLVKPGGSLRLSCAASGFSITTSGYYWTWIRQFPGKGLEWMGYIGYNSKTYYNPALKSRITISRDNAKNSLYLQMNSLRAEDTAVYYCARSLYGGYKDAFDSWGQGTLVTVSSTREDLKNVFPPEVAVFEPSEAEISHTQKATLVCLATGFYPDHVELSWWVNGKEVHSGVCTDPQPLKEQPALNDSRYCLSSRLRVSATFWQNPRNHFRCQVQFYGLSENDEWTQDRAKPVTQIVSAEAWGRADCGFTSESYQQGVLSATNLSVIGFRILLLKVAGFNLLMTLRLWSS

SEQ ID NO: 13935 - protein, 767 aa, synthetic construct
MALPVTALLLPLALLLHAARPEVQLVESGGGLVQPGGSLRLSCAASGFSFSDFWMSWVRQAPGKGLEWVATISQAGSEKDYVDSVKGRFTISRDNAKKSLYLQMNSLRAEDTAVYYCASGVYSFDYRGQGTLVTVSSGTGGGGSGGGGSGGGGSEFDEIVLTQSPLSLPVTPGEPASISCRSSQSLLHSIGYNYLDWYLQKPGQSPQLLIYLGSNRASGVPDRFSGSGSGTDFTLKISRVEAEDVGVYYCMQALQTPLTFGGGTKVEIKRLEIQNPDPAVYQLRDSKSSDKSVCLFTDFDSQTNVSQSKDSDVYITDKCVLDMRSMDFKSNSAVAWSNKSDFACANAFNNSIIPEDTFFPSPESSCDVKLVEKSFETDTNLNFQILYEILLGKATLYAVLVSALVLMAMVKRKDSRGRAKRSGSGVKQTLNFDLLKLAGDVESNPGPTSMDWIWRILFLVGAATGAHSFEEVQLVESGGGVVQPGRSLRLSCAASGFTFRSYGMHWVRQAPGKGLEWVAVISYDGSNKYYTDSVNGRFTISRDNSKNTLYLQMNSLRAEDTAVYYCARGGGYYETSGPDYWGQGTLVTVSSTREDLKNVFPPEVAVFEPSEAEISHTQKATLVCLATGFYPDHVELSWWVNGKEVHSGVCTDPQPLKEQPALNDSRYCLSSRLRVSATFWQNPRNHFRCQVQFYGLSENDEWTQDRAKPVTQIVSAEAWGRADCGFTSESYQQGVLSATNLSVIGFRILLLKVAGFNLLMTLRLWSS

SEQ ID NO: 13936 - protein, 765 aa, synthetic construct
MALPVTALLLPLALLLHAARPEVQLVESGGGLVQPGGSLRLSCAASGFSFSDFWMSWVRQAPGKGLEWVATISQAGSEKDYVDSVKGRFTISRDNAKKSLYLQMNSLRAEDTAVYYCASGVYSFDYRGQGTLVTVSSGTGGGGSGGGGSGGGGSEFDDVVMTQSPLSLPVTPGEPASISCRSSQSLLHSIGYNYLHWFLQKPGQSPQLLIYLGSNRASGVPDRFSGSGSGTDFTLKISRVEAEDVGVYYCMQALQTPPTFGQGTRLEIKRLEIQNPDPAVYQLRDSKSSDKSVCLFTDFDSQTNVSQSKDSDVYITDKCVLDMRSMDFKSNSAVAWSNKSDFACANAFNNSIIPEDTFFPSPESSCDVKLVEKSFETDTNLNFQILYEILLGKATLYAVLVSALVLMAMVKRKDSRGRAKRSGSGVKQTLNFDLLKLAGDVESNPGPTSMDWIWRILFLVGAATGAHSFEQLQLQESGPGLVKPSGTLSLTCAVSGGSISSSNWWSWVRQPPGKGLEWIGEIYHSGSTNYNPSLKSRVTISVDKSKNQFSLKLSSVTAADTAVYYCVGSPYGDYVLDYWGQGTLVTVSSTREDLKNVFPPEVAVFEPSEAEISHTQKATLVCLATGFYPDHVELSWWVNGKEVHSGVCTDPQPLKEQPALNDSRYCLSSRLRVSATFWQNPRNHFRCQVQFYGLSENDEWTQDRAKPVTQIVSAEAWGRADCGFTSESYQQGVLSATNLSVIGFRILLLKVAGFNLLMTLRLWSS

SEQ ID NO: 13937 - protein, 763 aa, synthetic construct
MALPVTALLLPLALLLHAARPEVQLVESGGGLVQPGGSLRLSCAASGFSFSDFWMSWVRQAPGKGLEWVATISQAGSEKDYVDSVKGRFTISRDNAKKSLYLQMNSLRAEDTAVYYCASGVYSFDYRGQGTLVTVSSGTGGGGSGGGGSGGGGSEFDEIVLTQSPGTLSLSLGERATLSCRASQSISSSFLAWYQQKPGQAPKLLIYAASTRATGIPDRFSGSGSGTDFTLTISRLEPEDFAVYYCQQYGRSLSFGGGTKVEVKLEIQNPDPAVYQLRDSKSSDKSVCLFTDFDSQTNVSQSKDSDVYITDKCVLDMRSMDFKSNSAVAWSNKSDFACANAFNNSIIPEDTFFPSPESSCDVKLVEKSFETDTNLNFQILYEILLGKATLYAVLVSALVLMAMVKRKDSRGRAKRSGSGVKQTLNFDLLKLAGDVESNPGPTSMDWIWRILFLVGAATGAHSFEQVQLQQSGPGLVKPSQTLSLTCAISGDSVSGNSATWNWIRQSPSRGLEWLGRTYYRSKWNHDYAESVKSRITINPDTSKNQFSLQLNSVTPEDTAVYYCARGDSSSWYAFDYWGQGTLVTVSSTREDLKNVFPPEVAVFEPSEAEISHTQKATLVCLATGFYPDHVELSWWVNGKEVHSGVCTDPQPLKEQPALNDSRYCLSSRLRVSATFWQNPRNHFRCQVQFYGLSENDEWTQDRAKPVTQIVSAEAWGRADCGFTSESYQQGVLSATNLSVIGFRILLLKVAGFNLLMTLRLWSS

SEQ ID NO: 13938 - protein, 762 aa, synthetic construct
MALPVTALLLPLALLLHAARPEVQLVESGGGLVQPGGSLRLSCAASGFSFSDFWMSWVRQAPGKGLEWVATISQAGSEKDYVDSVKGRFTISRDNAKKSLYLQMNSLRAEDTAVYYCASGVYSFDYRGQGTLVTVSSGTGGGGSGGGGSGGGGSEFDQSVVTQPPSVSVAPGKTARITCGRNNIGSKSVHWYQQKPGQAPVLVVYDDSDRPSGIPERFSGSNSGNTATLTISRVEAGDEADYYCQVWDSSSDHVVFGGGTKLTVLGLEIQNPDPAVYQLRDSKSSDKSVCLFTDFDSQTNVSQSKDSDVYITDKCVLDMRSMDFKSNSAVAWSNKSDFACANAFNNSIIPEDTFFPSPESSCDVKLVEKSFETDTNLNFQILYEILLGKATLYAVLVSALVLMAMVKRKDSRGRAKRSGSGVKQTLNFDLLKLAGDVESNPGPTSMDWIWRILFLVGAATGAHSFEVQLVQSGGGVMRPGGSLRLSCAASGFTFDDYGMSWVRQAPGKGLEWVSGINWNGGSTGYADSVRGRFTISRDNAKNSLYLQMNSLRAEDTALYYCARERGYGYHDPHDYWGQGTLVTVSSTREDLKNVFPPEVAVFEPSEAEISHTQKATLVCLATGFYPDHVELSWWVNGKEVHSGVCTDPQPLKEQPALNDSRYCLSSRLRVSATFWQNPRNHFRCQVQFYGLSENDEWTQDRAKPVTQIVSAEAWGRADCGFTSESYQQGVLSATNLSVIGFRILLLKVAGFNLLMTLRLWSS

SEQ ID NO: 13939 - protein, 775 aa, synthetic construct
MALPVTALLLPLALLLHAARPEVQLVESGGGLVQPGGSLRLSCAASGFSFSDFWMSWVRQAPGKGLEWVATISQAGSEKDYVDSVKGRFTISRDNAKKSLYLQMNSLRAEDTAVYYCASGVYSFDYRGQGTLVTVSSGTGGGGSGGGGSGGGGSEFEQKLISEEDLEFQAVVTQPPSASGTPGQRVTISCSGSSSNIGSNTVNWYQQVPGTAPKLLIYSNNQRPSGVPDRFSGSKSGTSASLAISGLQSEDEADYYCAAWDDSLNGWVFGGGTKLTVLLEIQNPDPAVYQLRDSKSSDKSVCLFTDFDSQTNVSQSKDSDVYITDKCVLDMRSMDFKSNSAVAWSNKSDFACANAFNNSIIPEDTFFPSPESSCDVKLVEKSFETDTNLNFQILYEILLGKATLYAVLVSALVLMAMVKRKDSRGRAKRSGSGVKQTLNFDLLKLAGDVESNPGPTSMDWIWRILFLVGAATGAHSFEQMQLVQSGAEVKEPGESLRISCKGSGYSFTNFWISWVRQMPGKGLEWMGRVDPGYSYSTYSPSFQGHVTISADKSTSTAYLQWNSLKASDTAMYYCARVQYSGYYDWFDPWGQGTLVTVSSTREDLKNVFPPEVAVFEPSEAEISHTQKATLVCLATGFYPDHVELSWWVNGKEVHSGVCTDPQPLKEQPALNDSRYCLSSRLRVSATFWQNPRNHFRCQVQFYGLSENDEWTQDRAKPVTQIVSAEAWGRADCGFTSESYQQGVLSATNLSVIGFRILLLKVAGFNLLMTLRLWSS

SEQ ID NO: 13940 - protein, 769 aa, synthetic construct
MALPVTALLLPLALLLHAARPEVQLVESGGGLVQPGGSLRLSCAASGFSFSDFWMSWVRQAPGKGLEWVATISQAGSEKDYVDSVKGRFTISRDNAKKSLYLQMNSLRAEDTAVYYCASGVYSFDYRGQGTLVTVSSGTGGGGSGGGGSGGGGSEFEQKLISEEDLEFDIQMTQSPSTLSASVGDRVTITCRASQNINKWLAWYQQRPGKAPQLLIYKASSLESGVPSRFSGSGSGTEYTLTISSLQPDDFATYYCQQYNSYATFGQGTKVEIKRLEIQNPDPAVYQLRDSKSSDKSVCLFTDFDSQTNVSQSKDSDVYITDKCVLDMRSMDFKSNSAVAWSNKSDFACANAFNNSIIPEDTFFPSPESSCDVKLVEKSFETDTNLNFQILYEILLGKATLYAVLVSALVLMAMVKRKDSRGRAKRSGSGVKQTLNFDLLKLAGDVESNPGPTSMDWIWRILFLVGAATGAHSFEQVQLVQSGAEVKKPGESLKISCKGSGYNFSNKWIGWVRQLPGRGLEWIAIIYPGYSDITYSPSFQGRVTISADTSINTAYLHWHSLKASDTAMYYCVRHTALAGFDYWGLGTLVTVSSTREDLKNVFPPEVAVFEPSEAEISHTQKATLVCLATGFYPDHVELSWWVNGKEVHSGVCTDPQPLKEQPALNDSRYCLSSRLRVSATFWQNPRNHFRCQVQFYGLSENDEWTQDRAKPVTQIVSAEAWGRADCGFTSESYQQGVLSATNLSVIGFRILLLKVAGFNLLMTLRLWSS

SEQ ID NO: 13941 - protein, 761 aa, synthetic construct
MALPVTALLLPLALLLHAARPEVQLVESGGGLVQPGGSLRLSCAASGFSFSDFWMSWVRQAPGKGLEWVATISQAGSEKDYVDSVKGRFTISRDNAKKSLYLQMNSLRAEDTAVYYCASGVYSFDYRGQGTLVTVSSGTGGGGSGGGGSGGGGSEFDIVLTQSPASLAVSLGQRATISCRASESVDNYGNTFMHWYQQKPGQPPKLLIYRASNLESGIPARFSGSGSRTDFTLTINPVEADDVATYYCQQSNEDPPTFGAGTKLELKLEIQNPDPAVYQLRDSKSSDKSVCLFTDFDSQTNVSQSKDSDVYITDKCVLDMRSMDFKSNSAVAWSNKSDFACANAFNNSIIPEDTFFPSPESSCDVKLVEKSFETDTNLNFQILYEILLGKATLYAVLVSALVLMAMVKRKDSRGRAKRSGSGVKQTLNFDLLKLAGDVESNPGPTSMDWIWRILFLVGAATGAHSFEQIQLVQSGPELKKPGETVKISCKASGYIFTNYGMNWVKQAPGKSFKWMGWINTYTGESTYSADFKGRFAFSLETSASTAYLHINDLKNEDTATYFCARSGGYDPMDYWGQGTSVTVSSTREDLKNVFPPEVAVFEPSEAEISHTQKATLVCLATGFYPDHVELSWWVNGKEVHSGVCTDPQPLKEQPALNDSRYCLSSRLRVSATFWQNPRNHFRCQVQFYGLSENDEWTQDRAKPVTQIVSAEAWGRADCGFTSESYQQGVLSATNLSVIGFRILLLKVAGFNLLMTLRLWSS

SEQ ID NO: 13942 - protein, 760 aa, synthetic construct
MALPVTALLLPLALLLHAARPEVQLVESGGGLVQPGGSLRLSCAASGFSFSDFWMSWVRQAPGKGLEWVATISQAGSEKDYVDSVKGRFTISRDNAKKSLYLQMNSLRAEDTAVYYCASGVYSFDYRGQGTLVTVSSGTGGGGSGGGGSGGGGSEFDEIVLTQSPGTLSLSPGERATLSCRASQSVSNTYLAWYHQRPGQAPRLLIYGASSRATGIPDRFSGSGSGTDFALTISSLEPEDFAVYYCQQYSNSWTFGQGTKVEIKRLEIQNPDPAVYQLRDSKSSDKSVCLFTDFDSQTNVSQSKDSDVYITDKCVLDMRSMDFKSNSAVAWSNKSDFACANAFNNSIIPEDTFFPSPESSCDVKLVEKSFETDTNLNFQILYEILLGKATLYAVLVSALVLMAMVKRKDSRGRAKRSGSGVKQTLNFDLLKLAGDVESNPGPTSMDWIWRILFLVGAATGAHSFEQVQLVESGGGVVQPGRSLRLSCAASGFTFSSYDMHWVRQAPGKGLEWVAVISYDGTNEYYADSVKGRFTISRDTSKNTLYLQMNSLRAEDTAVYYCARERYFDWSFDYWGQGTLVSVSSTREDLKNVFPPEVAVFEPSEAEISHTQKATLVCLATGFYPDHVELSWWVNGKEVHSGVCTDPQPLKEQPALNDSRYCLSSRLRVSATFWQNPRNHFRCQVQFYGLSENDEWTQDRAKPVTQIVSAEAWGRADCGFTSESYQQGVLSATNLSVIGFRILLLKVAGFNLLMTLRLWSS

SEQ ID NO: 13943 - protein, 759 aa, synthetic construct
MALPVTALLLPLALLLHAARPEVQLVESGGGLVQPGGSLRLSCAASGFSFSDFWMSWVRQAPGKGLEWVATISQAGSEKDYVDSVKGRFTISRDNAKKSLYLQMNSLRAEDTAVYYCASGVYSFDYRGQGTLVTVSSGTGGGGSGGGGSGGGGSEFDELTQDPAVSVALGQTVRITCQGDSLRSNYANWYQQKPGQAPVLVIYGQNNRPSGIPDRFSGSSSGNTASLTITGAQAADEADYYCDSRVSTGNHVVFGGGTKLTVLGQLEIQNPDPAVYQLRDSKSSDKSVCLFTDFDSQTNVSQSKDSDVYITDKCVLDMRSMDFKSNSAVAWSNKSDFACANAFNNSIIPEDTFFPSPESSCDVKLVEKSFETDTNLNFQILYEILLGKATLYAVLVSALVLMAMVKRKDSRGRAKRSGSGVKQTLNFDLLKLAGDVESNPGPTSMDWIWRILFLVGAATGAHSFEEVQLVQSGAEVKKPGASVKVSCKASGYTFTSYAMHWVRQAPGQRLEWMGWINAGNGNTKYSQKFQGRVTITRDTSASTAYMELSSLRSEDTAVYYCARDISYGSFDYWGQGTLVTVSSTREDLKNVFPPEVAVFEPSEAEISHTQKATLVCLATGFYPDHVELSWWVNGKEVHSGVCTDPQPLKEQPALNDSRYCLSSRLRVSATFWQNPRNHFRCQVQFYGLSENDEWTQDRAKPVTQIVSAEAWGRADCGFTSESYQQGVLSATNLSVIGFRILLLKVAGFNLLMTLRLWSS

SEQ ID NO: 13944 - protein, 761 aa, synthetic construct
MALPVTALLLPLALLLHAARPEVQLVESGGGLVQPGGSLRLSCAASGFSFSDFWMSWVRQAPGKGLEWVATISQAGSEKDYVDSVKGRFTISRDNAKKSLYLQMNSLRAEDTAVYYCASGVYSFDYRGQGTLVTVSSGTGGGGSGGGGSGGGGSEFDDIVLTQTPATLSVTPGDSVSLSCRASQSISNNLHWYQQKSHESPRLLIKNASQSISGIPSKFSGSGSGTDFTLRINSVETEDFGMYFCQQSNSWPYTFGSGTKLEIKLEIQNPDPAVYQLRDSKSSDKSVCLFTDFDSQTNVSQSKDSDVYITDKCVLDMRSMDFKSNSAVAWSNKSDFACANAFNNSIIPEDTFFPSPESSCDVKLVEKSFETDTNLNFQILYEILLGKATLYAVLVSALVLMAMVKRKDSRGRAKRSGSGVKQTLNFDLLKLAGDVESNPGPTSMDWIWRILFLVGAATGAHSFEQVKLQQSGPELVKPGASVKISCKASGYSFTGYYMHWVKQSHGNILDWIGYIYPYNGVSSYNQKFKGKATLTVDKSSSTAYMELRSLTSEDSAVYYCARERGLYQLRAMDYWGQGTSVTVSSTREDLKNVFPPEVAVFEPSEAEISHTQKATLVCLATGFYPDHVELSWWVNGKEVHSGVCTDPQPLKEQPALNDSRYCLSSRLRVSATFWQNPRNHFRCQVQFYGLSENDEWTQDRAKPVTQIVSAEAWGRADCGFTSESYQQGVLSATNLSVIGFRILLLKVAGFNLLMTLRLWSS

SEQ ID NO: 13945 - protein, 752 aa, synthetic construct
MALPVTALLLPLALLLHAARPEVQLVESGGGLVQPGGSLRLSCAASGFSFSDFWMSWVRQAPGKGLEWVATISQAGSEKDYVDSVKGRFTISRDNAKKSLYLQMNSLRAEDTAVYYCASGVYSFDYRGQGTLVTVSSGTGGGGSGGGGSGGGGSEFDDIVMTQTPAIMSASPGQKVTITCSASSSVNYMHWYQQKLGSSPKLWIYDTSKLAPGVPARFSGSGSGTSYSLTISSMEAEDAASYFCHQWSSYPYTFGSGTKLEIKLEIQNPDPAVYQLRDSKSSDKSVCLFTDFDSQTNVSQSKDSDVYITDKCVLDMRSMDFKSNSAVAWSNKSDFACANAFNNSIIPEDTFFPSPESSCDVKLVEKSFETDTNLNFQILYEILLGKATLYAVLVSALVLMAMVKRKDSRGRAKRSGSGVKQTLNFDLLKLAGDVESNPGPTSMDWIWRILFLVGAATGAHSFEEVQLQESGPDLVKPSQSLSLTCTVTGYSITSGYGWHWIRQFPGNKLEWMGYIHYSGSTTYNPSLKSRISISRDTSKNQFFLQLNSVTTEDTATYYCARSLRYWGQGTTLTVSSTREDLKNVFPPEVAVFEPSEAEISHTQKATLVCLATGFYPDHVELSWWVNGKEVHSGVCTDPQPLKEQPALNDSRYCLSSRLRVSATFWQNPRNHFRCQVQFYGLSENDEWTQDRAKPVTQIVSAEAWGRADCGFTSESYQQGVLSATNLSVIGFRILLLKVAGFNLLMTLRLWSS

SEQ ID NO: 13946 - protein, 755 aa, synthetic construct
MALPVTALLLPLALLLHAARPEVQLVESGGGLVQPGGSLRLSCAASGFSFSDFWMSWVRQAPGKGLEWVATISQAGSEKDYVDSVKGRFTISRDNAKKSLYLQMNSLRAEDTAVYYCASGVYSFDYRGQGTLVTVSSGTGGGGSGGGGSGGGGSEFDDIQMTQSPSSLSASVGDRVTITCSATSSISYMHWYQQKPGKAPKGWIYDTSKLAHGVPSRFSGSGSGTDFTLTISSLQPEDFATYYCHQRRSYPFTFGQGTKVEIKLEIQNPDPAVYQLRDSKSSDKSVCLFTDFDSQTNVSQSKDSDVYITDKCVLDMRSMDFKSNSAVAWSNKSDFACANAFNNSIIPEDTFFPSPESSCDVKLVEKSFETDTNLNFQILYEILLGKATLYAVLVSALVLMAMVKRKDSRGRAKRSGSGVKQTLNFDLLKLAGDVESNPGPTSMDWIWRILFLVGAATGAHSFEEVQLVQSGAEVKKPGASVKVSCKASGYTFTNFWIHWVRQAPGQGLEWIGEIDPSDSYTNYNQKFKGRVTITRDTSTSTAYLELSSLRSEDTAVYYCAREITTVDYWGQGTLVTVSSTREDLKNVFPPEVAVFEPSEAEISHTQKATLVCLATGFYPDHVELSWWVNGKEVHSGVCTDPQPLKEQPALNDSRYCLSSRLRVSATFWQNPRNHFRCQVQFYGLSENDEWTQDRAKPVTQIVSAEAWGRADCGFTSESYQQGVLSATNLSVIGFRILLLKVAGFNLLMTLRLWSS

SEQ ID NO: 13947 - protein, 762 aa, synthetic construct
MALPVTALLLPLALLLHAARPEVQLVESGGGLVQPGGSLRLSCAASGFSFSDFWMSWVRQAPGKGLEWVATISQAGSEKDYVDSVKGRFTISRDNAKKSLYLQMNSLRAEDTAVYYCASGVYSFDYRGQGTLVTVSSGTGGGGSGGGGSGGGGSEFDDIQMTQSPSSLSASVGDRVTITCKASQGFNKYVAWYQQKPGKAPKLLIYYTSTLQPGVPSRFSGSGSGRDYTLTISSLQPEDFATYYCLQYGNLLYAFGQGTKVEIKRLEIQNPDPAVYQLRDSKSSDKSVCLFTDFDSQTNVSQSKDSDVYITDKCVLDMRSMDFKSNSAVAWSNKSDFACANAFNNSIIPEDTFFPSPESSCDVKLVEKSFETDTNLNFQILYEILLGKATLYAVLVSALVLMAMVKRKDSRGRAKRSGSGVKQTLNFDLLKLAGDVESNPGPTSMDWIWRILFLVGAATGAHSFEEVQLVQSGAEVKKPGASVKVSCKASGYTFTSYWIGWVRQAPGQGLEWIGDIYPGGGYTNYNEKFKGRVTITRDTSTSTAYLELSSLRSEDTAVYYCARLDGSSYRGAMDSWGQGTLVTVSSTREDLKNVFPPEVAVFEPSEAEISHTQKATLVCLATGFYPDHVELSWWVNGKEVHSGVCTDPQPLKEQPALNDSRYCLSSRLRVSATFWQNPRNHFRCQVQFYGLSENDEWTQDRAKPVTQIVSAEAWGRADCGFTSESYQQGVLSATNLSVIGFRILLLKVAGFNLLMTLRLWSS

SEQ ID NO: 13948 - protein, 758 aa, synthetic construct
MALPVTALLLPLALLLHAARPEVQLVESGGGLVQPGGSLRLSCAASGFSFSDFWMSWVRQAPGKGLEWVATISQAGSEKDYVDSVKGRFTISRDNAKKSLYLQMNSLRAEDTAVYYCASGVYSFDYRGQGTLVTVSSGTGGGGSGGGGSGGGGSEFDDIQMTQSPSSLSASVGDRVTITCRASQDIRYYLNWYQQKPGKAPKLLIYVASSLQSGVPSRFSGSGSGTEFTLTVSSLQPEDFATYYCLQVYSTPRTFGQGTKVEIKLEIQNPDPAVYQLRDSKSSDKSVCLFTDFDSQTNVSQSKDSDVYITDKCVLDMRSMDFKSNSAVAWSNKSDFACANAFNNSIIPEDTFFPSPESSCDVKLVEKSFETDTNLNFQILYEILLGKATLYAVLVSALVLMAMVKRKDSRGRAKRSGSGVKQTLNFDLLKLAGDVESNPGPTSMDWIWRILFLVGAATGAHSFEEVQLVESGGGLAKPGGSLRLSCAASGFRFTFNNYYMDWVRQAPGQGLEWVSRISSSGDPTWYADSVKGRFTISRENAKNTLFLQMNSLRAEDTAVYYCASLTTGSDSWGQGVLVTVSSTREDLKNVFPPEVAVFEPSEAEISHTQKATLVCLATGFYPDHVELSWWVNGKEVHSGVCTDPQPLKEQPALNDSRYCLSSRLRVSATFWQNPRNHFRCQVQFYGLSENDEWTQDRAKPVTQIVSAEAWGRADCGFTSESYQQGVLSATNLSVIGFRILLLKVAGFNLLMTLRLWSS

SEQ ID NO: 13949 - protein, 758 aa, synthetic construct
MALPVTALLLPLALLLHAARPEVQLVESGGGLVQPGGSLRLSCAASGFSFSDFWMSWVRQAPGKGLEWVATISQAGSEKDYVDSVKGRFTISRDNAKKSLYLQMNSLRAEDTAVYYCASGVYSFDYRGQGTLVTVSSGTGGGGSGGGGSGGGGSEFEIVMTQSPATLSVSPGERATLSCRASQSVSRNLAWYQQKPGQAPRLLIYGASTRATGIPARFSGSGSGTEFTLTIGSLQSEDFAVYYCQQYKTWPRTFGQGTNVEIKLEIQNPDPAVYQLRDSKSSDKSVCLFTDFDSQTNVSQSKDSDVYITDKCVLDMRSMDFKSNSAVAWSNKSDFACANAFNNSIIPEDTFFPSPESSCDVKLVEKSFETDTNLNFQILYEILLGKATLYAVLVSALVLMAMVKRKDSRGRAKRSGSGVKQTLNFDLLKLAGDVESNPGPTSMDWIWRILFLVGAATGAHSFEQVQLQQWGAGLLKPSETLSLTCAVFGGSFSGYYWSWIRQPPGKGLEWIGEINHRGNTNDNPSLKSRVTISVDTSKNQFALKLSSVTAADTAVYYCARERGYTYGNFDHWGQGTLVTVSSTREDLKNVFPPEVAVFEPSEAEISHTQKATLVCLATGFYPDHVELSWWVNGKEVHSGVCTDPQPLKEQPALNDSRYCLSSRLRVSATFWQNPRNHFRCQVQFYGLSENDEWTQDRAKPVTQIVSAEAWGRADCGFTSESYQQGVLSATNLSVIGFRILLLKVAGFNLLMTLRLWSS

SEQ ID NO: 13950 - protein, 759 aa, synthetic construct
MALPVTALLLPLALLLHAARPEVQLVESGGGLVQPGGSLRLSCAASGFSFSDFWMSWVRQAPGKGLEWVATISQAGSEKDYVDSVKGRFTISRDNAKKSLYLQMNSLRAEDTAVYYCASGVYSFDYRGQGTLVTVSSGTGGGGSGGGGSGGGGSEFEIVMTPSSATLSVSPGERATLSCRASQSVSRNLAWYQQKPGQAPRLLIYGASTRATGIPARFSGSGSGTEFTLTISSLQSEDFAVYYCHQYSNWMCSFGQGTKLEIKLEIQNPDPAVYQLRDSKSSDKSVCLFTDFDSQTNVSQSKDSDVYITDKCVLDMRSMDFKSNSAVAWSNKSDFACANAFNNSIIPEDTFFPSPESSCDVKLVEKSFETDTNLNFQILYEILLGKATLYAVLVSALVLMAMVKRKDSRGRAKRSGSGVKQTLNFDLLKLAGDVESNPGPTSMDWIWRILFLVGAATGAHSFEEVQLLESGGGLVQPGGSLRLSCAASGFTFSRYAMNWVRQAPGKGLEWVSGISGSGGRTYYADSVKGRFTISRDNSKNTLYLQMNSLRAEDTAVYYCAKDRDFWSGPFDYWGQGTLVTVSSTREDLKNVFPPEVAVFEPSEAEISHTQKATLVCLATGFYPDHVELSWWVNGKEVHSGVCTDPQPLKEQPALNDSRYCLSSRLRVSATFWQNPRNHFRCQVQFYGLSENDEWTQDRAKPVTQIVSAEAWGRADCGFTSESYQQGVLSATNLSVIGFRILLLKVAGFNLLMTLRLWSS

SEQ ID NO: 13951 - protein, 764 aa, synthetic construct
MALPVTALLLPLALLLHAARPEVQLVESGGGLVQPGGSLRLSCAASGFSFSDFWMSWVRQAPGKGLEWVATISQAGSEKDYVDSVKGRFTISRDNAKKSLYLQMNSLRAEDTAVYYCASGVYSFDYRGQGTLVTVSSGTGGGGSGGGGSGGGGSEFDIQMTQSPSSLSASVGDRVTITCKASKNIRSYLAWYQQKPGKAPKLLIYSGSTLHSGVPSRFSGSGSGTDFTLTISSLQPEDFATYYCQQHHEYPLTFGQGTKVEIKRLEIQNPDPAVYQLRDSKSSDKSVCLFTDFDSQTNVSQSKDSDVYITDKCVLDMRSMDFKSNSAVAWSNKSDFACANAFNNSIIPEDTFFPSPESSCDVKLVEKSFETDTNLNFQILYEILLGKATLYAVLVSALVLMAMVKRKDSRGRAKRSGSGVKQTLNFDLLKLAGDVESNPGPTSMDWIWRILFLVGAATGAHSFEQVQLQESGPGLVKPSETLSLTCTVSGYTITSGYDWSWIRQPPGKGLEWIGYINYGGSTNYKPSLGSRVTISVDTSKNQFSLKLSSVTAADTAVYYCARYNEYKSYIYDWYFDFWGQGTLVTVSSTREDLKNVFPPEVAVFEPSEAEISHTQKATLVCLATGFYPDHVELSWWVNGKEVHSGVCTDPQPLKEQPALNDSRYCLSSRLRVSATFWQNPRNHFRCQVQFYGLSENDEWTQDRAKPVTQIVSAEAWGRADCGFTSESYQQGVLSATNLSVIGFRILLLKVAGFNLLMTLRLWSS

SEQ ID NO: 13952 - protein, 766 aa, synthetic construct
MALPVTALLLPLALLLHAARPEVQLVESGGGLVQPGGSLRLSCAASGFSFSDFWMSWVRQAPGKGLEWVATISQAGSEKDYVDSVKGRFTISRDNAKKSLYLQMNSLRAEDTAVYYCASGVYSFDYRGQGTLVTVSSGTGGGGSGGGGSGGGGSEFQSVVTQPPSVSAAPGQKVTISCSGSSSNIGNNYVSWYQQLPGTAPKLLIYDNNKRPSGIPDRFSGSKSGTSATLGITGLQTGDEADYYCGTWDGSLYTMLFGGGTKLTVLLEIQNPDPAVYQLRDSKSSDKSVCLFTDFDSQTNVSQSKDSDVYITDKCVLDMRSMDFKSNSAVAWSNKSDFACANAFNNSIIPEDTFFPSPESSCDVKLVEKSFETDTNLNFQILYEILLGKATLYAVLVSALVLMAMVKRKDSRGRAKRSGSGVKQTLNFDLLKLAGDVESNPGPTSMDWIWRILFLVGAATGAHSFEEVQLVESGGGLVKPGGSLRLSCAASGFTFSNAWMSWVRQAPGKGLEWVGFIRSKAYGGTTEYAASVKGRFTISRDDSKSIAYLQMNNLKTEDTAVYYCARDGLYSSSWYDSDYWGQGTLVTVSSTREDLKNVFPPEVAVFEPSEAEISHTQKATLVCLATGFYPDHVELSWWVNGKEVHSGVCTDPQPLKEQPALNDSRYCLSSRLRVSATFWQNPRNHFRCQVQFYGLSENDEWTQDRAKPVTQIVSAEAWGRADCGFTSESYQQGVLSATNLSVIGFRILLLKVAGFNLLMTLRLWSS

SEQ ID NO: 13953 - protein, 771 aa, synthetic construct
MALPVTALLLPLALLLHAARPEVQLVESGGGLVQPGGSLRLSCAASGFSFSDFWMSWVRQAPGKGLEWVATISQAGSEKDYVDSVKGRFTISRDNAKKSLYLQMNSLRAEDTAVYYCASGVYSFDYRGQGTLVTVSSGTGGGGSGGGGSGGGGSEFQSVLTQPPSVSGAPGQRVTISCTGSSSNIGAGYDVHWYQQLPGTAPKLLIFGNSNRPSGVPDRFSGFKSGTSASLAITGLQAEDEADYFCQSYDSSLSGSGVFGTGTKVTVLGLEIQNPDPAVYQLRDSKSSDKSVCLFTDFDSQTNVSQSKDSDVYITDKCVLDMRSMDFKSNSAVAWSNKSDFACANAFNNSIIPEDTFFPSPESSCDVKLVEKSFETDTNLNFQILYEILLGKATLYAVLVSALVLMAMVKRKDSRGRAKRSGSGVKQTLNFDLLKLAGDVESNPGPTSMDWIWRILFLVGAATGAHSFEQMQLVQSGGGLVQPGRSLRLSCAASGFTFDDYAMHWVRQAPGKGLEWVSGISWNSGSIGYADSVKGRFTISRDNAKNSLYLQMNSLRAEDTALYYCAKDIHSGSYYGLLYYAMDVWGQGTTVTVSSTREDLKNVFPPEVAVFEPSEAEISHTQKATLVCLATGFYPDHVELSWWVNGKEVHSGVCTDPQPLKEQPALNDSRYCLSSRLRVSATFWQNPRNHFRCQVQFYGLSENDEWTQDRAKPVTQIVSAEAWGRADCGFTSESYQQGVLSATNLSVIGFRILLLKVAGFNLLMTLRLWSS

SEQ ID NO: 13954 - protein, 771 aa, synthetic construct
MALPVTALLLPLALLLHAARPEVQLVESGGGLVQPGGSLRLSCAASGFSFSDFWMSWVRQAPGKGLEWVATISQAGSEKDYVDSVKGRFTISRDNAKKSLYLQMNSLRAEDTAVYYCASGVYSFDYRGQGTLVTVSSGTGGGGSGGGGSGGGGSEFLPVLTQPPSASGTPGQRVTISCSGRSSNIGSNSVNWYRQLPGAAPKLLIYSNNQRPPGVPVRFSGSKSGTSASLAISGLQSEDEATYYCATWDDNLNVHYVFGTGTKVTVLGSRLEIQNPDPAVYQLRDSKSSDKSVCLFTDFDSQTNVSQSKDSDVYITDKCVLDMRSMDFKSNSAVAWSNKSDFACANAFNNSIIPEDTFFPSPESSCDVKLVEKSFETDTNLNFQILYEILLGKATLYAVLVSALVLMAMVKRKDSRGRAKRSGSGVKQTLNFDLLKLAGDVESNPGPTSMDWIWRILFLVGAATGAHSFELEMAQVQLVQSGAEVKKPGSSVKVSCKASGGTFSSYAISWVRQAPGQGLEWMGRIIPILGIANYAQKFQGRVTITADKSTSTAYMELSSLRSEDTAVYYCARGGYYSHDMWSEDWGQGTLVTVSSTREDLKNVFPPEVAVFEPSEAEISHTQKATLVCLATGFYPDHVELSWWVNGKEVHSGVCTDPQPLKEQPALNDSRYCLSSRLRVSATFWQNPRNHFRCQVQFYGLSENDEWTQDRAKPVTQIVSAEAWGRADCGFTSESYQQGVLSATNLSVIGFRILLLKVAGFNLLMTLRLWSS

SEQ ID NO: 13955 - protein, 765 aa, synthetic construct
MALPVTALLLPLALLLHAARPEVQLVESGGGLVQPGGSLRLSCAASGFSFSDFWMSWVRQAPGKGLEWVATISQAGSEKDYVDSVKGRFTISRDNAKKSLYLQMNSLRAEDTAVYYCASGVYSFDYRGQGTLVTVSSGTGGGGSGGGGSGGGGSEFDFVMTQSPDSLAVSLGERVTMSCKSSQSLLNSGNQKNYLTWYQQKPGQPPKLLIYWASTRESGVPDRFSGSGSGTDFTLTISSLQAEDVAVYYCQNDYSYPYTFGQGTKLEIKLEIQNPDPAVYQLRDSKSSDKSVCLFTDFDSQTNVSQSKDSDVYITDKCVLDMRSMDFKSNSAVAWSNKSDFACANAFNNSIIPEDTFFPSPESSCDVKLVEKSFETDTNLNFQILYEILLGKATLYAVLVSALVLMAMVKRKDSRGRAKRSGSGVKQTLNFDLLKLAGDVESNPGPTSMDWIWRILFLVGAATGAHSFEEVQLVQSGAELKKPGASVKVSCKASGYTFTDYYMKWVRQAPGQGLEWIGDIIPSNGATFYNQKFKGRVTITVDKSTSTAYMELSSLRSEDTAVYYCARSHLLRASWFAYWGQGTLVTVSSTREDLKNVFPPEVAVFEPSEAEISHTQKATLVCLATGFYPDHVELSWWVNGKEVHSGVCTDPQPLKEQPALNDSRYCLSSRLRVSATFWQNPRNHFRCQVQFYGLSENDEWTQDRAKPVTQIVSAEAWGRADCGFTSESYQQGVLSATNLSVIGFRILLLKVAGFNLLMTLRLWSS

SEQ ID NO: 13956 - protein, 765 aa, synthetic construct
MALPVTALLLPLALLLHAARPEVQLVESGGGLVQPGGSLRLSCAASGFSFSDFWMSWVRQAPGKGLEWVATISQAGSEKDYVDSVKGRFTISRDNAKKSLYLQMNSLRAEDTAVYYCASGVYSFDYRGQGTLVTVSSGTGGGGSGGGGSGGGGSEFDFVMTQSPDSLAVSLGERVTMSCKSSQSLLNSGNQKNYLTWYQQKPGQPPKLLIYWASTRESGVPDRFSGSGSGTDFTLTISSLQAEDVAVYYCQNDYSYPYTFGQGTKLEIKLEIQNPDPAVYQLRDSKSSDKSVCLFTDFDSQTNVSQSKDSDVYITDKCVLDMRSMDFKSNSAVAWSNKSDFACANAFNNSIIPEDTFFPSPESSCDVKLVEKSFETDTNLNFQILYEILLGKATLYAVLVSALVLMAMVKRKDSRGRAKRSGSGVKQTLNFDLLKLAGDVESNPGPTSMDWIWRILFLVGAATGAHSFEQVQLVQSGAELKKPGASVKVSCKASGYTFTDYYMKWVRQAPGQGLEWIGDIIPSNGATFYNQKFKGRVTITVDKSTSTAYMELSSLRSEDTAVYYCARSHLLRASWFAYWGQGTLVTVSSTREDLKNVFPPEVAVFEPSEAEISHTQKATLVCLATGFYPDHVELSWWVNGKEVHSGVCTDPQPLKEQPALNDSRYCLSSRLRVSATFWQNPRNHFRCQVQFYGLSENDEWTQDRAKPVTQIVSAEAWGRADCGFTSESYQQGVLSATNLSVIGFRILLLKVAGFNLLMTLRLWSS

SEQ ID NO: 13957 - protein, 755 aa, synthetic construct
MALPVTALLLPLALLLHAARPEVQLVESGGGLVQPGGSLRLSCAASGFSFSDFWMSWVRQAPGKGLEWVATISQAGSEKDYVDSVKGRFTISRDNAKKSLYLQMNSLRAEDTAVYYCASGVYSFDYRGQGTLVTVSSGTGGGGSGGGGSGGGGSEFDVQITQSPSYLAASPGETITINCRASKSISKDLAWYQEKPGKTNKLLIYSGSTLQSGIPSRFSGSGSGTDFTLTISSLEPEDFAMYYCQQHNKYPYTFGGGTKLEIKRLEIQNPDPAVYQLRDSKSSDKSVCLFTDFDSQTNVSQSKDSDVYITDKCVLDMRSMDFKSNSAVAWSNKSDFACANAFNNSIIPEDTFFPSPESSCDVKLVEKSFETDTNLNFQILYEILLGKATLYAVLVSALVLMAMVKRKDSRGRAKRSGSGVKQTLNFDLLKLAGDVESNPGPTSMDWIWRILFLVGAATGAHSFEQVQLQQPGAELVRPGASVKLSCKASGYTFTSYWMNWVKQRPDQGLEWIGRIDPYDSETHYNQKFKDKAILTVDKSSSTAYMQLSSLTSEDSAVYYCARGNWDDYWGQGTTLTVSSTREDLKNVFPPEVAVFEPSEAEISHTQKATLVCLATGFYPDHVELSWWVNGKEVHSGVCTDPQPLKEQPALNDSRYCLSSRLRVSATFWQNPRNHFRCQVQFYGLSENDEWTQDRAKPVTQIVSAEAWGRADCGFTSESYQQGVLSATNLSVIGFRILLLKVAGFNLLMTLRLWSS

SEQ ID NO: 13958 - protein, 757 aa, synthetic construct
MALPVTALLLPLALLLHAARPEVQLVESGGGLVQPGGSLRLSCAASGFSFSDFWMSWVRQAPGKGLEWVATISQAGSEKDYVDSVKGRFTISRDNAKKSLYLQMNSLRAEDTAVYYCASGVYSFDYRGQGTLVTVSSGTGGGGSGGGGSGGGGSEFEIVLTQSPTSMTASPGEQVTITCRASSSINYMHWYQQKPGASPRPWIYETSKLASGVPDRFSGSASGTSYSLTINNMEAEDAATYYCQQWNYPSWTFGGGTKLELKLEIQNPDPAVYQLRDSKSSDKSVCLFTDFDSQTNVSQSKDSDVYITDKCVLDMRSMDFKSNSAVAWSNKSDFACANAFNNSIIPEDTFFPSPESSCDVKLVEKSFETDTNLNFQILYEILLGKATLYAVLVSALVLMAMVKRKDSRGRAKRSGSGVKQTLNFDLLKLAGDVESNPGPTSMDWIWRILFLVGAATGAHSFEEVQLVESGGGLVQPGRSLKLSCAASGFTFSDYNMAWVRQAPKKGLEWVATILYDGGRTYYRGSVKGRFTISRDNAKSTLYLRMDSLRSEDTATYYCATHSRGTDYFDYWGQGVMVTVSSTREDLKNVFPPEVAVFEPSEAEISHTQKATLVCLATGFYPDHVELSWWVNGKEVHSGVCTDPQPLKEQPALNDSRYCLSSRLRVSATFWQNPRNHFRCQVQFYGLSENDEWTQDRAKPVTQIVSAEAWGRADCGFTSESYQQGVLSATNLSVIGFRILLLKVAGFNLLMTLRLWSS

SEQ ID NO: 13959 - protein, 766 aa, synthetic construct
MALPVTALLLPLALLLHAARPEVQLVESGGGLVQPGGSLRLSCAASGFSFSDFWMSWVRQAPGKGLEWVATISQAGSEKDYVDSVKGRFTISRDNAKKSLYLQMNSLRAEDTAVYYCASGVYSFDYRGQGTLVTVSSGTGGGGSGGGGSGGGGSEFDIVMTQSPSSLAVSEGETVTINCKSSQSFLSSGDGKNYVAWYQYKPGQSPKLLIYWASTRQSGVPDRFIGSGSGTDFTLTISTVQAEDLAIYYCQQYYDTPLTFGSGTKLEIKLEIQNPDPAVYQLRDSKSSDKSVCLFTDFDSQTNVSQSKDSDVYITDKCVLDMRSMDFKSNSAVAWSNKSDFACANAFNNSIIPEDTFFPSPESSCDVKLVEKSFETDTNLNFQILYEILLGKATLYAVLVSALVLMAMVKRKDSRGRAKRSGSGVKQTLNFDLLKLAGDVESNPGPTSMDWIWRILFLVGAATGAHSFEEVKLQESGPSLVQSSQTLSLTCTVSGFSLTSYHIHWVRQTPGKGLEWMGVMWSDGDTSYNSALKSRLSISRDTSQSQVFLKMNSLQTEDTATYYCARGYYSSYLYLWFAYWGQGTLVTVSSTREDLKNVFPPEVAVFEPSEAEISHTQKATLVCLATGFYPDHVELSWWVNGKEVHSGVCTDPQPLKEQPALNDSRYCLSSRLRVSATFWQNPRNHFRCQVQFYGLSENDEWTQDRAKPVTQIVSAEAWGRADCGFTSESYQQGVLSATNLSVIGFRILLLKVAGFNLLMTLRLWSS

SEQ ID NO: 13960 - protein, 770 aa, synthetic construct
MALPVTALLLPLALLLHAARPEVQLVESGGGLVQPGGSLRLSCAASGFSFSDFWMSWVRQAPGKGLEWVATISQAGSEKDYVDSVKGRFTISRDNAKKSLYLQMNSLRAEDTAVYYCASGVYSFDYRGQGTLVTVSSGTGGGGSGGGGSGGGGSEFDVLMTQTPVSLPVSLGGQVSISCRSSQSLVHSDGDTYLHWYLQKPGQSPQLLIYRVSNRFSGVPDRFSGSGSGTDFTLKISRVEPEDLGLYYCLQTTHFPPWTFGGGTKLEMKLEIQNPDPAVYQLRDSKSSDKSVCLFTDFDSQTNVSQSKDSDVYITDKCVLDMRSMDFKSNSAVAWSNKSDFACANAFNNSIIPEDTFFPSPESSCDVKLVEKSFETDTNLNFQILYEILLGKATLYAVLVSALVLMAMVKRKDSRGRAKRSGSGVKQTLNFDLLKLAGDVESNPGPTSMDWIWRILFLVGAATGAHSFEQVQLQQSGPELRRPGSSVRLSCKASGYRIKDFLIHWIKNRPEHGLEWIGWIDPEDGETKYAQKFQTKATLTADTSSNTAYMQLSSLTSEDTATYFCARWGDVYYGLMRGHVMDAWGQGTSVTVSSTREDLKNVFPPEVAVFEPSEAEISHTQKATLVCLATGFYPDHVELSWWVNGKEVHSGVCTDPQPLKEQPALNDSRYCLSSRLRVSATFWQNPRNHFRCQVQFYGLSENDEWTQDRAKPVTQIVSAEAWGRADCGFTSESYQQGVLSATNLSVIGFRILLLKVAGFNLLMTLRLWSS

SEQ ID NO: 13961 - protein, 765 aa, synthetic construct
MALPVTALLLPLALLLHAARPEVQLVESGGGLVQPGGSLRLSCAASGFSFSDFWMSWVRQAPGKGLEWVATISQAGSEKDYVDSVKGRFTISRDNAKKSLYLQMNSLRAEDTAVYYCASGVYSFDYRGQGTLVTVSSGTGGGGSGGGGSGGGGSEFDIVMTQSPATLSLSPGERATLSCRSSKSLQNVNGNTYLYWFQQKPGQSPQLLIYRMSNLNSGVPDRFSGSGSGTEFTLTISSLEPEDFAVYYCMQHLEYPITFGAGTKLEIKLEIQNPDPAVYQLRDSKSSDKSVCLFTDFDSQTNVSQSKDSDVYITDKCVLDMRSMDFKSNSAVAWSNKSDFACANAFNNSIIPEDTFFPSPESSCDVKLVEKSFETDTNLNFQILYEILLGKATLYAVLVSALVLMAMVKRKDSRGRAKRSGSGVKQTLNFDLLKLAGDVESNPGPTSMDWIWRILFLVGAATGAHSFEEVQLVESGGGLVKPGGSLKLSCAASGYTFTSYVMHWVRQAPGKGLEWIGYINPYNDGTKYNEKFQGRVTISSDKSISTAYMELSSLRSEDTAMYYCARGTYYYGTRVFDYWGQGTLVTVSSTREDLKNVFPPEVAVFEPSEAEISHTQKATLVCLATGFYPDHVELSWWVNGKEVHSGVCTDPQPLKEQPALNDSRYCLSSRLRVSATFWQNPRNHFRCQVQFYGLSENDEWTQDRAKPVTQIVSAEAWGRADCGFTSESYQQGVLSATNLSVIGFRILLLKVAGFNLLMTLRLWSS

SEQ ID NO: 13962 - protein, 761 aa, synthetic construct
MALPVTALLLPLALLLHAARPEVQLVESGGGLVQPGGSLRLSCAASGFSFSDFWMSWVRQAPGKGLEWVATISQAGSEKDYVDSVKGRFTISRDNAKKSLYLQMNSLRAEDTAVYYCASGVYSFDYRGQGTLVTVSSGTGGGGSGGGGSGGGGSEFDIQMTQSPSSLSASVGDRVTITCKASDHINNWLAWYQQKPGQAPKLLIYGATTLETGVPSRFSGSGSGTDYTLTISSLQPEDFATYYCQQSWNTPWTFGQGTKLEIKRLEIQNPDPAVYQLRDSKSSDKSVCLFTDFDSQTNVSQSKDSDVYITDKCVLDMRSMDFKSNSAVAWSNKSDFACANAFNNSIIPEDTFFPSPESSCDVKLVEKSFETDTNLNFQILYEILLGKATLYAVLVSALVLMAMVKRKDSRGRAKRSGSGVKQTLNFDLLKLAGDVESNPGPTSMDWIWRILFLVGAATGAHSFEQVQLQQPGAELVKPGASVKMSCKASGYAFSSYWINWMKQKPGQGLEWIGQIYPGDGDTNYNGKFKGRATLTADTSSSTAYMQLSSLTSEDSAVYFCARSITTVVGCAMDYWGQGTSVTVSSTREDLKNVFPPEVAVFEPSEAEISHTQKATLVCLATGFYPDHVELSWWVNGKEVHSGVCTDPQPLKEQPALNDSRYCLSSRLRVSATFWQNPRNHFRCQVQFYGLSENDEWTQDRAKPVTQIVSAEAWGRADCGFTSESYQQGVLSATNLSVIGFRILLLKVAGFNLLMTLRLWSS

SEQ ID NO: 13963 - protein, 763 aa, synthetic construct
MALPVTALLLPLALLLHAARPEVQLVESGGGLVQPGGSLRLSCAASGFSFSDFWMSWVRQAPGKGLEWVATISQAGSEKDYVDSVKGRFTISRDNAKKSLYLQMNSLRAEDTAVYYCASGVYSFDYRGQGTLVTVSSGTGGGGSGGGGSGGGGSEFQIVLSQSPAILSASPGEKVTMTCRASSSVSYMHWYQQKPGSSPKPWIYATSNLASGVPARFSGSGSGTSYSFTISRVEAEDAATYYCQQWTFNPPTFGGGTRLEIKRTVAALEIQNPDPAVYQLRDSKSSDKSVCLFTDFDSQTNVSQSKDSDVYITDKCVLDMRSMDFKSNSAVAWSNKSDFACANAFNNSIIPEDTFFPSPESSCDVKLVEKSFETDTNLNFQILYEILLGKATLYAVLVSALVLMAMVKRKDSRGRAKRSGSGVKQTLNFDLLKLAGDVESNPGPTSMDWIWRILFLVGAATGAHSFEQAYLQQSGAELVRPGASVKMSCKASGYTFTSYNMHWVKQTPRQGLEWIGGIYPGNGDTSYNQKFKGKATLTVGKSSSTAYMQLSSLTSEDSAVYFCARYDYNYAMDYWGQGTSVTVSSASTREDLKNVFPPEVAVFEPSEAEISHTQKATLVCLATGFYPDHVELSWWVNGKEVHSGVCTDPQPLKEQPALNDSRYCLSSRLRVSATFWQNPRNHFRCQVQFYGLSENDEWTQDRAKPVTQIVSAEAWGRADCGFTSESYQQGVLSATNLSVIGFRILLLKVAGFNLLMTLRLWSS

SEQ ID NO: 13964 - protein, 761 aa, synthetic construct
MALPVTALLLPLALLLHAARPEVQLVESGGGLVQPGGSLRLSCAASGFSFSDFWMSWVRQAPGKGLEWVATISQAGSEKDYVDSVKGRFTISRDNAKKSLYLQMNSLRAEDTAVYYCASGVYSFDYRGQGTLVTVSSGTGGGGSGGGGSGGGGSEFEIVLTQSPATLSLSPGERATLSCRASQSVSSYLAWYQQKPGQAPRLLIYDASNRATGIPARFSGSGSGTDFTLTISSLEPEDFAVYYCQQRSNWPITFGQGTRLEIKLEIQNPDPAVYQLRDSKSSDKSVCLFTDFDSQTNVSQSKDSDVYITDKCVLDMRSMDFKSNSAVAWSNKSDFACANAFNNSIIPEDTFFPSPESSCDVKLVEKSFETDTNLNFQILYEILLGKATLYAVLVSALVLMAMVKRKDSRGRAKRSGSGVKQTLNFDLLKLAGDVESNPGPTSMDWIWRILFLVGAATGAHSFEEVQLVESGGGLVQPDRSLRLSCAASGFTFHDYAMHWVRQAPGKGLEWVSTISWNSGTIGYADSVKGRFTISRDNAKNSLYLQMNSLRAEDTALYYCAKDIQYGNYYYGMDVWGQGTTVTVSSTREDLKNVFPPEVAVFEPSEAEISHTQKATLVCLATGFYPDHVELSWWVNGKEVHSGVCTDPQPLKEQPALNDSRYCLSSRLRVSATFWQNPRNHFRCQVQFYGLSENDEWTQDRAKPVTQIVSAEAWGRADCGFTSESYQQGVLSATNLSVIGFRILLLKVAGFNLLMTLRLWSS

SEQ ID NO: 13965 - protein, 756 aa, synthetic construct
MALPVTALLLPLALLLHAARPEVQLVESGGGLVQPGGSLRLSCAASGFSFSDFWMSWVRQAPGKGLEWVATISQAGSEKDYVDSVKGRFTISRDNAKKSLYLQMNSLRAEDTAVYYCASGVYSFDYRGQGTLVTVSSGTGGGGSGGGGSGGGGSEFDIQMTQSPSSLSASVGDRVTINCKASQDINSYLSWFQQKPGKAPKTLIYRANRLVDGVPSRFSGSGSGQDYTLTISSLQPEDFATYYCLQYDEFPLTFGGGTKVEIKLEIQNPDPAVYQLRDSKSSDKSVCLFTDFDSQTNVSQSKDSDVYITDKCVLDMRSMDFKSNSAVAWSNKSDFACANAFNNSIIPEDTFFPSPESSCDVKLVEKSFETDTNLNFQILYEILLGKATLYAVLVSALVLMAMVKRKDSRGRAKRSGSGVKQTLNFDLLKLAGDVESNPGPTSMDWIWRILFLVGAATGAHSFEQVQLVQSGAEVKKPGASVKVSCKASGYTFTNYDINWVRQAPGQGLEWIGWIYPGDGSTKYNEKFKAKATLTADTSTSTAYMELRSLRSDDTAVYYCASGYEDAMDYWGQGTTVTVSSTREDLKNVFPPEVAVFEPSEAEISHTQKATLVCLATGFYPDHVELSWWVNGKEVHSGVCTDPQPLKEQPALNDSRYCLSSRLRVSATFWQNPRNHFRCQVQFYGLSENDEWTQDRAKPVTQIVSAEAWGRADCGFTSESYQQGVLSATNLSVIGFRILLLKVAGFNLLMTLRLWSS

SEQ ID NO: 13966 - protein, 758 aa, synthetic construct
MALPVTALLLPLALLLHAARPEVQLVESGGGLVQPGGSLRLSCAASGFSFSDFWMSWVRQAPGKGLEWVATISQAGSEKDYVDSVKGRFTISRDNAKKSLYLQMNSLRAEDTAVYYCASGVYSFDYRGQGTLVTVSSGTGGGGSGGGGSGGGGSEFDIVMTQTPLSLSVTPGQPASISCKSSQSLLDGDGKTYLNWLLQKPGQSPQRLIYLVSKLDSGVPDRFSGSGSGTDFTLKISRVEAEDVGVYYCWQGTHFPRTFGQGTKLEIKLEIQNPDPAVYQLRDSKSSDKSVCLFTDFDSQTNVSQSKDSDVYITDKCVLDMRSMDFKSNSAVAWSNKSDFACANAFNNSIIPEDTFFPSPESSCDVKLVEKSFETDTNLNFQILYEILLGKATLYAVLVSALVLMAMVKRKDSRGRAKRSGSGVKQTLNFDLLKLAGDVESNPGPTSMDWIWRILFLVGAATGAHSFEQVQLVQSGAEVKKPGASVKVSCKASGYTFKDTYIHWVRQAPGQGLEWMGRIDPANGNTKYDPKFQGRVTMTRDTSISTAYMELSRLRSDDTAVYYCARRGGVDWGQGTLVTVSSTREDLKNVFPPEVAVFEPSEAEISHTQKATLVCLATGFYPDHVELSWWVNGKEVHSGVCTDPQPLKEQPALNDSRYCLSSRLRVSATFWQNPRNHFRCQVQFYGLSENDEWTQDRAKPVTQIVSAEAWGRADCGFTSESYQQGVLSATNLSVIGFRILLLKVAGFNLLMTLRLWSS

SEQ ID NO: 13967 - protein, 759 aa, synthetic construct
MALPVTALLLPLALLLHAARPEVQLVESGGGLVQPGGSLRLSCAASGFSFSDFWMSWVRQAPGKGLEWVATISQAGSEKDYVDSVKGRFTISRDNAKKSLYLQMNSLRAEDTAVYYCASGVYSFDYRGQGTLVTVSSGTGGGGSGGGGSGGGGSEFDIQMTQSPSSLSASVGDRVTITCKASQDVSTAVAWFQQKPGKAPKLLIYSPSYRYTGVPSRFSGSGSGTDFTLTISSLQPEDFTYYCQQLYSTPYTFGQGTKVEIKLEIQNPDPAVYQLRDSKSSDKSVCLFTDFDSQTNVSQSKDSDVYITDKCVLDMRSMDFKSNSAVAWSNKSDFACANAFNNSIIPEDTFFPSPESSCDVKLVEKSFETDTNLNFQILYEILLGKATLYAVLVSALVLMAMVKRKDSRGRAKRSGSGVKQTLNFDLLKLAGDVESNPGPTSMDWIWRILFLVGAATGAHSFEEVQLVQSGAEVKKPGASVKVSCKASGYTFTDYYLDVVVRQAPGQGLEWIGRVNPYNGGTIYNQKFKGRVTLTRDTSTSTAYLELSSLRSEDTAVYYCARDHYRYDPLLDYWGQGTLVTVSSTREDLKNVFPPEVAVFEPSEAEISHTQKATLVCLATGFYPDHVELSWWVNGKEVHSGVCTDPQPLKEQPALNDSRYCLSSRLRVSATFWQNPRNHFRCQVQFYGLSENDEWTQDRAKPVTQIVSAEAWGRADCGFTSESYQQGVLSATNLSVIGFRILLLKVAGFNLLMTLRLWSS

SEQ ID NO: 13968 - protein, 765 aa, synthetic construct
MALPVTALLLPLALLLHAARPEVQLVESGGGLVQPGGSLRLSCAASGFSFSDFWMSWVRQAPGKGLEWVATISQAGSEKDYVDSVKGRFTISRDNAKKSLYLQMNSLRAEDTAVYYCASGVYSFDYRGQGTLVTVSSGTGGGGSGGGGSGGGGSEFDIQMTQSPSSLSASVGDRVTITCRASQSVSTSSYNYMHWYQQKPGKPPKLLIKYASNLESGVPSRFSGSGSGTDFTLTISSLQPEDFATYYCQHSWEIPLTFGQGTKVEIKLEIQNPDPAVYQLRDSKSSDKSVCLFTDFDSQTNVSQSKDSDVYITDKCVLDMRSMDFKSNSAVAWSNKSDFACANAFNNSIIPEDTFFPSPESSCDVKLVEKSFETDTNLNFQILYEILLGKATLYAVLVSALVLMAMVKRKDSRGRAKRSGSGVKQTLNFDLLKLAGDVESNPGPTSMDWIWRILFLVGAATGAHSFEEVQLVQSGAEVKKPGASVKVSCKASGYSFTDYYMHWVRQAPGQGLEWIGRINPYNGAAFYSQNFKDRVTLTVDTSTSTAYLELSSLRSEDTAVYYCAIERGADLEGYAMDYWGQGTLVTVSSTREDLKNVFPPEVAVFEPSEAEISHTQKATLVCLATGFYPDHVELSWWVNGKEVHSGVCTDPQPLKEQPALNDSRYCLSSRLRVSATFWQNPRNHFRCQVQFYGLSENDEWTQDRAKPVTQIVSAEAWGRADCGFTSESYQQGVLSATNLSVIGFRILLLKVAGFNLLMTLRLWSS

SEQ ID NO: 13969 - protein, 763 aa, synthetic construct
MALPVTALLLPLALLLHAARPEVQLVESGGGLVQPGGSLRLSCAASGFSFSDFWMSWVRQAPGKGLEWVATISQAGSEKDYVDSVKGRFTISRDNAKKSLYLQMNSLRAEDTAVYYCASGVYSFDYRGQGTLVTVSSGTGGGGSGGGGSGGGGSEFEIVLTQSPATLSASPGERVTLTCRASSNVISSYVHWYQQKPGSSPRLFLYSTSNLASGVPSRFSGSGSGTDFTFTISSLEAEDAATYYCQQYSGYPLTFGQGTRLEIKLEIQNPDPAVYQLRDSKSSDKSVCLFTDFDSQTNVSQSKDSDVYITDKCVLDMRSMDFKSNSAVAWSNKSDFACANAFNNSIIPEDTFFPSPESSCDVKLVEKSFETDTNLNFQILYEILLGKATLYAVLVSALVLMAMVKRKDSRGRAKRSGSGVKQTLNFDLLKLAGDVESNPGPTSMDWIWRILFLVGAATGAHSFEQVQLQESGPGLVKPSETLSLTCAVSGYSITSAYYWNWIRQPPGKGLEWIGYISYDGRNNYNPSLKNRITINPDTSKNQFSLQLNSVTPEDTAVYYCAREGDYDVGNYYAMDYWGQGTLVTVSSTREDLKNVFPPEVAVFEPSEAEISHTQKATLVCLATGFYPDHVELSWWVNGKEVHSGVCTDPQPLKEQPALNDSRYCLSSRLRVSATFWQNPRNHFRCQVQFYGLSENDEWTQDRAKPVTQIVSAEAWGRADCGFTSESYQQGVLSATNLSVIGFRILLLKVAGFNLLMTLRLWSS

SEQ ID NO: 13970 - protein, 763 aa, synthetic construct
MALPVTALLLPLALLLHAARPEVQLVESGGGLVQPGGSLRLSCAASGFSFSDFWMSWVRQAPGKGLEWVATISQAGSEKDYVDSVKGRFTISRDNAKKSLYLQMNSLRAEDTAVYYCASGVYSFDYRGQGTLVTVSSGTGGGGSGGGGSGGGGSEFEIVLTQSPATLSLSPGERATLSCRASSNVISSYVHWYQQKPGQAPRLLIYSTSNLASGIPARFSGSGSGTDFTLTISSLEPEDFAVYYCQQYSGYPLTFGQGTRLEIKLEIQNPDPAVYQLRDSKSSDKSVCLFTDFDSQTNVSQSKDSDVYITDKCVLDMRSMDFKSNSAVAWSNKSDFACANAFNNSIIPEDTFFPSPESSCDVKLVEKSFETDTNLNFQILYEILLGKATLYAVLVSALVLMAMVKRKDSRGRAKRSGSGVKQTLNFDLLKLAGDVESNPGPTSMDWIWRILFLVGAATGAHSFEEVQLVESGGGLVQPGRSLRLSCAASGYSITSAYYWNWVRQAPGKGLEWVSYISYDGRNNYNPSLKNRFTISRDNAKKSLYLQMNSLRAEDTALYYCAKEGDYDVGNYYAMDYWGQGTTVTVSSTREDLKNVFPPEVAVFEPSEAEISHTQKATLVCLATGFYPDHVELSWWVNGKEVHSGVCTDPQPLKEQPALNDSRYCLSSRLRVSATFWQNPRNHFRCQVQFYGLSENDEWTQDRAKPVTQIVSAEAWGRADCGFTSESYQQGVLSATNLSVIGFRILLLKVAGFNLLMTLRLWSS

SEQ ID NO: 13971 - protein, 762 aa, synthetic construct
MALPVTALLLPLALLLHAARPEVQLVESGGGLVQPGGSLRLSCAASGFSFSDFWMSWVRQAPGKGLEWVATISQAGSEKDYVDSVKGRFTISRDNAKKSLYLQMNSLRAEDTAVYYCASGVYSFDYRGQGTLVTVSSGTGGGGSGGGGSGGGGSEFDVVMTQTPLSLPVSLGDQASISCRSSQSLVHSNGNTYLRWYLQKPGQSPKVLIYKVSNRVSGVPDRFSGSGSGTDFTLKINRVEAEDLGVYFCSQSTHVPWTFGGGTKLEIKLEIQNPDPAVYQLRDSKSSDKSVCLFTDFDSQTNVSQSKDSDVYITDKCVLDMRSMDFKSNSAVAWSNKSDFACANAFNNSIIPEDTFFPSPESSCDVKLVEKSFETDTNLNFQILYEILLGKATLYAVLVSALVLMAMVKRKDSRGRAKRSGSGVKQTLNFDLLKLAGDVESNPGPTSMDWIWRILFLVGAATGAHSFEGVKLDETGGGLVQPGGAMKLSCVTSGFTFGHYWMNWVRQSPEKGLEWVAQFRNKPYNYETYYSDSVKGRFTISRDDSKSSVYLQMNNLRVEDTGIYYCTGASYGMEYLGQGTSVTVSTTREDLKNVFPPEVAVFEPSEAEISHTQKATLVCLATGFYPDHVELSWWVNGKEVHSGVCTDPQPLKEQPALNDSRYCLSSRLRVSATFWQNPRNHFRCQVQFYGLSENDEWTQDRAKPVTQIVSAEAWGRADCGFTSESYQQGVLSATNLSVIGFRILLLKVAGFNLLMTLRLWSS

SEQ ID NO: 13972 - protein, 768 aa, synthetic construct
MALPVTALLLPLALLLHAARPEVQLVESGGGLVQPGGSLRLSCAASGFSFSDFWMSWVRQAPGKGLEWVATISQAGSEKDYVDSVKGRFTISRDNAKKSLYLQMNSLRAEDTAVYYCASGVYSFDYRGQGTLVTVSSGTGGGGSGGGGSGGGGSEFQVQLVESGGNLVQPGGSLRLSCAASGFTFGSFSMSWVRQAPGGGLEWVAGLSARSSLTHYADSVKGRFTISRDNAKNSVYLQMNSLRVEDTAVYYCARRSYDSSGYWGHFYSYMDVWGQGTLVTVSLEIQNPDPAVYQLRDSKSSDKSVCLFTDFDSQTNVSQSKDSDVYITDKCVLDMRSMDFKSNSAVAWSNKSDFACANAFNNSIIPEDTFFPSPESSCDVKLVEKSFETDTNLNFQILYEILLGKATLYAVLVSALVLMAMVKRKDSRGRAKRSGSGVKQTLNFDLLKLAGDVESNPGPTSMDWIWRILFLVGAATGAHSFESVLTQPSSVSAAPGQKVTISCSGSTSNIGNNYVSWYQQHPGKAPKLMIYDVSKRPSGVPDRFSGSKSGNSASLDISGLQSEDEADYYCAAWDDSLSEFLFGTGTKLTVLGTREDLKNVFPPEVAVFEPSEAEISHTQKATLVCLATGFYPDHVELSWWVNGKEVHSGVCTDPQPLKEQPALNDSRYCLSSRLRVSATFWQNPRNHFRCQVQFYGLSENDEWTQDRAKPVTQIVSAEAWGRADCGFTSESYQQGVLSATNLSVIGFRILLLKVAGFNLLMTLRLWSS

SEQ ID NO: 13973 - protein, 763 aa, synthetic construct
MALPVTALLLPLALLLHAARPEVQLVESGGGLVQPGGSLRLSCAASGFSFSDFWMSWVRQAPGKGLEWVATISQAGSEKDYVDSVKGRFTISRDNAKKSLYLQMNSLRAEDTAVYYCASGVYSFDYRGQGTLVTVSSGTGGGGSGGGGSGGGGSEFDVVMTQSPSSLSASVGDRVTITCQSSLDISHYLNWYQQKPGKAPKLLIYDASNLETGVPSRFSGSGSGTHFTFTISSLQPEDFATYYCQQYDNLPLTFGGGTKLEIKRLEIQNPDPAVYQLRDSKSSDKSVCLFTDFDSQTNVSQSKDSDVYITDKCVLDMRSMDFKSNSAVAWSNKSDFACANAFNNSIIPEDTFFPSPESSCDVKLVEKSFETDTNLNFQILYEILLGKATLYAVLVSALVLMAMVKRKDSRGRAKRSGSGVKQTLNFDLLKLAGDVESNPGPTSMDWIWRILFLVGAATGAHSFEQVQLVQSGGGVVQPGGSLRVSCAASGVTLSDYGMHWVRQAPGKGLEWVAFIRNDGSDKYYADSVKGRFTISRDNSEKTVSLQMSSLRAEDTAVYYCAKNGESGPLDYWYLDLWGRGTLVTVSSTREDLKNVFPPEVAVFEPSEAEISHTQKATLVCLATGFYPDHVELSWWVNGKEVHSGVCTDPQPLKEQPALNDSRYCLSSRLRVSATFWQNPRNHFRCQVQFYGLSENDEWTQDRAKPVTQIVSAEAWGRADCGFTSESYQQGVLSATNLSVIGFRILLLKVAGFNLLMTLRLWSS

SEQ ID NO: 13974 - protein, 767 aa, synthetic construct
MALPVTALLLPLALLLHAARPEVQLVESGGGLVQPGGSLRLSCAASGFSFSDFWMSWVRQAPGKGLEWVATISQAGSEKDYVDSVKGRFTISRDNAKKSLYLQMNSLRAEDTAVYYCASGVYSFDYRGQGTLVTVSSGTGGGGSGGGGSGGGGSEFSYELTQPPSVSGTPGQRVAISCSGSSSNIGTRMVTWYQHVPGTAPKLLIFNNNQRPSGVPDRFSASKSGTSASLAIIGLQSDDEADYYCATWDDNVKSYVFGTGTKVTVLGSRLEIQNPDPAVYQLRDSKSSDKSVCLFTDFDSQTNVSQSKDSDVYITDKCVLDMRSMDFKSNSAVAWSNKSDFACANAFNNSIIPEDTFFPSPESSCDVKLVEKSFETDTNLNFQILYEILLGKATLYAVLVSALVLMAMVKRKDSRGRAKRSGSGVKQTLNFDLLKLAGDVESNPGPTSMDWIWRILFLVGAATGAHSFELEMAQVQLQQWGAGLLKPSETLSLTCAVYGGSFSGYYWSWIRQPPGKGLEWIGEINHSGSTNYNPSLKSRVTISVDTSKNQFSLKLSSVTAADTAVYYCARAPQSWYVGDVWGQGTLVTVSSTREDLKNVFPPEVAVFEPSEAEISHTQKATLVCLATGFYPDHVELSWWVNGKEVHSGVCTDPQPLKEQPALNDSRYCLSSRLRVSATFWQNPRNHFRCQVQFYGLSENDEWTQDRAKPVTQIVSAEAWGRADCGFTSESYQQGVLSATNLSVIGFRILLLKVAGFNLLMTLRLWSS

SEQ ID NO: 13975 - protein, 764 aa, synthetic construct
MALPVTALLLPLALLLHAARPEVQLVESGGGLVQPGGSLRLSCAASGFSFSDFWMSWVRQAPGKGLEWVATISQAGSEKDYVDSVKGRFTISRDNAKKSLYLQMNSLRAEDTAVYYCASGVYSFDYRGQGTLVTVSSGTGGGGSGGGGSGGGGSEFQSVLTQPPSLSVAPGKTASITCGGNNIGMKSVHWYQQRPGQAPVLVIYYDSDRPSGIPGRFSGSNSGNTATLTISRVEAGDEADYYCQVWDTTGDHPGYVFGTGTKVTVLLEIQNPDPAVYQLRDSKSSDKSVCLFTDFDSQTNVSQSKDSDVYITDKCVLDMRSMDFKSNSAVAWSNKSDFACANAFNNSIIPEDTFFPSPESSCDVKLVEKSFETDTNLNFQILYEILLGKATLYAVLVSALVLMAMVKRKDSRGRAKRSGSGVKQTLNFDLLKLAGDVESNPGPTSMDWIWRILFLVGAATGAHSFEQVQLVQSGAEVKKPGSSVKVSCKASGGTFSSYAISWVRQAPGQGLEWMGGIIPIFGTANYAQKFQGRVTITADESTSTAYMELSSLRSEDTAVYYCARGVYGYSGSAPYDEWGQGTLVTVSSTREDLKNVFPPEVAVFEPSEAEISHTQKATLVCLATGFYPDHVELSWWVNGKEVHSGVCTDPQPLKEQPALNDSRYCLSSRLRVSATFWQNPRNHFRCQVQFYGLSENDEWTQDRAKPVTQIVSAEAWGRADCGFTSESYQQGVLSATNLSVIGFRILLLKVAGFNLLMTLRLWSS

SEQ ID NO: 13976 - protein, 762 aa, synthetic construct
MALPVTALLLPLALLLHAARPEVQLVESGGGLVQPGGSLRLSCAASGFSFSDFWMSWVRQAPGKGLEWVATISQAGSEKDYVDSVKGRFTISRDNAKKSLYLQMNSLRAEDTAVYYCASGVYSFDYRGQGTLVTVSSGTGGGGSGGGGSGGGGSEFEVQLVESGGGLVQPGRSLRLSCAASGFTFDDYAMHWVRQAPGKGLEWVSGISWNSGSIGYADSVKGRFTISRDNAKNSLYLQMNSLRAEDTALYYCAKDKGGGYYDFWSGSDYWGQGTLVTVSSLEIQNPDPAVYQLRDSKSSDKSVCLFTDFDSQTNVSQSKDSDVYITDKCVLDMRSMDFKSNSAVAWSNKSDFACANAFNNSIIPEDTFFPSPESSCDVKLVEKSFETDTNLNFQILYEILLGKATLYAVLVSALVLMAMVKRKDSRGRAKRSGSGVKQTLNFDLLKLAGDVESNPGPTSMDWIWRILFLVGAATGAHSFESSELTQDPAVSVALGQTVRITCQGDSLRSYYASWYQQKPGQAPVLVIYGKNNRPSGIPDRFSGSSSGNTASLTITGAQAEDEADYYCNSRDSSGWVFGGGTKLTVLTREDLKNVFPPEVAVFEPSEAEISHTQKATLVCLATGFYPDHVELSWWVNGKEVHSGVCTDPQPLKEQPALNDSRYCLSSRLRVSATFWQNPRNHFRCQVQFYGLSENDEWTQDRAKPVTQIVSAEAWGRADCGFTSESYQQGVLSATNLSVIGFRILLLKVAGFNLLMTLRLWSS

SEQ ID NO: 13977 - protein, 771 aa, synthetic construct
MALPVTALLLPLALLLHAARPEVQLVESGGGLVQPGGSLRLSCAASGFSFSDFWMSWVRQAPGKGLEWVATISQAGSEKDYVDSVKGRFTISRDNAKKSLYLQMNSLRAEDTAVYYCASGVYSFDYRGQGTLVTVSSGTGGGGSGGGGSGGGGSEFEVQLQQSGPGLVKPSQTLSLTCAISGDSVLSNSDTWNWIRQSPSRGLEWLGRTYHRSTWYDDYASSVRGRVSINVDTSKNQYSLQLNAVTPEDTGVYYCARDRLQDGNSWSDAFDVWGQGTMVTVSSLEIQNPDPAVYQLRDSKSSDKSVCLFTDFDSQTNVSQSKDSDVYITDKCVLDMRSMDFKSNSAVAWSNKSDFACANAFNNSIIPEDTFFPSPESSCDVKLVEKSFETDTNLNFQILYEILLGKATLYAVLVSALVLMAMVKRKDSRGRAKRSGSGVKQTLNFDLLKLAGDVESNPGPTSMDWIWRILFLVGAATGAHSFEQSALTQPASVSGSPGQSITISCTGTSSDVGGYNYVSWYQQHPGKAPKLMIYDVSNRPSGVSNRFSGSKSGNTASLTISGLQAEDEADYYCSSYTSSSTLVYVFGTGTKVTVLTREDLKNVFPPEVAVFEPSEAEISHTQKATLVCLATGFYPDHVELSWWVNGKEVHSGVCTDPQPLKEQPALNDSRYCLSSRLRVSATFWQNPRNHFRCQVQFYGLSENDEWTQDRAKPVTQIVSAEAWGRADCGFTSESYQQGVLSATNLSVIGFRILLLKVAGFNLLMTLRLWSS

SEQ ID NO: 13978 - protein, 749 aa, synthetic construct
MALPVTALLLPLALLLHAARPEVQLVESGGGLVQPGGSLRLSCAASGFSFSDFWMSWVRQAPGKGLEWVATISQAGSEKDYVDSVKGRFTISRDNAKKSLYLQMNSLRAEDTAVYYCASGVYSFDYRGQGTLVTVSSGTGGGGSGGGGSGGGGSEFQVQLVQSGAEVKKPGASVKVSCKASGYTFTSYDINWVRQATGQGLEWMGWMNPNSGNTGYAQKFQGRVTMTRNTSISTAYMELSSLRSEDTAVYYCARGDSTKVEIKLEIQNPDPAVYQLRDSKSSDKSVCLFTDFDSQTNVSQSKDSDVYITDKCVLDMRSMDFKSNSAVAWSNKSDFACANAFNNSIIPEDTFFPSPESSCDVKLVEKSFETDTNLNFQILYEILLGKATLYAVLVSALVLMAMVKRKDSRGRAKRSGSGVKQTLNFDLLKLAGDVESNPGPTSMDWIWRILFLVGAATGAHSFEQSVLTQPRSVSGSPGQSVTISCTGTSSDVGGYNYVSWYQQHPGEAPKLIIYDADKRPSGISNRFSSGKSGNTASLTISGLQVEDEADYYCCSYAGGSTWVFGGGTKVTVLTREDLKNVFPPEVAVFEPSEAEISHTQKATLVCLATGFYPDHVELSWWVNGKEVHSGVCTDPQPLKEQPALNDSRYCLSSRLRVSATFWQNPRNHFRCQVQFYGLSENDEWTQDRAKPVTQIVSAEAWGRADCGFTSESYQQGVLSATNLSVIGFRILLLKVAGFNLLMTLRLWSS

SEQ ID NO: 13979 - protein, 771 aa, synthetic construct
MALPVTALLLPLALLLHAARPEVQLVESGGGLVQPGGSLRLSCAASGFSFSDFWMSWVRQAPGKGLEWVATISQAGSEKDYVDSVKGRFTISRDNAKKSLYLQMNSLRAEDTAVYYCASGVYSFDYRGQGTLVTVSSGTGGGGSGGGGSGGGGSEFEVQLQQSGPGLVKPSQTLSLTCAISGDSVSSNSAAWNWIRQSPSRGLEWLGRTYYRSKWYSDYAVSVKSRITINPDTSKNQFSLQLNSVTPEDTAVYYCARDPYDFWSGYPDAFDIWGQGTMVTVSSLEIQNPDPAVYQLRDSKSSDKSVCLFTDFDSQTNVSQSKDSDVYITDKCVLDMRSMDFKSNSAVAWSNKSDFACANAFNNSIIPEDTFFPSPESSCDVKLVEKSFETDTNLNFQILYEILLGKATLYAVLVSALVLMAMVKRKDSRGRAKRSGSGVKQTLNFDLLKLAGDVESNPGPTSMDWIWRILFLVGAATGAHSFEQSALTQPASVSGSPGQSITISCTGTSSDVGGYNYVSWYQQHPGKAPKVIISEVNNRPSGVSHRFSGSKSGNTASLTISGLQAEDEADYFCSSYTSGRTLYVFGTGSKVTVLGTREDLKNVFPPEVAVFEPSEAEISHTQKATLVCLATGFYPDHVELSWWVNGKEVHSGVCTDPQPLKEQPALNDSRYCLSSRLRVSATFWQNPRNHFRCQVQFYGLSENDEWTQDRAKPVTQIVSAEAWGRADCGFTSESYQQGVLSATNLSVIGFRILLLKVAGFNLLMTLRLWSS

SEQ ID NO: 13980 - protein, 770 aa, synthetic construct
MALPVTALLLPLALLLHAARPEVQLVESGGGLVQPGGSLRLSCAASGFSFSDFWMSWVRQAPGKGLEWVATISQAGSEKDYVDSVKGRFTISRDNAKKSLYLQMNSLRAEDTAVYYCASGVYSFDYRGQGTLVTVSSGTGGGGSGGGGSGGGGSEFQSALTQPASASGSPGQSVTISCTGTSSDVGGYNYVSWYQQHPGKAPKLMIYDVSNRPSGVSNRFSGSKSGNTASLTISGLQAEDEADYYCSSYTSSSTLYVFGTGTQLTVLLEIQNPDPAVYQLRDSKSSDKSVCLFTDFDSQTNVSQSKDSDVYITDKCVLDMRSMDFKSNSAVAWSNKSDFACANAFNNSIIPEDTFFPSPESSCDVKLVEKSFETDTNLNFQILYEILLGKATLYAVLVSALVLMAMVKRKDSRGRAKRSGSGVKQTLNFDLLKLAGDVESNPGPTSMDWIWRILFLVGAATGAHSFEEVQLQQSGPGLVKPSQTLSLTCAISGDSMLSNSDTWNWIRQSPSRGLEWLGRTYHRSTWYDDYASSVRGRVSINVDTSKNQYSLQLNAVTPEDTGVYYCARVRLQDGNSWSDAFDVWGQGTMVTVSSTREDLKNVFPPEVAVFEPSEAEISHTQKATLVCLATGFYPDHVELSWWVNGKEVHSGVCTDPQPLKEQPALNDSRYCLSSRLRVSATFWQNPRNHFRCQVQFYGLSENDEWTQDRAKPVTQIVSAEAWGRADCGFTSESYQQGVLSATNLSVIGFRILLLKVAGFNLLMTLRLWSS

SEQ ID NO: 13981 - protein, 770 aa, synthetic construct
MALPVTALLLPLALLLHAARPEVQLVESGGGLVQPGGSLRLSCAASGFSFSDFWMSWVRQAPGKGLEWVATISQAGSEKDYVDSVKGRFTISRDNAKKSLYLQMNSLRAEDTAVYYCASGVYSFDYRGQGTLVTVSSGTGGGGSGGGGSGGGGSEFDVMLTQTPLSLPVSLGDQASISCRSSQSILHSTGDTYLEWYLQKPGQSPKLLINKVSNRLSGVPDRFSGSGSGTDFTLKISRVEAEDLGVYYCFQGSHVPWTFGGGTKLEIKRADAAPTVSIFPLEIQNPDPAVYQLRDSKSSDKSVCLFTDFDSQTNVSQSKDSDVYITDKCVLDMRSMDFKSNSAVAWSNKSDFACANAFNNSIIPEDTFFPSPESSCDVKLVEKSFETDTNLNFQILYEILLGKATLYAVLVSALVLMAMVKRKDSRGRAKRSGSGVKQTLNFDLLKLAGDVESNPGPTSMDWIWRILFLVGAATGAHSFEQVKLQQSGPSLVKPGASVKMSCKASGYTFTDFYMKWVKQSHGKSLEWIGDINPNIGDTFYNQKFKGKATLTVDKSSSTAYMQLNSLTSEDSAVYFCSVGYFDVWGAGTTVTVSSTREDLKNVFPPEVAVFEPSEAEISHTQKATLVCLATGFYPDHVELSWWVNGKEVHSGVCTDPQPLKEQPALNDSRYCLSSRLRVSATFWQNPRNHFRCQVQFYGLSENDEWTQDRAKPVTQIVSAEAWGRADCGFTSESYQQGVLSATNLSVIGFRILLLKVAGFNLLMTLRLWSS

SEQ ID NO: 13982 - protein, 766 aa, synthetic construct
MALPVTALLLPLALLLHAARPEVQLVESGGGLVQPGGSLRLSCAASGFSFSDFWMSWVRQAPGKGLEWVATISQAGSEKDYVDSVKGRFTISRDNAKKSLYLQMNSLRAEDTAVYYCASGVYSFDYRGQGTLVTVSSGTGGGGSGGGGSGGGGSEFEIVLTQSPATLSLSPGERATLSCRASQSVSIYLAWYQQKPGQAPRLLIYDASNRATGIPARFSGSGSGTDFTLTISSLEPEDFAVYYCQQRSNWPPFTFGPGTKVDIKLEIQNPDPAVYQLRDSKSSDKSVCLFTDFDSQTNVSQSKDSDVYITDKCVLDMRSMDFKSNSAVAWSNKSDFACANAFNNSIIPEDTFFPSPESSCDVKLVEKSFETDTNLNFQILYEILLGKATLYAVLVSALVLMAMVKRKDSRGRAKRSGSGVKQTLNFDLLKLAGDVESNPGPTSMDWIWRILFLVGAATGAHSFEQVQLVESGGGVVQPGRSLRLSCAASGFTFSSYGMHWVRQAPGKGLEWVAVIWDDGSNKYYVDSVKGRFTISRDNSKNTLYLQMNSLRAEDTAVYYCARDDYYGSGSFNSYYGTDVWGQGTTVTVSSTREDLKNVFPPEVAVFEPSEAEISHTQKATLVCLATGFYPDHVELSWWVNGKEVHSGVCTDPQPLKEQPALNDSRYCLSSRLRVSATFWQNPRNHFRCQVQFYGLSENDEWTQDRAKPVTQIVSAEAWGRADCGFTSESYQQGVLSATNLSVIGFRILLLKVAGFNLLMTLRLWSS

SEQ ID NO: 13983 - protein, 751 aa, synthetic construct
MALPVTALLLPLALLLHAARPEVQLVESGGGLVQPGGSLRLSCAASGFSFSDFWMSWVRQAPGKGLEWVATISQAGSEKDYVDSVKGRFTISRDNAKKSLYLQMNSLRAEDTAVYYCASGVYSFDYRGQGTLVTVSSGTGGGGSGGGGSGGGGSEFDIQMTQSPSSLSASVGDRVTITCRASQGISSWLAWYQQKPEKAPKSLIYAASSLQSGVPSRFSGSGSGTDFTLTISSLQPEDFATYYCQQYNSYPYTFGQGTKLEIKLEIQNPDPAVYQLRDSKSSDKSVCLFTDFDSQTNVSQSKDSDVYITDKCVLDMRSMDFKSNSAVAWSNKSDFACANAFNNSIIPEDTFFPSPESSCDVKLVEKSFETDTNLNFQILYEILLGKATLYAVLVSALVLMAMVKRKDSRGRAKRSGSGVKQTLNFDLLKLAGDVESNPGPTSMDWIWRILFLVGAATGAHSFEEVQLVQSGGGLVHPGGSLRLSCAGSGFTFSTYLMYWVRQAPGKTLEWVSAIGSGGDTYYADSVKGRFTISRDNAKNSLYLQMNSLRAEDMAVYYCARGLGYWGQGTLVTVSSTREDLKNVFPPEVAVFEPSEAEISHTQKATLVCLATGFYPDHVELSWWVNGKEVHSGVCTDPQPLKEQPALNDSRYCLSSRLRVSATFWQNPRNHFRCQVQFYGLSENDEWTQDRAKPVTQIVSAEAWGRADCGFTSESYQQGVLSATNLSVIGFRILLLKVAGFNLLMTLRLWSS

SEQ ID NO: 13984 - protein, 770 aa, synthetic construct
MALPVTALLLPLALLLHAARPEVQLVESGGGLVQPGGSLRLSCAASGFSFSDFWMSWVRQAPGKGLEWVATISQAGSEKDYVDSVKGRFTISRDNAKKSLYLQMNSLRAEDTAVYYCASGVYSFDYRGQGTLVTVSSGTGGGGSGGGGSGGGGSEFLPVLTQPPSVSVAPGKTARITCGGNNIGSKSVHWYQQKPGQAPVLVVYDDSDRPSGIPERFSGSNSGNTATLTISRVEAGDEADYYCQVWDSSSDYVVFGGGTKLTVLLEIQNPDPAVYQLRDSKSSDKSVCLFTDFDSQTNVSQSKDSDVYITDKCVLDMRSMDFKSNSAVAWSNKSDFACANAFNNSIIPEDTFFPSPESSCDVKLVEKSFETDTNLNFQILYEILLGKATLYAVLVSALVLMAMVKRKDSRGRAKRSGSGVKQTLNFDLLKLAGDVESNPGPTSMDWIWRILFLVGAATGAHSFEEVQLVQSGAEVKKPGESLKISCKGSGYSFTSYWIGWVRQMPGKGLEWMGIIYPGDSDTRYSPSFQGQVTISADKSISTAYLQWSSLKASDTAMYYCARQVWGWQGGMYPRSNWWYNLDSWGQGTLVTVSSTREDLKNVFPPEVAVFEPSEAEISHTQKATLVCLATGFYPDHVELSWWVNGKEVHSGVCTDPQPLKEQPALNDSRYCLSSRLRVSATFWQNPRNHFRCQVQFYGLSENDEWTQDRAKPVTQIVSAEAWGRADCGFTSESYQQGVLSATNLSVIGFRILLLKVAGFNLLMTLRLWSS

SEQ ID NO: 13985 - protein, 763 aa, synthetic construct
MALPVTALLLPLALLLHAARPEVQLVESGGGLVQPGGSLRLSCAASGFSFSDFWMSWVRQAPGKGLEWVATISQAGSEKDYVDSVKGRFTISRDNAKKSLYLQMNSLRAEDTAVYYCASGVYSFDYRGQGTLVTVSSGTGGGGSGGGGSGGGGSEFELVMTQSPASLAVSLGQRATISCRASESVDSYGKSFMHWYQLKPGQPPKLLIYRASNLESGVPARFSGSGSRTDFTLTIDPVEADDAATYYCQQNNEDPWTFGGGTKLEIKLEIQNPDPAVYQLRDSKSSDKSVCLFTDFDSQTNVSQSKDSDVYITDKCVLDMRSMDFKSNSAVAWSNKSDFACANAFNNSIIPEDTFFPSPESSCDVKLVEKSFETDTNLNFQILYEILLGKATLYAVLVSALVLMAMVKRKDSRGRAKRSGSGVKQTLNFDLLKLAGDVESNPGPTSMDWIWRILFLVGAATGAHSFEEVQLEQSGPELVKPGASVKMSCKASGYTFTNYYMKWVKQSHGKSLEWIGDLNPNNGDTFYNQKFKGKATLTVDKSSNTAYMQLNSLTSEDSAVYYCARTGRYEENAMDYWGQGTSVTVSSTREDLKNVFPPEVAVFEPSEAEISHTQKATLVCLATGFYPDHVELSWWVNGKEVHSGVCTDPQPLKEQPALNDSRYCLSSRLRVSATFWQNPRNHFRCQVQFYGLSENDEWTQDRAKPVTQIVSAEAWGRADCGFTSESYQQGVLSATNLSVIGFRILLLKVAGFNLLMTLRLWSS

SEQ ID NO: 13986 - protein, 757 aa, synthetic construct
MALPVTALLLPLALLLHAARPEVQLVESGGGLVQPGGSLRLSCAASGFSFSDFWMSWVRQAPGKGLEWVATISQAGSEKDYVDSVKGRFTISRDNAKKSLYLQMNSLRAEDTAVYYCASGVYSFDYRGQGTLVTVSSGTGGGGSGGGGSGGGGSEFDVVMTQSPSSLSASVGDRVTITCMASEDIYIRLAWYQQKPGNAPKLLIYAATSLETGVPSRFSGSGSGTDFTLTISSLQPEDFATYYCQQYWSSPWTFGGGTKVEIKLEIQNPDPAVYQLRDSKSSDKSVCLFTDFDSQTNVSQSKDSDVYITDKCVLDMRSMDFKSNSAVAWSNKSDFACANAFNNSIIPEDTFFPSPESSCDVKLVEKSFETDTNLNFQILYEILLGKATLYAVLVSALVLMAMVKRKDSRGRAKRSGSGVKQTLNFDLLKLAGDVESNPGPTSMDWIWRILFLVGAATGAHSFEQVQLQESGPGLVKPSQTLSLTCTVSGYSITSDYTWNWIRQPPGNGLEWIGYITYSGSTSYNPSLKSRVLISVDTSKNQVSLKLSSVTAADTAVYYCARLGRRYTMDYWGQGTTVTVSSTREDLKNVFPPEVAVFEPSEAEISHTQKATLVCLATGFYPDHVELSWWVNGKEVHSGVCTDPQPLKEQPALNDSRYCLSSRLRVSATFWQNPRNHFRCQVQFYGLSENDEWTQDRAKPVTQIVSAEAWGRADCGFTSESYQQGVLSATNLSVIGFRILLLKVAGFNLLMTLRLWSS

SEQ ID NO: 13987 - protein, 761 aa, synthetic construct; identical to SEQ ID NO: 13850

SEQ ID NO: 13988 - protein, 761 aa, synthetic construct
MALPVTALLLPLALLLHAARPEVQLVESGGGLVQPGGSLRLSCAASGFSFSDFWMSWVRQAPGKGLEWVATISQAGSEKDYVDSVKGRFTISRDNAKKSLYLQMNSLRAEDTAVYYCASGVYSFDYRGQGTLVTVSSGTGGGGSGGGGSGGGGSEFDIVLTQSPATLSLSPGDRATLSCRASESVTILGSHLIYWYQQKPGQAPRLLIQLASNVQTGIPARFSGSGSRTDFTLTISSLEPEDFAVYYCLQSRTIPRTFGQGTKLEIKRLEIQNPDPAVYQLRDSKSSDKSVCLFTDFDSQTNVSQSKDSDVYITDKCVLDMRSMDFKSNSAVAWSNKSDFACANAFNNSIIPEDTFFPSPESSCDVKLVEKSFETDTNLNFQILYEILLGKATLYAVLVSALVLMAMVKRKDSRGRAKRSGSGVKQTLNFDLLKLAGDVESNPGPTSMDWIWRILFLVGAATGAHSFEQVQLVQSGSELKKPGESVKISCKASGYTFTHYSMNWVRQAPGQGLEWMGRINTETGEPLYADDFKGRFVFSLDTSASTAYLQISSLKAEDTAVYYCSNDYLYSLDYWGQGTLVTVSSTREDLKNVFPPEVAVFEPSEAEISHTQKATLVCLATGFYPDHVELSWWVNGKEVHSGVCTDPQPLKEQPALNDSRYCLSSRLRVSATFWQNPRNHFRCQVQFYGLSENDEWTQDRAKPVTQIVSAEAWGRADCGFTSESYQQGVLSATNLSVIGFRILLLKVAGFNLLMTLRLWSS

SEQ ID NO: 13989 - protein, 762 aa, synthetic construct
MALPVTALLLPLALLLHAARPEVQLVESGGGLVQPGGSLRLSCAASGFSFSDFWMSWVRQAPGKGLEWVATISQAGSEKDYVDSVKGRFTISRDNAKKSLYLQMNSLRAEDTAVYYCASGVYSFDYRGQGTLVTVSSGTGGGGSGGGGSGGGGSEFDIQLTQSPSFLSASVGDRVTITCRASQGISTDLNWYQQKPGKAPKLLIYAASNLESGVPSRFSGSGSGTEFTLTISSLQPEDFATYYCQQSYNWPYTFGGGTKVEIKRLEIQNPDPAVYQLRDSKSSDKSVCLFTDFDSQTNVSQSKDSDVYITDKCVLDMRSMDFKSNSAVAWSNKSDFACANAFNNSIIPEDTFFPSPESSCDVKLVEKSFETDTNLNFQILYEILLGKATLYAVLVSALVLMAMVKRKDSRGRAKRSGSGVKQTLNFDLLKLAGDVESNPGPTSMDWIWRILFLVGAATGAHSFEEVQLVESGGGLVKPGGSLRLSCAASGFTFSNFEMNWVRQAPGKGLEWVSGISSNGRYINYADSVKGRFTISRDNAKNSLYLQMNSLRAEDTAVYYCARVVDFDQDYNGFDYWGQGTLVTVSSTREDLKNVFPPEVAVFEPSEAEISHTQKATLVCLATGFYPDHVELSWWVNGKEVHSGVCTDPQPLKEQPALNDSRYCLSSRLRVSATFWQNPRNHFRCQVQFYGLSENDEWTQDRAKPVTQIVSAEAWGRADCGFTSESYQQGVLSATNLSVIGFRILLLKVAGFNLLMTLRLWSS

SEQ ID NO: 13990 - protein, 760 aa, synthetic construct
MALPVTALLLPLALLLHAARPEVQLVESGGGLVQPGGSLRLSCAASGFSFSDFWMSWVRQAPGKGLEWVATISQAGSEKDYVDSVKGRFTISRDNAKKSLYLQMNSLRAEDTAVYYCASGVYSFDYRGQGTLVTVSSGTGGGGSGGGGSGGGGSEFDIQLTQSPSFLSASVGDRVTITCSLSLGISTWRDWFPPRLGRGLEPLTYAASTLQSGVPSRFSGSGSGTEFTLTISSLQPEDFATYYCQQLNSYPLTFGGGTKVEIKRLEIQNPDPAVYQLRDSKSSDKSVCLFTDFDSQTNVSQSKDSDVYITDKCVLDMRSMDFKSNSAVAWSNKSDFACANAFNNSIIPEDTFFPSPESSCDVKLVEKSFETDTNLNFQILYEILLGKATLYAVLVSALVLMAMVKRKDSRGRAKRSGSGVKQTLNFDLLKLAGDVESNPGPTSMDWIWRILFLVGAATGAHSFEEVQLVESGGGLVKPGGSLRLSCAASGFTFSTYGMSWVRQAPGKGLEWVAYINNGSGYIYYADSVKGRFTISRDNAKNSLYLQMNSLRAEDTAVYYCARGQWWSGGDFDYWGQGTLVTVSSTREDLKNVFPPEVAVFEPSEAEISHTQKATLVCLATGFYPDHVELSWWVNGKEVHSGVCTDPQPLKEQPALNDSRYCLSSRLRVSATFWQNPRNHFRCQVQFYGLSENDEWTQDRAKPVTQIVSAEAWGRADCGFTSESYQQGVLSATNLSVIGFRILLLKVAGFNLLMTLRLWSS

SEQ ID NO: 13991 - protein, 761 aa, synthetic construct
MALPVTALLLPLALLLHAARPEVQLVESGGGLVQPGGSLRLSCAASGFSFSDFWMSWVRQAPGKGLEWVATISQAGSEKDYVDSVKGRFTISRDNAKKSLYLQMNSLRAEDTAVYYCASGVYSFDYRGQGTLVTVSSGTGGGGSGGGGSGGGGSEFEIVLTQSPATLSLSPGERATLSCSASSSVSYMYWYQQKPGQAPRLLIYRTSNLASGIPARFSGSGSGTDFTLTISSLEPEDFAVYYCQQYHSYPTTFGQGTKVEIKRTVLEIQNPDPAVYQLRDSKSSDKSVCLFTDFDSQTNVSQSKDSDVYITDKCVLDMRSMDFKSNSAVAWSNKSDFACANAFNNSIIPEDTFFPSPESSCDVKLVEKSFETDTNLNFQILYEILLGKATLYAVLVSALVLMAMVKRKDSRGRAKRSGSGVKQTLNFDLLKLAGDVESNPGPTSMDWIWRILFLVGAATGAHSFEEVQLVESGGGLVQPGGSLRLSCAASGFSFNTYAMNWVRQAPGKGLEWVSHIRSKSNNFATYYADSVKDRFTISRDNAKNSLYLQMNSLRAEDTAVYYCARQGGDFPMDYWGQGTLVTVSSTREDLKNVFPPEVAVFEPSEAEISHTQKATLVCLATGFYPDHVELSWWVNGKEVHSGVCTDPQPLKEQPALNDSRYCLSSRLRVSATFWQNPRNHFRCQVQFYGLSENDEWTQDRAKPVTQIVSAEAWGRADCGFTSESYQQGVLSATNLSVIGFRILLLKVAGFNLLMTLRLWSS

SEQ ID NO: 13992 - protein, 757 aa, synthetic construct
MALPVTALLLPLALLLHAARPEVQLVESGGGLVQPGGSLRLSCAASGFSFSDFWMSWVRQAPGKGLEWVATISQAGSEKDYVDSVKGRFTISRDNAKKSLYLQMNSLRAEDTAVYYCASGVYSFDYRGQGTLVTVSSGTGGGGSGGGGSGGGGSEFDVVMTQSPSSLSASVGDRVTITCKASEDIYIRLAWYQQKPGKAPKLLIYAATSLETGVPSRFSGSGSGTDFTLTISSLQPEDFATYYCQQYWTTPWTFGGGTKVEIKLEIQNPDPAVYQLRDSKSSDKSVCLFTDFDSQTNVSQSKDSDVYITDKCVLDMRSMDFKSNSAVAWSNKSDFACANAFNNSIIPEDTFFPSPESSCDVKLVEKSFETDTNLNFQILYEILLGKATLYAVLVSALVLMAMVKRKDSRGRAKRSGSGVKQTLNFDLLKLAGDVESNPGPTSMDWIWRILFLVGAATGAHSFEQVQLQESGPGLVKPSQTLSLTCTVSGYSITIDYTWNWIRQPPGKGLEWIGYITYSGSTDYNPSLKSRVLISVDTSKNQVSLKLSSVTAADTAVYYCARLGRRYALDYWGQGTTVTVSSTREDLKNVFPPEVAVFEPSEAEISHTQKATLVCLATGFYPDHVELSWWVNGKEVHSGVCTDPQPLKEQPALNDSRYCLSSRLRVSATFWQNPRNHFRCQVQFYGLSENDEWTQDRAKPVTQIVSAEAWGRADCGFTSESYQQGVLSATNLSVIGFRILLLKVAGFNLLMTLRLWSS

SEQ ID NO: 13993 - protein, 761 aa, synthetic construct
MALPVTALLLPLALLLHAARPEVQLVESGGGLVQPGGSLRLSCAASGFSFSDFWMSWVRQAPGKGLEWVATISQAGSEKDYVDSVKGRFTISRDNAKKSLYLQMNSLRAEDTAVYYCASGVYSFDYRGQGTLVTVSSGTGGGGSGGGGSGGGGSEFDIQMTQTTSSLSASLGDRVTISCRASQDISNYLNWYQQKPDGTVKLLIYYTSILHSGVPSRFSGSGSGTDYSLTISNLEQEDFATYFCQQGNTLPWTFGGGTKLEIKALEIQNPDPAVYQLRDSKSSDKSVCLFTDFDSQTNVSQSKDSDVYITDKCVLDMRSMDFKSNSAVAWSNKSDFACANAFNNSIIPEDTFFPSPESSCDVKLVEKSFETDTNLNFQILYEILLGKATLYAVLVSALVLMAMVKRKDSRGRAKRSGSGVKQTLNFDLLKLAGDVESNPGPTSMDWIWRILFLVGAATGAHSFEVQLVESGGGLVKPGGSLKLSCAASGFAFSIYDMSWVRQTPEKRLEWVAYISSGGGTYYPDTVKGRFTISRDNAKNTLYLQMSSLKSEDTAMYYCARHSGYGTHWGVLFAYWGQGTLVTVSATREDLKNVFPPEVAVFEPSEAEISHTQKATLVCLATGFYPDHVELSWWVNGKEVHSGVCTDPQPLKEQPALNDSRYCLSSRLRVSATFWQNPRNHFRCQVQFYGLSENDEWTQDRAKPVTQIVSAEAWGRADCGFTSESYQQGVLSATNLSVIGFRILLLKVAGFNLLMTLRLWSS

SEQ ID NO: 13994 - protein, 772 aa, synthetic construct
MALPVTALLLPLALLLHAARPEVQLVESGGGLVQPGGSLRLSCAASGFSFSDFWMSWVRQAPGKGLEWVATISQAGSEKDYVDSVKGRFTISRDNAKKSLYLQMNSLRAEDTAVYYCASGVYSFDYRGQGTLVTVSSGTGGGGSGGGGSGGGGSEFDIVMTQSPDSLAVSLGERATINCKSSQSLLYRSNQKNYLAWYQQKPGQPPKLLIYWASTRESGVPDRFSGSGSGTDFTLTISSLQAEDVAVYYCQQYYNYPRTFGQGTKVEIKRTVLEIQNPDPAVYQLRDSKSSDKSVCLFTDFDSQTNVSQSKDSDVYITDKCVLDMRSMDFKSNSAVAWSNKSDFACANAFNNSIIPEDTFFPSPESSCDVKLVEKSFETDTNLNFQILYEILLGKATLYAVLVSALVLMAMVKRKDSRGRAKRSGSGVKQTLNFDLLKLAGDVESNPGPTSMDWIWRILFLVGAATGAHSFEEVQLLESGGGLVQPGGSLRLSCAASGYSITSDYAWNWVRQAPGKGLEWVSYISNSGSTSYNPSLKSRFTISRDNSKNTLYLQMNSLRAEDTAVYYCAKERNYDYDDYYYAMDYWGQGTLVTVSSTREDLKNVFPPEVAVFEPSEAEISHTQKATLVCLATGFYPDHVELSWWVNGKEVHSGVCTDPQPLKEQPALNDSRYCLSSRLRVSATFWQNPRNHFRCQVQFYGLSENDEWTQDRAKPVTQIVSAEAWGRADCGFTSESYQQGVLSATNLSVIGFRILLLKVAGFNLLMTLRLWSS

SEQ ID NO: 13995 - protein, 765 aa, synthetic construct
MALPVTALLLPLALLLHAARPEVQLVESGGGLVQPGGSLRLSCAASGFSFSDFWMSWVRQAPGKGLEWVATISQAGSEKDYVDSVKGRFTISRDNAKKSLYLQMNSLRAEDTAVYYCASGVYSFDYRGQGTLVTVSSGTGGGGSGGGGSGGGGSEFDVVMTQSPLSLPVTLGQPASISCRSSQSLLHSSGNTYLEWYQQRPGQSPRPLIYKISTRFSGVPDRFSGSGSGTDFTLKISRVEAEDVGVYYCFQGSHVPYTFGGGTKVEIKRLEIQNPDPAVYQLRDSKSSDKSVCLFTDFDSQTNVSQSKDSDVYITDKCVLDMRSMDFKSNSAVAWSNKSDFACANAFNNSIIPEDTFFPSPESSCDVKLVEKSFETDTNLNFQILYEILLGKATLYAVLVSALVLMAMVKRKDSRGRAKRSGSGVKQTLNFDLLKLAGDVESNPGPTSMDWIWRILFLVGAATGAHSFEQVQLVQSGAEVKKPGASVKVSCKASGLTIEDYYMHWVRQAPGQGLEWMGWIDPENGDTEYGPKFQGRVTMTRDTSINTAYMELSRLRSDDTAVYYCAVHNAHYGTWFAYWGQGTLVTVSSTREDLKNVFPPEVAVFEPSEAEISHTQKATLVCLATGFYPDHVELSWWVNGKEVHSGVCTDPQPLKEQPALNDSRYCLSSRLRVSATFWQNPRNHFRCQVQFYGLSENDEWTQDRAKPVTQIVSAEAWGRADCGFTSESYQQGVLSATNLSVIGFRILLLKVAGFNLLMTLRLWSS

SEQ ID NO: 13996 - protein, 757 aa, synthetic construct
MALPVTALLLPLALLLHAARPEVQLVESGGGLVQPGGSLRLSCAASGFSFSDFWMSWVRQAPGKGLEWVATISQAGSEKDYVDSVKGRFTISRDNAKKSLYLQMNSLRAEDTAVYYCASGVYSFDYRGQGTLVTVSSGTGGGGSGGGGSGGGGSEFDIQMTQSPSSLSASVGDRVTITCRASENIYSNLAWYQQKPGKAPKLLIYAATNLADGVPSRFSGSGSGTDFTLTISSLQPEDFATYYCQHFWGTPTFGQGTKVEIKRTVLEIQNPDPAVYQLRDSKSSDKSVCLFTDFDSQTNVSQSKDSDVYITDKCVLDMRSMDFKSNSAVAWSNKSDFACANAFNNSIIPEDTFFPSPESSCDVKLVEKSFETDTNLNFQILYEILLGKATLYAVLVSALVLMAMVKRKDSRGRAKRSGSGVKQTLNFDLLKLAGDVESNPGPTSMDWIWRILFLVGAATGAHSFEEVQLVESGGGLVQPGGSLRLSCAASGFSLTNYGVHWVRQAPGKGLEWVSVIWSGGSTDYNAAFISRFTISADTSKNTAYLQMNSLRAEDTAVYYCARELIHAMDNWGQGTLVTVSSTREDLKNVFPPEVAVFEPSEAEISHTQKATLVCLATGFYPDHVELSWWVNGKEVHSGVCTDPQPLKEQPALNDSRYCLSSRLRVSATFWQNPRNHFRCQVQFYGLSENDEWTQDRAKPVTQIVSAEAWGRADCGFTSESYQQGVLSATNLSVIGFRILLLKVAGFNLLMTLRLWSS

SEQ ID NO: 13997 - protein, 764 aa, synthetic construct
MALPVTALLLPLALLLHAARPEVQLVESGGGLVQPGGSLRLSCAASGFSFSDFWMSWVRQAPGKGLEWVATISQAGSEKDYVDSVKGRFTISRDNAKKSLYLQMNSLRAEDTAVYYCASGVYSFDYRGQGTLVTVSSGTGGGGSGGGGSGGGGSEFDFVMTQSPLSLPVTPGEPASISCRSSQSIVHSNGNTYLEWYLQKPGQSPQLLIYKVSNRFSGVPDRFSGSGSGTDFTLKISRVEAEDVGVYYCFQGSHVPLTFGQGTKLEIKRLEIQNPDPAVYQLRDSKSSDKSVCLFTDFDSQTNVSQSKDSDVYITDKCVLDMRSMDFKSNSAVAWSNKSDFACANAFNNSIIPEDTFFPSPESSCDVKLVEKSFETDTNLNFQILYEILLGKATLYAVLVSALVLMAMVKRKDSRGRAKRSGSGVKQTLNFDLLKLAGDVESNPGPTSMDWIWRILFLVGAATGAHSFEEVQLVESGAEVKKPGASVKVSCKASGYTFTSYWIHWVRQAPGQGLEWMGENDPSNGRTNYNEKFKNRVTLTVDTSISTAYMELSRLRSDDTAVYYCARGPNYFYSMDYWGQGTMVTVSSTREDLKNVFPPEVAVFEPSEAEISHTQKATLVCLATGFYPDHVELSWWVNGKEVHSGVCTDPQPLKEQPALNDSRYCLSSRLRVSATFWQNPRNHFRCQVQFYGLSENDEWTQDRAKPVTQIVSAEAWGRADCGFTSESYQQGVLSATNLSVIGFRILLLKVAGFNLLMTLRLWSS

SEQ ID NO: 13998 - protein, 757 aa, synthetic construct
MALPVTALLLPLALLLHAARPEVQLVESGGGLVQPGGSLRLSCAASGFSFSDFWMSWVRQAPGKGLEWVATISQAGSEKDYVDSVKGRFTISRDNAKKSLYLQMNSLRAEDTAVYYCASGVYSFDYRGQGTLVTVSSGTGGGGSGGGGSGGGGSEFDIQLTQSPSFLSASVGDRVTITCSARSSISFMYWYQQKPGKAPKLLIYDTSNLASGVPSRFSGSGSGTEFTLTISSLEAEDAATYYCQQWSSYPLTFGQGTKLEIKLEIQNPDPAVYQLRDSKSSDKSVCLFTDFDSQTNVSQSKDSDVYITDKCVLDMRSMDFKSNSAVAWSNKSDFACANAFNNSIIPEDTFFPSPESSCDVKLVEKSFETDTNLNFQILYEILLGKATLYAVLVSALVLMAMVKRKDSRGRAKRSGSGVKQTLNFDLLKLAGDVESNPGPTSMDWIWRILFLVGAATGAHSFEQVQLVQSGAEVKKPGASVKVSCKASGYTFTGSWMNWVRQAPGQGLEWIGRIYPGDGETNYNGKFKDRVTITADKSTSTAYMELSSLRSEDTAVYYCARIYGNNVYFDVWGQGTTVTVSSTREDLKNVFPPEVAVFEPSEAEISHTQKATLVCLATGFYPDHVELSWWVNGKEVHSGVCTDPQPLKEQPALNDSRYCLSSRLRVSATFWQNPRNHFRCQVQFYGLSENDEWTQDRAKPVTQIVSAEAWGRADCGFTSESYQQGVLSATNLSVIGFRILLLKVAGFNLLMTLRLWSS

SEQ ID NO: 13999 - protein, 765 aa, synthetic construct
MALPVTALLLPLALLLHAARPEVQLVESGGGLVQPGGSLRLSCAASGFSFSDFWMSWVRQAPGKGLEWVATISQAGSEKDYVDSVKGRFTISRDNAKKSLYLQMNSLRAEDTAVYYCASGVYSFDYRGQGTLVTVSSGTGGGGSGGGGSGGGGSEFQLVLTQSPSASASLGSSVKLTCTLSSGHKTDTIDWYQQQPGKAPRYLMKLEGSGSYNKGSGVPDRFSGSSSGADWYLTISSLQSEDEADYYCGTDYPGNYLFGGGTQLTVLGLEIQNPDPAVYQLRDSKSSDKSVCLFTDFDSQTNVSQSKDSDVYITDKCVLDMRSMDFKSNSAVAWSNKSDFACANAFNNSIIPEDTFFPSPESSCDVKLVEKSFETDTNLNFQILYEILLGKATLYAVLVSALVLMAMVKRKDSRGRAKRSGSGVKQTLNFDLLKLAGDVESNPGPTSMDWIWRILFLVGAATGAHSFEQEQLVESGGGLVQPGGSLRLSCAASGFTFSDYYMSWIRQAPGKGLEWVATIYPSSGKTYYADSAKGRLTISSDNAKDSLYLQMNSLRAEDTAVYYCTRDSYADDAALFDIWGQGTTVTVSSTREDLKNVFPPEVAVFEPSEAEISHTQKATLVCLATGFYPDHVELSWWVNGKEVHSGVCTDPQPLKEQPALNDSRYCLSSRLRVSATFWQNPRNHFRCQVQFYGLSENDEWTQDRAKPVTQIVSAEAWGRADCGFTSESYQQGVLSATNLSVIGFRILLLKVAGFNLLMTLRLWSS

SEQ ID NO: 14000 - protein, 757 aa, synthetic construct; identical to SEQ ID NO: 13996

SEQ ID NO: 14001 - protein, 764 aa, synthetic construct; identical to SEQ ID NO: 13997

SEQ ID NO: 14002 - protein, 757 aa, synthetic construct; identical to SEQ ID NO: 13998

SEQ ID NO: 14003 - protein, 765 aa, synthetic construct; identical to SEQ ID NO: 13999

SEQ ID NO: 14004 - protein, 764 aa, synthetic construct
MALPVTALLLPLALLLHAARPEVQLVESGGGLVQPGGSLRLSCAASGFSFSDFWMSWVRQAPGKGLEWVATISQAGSEKDYVDSVKGRFTISRDNAKKSLYLQMNSLRAEDTAVYYCASGVYSFDYRGQGTLVTVSSGTGGGGSGGGGSGGGGSEFDIQLTQSPSSLSASVGDRVSFTCQASQDINNFLNWYQQKPGKAPKLLIYDASNLETGVPSRFSGSGSGTDFTFTISSLQPEDIATYYCQQYGNLPFTFGGGTKVEIKRLEIQNPDPAVYQLRDSKSSDKSVCLFTDFDSQTNVSQSKDSDVYITDKCVLDMRSMDFKSNSAVAWSNKSDFACANAFNNSIIPEDTFFPSPESSCDVKLVEKSFETDTNLNFQILYEILLGKATLYAVLVSALVLMAMVKRKDSRGRAKRSGSGVKQTLNFDLLKLAGDVESNPGPTSMDWIWRILFLVGAATGAHSFEQVQLQESGPGLVKPSQTLSLTCTVSGGSISSGGFYWSWIRQHPGKGLEWIGYIHHSGSTHYNPSLKSRVTISIDTSKNLFSLRLSSVTAADTAVYYCASLVYCGGDCYSGFDYWGQGTLVTVSSTREDLKNVFPPEVAVFEPSEAEISHTQKATLVCLATGFYPDHVELSWWVNGKEVHSGVCTDPQPLKEQPALNDSRYCLSSRLRVSATFWQNPRNHFRCQVQFYGLSENDEWTQDRAKPVTQIVSAEAWGRADCGFTSESYQQGVLSATNLSVIGFRILLLKVAGFNLLMTLRLWSS

SEQ ID NO: 14005 - protein, 760 aa, synthetic construct
MALPVTALLLPLALLLHAARPEVQLVESGGGLVQPGGSLRLSCAASGFSFSDFWMSWVRQAPGKGLEWVATISQAGSEKDYVDSVKGRFTISRDNAKKSLYLQMNSLRAEDTAVYYCASGVYSFDYRGQGTLVTVSSGTGGGGSGGGGSGGGGSEFDIQMTQSPSSLSASVGDRVTITCKSSQSVLYSSNQKNYLAWFQQKPGKAPKLLIYWASTRESGVPSRFSGSGSGTDFTLTISSLQPEDFATYFCHQYLSSYTFGQGTKVEIKRLEIQNPDPAVYQLRDSKSSDKSVCLFTDFDSQTNVSQSKDSDVYITDKCVLDMRSMDFKSNSAVAWSNKSDFACANAFNNSIIPEDTFFPSPESSCDVKLVEKSFETDTNLNFQILYEILLGKATLYAVLVSALVLMAMVKRKDSRGRAKRSGSGVKQTLNFDLLKLAGDVESNPGPTSMDWIWRILFLVGAATGAHSFEEVQLVESGGGLVQPGGSLRLSCAASGYTFTTYWMHWVRQAPGKGLEWVGYIRPSTGYTEYNQKFKDRFTISADTSKNTAYLQMNSLRAEDTAVYYCARSRWLLDYWGQGTLVTVSTREDLKNVFPPEVAVFEPSEAEISHTQKATLVCLATGFYPDHVELSWWVNGKEVHSGVCTDPQPLKEQPALNDSRYCLSSRLRVSATFWQNPRNHFRCQVQFYGLSENDEWTQDRAKPVTQIVSAEAWGRADCGFTSESYQQGVLSATNLSVIGFRILLLKVAGFNLLMTLRLWSS

SEQ ID NO: 14006 - protein, 757 aa, synthetic construct
MALPVTALLLPLALLLHAARPEVQLVESGGGLVQPGGSLRLSCAASGFSFSDFWMSWVRQAPGKGLEWVATISQAGSEKDYVDSVKGRFTISRDNAKKSLYLQMNSLRAEDTAVYYCASGVYSFDYRGQGTLVTVSSGTGGGGSGGGGSGGGGSEFDIQMTQSPSSLSASVGDRVTITCRASQDISNYLNWYQQKPGKAPKLLIYYTSRLHSGVPSRFSGSGSGTDFTLTISSLQPEDFATYYCQQGNTLPYTFGQGTKVEIKRLEIQNPDPAVYQLRDSKSSDKSVCLFTDFDSQTNVSQSKDSDVYITDKCVLDMRSMDFKSNSAVAWSNKSDFACANAFNNSIIPEDTFFPSPESSCDVKLVEKSFETDTNLNFQILYEILLGKATLYAVLVSALVLMAMVKRKDSRGRAKRSGSGVKQTLNFDLLKLAGDVESNPGPTSMDWIWRILFLVGAATGAHSFEEVQLVESGGGLVQPGGSLRLSCAASGFTFSDYFMSWVRQAPGKGLEWVATISNGGTYTYYPDSVKGRFTISRDNSKNTLYLQMNSLRAEDTAVYYCARFDGYIFDYWGQGTLVTVSSTREDLKNVFPPEVAVFEPSEAEISHTQKATLVCLATGFYPDHVELSWWVNGKEVHSGVCTDPQPLKEQPALNDSRYCLSSRLRVSATFWQNPRNHFRCQVQFYGLSENDEWTQDRAKPVTQIVSAEAWGRADCGFTSESYQQGVLSATNLSVIGFRILLLKVAGFNLLMTLRLWSS

SEQ ID NO: 14007 - protein, 891 aa, synthetic construct
MALPVTALLLPLALLLHAARPEVQLVESGGGLVQPGGSLRLSCAASGFSFSDFWMSWVRQAPGKGLEWVATISQAGSEKDYVDSVKGRFTISRDNAKKSLYLQMNSLRAEDTAVYYCASGVYSFDYRGQGTLVTVSSGTGGGGSGGGGSGGGGSEFDIQMTQTTSSLSASLGDRVTISCRASQDISKYLNWYQQKPDGTVKLLIYHTSRLHSGVPSRFSGSGSGTDYSLTISNLEQEDIATYFCQQGNTLPYTFGGGTKLEITLEDLKNVFPPEVAVFEPSEAEISHTQKATLVCLATGFYPDHVELSWWVNGKEVHSGVCTDPQPLKEQPALNDSRYCLSSRLRVSATFWQNPRNHFRCQVQFYGLSENDEWTQDRAKPVTQIVSAEAWGRADCGFTSESYQQGVLSATNLSVIGFRILLLKVAGFNLLMTLRLWSSRAKRSGSGATNFSLLKQAGDVEENPGPTSMDWIWRILFLVGAATGAHSGPQLQLQESGPGLVKPSETLSLTCTVSGDSISSGDYYWGWIRQPPGKGLEWIGHIYYSGVTYYNPSLKSRVTISVDTSRNQFSLKLSSVTAADTAVYYCTREDSSNWRSRGQGTLVTVSSGSGGGGSGGGGSGGGGSFEVKLQESGPGLVAPSQSLSVTCTVSGVSLPDYGVSWIRQPPRKGLEWLGVIWGSETTYYNSALKSRLTIIKDNSKSQVFLKMNSLQTDDTAIYYCAKHYYYGGSYAMDYWGQGTSVTVSSTRIQNPDPAVYQLRDSKSSDKSVCLFTDFDSQTNVSQSKDSDVYITDKCVLDMRSMDFKSNSAVAWSNKSDFACANAFNNSIIPEDTFFPSPESSCDVKLVEKSFETDTNLNFQILYEILLGKATLYAVLVSALVLMAMVKRKDSRG

SEQ ID NO: 14008 - protein, 892 aa, synthetic construct
MALPVTALLLPLALLLHAARPEVQLVESGGGLVQPGGSLRLSCAASGFSFSDFWMSWVRQAPGKGLEWVATISQAGSEKDYVDSVKGRFTISRDNAKKSLYLQMNSLRAEDTAVYYCASGVYSFDYRGQGTLVTVSSGTGGGGSGGGGSGGGGSEFEIVMTQSPATLSLSPGERATLSCRASQDISKYLNWYQQKPGQAPRLLIYHTSRLHSGIPARFSGSGSGTDYTLTISSLQPEDFAVYFCQQGNTLPYTFGQGTKLEIKLEDLKNVFPPEVAVFEPSEAEISHTQKATLVCLATGFYPDHVELSWWVNGKEVHSGVCTDPQPLKEQPALNDSRYCLSSRLRVSATFWQNPRNHFRCQVQFYGLSENDEWTQDRAKPVTQIVSAEAWGRADCGFTSESYQQGVLSATNLSVIGFRILLLKVAGFNLLMTLRLWSSRAKRSGSGATNFSLLKQAGDVEENPGPTSMDWIWRILFLVGAATGAHSGPQLQLQESGPGLVKPSETLSLTCTVSGDSISSGDYYWGWIRQPPGKGLEWIGHIYYSGVTYYNPSLKSRVTISVDTSRNQFSLKLSSVTAADTAVYYCTREDSSNWRSRGQGTLVTVSSGSGGGGSGGGGSGGGGSFEQVQLQESGPGLVKPSETLSLTCTVSGVSLPDYGVSWIRQPPGKGLEWIGVIWGSETTYYNSSLKSRVTISKDNSKNQVSLKLSSVTAADTAVYYCAKHYYYGGSYAMDYWGQGTLVTVSSTRIQNPDPAVYQLRDSKSSDKSVCLFTDFDSQTNVSQSKDSDVYITDKCVLDMRSMDFKSNSAVAWSNKSDFACANAFNNSIIPEDTFFPSPESSCDVKLVEKSFETDTNLNFQILYEILLGKATLYAVLVSALVLMAMVKRKDSRG

SEQ ID NO: 14009 - protein, 893 aa, synthetic construct
MALPVTALLLPLALLLHAARPEVQLVESGGGLVQPGGSLRLSCAASGFSFSDFWMSWVRQAPGKGLEWVATISQAGSEKDYVDSVKGRFTISRDNAKKSLYLQMNSLRAEDTAVYYCASGVYSFDYRGQGTLVTVSSGTGGGGSGGGGSGGGGSEFDEIVLTQSPATLSLSPGERATLSCSASSSVSYMHWYQQKPGQAPRLLIYDTSKLASGIPARFSGSGSGTDFTLTISSLEPEDVAVYYCFQGSVYPFTFGQGTKLEIKRLEDLKNVFPPEVAVFEPSEAEISHTQKATLVCLATGFYPDHVELSWWVNGKEVHSGVCTDPQPLKEQPALNDSRYCLSSRLRVSATFWQNPRNHFRCQVQFYGLSENDEWTQDRAKPVTQIVSAEAWGRADCGFTSESYQQGVLSATNLSVIGFRILLLKVAGFNLLMTLRLWSSRAKRSGSGATNFSLLKQAGDVEENPGPTSMDWIWRILFLVGAATGAHSGPQLQLQESGPGLVKPSETLSLTCTVSGDSISSGDYYWGWIRQPPGKGLEWIGHIYYSGVTYYNPSLKSRVTISVDTSRNQFSLKLSSVTAADTAVYYCTREDSSNWRSRGQGTLVTVSSGSGGGGSGGGGSGGGGSFEQVQLQESGPGLVKPSQTLSLTCTVSGGSISTSGMGVGWIRQHPGKGLEWIGHIWWDDDKRYNPALKSRVTISVDTSKNQFSLKLSSVTAADTAVYYCARMELWSYYFDYWGQGTLVTVSSTRIQNPDPAVYQLRDSKSSDKSVCLFTDFDSQTNVSQSKDSDVYITDKCVLDMRSMDFKSNSAVAWSNKSDFACANAFNNSIIPEDTFFPSPESSCDVKLVEKSFETDTNLNFQILYEILLGKATLYAVLVSALVLMAMVKRKDSRG

SEQ ID NO: 14010 - protein, 891 aa, synthetic construct
MALPVTALLLPLALLLHAARPEVQLVESGGGLVQPGGSLRLSCAASGFSFSDFWMSWVRQAPGKGLEWVATISQAGSEKDYVDSVKGRFTISRDNAKKSLYLQMNSLRAEDTAVYYCASGVYSFDYRGQGTLVTVSSGTGGGGSGGGGSGGGGSEFDYIHVTQSPSSLSVSIGDRVTINCQTSQGVGSDLHWYQHKPGRAPKLLIHHASSVEDGVPSRFSGTGFHTSFNLTINDLQADDIGTYYCQVLQSFGRGSRLDTKLEDLKNVFPPEVAVFEPSEAEISHTQKATLVCLATGFYPDHVELSWWVNGKEVHSGVCTDPQPLKEQPALNDSRYCLSSRLRVSATFWQNPRNHFRCQVQFYGLSENDEWTQDRAKPVTQIVSAEAWGRADCGFTSESYQQGVLSATNLSVIGFRILLLKVAGFNLLMTLRLWSSRAKRSGSGATNFSLLKQAGDVEENPGPTSMDWIWRILFLVGAATGAHSGPQLQLQESGPGLVKPSETLSLTCTVSGDSISSGDYYWGWIRQPPGKGLEWIGHIYYSGVTYYNPSLKSRVTISVDTSRNQFSLKLSSVTAADTAVYYCTREDSSNWRSRGQGTLVTVSSGSGGGGSGGGGSGGGGSFERAHLVQSGTAMKKPGASVRVSCQTSGYTFTAHILFWFRQAPGRGLEWVGWIKPQYGAVNFGGGFRDRVTLTRDVYREIAYMDIRGLKPDDTAVYYCARDRSYGDSSWALDAWGQGTTVVVSATRIQNPDPAVYQLRDSKSSDKSVCLFTDFDSQTNVSQSKDSDVYITDKCVLDMRSMDFKSNSAVAWSNKSDFACANAFNNSIIPEDTFFPSPESSCDVKLVEKSFETDTNLNFQILYEILLGKATLYAVLVSALVLMAMVKRKDSRG

SEQ ID NO: 14011 - protein, 901 aa, synthetic construct
MALPVTALLLPLALLLHAARPEVQLVESGGGLVQPGGSLRLSCAASGFSFSDFWMSWVRQAPGKGLEWVATISQAGSEKDYVDSVKGRFTISRDNAKKSLYLQMNSLRAEDTAVYYCASGVYSFDYRGQGTLVTVSSGTGGGGSGGGGSGGGGSEFDVQMIQTPDSLAVSLGQRATISCRASESVDNYGISFMHWYQQKPGQSPKLLIYRASNLESGIPARFSGSGSRTDFTLTINPVETDDVATYYCQQNNKDPPTFGGGTKLEIKLEDLKNVFPPEVAVFEPSEAEISHTQKATLVCLATGFYPDHVELSWWVNGKEVHSGVCTDPQPLKEQPALNDSRYCLSSRLRVSATFWQNPRNHFRCQVQFYGLSENDEWTQDRAKPVTQIVSAEAWGRADCGFTSESYQQGVLSATNLSVIGFRILLLKVAGFNLLMTLRLWSSRAKRSGSGATNFSLLKQAGDVEENPGPTSMDWIWRILFLVGAATGAHSGPQLQLQESGPGLVKPSETLSLTCTVSGDSISSGDYYWGWIRQPPGKGLEWIGHIYYSGVTYYNPSLKSRVTISVDTSRNQFSLKLSSVTAADTAVYYCTREDSSNWRSRGQGTLVTVSSGSGGGGSGGGGSGGGGSFEGGGGSQVQLQQSGAELVKPGASVKISCKASGYAFSSYWMNWVKQRPGKGLEWIGQIYPGDGDTTYNGKFKGKATLTADKSSSTVYMQLNSLTSEDSAVYFCVRYYYGSSGYFDYWGQGTTLTVSSTRIQNPDPAVYQLRDSKSSDKSVCLFTDFDSQTNVSQSKDSDVYITDKCVLDMRSMDFKSNSAVAWSNKSDFACANAFNNSIIPEDTFFPSPESSCDVKLVEKSFETDTNLNFQILYEILLGKATLYAVLVSALVLMAMVKRKDSRG

SEQ ID NO: 14012 - protein, 892 aa, synthetic construct
MALPVTALLLPLALLLHAARPEVQLVESGGGLVQPGGSLRLSCAASGFSFSDFWMSWVRQAPGKGLEWVATISQAGSEKDYVDSVKGRFTISRDNAKKSLYLQMNSLRAEDTAVYYCASGVYSFDYRGQGTLVTVSSGTGGGGSGGGGSGGGGSEFDVQMIQTPSSLSASLGDRVTISCRASQDIGNYLNWYQQKPDGTVKLLIYYTSRLHSGVPSRFSGSGSGTEYSLTISNLEQEDIATYFCQQGSALPPTFGGGTKLEINLEDLKNVFPPEVAVFEPSEAEISHTQKATLVCLATGFYPDHVELSWWVNGKEVHSGVCTDPQPLKEQPALNDSRYCLSSRLRVSATFWQNPRNHFRCQVQFYGLSENDEWTQDRAKPVTQIVSAEAWGRADCGFTSESYQQGVLSATNLSVIGFRILLLKVAGFNLLMTLRLWSSRAKRSGSGATNFSLLKQAGDVEENPGPTSMDWIWRILFLVGAATGAHSGPQLQLQESGPGLVKPSETLSLTCTVSGDSISSGDYYWGWIRQPPGKGLEWIGHIYYSGVTYYNPSLKSRVTISVDTSRNQFSLKLSSVTAADTAVYYCTREDSSNWRSRGQGTLVTVSSGSGGGGSGGGGSGGGGSFEALQLQQSGAELVRPGASVTLSCKASGYTFTDYEMHWVKQTPVHGLEWIGAIDPETGGTAYNQKFEGKAILTADKSSSTAYMELRSLTSEDSPVYYCARRRYYGSSSFDYWGQGTTLTVSSTRIQNPDPAVYQLRDSKSSDKSVCLFTDFDSQTNVSQSKDSDVYITDKCVLDMRSMDFKSNSAVAWSNKSDFACANAFNNSIIPEDTFFPSPESSCDVKLVEKSFETDTNLNFQILYEILLGKATLYAVLVSALVLMAMVKRKDSRG

SEQ ID NO: 14013 - protein, 896 aa, synthetic construct
MALPVTALLLPLALLLHAARPEVQLVESGGGLVQPGGSLRLSCAASGFSFSDFWMSWVRQAPGKGLEWVATISQAGSEKDYVDSVKGRFTISRDNAKKSLYLQMNSLRAEDTAVYYCASGVYSFDYRGQGTLVTVSSGTGGGGSGGGGSGGGGSEFDIVLTQSPASLAVSLGQRATISCRASKSVSTSGYSYLHWYQQKPGQPPKLLIYLASNLESGVPARFSGSGSGTDFTLNIHPVEEEDAATYYCQHSRELPFTFGSGTKLEIKLEDLKNVFPPEVAVFEPSEAEISHTQKATLVCLATGFYPDHVELSWWVNGKEVHSGVCTDPQPLKEQPALNDSRYCLSSRLRVSATFWQNPRNHFRCQVQFYGLSENDEWTQDRAKPVTQIVSAEAWGRADCGFTSESYQQGVLSATNLSVIGFRILLLKVAGFNLLMTLRLWSSRAKRSGSGATNFSLLKQAGDVEENPGPTSMDWIWRILFLVGAATGAHSGPQLQLQESGPGLVKPSETLSLTCTVSGDSISSGDYYWGWIRQPPGKGLEWIGHIYYSGVTYYNPSLKSRVTISVDTSRNQFSLKLSSVTAADTAVYYCTREDSSNWRSRGQGTLVTVSSGSGGGGSGGGGSGGGGSFEQVQLVESGGGLVQPGGSLKLSCAASGFDFSRYWMSWVRQAPGKGLEWIGEINPTSSTINFTPSLKDKVFISRDNAKNTLYLQMSKVRSEDTALYYCARGNYYRYGDAMDYWGQGTSVTVSTRIQNPDPAVYQLRDSKSSDKSVCLFTDFDSQTNVSQSKDSDVYITDKCVLDMRSMDFKSNSAVAWSNKSDFACANAFNNSIIPEDTFFPSPESSCDVKLVEKSFETDTNLNFQILYEILLGKATLYAVLVSALVLMAMVKRKDSRG

SEQ ID NO: 14014 - protein, 894 aa, synthetic construct
MALPVTALLLPLALLLHAARPEVQLVESGGGLVQPGGSLRLSCAASGFSFSDFWMSWVRQAPGKGLEWVATISQAGSEKDYVDSVKGRFTISRDNAKKSLYLQMNSLRAEDTAVYYCASGVYSFDYRGQGTLVTVSSGTGGGGSGGGGSGGGGSEFDIQMTQSPSSLSASVGDRVTITCSASQDISNYLNWYQQKPGKAPKLLIYYTSNLHSGVPSRFSGSGSGTDFTLTISSLQPEDFATYYCQQYRKLPWTFGQGTKLEIKRLEDLKNVFPPEVAVFEPSEAEISHTQKATLVCLATGFYPDHVELSWWVNGKEVHSGVCTDPQPLKEQPALNDSRYCLSSRLRVSATFWQNPRNHFRCQVQFYGLSENDEWTQDRAKPVTQIVSAEAWGRADCGFTSESYQQGVLSATNLSVIGFRILLLKVAGFNLLMTLRLWSSRAKRSGSGATNFSLLKQAGDVEENPGPTSMDWIWRILFLVGAATGAHSGPQLQLQESGPGLVKPSETLSLTCTVSGDSISSGDYYWGWIRQPPGKGLEWIGHIYYSGVTYYNPSLKSRVTISVDTSRNQFSLKLSSVTAADTAVYYCTREDSSNWRSRGQGTLVTVSSGSGGGGSGGGGSGGGGSFEQVQLVQSGAEVKKPGSSVKVSCKASGGTFSNYWMHWVRQAPGQGLEWMGATYRGHSDTYYNQKFKGRVTITADKSTSTAYMELSSLRSEDTAVYYCARGAIYDGYDVLDNWGQGTLVTVSSTRIQNPDPAVYQLRDSKSSDKSVCLFTDFDSQTNVSQSKDSDVYITDKCVLDMRSMDFKSNSAVAWSNKSDFACANAFNNSIIPEDTFFPSPESSCDVKLVEKSFETDTNLNFQILYEILLGKATLYAVLVSALVLMAMVKRKDSRG

SEQ ID NO: 14015 - protein, 894 aa, synthetic construct
MALPVTALLLPLALLLHAARPEVQLVESGGGLVQPGGSLRLSCAASGFSFSDFWMSWVRQAPGKGLEWVATISQAGSEKDYVDSVKGRFTISRDNAKKSLYLQMNSLRAEDTAVYYCASGVYSFDYRGQGTLVTVSSGTGGGGSGGGGSGGGGSEFDIVLTQSPATLSLSPGDRATISCRASESVTILGSHLIYWYQQKPGQPPRLLIQLASNVQTGVPARFSGSGSRTDFTLTISSVEPEDFAVYYCLQSRTIPRTFGQGTKLEIKRLEDLKNVFPPEVAVFEPSEAEISHTQKATLVCLATGFYPDHVELSWWVNGKEVHSGVCTDPQPLKEQPALNDSRYCLSSRLRVSATFWQNPRNHFRCQVQFYGLSENDEWTQDRAKPVTQIVSAEAWGRADCGFTSESYQQGVLSATNLSVIGFRILLLKVAGFNLLMTLRLWSSRAKRSGSGATNFSLLKQAGDVEENPGPTSMDWIWRILFLVGAATGAHSGPQLQLQESGPGLVKPSETLSLTCTVSGDSISSGDYYWGWIRQPPGKGLEWIGHIYYSGVTYYNPSLKSRVTISVDTSRNQFSLKLSSVTAADTAVYYCTREDSSNWRSRGQGTLVTVSSGSGGGGSGGGGSGGGGSFEQVQLVQSGPEVKKPGESVKISCKASGYTFRHYSMNWVKQAPGQGLKWMGRINTESGVPIYADDFKGRFSFTVDTSASTAYLEISSLTSEDTAVYFCSNDYLYSLDFWGQGTTLTVSSTRIQNPDPAVYQLRDSKSSDKSVCLFTDFDSQTNVSQSKDSDVYITDKCVLDMRSMDFKSNSAVAWSNKSDFACANAFNNSIIPEDTFFPSPESSCDVKLVEKSFETDTNLNFQILYEILLGKATLYAVLVSALVLMAMVKRKDSRG

SEQ ID NO: 14016 - protein, 895 aa, synthetic construct
MALPVTALLLPLALLLHAARPEVQLVESGGGLVQPGGSLRLSCAASGFSFSDFWMSWVRQAPGKGLEWVATISQAGSEKDYVDSVKGRFTISRDNAKKSLYLQMNSLRAEDTAVYYCASGVYSFDYRGQGTLVTVSSGTGGGGSGGGGSGGGGSEFQSVLTQPPSVSGAPGQRVTISCTGSSSNIGAGFDVHWYQQLPGTAPKLLIYGNSNRPSGVPDRFSGSKSGTSASLAITGLQAEDEADYYCQSYDSSLSGYVFGTGTKVTVLGLEDLKNVFPPEVAVFEPSEAEISHTQKATLVCLATGFYPDHVELSWWVNGKEVHSGVCTDPQPLKEQPALNDSRYCLSSRLRVSATFWQNPRNHFRCQVQFYGLSENDEWTQDRAKPVTQIVSAEAWGRADCGFTSESYQQGVLSATNLSVIGFRILLLKVAGFNLLMTLRLWSSRAKRSGSGATNFSLLKQAGDVEENPGPTSMDWIWRILFLVGAATGAHSGPQLQLQESGPGLVKPSETLSLTCTVSGDSISSGDYYWGWIRQPPGKGLEWIGHIYYSGVTYYNPSLKSRVTISVDTSRNQFSLKLSSVTAADTAVYYCTREDSSNWRSRGQGTLVTVSSGSGGGGSGGGGSGGGGSFEQVQLVQSGAEVKKPGASVKVSCKASGYTFTDYYMHWVRQAPGQRLEWMGWINPNSGGTNYAQKFQDRITVTRDTSSNTGYMELTRLRSDDTAVYYCARSPYSGVLDKWGQGTLVTVSSTRIQNPDPAVYQLRDSKSSDKSVCLFTDFDSQTNVSQSKDSDVYITDKCVLDMRSMDFKSNSAVAWSNKSDFACANAFNNSIIPEDTFFPSPESSCDVKLVEKSFETDTNLNFQILYEILLGKATLYAVLVSALVLMAMVKRKDSRG

SEQ ID NO: 14017 - protein, 892 aa, synthetic construct
MALPVTALLLPLALLLHAARPEVQLVESGGGLVQPGGSLRLSCAASGFSFSDFWMSWVRQAPGKGLEWVATISQAGSEKDYVDSVKGRFTISRDNAKKSLYLQMNSLRAEDTAVYYCASGVYSFDYRGQGTLVTVSSGTGGGGSGGGGSGGGGSEFQAVLTQPPSASGTPGQRVTISCSGSSSNIGSYTVSWYQQLPGTAPKFLIYSNNQRPSGVPDRFSGSKSGTSASLAISGLQSEDEADYYCAAWDDSLNGYVFGTGTKVTVLGLEDLKNVFPPEVAVFEPSEAEISHTQKATLVCLATGFYPDHVELSWWVNGKEVHSGVCTDPQPLKEQPALNDSRYCLSSRLRVSATFWQNPRNHFRCQVQFYGLSENDEWTQDRAKPVTQIVSAEAWGRADCGFTSESYQQGVLSATNLSVIGFRILLLKVAGFNLLMTLRLWSSRAKRSGSGATNFSLLKQAGDVEENPGPTSMDWIWRILFLVGAATGAHSGPQLQLQESGPGLVKPSETLSLTCTVSGDSISSGDYYWGWIRQPPGKGLEWIGHIYYSGVTYYNPSLKSRVTISVDTSRNQFSLKLSSVTAADTAVYYCTREDSSNWRSRGQGTLVTVSSGSGGGGSGGGGSGGGGSFEVQLVQSGAEVKKPGESLKISCKGSGYDFTTYWIGWVRQMPGKGLEWMGIIYPGDSDTRYSPSVRGRVTISADKSINTAYLQWSSLEASDTAMYYCARMWTFSQDGWGQGTLVTVSSTRIQNPDPAVYQLRDSKSSDKSVCLFTDFDSQTNVSQSKDSDVYITDKCVLDMRSMDFKSNSAVAWSNKSDFACANAFNNSIIPEDTFFPSPESSCDVKLVEKSFETDTNLNFQILYEILLGKATLYAVLVSALVLMAMVKRKDSRG

SEQ ID NO: 14018 - protein, 895 aa, synthetic construct
MALPVTALLLPLALLLHAARPEVQLVESGGGLVQPGGSLRLSCAASGFSFSDFWMSWVRQAPGKGLEWVATISQAGSEKDYVDSVKGRFTISRDNAKKSLYLQMNSLRAEDTAVYYCASGVYSFDYRGQGTLVTVSSGTGGGGSGGGGSGGGGSEFDIVMTQSPDSLAVSLGERATINCKSSQSILYSSNQKNYLAWYQQKPGQSPKLLIYWASTRESGVPDRFSGSGSGTDFTLTISSLQAEDVAVYYCHQYISSYTFGQGTKLEIKLEDLKNVFPPEVAVFEPSEAEISHTQKATLVCLATGFYPDHVELSWWVNGKEVHSGVCTDPQPLKEQPALNDSRYCLSSRLRVSATFWQNPRNHFRCQVQFYGLSENDEWTQDRAKPVTQIVSAEAWGRADCGFTSESYQQGVLSATNLSVIGFRILLLKVAGFNLLMTLRLWSSRAKRSGSGATNFSLLKQAGDVEENPGPTSMDWIWRILFLVGAATGAHSGPQLQLQESGPGLVKPSETLSLTCTVSGDSISSGDYYWGWIRQPPGKGLEWIGHIYYSGVTYYNPSLKSRVTISVDTSRNQFSLKLSSVTAADTAVYYCTREDSSNWRSRGQGTLVTVSSGSGGGGSGGGGSGGGGSFEQVQLVQSGAEVKKPGASVKVSCKASGYTFASQWMHWMRQAPGQGLEWIGWINPGNVNTKYNEKFKGRATLTVDTSTNTAYMELSSLRSEDTAVYYCARSTWYRPLDYWGQGTLVTVSSTRIQNPDPAVYQLRDSKSSDKSVCLFTDFDSQTNVSQSKDSDVYITDKCVLDMRSMDFKSNSAVAWSNKSDFACANAFNNSIIPEDTFFPSPESSCDVKLVEKSFETDTNLNFQILYEILLGKATLYAVLVSALVLMAMVKRKDSRG

SEQ ID NO: 14019 - protein, 895 aa, synthetic construct
MALPVTALLLPLALLLHAARPEVQLVESGGGLVQPGGSLRLSCAASGFSFSDFWMSWVRQAPGKGLEWVATISQAGSEKDYVDSVKGRFTISRDNAKKSLYLQMNSLRAEDTAVYYCASGVYSFDYRGQGTLVTVSSGTGGGGSGGGGSGGGGSEFDHIVLTQSPSSLSASLGDRVTISCRASQDISTYLNWYQQKPDGTVKLLIFYTSRLHAGVPSRFSGSGSGTHHSLTISNLEQEDIATYFCQQGNSLPFTFGSGTKLEIKRLEDLKNVFPPEVAVFEPSEAEISHTQKATLVCLATGFYPDHVELSWWVNGKEVHSGVCTDPQPLKEQPALNDSRYCLSSRLRVSATFWQNPRNHFRCQVQFYGLSENDEWTQDRAKPVTQIVSAEAWGRADCGFTSESYQQGVLSATNLSVIGFRILLLKVAGFNLLMTLRLWSSRAKRSGSGATNFSLLKQAGDVEENPGPTSMDWIWRILFLVGAATGAHSGPQLQLQESGPGLVKPSETLSLTCTVSGDSISSGDYYWGWIRQPPGKGLEWIGHIYYSGVTYYNPSLKSRVTISVDTSRNQFSLKLSSVTAADTAVYYCTREDSSNWRSRGQGTLVTVSSGSGGGGSGGGGSGGGGSFEQVQLKESGPELEKPGASVKISCKASGYSFTAYSMNWVKQNNGMSLEWIGSIDPYYGDTKYAQKFKGKATLTVDKASSTAYLQLKSLTSEDSAVYYCARRMITTGDWYFDVWGAGTTVTVSSTRIQNPDPAVYQLRDSKSSDKSVCLFTDFDSQTNVSQSKDSDVYITDKCVLDMRSMDFKSNSAVAWSNKSDFACANAFNNSIIPEDTFFPSPESSCDVKLVEKSFETDTNLNFQILYEILLGKATLYAVLVSALVLMAMVKRKDSRG

SEQ ID NO: 14020 - protein, 895 aa, synthetic construct; identical to SEQ ID NO: 14019

SEQ ID NO: 14021 - protein, 895 aa, synthetic construct
MALPVTALLLPLALLLHAARPEVQLVESGGGLVQPGGSLRLSCAASGFSFSDFWMSWVRQAPGKGLEWVATISQAGSEKDYVDSVKGRFTISRDNAKKSLYLQMNSLRAEDTAVYYCASGVYSFDYRGQGTLVTVSSGTGGGGSGGGGSGGGGSEFDEIVLTQSPATLSLSPGERATLSCRASQSVSSYLAWYQQKPGQAPRLLIYDASNRATGIPARFSGSGSGTDFTLTISSLEPEDFAVYYCQQRSNWPITFGQGTRLEIKLEDLKNVFPPEVAVFEPSEAEISHTQKATLVCLATGFYPDHVELSWWVNGKEVHSGVCTDPQPLKEQPALNDSRYCLSSRLRVSATFWQNPRNHFRCQVQFYGLSENDEWTQDRAKPVTQIVSAEAWGRADCGFTSESYQQGVLSATNLSVIGFRILLLKVAGFNLLMTLRLWSSRAKRSGSGATNFSLLKQAGDVEENPGPTSMDWIWRILFLVGAATGAHSGPQLQLQESGPGLVKPSETLSLTCTVSGDSISSGDYYWGWIRQPPGKGLEWIGHIYYSGVTYYNPSLKSRVTISVDTSRNQFSLKLSSVTAADTAVYYCTREDSSNWRSRGQGTLVTVSSGSGGGGSGGGGSGGGGSFEEVQLVESGGGLVQPGRSLRLSCAASGFTFNDYAMHWVRQAPGKGLEWVSTISWNSGSIGYADSVKGRFTISRDNAKKSLYLQMNSLRAEDTALYYCAKDIQYGNYYYGMDVWGQGTTVTVSSTRIQNPDPAVYQLRDSKSSDKSVCLFTDFDSQTNVSQSKDSDVYITDKCVLDMRSMDFKSNSAVAWSNKSDFACANAFNNSIIPEDTFFPSPESSCDVKLVEKSFETDTNLNFQILYEILLGKATLYAVLVSALVLMAMVKRKDSRG

SEQ ID NO: 14022 - protein, 897 aa, synthetic construct
MALPVTALLLPLALLLHAARPEVQLVESGGGLVQPGGSLRLSCAASGFSFSDFWMSWVRQAPGKGLEWVATISQAGSEKDYVDSVKGRFTISRDNAKKSLYLQMNSLRAEDTAVYYCASGVYSFDYRGQGTLVTVSSGTGGGGSGGGGSGGGGSEFDIVMTQTPLSLPVTPGEPASISCRSSKSLLHSNGITYLYWYLQKPGQSPQLLIYQMSNLVSGVPDRFSGSGSGTDFTLKISRVEAEDVGVYYCAQNLELPYTFGGGTKVEIKRLEDLKNVFPPEVAVFEPSEAEISHTQKATLVCLATGFYPDHVELSWWVNGKEVHSGVCTDPQPLKEQPALNDSRYCLSSRLRVSATFWQNPRNHFRCQVQFYGLSENDEWTQDRAKPVTQIVSAEAWGRADCGFTSESYQQGVLSATNLSVIGFRILLLKVAGFNLLMTLRLWSSRAKRSGSGATNFSLLKQAGDVEENPGPTSMDWIWRILFLVGAATGAHSGPQLQLQESGPGLVKPSETLSLTCTVSGDSISSGDYYWGWIRQPPGKGLEWIGHIYYSGVTYYNPSLKSRVTISVDTSRNQFSLKLSSVTAADTAVYYCTREDSSNWRSRGQGTLVTVSSGSGGGGSGGGGSGGGGSFEQVQLVQSGAEVKKPGSSVKVSCKASGYAFSYSWINWVRQAPGQGLEWMGRIFPGDGDTDYNGKFKGRVTITADKSTSTAYMELSSLRSEDTAVYYCARNVFDGYWLVYWGQGTLVTVSSTRIQNPDPAVYQLRDSKSSDKSVCLFTDFDSQTNVSQSKDSDVYITDKCVLDMRSMDFKSNSAVAWSNKSDFACANAFNNSIIPEDTFFPSPESSCDVKLVEKSFETDTNLNFQILYEILLGKATLYAVLVSALVLMAMVKRKDSRG

SEQ ID NO: 14023 - protein, 898 aa, synthetic construct
MALPVTALLLPLALLLHAARPEVQLVESGGGLVQPGGSLRLSCAASGFSFSDFWMSWVRQAPGKGLEWVATISQAGSEKDYVDSVKGRFTISRDNAKKSLYLQMNSLRAEDTAVYYCASGVYSFDYRGQGTLVTVSSGTGGGGSGGGGSGGGGSEFDIQMTQSPSSLSASVGDRVTITCRSSQSIVHSVGNTFLEWYQQKPGKAPKLLIYKVSNRFSGVPSRFSGSGSGTDFTLTISSLQPEDFATYYCFQGSQFPYTFGQGTKVEIKRLEDLKNVFPPEVAVFEPSEAEISHTQKATLVCLATGFYPDHVELSWWVNGKEVHSGVCTDPQPLKEQPALNDSRYCLSSRLRVSATFWQNPRNHFRCQVQFYGLSENDEWTQDRAKPVTQIVSAEAWGRADCGFTSESYQQGVLSATNLSVIGFRILLLKVAGFNLLMTLRLWSSRAKRSGSGATNFSLLKQAGDVEENPGPTSMDWIWRILFLVGAATGAHSGPQLQLQESGPGLVKPSETLSLTCTVSGDSISSGDYYWGWIRQPPGKGLEWIGHIYYSGVTYYNPSLKSRVTISVDTSRNQFSLKLSSVTAADTAVYYCTREDSSNWRSRGQGTLVTVSSGSGGGGSGGGGSGGGGSFEEVQLVESGGGLVQPGGSLRLSCAASGYEFSRSWMNWVRQAPGKGLEWVGRIYPGDGDTNYSGKFKGRFTISADTSKNTAYLQMNSLRAEDTAVYYCARDGSSWDWYFDVWGQGTLVTVSSTRIQNPDPAVYQLRDSKSSDKSVCLFTDFDSQTNVSQSKDSDVYITDKCVLDMRSMDFKSNSAVAWSNKSDFACANAFNNSIIPEDTFFPSPESSCDVKLVEKSFETDTNLNFQILYEILLGKATLYAVLVSALVLMAMVKRKDSRG

SEQ ID NO: 14024 - protein, 896 aa, synthetic construct
MALPVTALLLPLALLLHAARPEVQLVESGGGLVQPGGSLRLSCAASGFSFSDFWMSWVRQAPGKGLEWVATISQAGSEKDYVDSVKGRFTISRDNAKKSLYLQMNSLRAEDTAVYYCASGVYSFDYRGQGTLVTVSSGTGGGGSGGGGSGGGGSEFDIQMTQSPSSLSASVGDRVTITCRASQTIWSYLNWYQQRPGKAPNLLIYAASSLQSGVPSRFSGRGSGTDFTLTISSLQAEDFATYYCQQSYSIPQIFGQGTKLEIKLEDLKNVFPPEVAVFEPSEAEISHTQKATLVCLATGFYPDHVELSWWVNGKEVHSGVCTDPQPLKEQPALNDSRYCLSSRLRVSATFWQNPRNHFRCQVQFYGLSENDEWTQDRAKPVTQIVSAEAWGRADCGFTSESYQQGVLSATNLSVIGFRILLLKVAGFNLLMTLRLWSSRAKRSGSGATNFSLLKQAGDVEENPGPTSMDWIWRILFLVGAATGAHSGPQLQLQESGPGLVKPSETLSLTCTVSGDSISSGDYYWGWIRQPPGKGLEWIGHIYYSGVTYYNPSLKSRVTISVDTSRNQFSLKLSSVTAADTAVYYCTREDSSNWRSRGQGTLVTVSSGSGGGGSGGGGSGGGGSFEQVQLQQSGPGLVKPSQTLSLTCAISGDSVSSNSAAWNWIRQSPSRGLEWLGRTYYRSKWYNDYAVSVKSRITINPDTSKNQFSLQLNSVTPEDTAVYYCAREVTGDLEDAFDIWGQGTMVTVSSTRIQNPDPAVYQLRDSKSSDKSVCLFTDFDSQTNVSQSKDSDVYITDKCVLDMRSMDFKSNSAVAWSNKSDFACANAFNNSIIPEDTFFPSPESSCDVKLVEKSFETDTNLNFQILYEILLGKATLYAVLVSALVLMAMVKRKDSRG

SEQ ID NO: 14025 - protein, 889 aa, synthetic construct
MALPVTALLLPLALLLHAARPEVQLVESGGGLVQPGGSLRLSCAASGFSFSDFWMSWVRQAPGKGLEWVATISQAGSEKDYVDSVKGRFTISRDNAKKSLYLQMNSLRAEDTAVYYCASGVYSFDYRGQGTLVTVSSGTGGGGSGGGGSGGGGSEFDIQMTQSPATIENTSLSASVGDRVTITCRASQGISSWLTWYQQKPEKAPKSLIYAASSLQSGVPSRFSGSGSGTDFTLTISSLQPEDFATYYCQQYDSYPITFGQGTRLEIKLEDLKNVFPPEVAVFEPSEAEISHTQKATLVCLATGFYPDHVELSWWVNGKEVHSGVCTDPQPLKEQPALNDSRYCLSSRLRVSATFWQNPRNHFRCQVQFYGLSENDEWTQDRAKPVTQIVSAEAWGRADCGFTSESYQQGVLSATNLSVIGFRILLLKVAGFNLLMTLRLWSSRAKRSGSGATNFSLLKQAGDVEENPGPTSMDWIWRILFLVGAATGAHSGPQLQLQESGPGLVKPSETLSLTCTVSGDSISSGDYYWGWIRQPPGKGLEWIGHIYYSGVTYYNPSLKSRVTISVDTSRNQFSLKLSSVTAADTAVYYCTREDSSNWRSRGQGTLVTVSSGSGGGGSGGGGSGGGGSFEQVQLQQWGAGLLKPSETLSLTCAVYGGSFSAYYWSWIRQPPGKGLEWIGDINHGGGTNYNPSLKSRVTISVDTSKNQFSLKLNSVTAADTAVYYCASLTAYWGQGSLVTVSSTRIQNPDPAVYQLRDSKSSDKSVCLFTDFDSQTNVSQSKDSDVYITDKCVLDMRSMDFKSNSAVAWSNKSDFACANAFNNSIIPEDTFFPSPESSCDVKLVEKSFETDTNLNFQILYEILLGKATLYAVLVSALVLMAMVKRKDSRG

SEQ ID NO: 14026 - protein, 894 aa, synthetic construct
MALPVTALLLPLALLLHAARPEVQLVESGGGLVQPGGSLRLSCAASGFSFSDFWMSWVRQAPGKGLEWVATISQAGSEKDYVDSVKGRFTISRDNAKKSLYLQMNSLRAEDTAVYYCASGVYSFDYRGQGTLVTVSSGTGGGGSGGGGSGGGGSEFDEIVLTQSPDSLAVSLGERATINCKASQSVDFDGDSYLNWYQQKPGQPPKVLIYAASTLQSGVPSRFSGSGSGTDFTLTINSLEAEDAATYYCQQSNEDPWTFGGGTKVEIKLEDLKNVFPPEVAVFEPSEAEISHTQKATLVCLATGFYPDHVELSWWVNGKEVHSGVCTDPQPLKEQPALNDSRYCLSSRLRVSATFWQNPRNHFRCQVQFYGLSENDEWTQDRAKPVTQIVSAEAWGRADCGFTSESYQQGVLSATNLSVIGFRILLLKVAGFNLLMTLRLWSSRAKRSGSGATNFSLLKQAGDVEENPGPTSMDWIWRILFLVGAATGAHSGPQLQLQESGPGLVKPSETLSLTCTVSGDSISSGDYYWGWIRQPPGKGLEWIGHIYYSGVTYYNPSLKSRVTISVDTSRNQFSLKLSSVTAADTAVYYCTREDSSNWRSRGQGTLVTVSSGSGGGGSGGGGSGGGGSFEQVQLVQSGAEVKKPGASVKVSCKVSGYTFTDYYITWVRQAPGQALEWMGWIYPGSGNTKYSQKFQGRFVFSVDTSASTAYLQLSSLKAEDTAVYYCANYGNYWFAYWGQGTLVTVSSTRIQNPDPAVYQLRDSKSSDKSVCLFTDFDSQTNVSQSKDSDVYITDKCVLDMRSMDFKSNSAVAWSNKSDFACANAFNNSIIPEDTFFPSPESSCDVKLVEKSFETDTNLNFQILYEILLGKATLYAVLVSALVLMAMVKRKDSRG

SEQ ID NO: 14027 - protein, 891 aa, synthetic construct
MALPVTALLLPLALLLHAARPEVQLVESGGGLVQPGGSLRLSCAASGFSFSDFWMSWVRQAPGKGLEWVATISQAGSEKDYVDSVKGRFTISRDNAKKSLYLQMNSLRAEDTAVYYCASGVYSFDYRGQGTLVTVSSGTGGGGSGGGGSGGGGSEFDIQMTQSPSSLSASVGDRVTITCRASQGISSWLAWYQQKPEKAPKSLIYAASSLQSGVPSRFSGSGSGTDFTLTISSLQPEDFATYYCQQYNSYPPTFGGGTKVEIKLEDLKNVFPPEVAVFEPSEAEISHTQKATLVCLATGFYPDHVELSWWVNGKEVHSGVCTDPQPLKEQPALNDSRYCLSSRLRVSATFWQNPRNHFRCQVQFYGLSENDEWTQDRAKPVTQIVSAEAWGRADCGFTSESYQQGVLSATNLSVIGFRILLLKVAGFNLLMTLRLWSSRAKRSGSGATNFSLLKQAGDVEENPGPTSMDWIWRILFLVGAATGAHSGPQLQLQESGPGLVKPSETLSLTCTVSGDSISSGDYYWGWIRQPPGKGLEWIGHIYYSGVTYYNPSLKSRVTISVDTSRNQFSLKLSSVTAADTAVYYCTREDSSNWRSRGQGTLVTVSSGSGGGGSGGGGSGGGGSFEEVQLVQSGGGLVHPGGSLRLSCAGSGFAFSSSTMHWIRQAPGKGLEWISLIGSGGGIYYGDSVKGRFTISRDNAKNSLYLQMNSLRAEDMAVYYCVRGYFDWVDYFDYWGQGTLVTVSSTRIQNPDPAVYQLRDSKSSDKSVCLFTDFDSQTNVSQSKDSDVYITDKCVLDMRSMDFKSNSAVAWSNKSDFACANAFNNSIIPEDTFFPSPESSCDVKLVEKSFETDTNLNFQILYEILLGKATLYAVLVSALVLMAMVKRKDSRG

SEQ ID NO: 14028 - protein, 901 aa, synthetic construct
MALPVTALLLPLALLLHAARPEVQLVESGGGLVQPGGSLRLSCAASGFSFSDFWMSWVRQAPGKGLEWVATISQAGSEKDYVDSVKGRFTISRDNAKKSLYLQMNSLRAEDTAVYYCASGVYSFDYRGQGTLVTVSSGTGGGGSGGGGSGGGGSEFDDIVMTQSPDSLTVSLGERTTINCKSSQSVLDSSKNKNSLAWYQQKPGQPPKLLLSWASTRESGIPDRFSGSGSGTDFTLTIDSLQPEDSATYYCQQSAHFPITFGQGTRLEIKLEDLKNVFPPEVAVFEPSEAEISHTQKATLVCLATGFYPDHVELSWWVNGKEVHSGVCTDPQPLKEQPALNDSRYCLSSRLRVSATFWQNPRNHFRCQVQFYGLSENDEWTQDRAKPVTQIVSAEAWGRADCGFTSESYQQGVLSATNLSVIGFRILLLKVAGFNLLMTLRLWSSRAKRSGSGATNFSLLKQAGDVEENPGPTSMDWIWRILFLVGAATGAHSGPQLQLQESGPGLVKPSETLSLTCTVSGDSISSGDYYWGWIRQPPGKGLEWIGHIYYSGVTYYNPSLKSRVTISVDTSRNQFSLKLSSVTAADTAVYYCTREDSSNWRSRGQGTLVTVSSGSGGGGSGGGGSGGGGSFEQVQLVQSGAEVKKPGASVKVSCKASGYTFTNYGMNWVKQAPGQGLKWMGWINTYTGEPTYADDFKGRVTMTSDTSTSTAYLELHNLRSDDTAVYYCARWSWSDGYYVYFDYWGQGTTVTVSSTRIQNPDPAVYQLRDSKSSDKSVCLFTDFDSQTNVSQSKDSDVYITDKCVLDMRSMDFKSNSAVAWSNKSDFACANAFNNSIIPEDTFFPSPESSCDVKLVEKSFETDTNLNFQILYEILLGKATLYAVLVSALVLMAMVKRKDSRG

SEQ ID NO: 14029 - protein, 897 aa, synthetic construct
MALPVTALLLPLALLLHAARPEVQLVESGGGLVQPGGSLRLSCAASGFSFSDFWMSWVRQAPGKGLEWVATISQAGSEKDYVDSVKGRFTISRDNAKKSLYLQMNSLRAEDTAVYYCASGVYSFDYRGQGTLVTVSSGTGGGGSGGGGSGGGGSEFDEIVLTQSPGSLAVSPGERVTMSCKSSQSVFFSSSQKNYLAWYQQIPGQSPRLLIYWASTRESGVPDRFTGSGSGTDFTLTISSVQPEDLAIYYCHQYLSSRTFGQGTKLEIKRLEDLKNVFPPEVAVFEPSEAEISHTQKATLVCLATGFYPDHVELSWWVNGKEVHSGVCTDPQPLKEQPALNDSRYCLSSRLRVSATFWQNPRNHFRCQVQFYGLSENDEWTQDRAKPVTQIVSAEAWGRADCGFTSESYQQGVLSATNLSVIGFRILLLKVAGFNLLMTLRLWSSRAKRSGSGATNFSLLKQAGDVEENPGPTSMDWIWRILFLVGAATGAHSGPQLQLQESGPGLVKPSETLSLTCTVSGDSISSGDYYWGWIRQPPGKGLEWIGHIYYSGVTYYNPSLKSRVTISVDTSRNQFSLKLSSVTAADTAVYYCTREDSSNWRSRGQGTLVTVSSGSGGGGSGGGGSGGGGSFEQVQLQQPGAEVVKPGASVKMSCKASGYTFTSYYIHWIKQTPGQGLEWVGVIYPGNDDISYNQKFQGKATLTADKSSTTAYMQLSSLTSEDSAVYYCAREVRLRYFDVWGQGTTVTVSSTRIQNPDPAVYQLRDSKSSDKSVCLFTDFDSQTNVSQSKDSDVYITDKCVLDMRSMDFKSNSAVAWSNKSDFACANAFNNSIIPEDTFFPSPESSCDVKLVEKSFETDTNLNFQILYEILLGKATLYAVLVSALVLMAMVKRKDSRG

SEQ ID NO: 14030 - protein, 901 aa, synthetic construct
MALPVTALLLPLALLLHAARPEVQLVESGGGLVQPGGSLRLSCAASGFSFSDFWMSWVRQAPGKGLEWVATISQAGSEKDYVDSVKGRFTISRDNAKKSLYLQMNSLRAEDTAVYYCASGVYSFDYRGQGTLVTVSSGTGGGGSGGGGSGGGGSEFDVLLTQSPLSLPVTLGQPASISCRSSQTIVHSNGNTYLEWFQQRPGQSPRLLIYQVSNRFSGVPDRFSGSGSGTDFTLKISRVEAEDVGVYYCFQGSHVPRTFGGGTKVEIKRALEDLKNVFPPEVAVFEPSEAEISHTQKATLVCLATGFYPDHVELSWWVNGKEVHSGVCTDPQPLKEQPALNDSRYCLSSRLRVSATFWQNPRNHFRCQVQFYGLSENDEWTQDRAKPVTQIVSAEAWGRADCGFTSESYQQGVLSATNLSVIGFRILLLKVAGFNLLMTLRLWSSRAKRSGSGATNFSLLKQAGDVEENPGPTSMDWIWRILFLVGAATGAHSGPQLQLQESGPGLVKPSETLSLTCTVSGDSISSGDYYWGWIRQPPGKGLEWIGHIYYSGVTYYNPSLKSRVTISVDTSRNQFSLKLSSVTAADTAVYYCTREDSSNWRSRGQGTLVTVSSGSGGGGSGGGGSGGGGSFEQIQLVQSGSELKKPGASVKVSCKASGYTFTNYGMNWVRQAPGQGLKWMGWINTNTGEPKYAEEFKGRFALSLDTSVSTAYLQINSLKAEDTAVYFCARGYGNYARGAWLAYWGQGTLVTVSSTRIQNPDPAVYQLRDSKSSDKSVCLFTDFDSQTNVSQSKDSDVYITDKCVLDMRSMDFKSNSAVAWSNKSDFACANAFNNSIIPEDTFFPSPESSCDVKLVEKSFETDTNLNFQILYEILLGKATLYAVLVSALVLMAMVKRKDSRG

SEQ ID NO: 14031 - protein, 886 aa, synthetic construct
MALPVTALLLPLALLLHAARPEVQLVESGGGLVQPGGSLRLSCAASGFSFSDFWMSWVRQAPGKGLEWVATISQAGSEKDYVDSVKGRFTISRDNAKKSLYLQMNSLRAEDTAVYYCASGVYSFDYRGQGTLVTVSSGTGGGGSGGGGSGGGGSEFDEIVLTQSPATLSLSPGERATLSCSASSSINYIYWLQQKPGQAPRILIYLTSNLASGVPARFSGSGSGTDFTLTISSLEPEDFAVYYCLQWSSNPLTFGGGTKVEIKLEDLKNVFPPEVAVFEPSEAEISHTQKATLVCLATGFYPDHVELSWWVNGKEVHSGVCTDPQPLKEQPALNDSRYCLSSRLRVSATFWQNPRNHFRCQVQFYGLSENDEWTQDRAKPVTQIVSAEAWGRADCGFTSESYQQGVLSATNLSVIGFRILLLKVAGFNLLMTLRLWSSRAKRSGSGATNFSLLKQAGDVEENPGPTSMDWIWRILFLVGAATGAHSGPQLQLQESGPGLVKPSETLSLTCTVSGDSISSGDYYWGWIRQPPGKGLEWIGHIYYSGVTYYNPSLKSRVTISVDTSRNQFSLKLSSVTAADTAVYYCTREDSSNWRSRGQGTLVTVSSGSGGGGSGGGGSGGGGSFEEVQLVESGGGLVKPGGSLRLSCAASGFTFSSYDMSWVRQAPGKGLEWVSTISSGGSYTYYLDSIKGRFTISRDNAKNSLYLQMNSLRAEDTAVYYCARQGLDYWGRGTLVTVSSTRIQNPDPAVYQLRDSKSSDKSVCLFTDFDSQTNVSQSKDSDVYITDKCVLDMRSMDFKSNSAVAWSNKSDFACANAFNNSIIPEDTFFPSPESSCDVKLVEKSFETDTNLNFQILYEILLGKATLYAVLVSALVLMAMVKRKDSRG

SEQ ID NO: 14032 - protein, 895 aa, synthetic construct
MALPVTALLLPLALLLHAARPEVQLVESGGGLVQPGGSLRLSCAASGFSFSDFWMSWVRQAPGKGLEWVATISQAGSEKDYVDSVKGRFTISRDNAKKSLYLQMNSLRAEDTAVYYCASGVYSFDYRGQGTLVTVSSGTGGGGSGGGGSGGGGSEFDIVMTQSPDSLAVSLGERATINCRASKSVSTSGYSFMHWYQQKPGQPPKLLIYLASNLESGVPDRFSGSGSGTDFTLTISSLQAEDVAVYYCQHSREVPWTFGQGTKVEIKRLEDLKNVFPPEVAVFEPSEAEISHTQKATLVCLATGFYPDHVELSWWVNGKEVHSGVCTDPQPLKEQPALNDSRYCLSSRLRVSATFWQNPRNHFRCQVQFYGLSENDEWTQDRAKPVTQIVSAEAWGRADCGFTSESYQQGVLSATNLSVIGFRILLLKVAGFNLLMTLRLWSSRAKRSGSGATNFSLLKQAGDVEENPGPTSMDWIWRILFLVGAATGAHSGPQLQLQESGPGLVKPSETLSLTCTVSGDSISSGDYYWGWIRQPPGKGLEWIGHIYYSGVTYYNPSLKSRVTISVDTSRNQFSLKLSSVTAADTAVYYCTREDSSNWRSRGQGTLVTVSSGSGGGGSGGGGSGGGGSFEQVQLVQSGAEVKKPGASVKVSCKASGYTFTNYGMNWVRQAPGQGLEWMGWINTYTGEPTYADAFKGRFAFSLDTSTSTAYLQINSLRSDDTAVYYCARDYGDYGMDYWGQGTTVTVSSTRIQNPDPAVYQLRDSKSSDKSVCLFTDFDSQTNVSQSKDSDVYITDKCVLDMRSMDFKSNSAVAWSNKSDFACANAFNNSIIPEDTFFPSPESSCDVKLVEKSFETDTNLNFQILYEILLGKATLYAVLVSALVLMAMVKRKDSRG

SEQ ID NO: 14033 - protein, 891 aa, synthetic construct
MALPVTALLLPLALLLHAARPEVQLVESGGGLVQPGGSLRLSCAASGFSFSDFWMSWVRQAPGKGLEWVATISQAGSEKDYVDSVKGRFTISRDNAKKSLYLQMNSLRAEDTAVYYCASGVYSFDYRGQGTLVTVSSGTGGGGSGGGGSGGGGSEFDIVMTQTPLTLSVTIGQPASISCKSSQSLLDSDGKTYLNWLLQRPGQSPERLIYLVSKLDSGVPDRFTGSGSGTDFTLKISRVEAEDLGVYCCWQGTHFPYTFGGGTKVEIKGLEDLKNVFPPEVAVFEPSEAEISHTQKATLVCLATGFYPDHVELSWWVNGKEVHSGVCTDPQPLKEQPALNDSRYCLSSRLRVSATFWQNPRNHFRCQVQFYGLSENDEWTQDRAKPVTQIVSAEAWGRADCGFTSESYQQGVLSATNLSVIGFRILLLKVAGFNLLMTLRLWSSRAKRSGSGATNFSLLKQAGDVEENPGPTSMDWIWRILFLVGAATGAHSGPQLQLQESGPGLVKPSETLSLTCTVSGDSISSGDYYWGWIRQPPGKGLEWIGHIYYSGVTYYNPSLKSRVTISVDTSRNQFSLKLSSVTAADTAVYYCTREDSSNWRSRGQGTLVTVSSGSGGGGSGGGGSGGGGSFEQVQLQQPGAELVRPGASVKLSCKASGYTFTSYWMNWVKQRPGQGLEWIGMIDPSDSETHYNHIFKDKATLTVDKSSSTAYLQLSSLTSEDSAVYYCARNLYLWGQGTSVTVSSTRIQNPDPAVYQLRDSKSSDKSVCLFTDFDSQTNVSQSKDSDVYITDKCVLDMRSMDFKSNSAVAWSNKSDFACANAFNNSIIPEDTFFPSPESSCDVKLVEKSFETDTNLNFQILYEILLGKATLYAVLVSALVLMAMVKRKDSRG

SEQ ID NO: 14034 - protein, 899 aa, synthetic construct
MALPVTALLLPLALLLHAARPEVQLVESGGGLVQPGGSLRLSCAASGFSFSDFWMSWVRQAPGKGLEWVATISQAGSEKDYVDSVKGRFTISRDNAKKSLYLQMNSLRAEDTAVYYCASGVYSFDYRGQGTLVTVSSGTGGGGSGGGGSGGGGSEFDIVMTQSPDSLAVSLGERATINCESSQSLLNSGNQKNYLTWYQQKPGQPPKPLIYWASTRESGVPDRFSGSGSGTDFTLTISSLQAEDVAVYYCQNDYSYPYTFGQGTKLEIKRLEDLKNVFPPEVAVFEPSEAEISHTQKATLVCLATGFYPDHVELSWWVNGKEVHSGVCTDPQPLKEQPALNDSRYCLSSRLRVSATFWQNPRNHFRCQVQFYGLSENDEWTQDRAKPVTQIVSAEAWGRADCGFTSESYQQGVLSATNLSVIGFRILLLKVAGFNLLMTLRLWSSRAKRSGSGATNFSLLKQAGDVEENPGPTSMDWIWRILFLVGAATGAHSGPQLQLQESGPGLVKPSETLSLTCTVSGDSISSGDYYWGWIRQPPGKGLEWIGHIYYSGVTYYNPSLKSRVTISVDTSRNQFSLKLSSVTAADTAVYYCTREDSSNWRSRGQGTLVTVSSGSGGGGSGGGGSGGGGSFEEVQLVQSGAEVKKPGESLKISCKGSGYSFTDYYMKWARQMPGKGLEWMGDIIPSNGATFYNQKFKGQVTISADKSISTTYLQWSSLKASDTAMYYCARSHLLRASWFAYWGQGTMVTVSSTRIQNPDPAVYQLRDSKSSDKSVCLFTDFDSQTNVSQSKDSDVYITDKCVLDMRSMDFKSNSAVAWSNKSDFACANAFNNSIIPEDTFFPSPESSCDVKLVEKSFETDTNLNFQILYEILLGKATLYAVLVSALVLMAMVKRKDSRG

SEQ ID NO: 14035 - protein, 894 aa, synthetic construct
MALPVTALLLPLALLLHAARPEVQLVESGGGLVQPGGSLRLSCAASGFSFSDFWMSWVRQAPGKGLEWVATISQAGSEKDYVDSVKGRFTISRDNAKKSLYLQMNSLRAEDTAVYYCASGVYSFDYRGQGTLVTVSSGTGGGGSGGGGSGGGGSEFDIQMTQSTSSLSASLGDRVTISCSASQGINNYLNWYQQKPDGTVELLIYYTSTLQSGVPSRFSGSGSGTDYSLTISNLEPEDIGTYYCQQYSKLPRTFGGGTKLEIKLEDLKNVFPPEVAVFEPSEAEISHTQKATLVCLATGFYPDHVELSWWVNGKEVHSGVCTDPQPLKEQPALNDSRYCLSSRLRVSATFWQNPRNHFRCQVQFYGLSENDEWTQDRAKPVTQIVSAEAWGRADCGFTSESYQQGVLSATNLSVIGFRILLLKVAGFNLLMTLRLWSSRAKRSGSGATNFSLLKQAGDVEENPGPTSMDWIWRILFLVGAATGAHSGPQLQLQESGPGLVKPSETLSLTCTVSGDSISSGDYYWGWIRQPPGKGLEWIGHIYYSGVTYYNPSLKSRVTISVDTSRNQFSLKLSSVTAADTAVYYCTREDSSNWRSRGQGTLVTVSSGSGGGGSGGGGSGGGGSFEQVQLQQSGSELMMPGASVKISCKATGYTFSNYWIEWVKQRPGHGLEWIGEILPGTGRTIYNEKFKGKATFTADISSNTVQMQLSSLTSEDSAVYYCARRDYYGNFYYAMDYWGQGTSVTVSSTRIQNPDPAVYQLRDSKSSDKSVCLFTDFDSQTNVSQSKDSDVYITDKCVLDMRSMDFKSNSAVAWSNKSDFACANAFNNSIIPEDTFFPSPESSCDVKLVEKSFETDTNLNFQILYEILLGKATLYAVLVSALVLMAMVKRKDSRG

SEQ ID NO: 14036 - protein, 889 aa, synthetic construct
MALPVTALLLPLALLLHAARPEVQLVESGGGLVQPGGSLRLSCAASGFSFSDFWMSWVRQAPGKGLEWVATISQAGSEKDYVDSVKGRFTISRDNAKKSLYLQMNSLRAEDTAVYYCASGVYSFDYRGQGTLVTVSSGTGGGGSGGGGSGGGGSEFDIQMTQSPASLSVSVGETVTITCRASENIYSNLAWYQQKQGKSPQLLVYAATNLADGVPSRFSGSGSGTQYSLKINSLQSEDFGSYYCQHFWGTWTFGGGTTLEIKLEDLKNVFPPEVAVFEPSEAEISHTQKATLVCLATGFYPDHVELSWWVNGKEVHSGVCTDPQPLKEQPALNDSRYCLSSRLRVSATFWQNPRNHFRCQVQFYGLSENDEWTQDRAKPVTQIVSAEAWGRADCGFTSESYQQGVLSATNLSVIGFRILLLKVAGFNLLMTLRLWSSRAKRSGSGATNFSLLKQAGDVEENPGPTSMDWIWRILFLVGAATGAHSGPQLQLQESGPGLVKPSETLSLTCTVSGDSISSGDYYWGWIRQPPGKGLEWIGHIYYSGVTYYNPSLKSRVTISVDTSRNQFSLKLSSVTAADTAVYYCTREDSSNWRSRGQGTLVTVSSGSGGGGSGGGGSGGGGSFEEVQLQQSGPELVKPGASVKMSCKASGYTFTDYYMKWMKQSHGKSLEWIGDINPNNGGTTYNQKFKGKATLTVDKSSSTAYMQLNSLTSEDSAVYYCARDYGYGYFDYWGQGTTLTVSSTRIQNPDPAVYQLRDSKSSDKSVCLFTDFDSQTNVSQSKDSDVYITDKCVLDMRSMDFKSNSAVAWSNKSDFACANAFNNSIIPEDTFFPSPESSCDVKLVEKSFETDTNLNFQILYEILLGKATLYAVLVSALVLMAMVKRKDSRG

SEQ ID NO: 14037 - protein, 892 aa, synthetic construct
MALPVTALLLPLALLLHAARPEVQLVESGGGLVQPGGSLRLSCAASGFSFSDFWMSWVRQAPGKGLEWVATISQAGSEKDYVDSVKGRFTISRDNAKKSLYLQMNSLRAEDTAVYYCASGVYSFDYRGQGTLVTVSSGTGGGGSGGGGSGGGGSEFEIVLTQSPGTLSLSPGERATLSCRASQSVGGYLAWYQQKPGQAPRLLIYDASNRATGIPARFSGSGSGTDFTLTISSLEPEDFAVYYCQQRNNWPPMYTFGQGTKLEIKRLEDLKNVFPPEVAVFEPSEAEISHTQKATLVCLATGFYPDHVELSWWVNGKEVHSGVCTDPQPLKEQPALNDSRYCLSSRLRVSATFWQNPRNHFRCQVQFYGLSENDEWTQDRAKPVTQIVSAEAWGRADCGFTSESYQQGVLSATNLSVIGFRILLLKVAGFNLLMTLRLWSSRAKRSGSGATNFSLLKQAGDVEENPGPTSMDWIWRILFLVGAATGAHSGPQLQLQESGPGLVKPSETLSLTCTVSGDSISSGDYYWGWIRQPPGKGLEWIGHIYYSGVTYYNPSLKSRVTISVDTSRNQFSLKLSSVTAADTAVYYCTREDSSNWRSRGQGTLVTVSSGSGGGGSGGGGSGGGGSFEQVQLVQSGAEVKKPGSSVKVSCKASGGTFSSYAISWVRQAPGQGLEWMGGIIPILGTANYAQKFQGRVTITADESTSTAYMELSSLRSEDTAVYYCARWGGGAFDIWGQGTMVTVSSTRIQNPDPAVYQLRDSKSSDKSVCLFTDFDSQTNVSQSKDSDVYITDKCVLDMRSMDFKSNSAVAWSNKSDFACANAFNNSIIPEDTFFPSPESSCDVKLVEKSFETDTNLNFQILYEILLGKATLYAVLVSALVLMAMVKRKDSRG

SEQ ID NO: 14038 - protein, 887 aa, synthetic construct
MALPVTALLLPLALLLHAARPEVQLVESGGGLVQPGGSLRLSCAASGFSFSDFWMSWVRQAPGKGLEWVATISQAGSEKDYVDSVKGRFTISRDNAKKSLYLQMNSLRAEDTAVYYCASGVYSFDYRGQGTLVTVSSGTGGGGSGGGGSGGGGSEFQIVLTQSPALMSASPGEKVTMTCSASSSVRYMYWYQQKPRSSPKPWIHLTSNLASGVPARFSGSGSGTSYSLTISSMEAEDAATYYCQQWSSHPFTFGSGTKLEIKLEDLKNVFPPEVAVFEPSEAEISHTQKATLVCLATGFYPDHVELSWWVNGKEVHSGVCTDPQPLKEQPALNDSRYCLSSRLRVSATFWQNPRNHFRCQVQFYGLSENDEWTQDRAKPVTQIVSAEAWGRADCGFTSESYQQGVLSATNLSVIGFRILLLKVAGFNLLMTLRLWSSRAKRSGSGATNFSLLKQAGDVEENPGPTSMDWIWRILFLVGAATGAHSGPQLQLQESGPGLVKPSETLSLTCTVSGDSISSGDYYWGWIRQPPGKGLEWIGHIYYSGVTYYNPSLKSRVTISVDTSRNQFSLKLSSVTAADTAVYYCTREDSSNWRSRGQGTLVTVSSGSGGGGSGGGGSGGGGSFEDVQLQESGPGLVKPSQSLSLTCTVTGFSITSDYSWNWIRQFPGNKLEWMGYISYSGHTSYNPSLESRISITRDTSKNQFFLQLNSVTTEDTATYYCTRGNWDVVYWGQGTLVTVSATRIQNPDPAVYQLRDSKSSDKSVCLFTDFDSQTNVSQSKDSDVYITDKCVLDMRSMDFKSNSAVAWSNKSDFACANAFNNSIIPEDTFFPSPESSCDVKLVEKSFETDTNLNFQILYEILLGKATLYAVLVSALVLMAMVKRKDSRG

SEQ ID NO: 14039 - protein, 897 aa, synthetic construct
MALPVTALLLPLALLLHAARPEVQLVESGGGLVQPGGSLRLSCAASGFSFSDFWMSWVRQAPGKGLEWVATISQAGSEKDYVDSVKGRFTISRDNAKKSLYLQMNSLRAEDTAVYYCASGVYSFDYRGQGTLVTVSSGTGGGGSGGGGSGGGGSEFDVVMTQSPLSLPVTLGQPASISCRSSQSIVHSDGNTYLEWYQQRPGQSPRRLIYKVSNRFSGVPDRFSGSGSGTDFTLKISRVEAEDVGVYYCFQGSHAPWTFGGGTKVEIKLEDLKNVFPPEVAVFEPSEAEISHTQKATLVCLATGFYPDHVELSWWVNGKEVHSGVCTDPQPLKEQPALNDSRYCLSSRLRVSATFWQNPRNHFRCQVQFYGLSENDEWTQDRAKPVTQIVSAEAWGRADCGFTSESYQQGVLSATNLSVIGFRILLLKVAGFNLLMTLRLWSSRAKRSGSGATNFSLLKQAGDVEENPGPTSMDWIWRILFLVGAATGAHSGPQLQLQESGPGLVKPSETLSLTCTVSGDSISSGDYYWGWIRQPPGKGLEWIGHIYYSGVTYYNPSLKSRVTISVDTSRNQFSLKLSSVTAADTAVYYCTREDSSNWRSRGQGTLVTVSSGSGGGGSGGGGSGGGGSFEEVQLVESGGGLVQPGGSLRLSCAASGFTFSSYGMHWVRQAPGKGLEWVAYITTRSSTIYYADSVKGRFTISRDNAKNSLYLQMNSLRAEDTAVYYCTREPLTGYYAMDYWGQGTSVTVSSTRIQNPDPAVYQLRDSKSSDKSVCLFTDFDSQTNVSQSKDSDVYITDKCVLDMRSMDFKSNSAVAWSNKSDFACANAFNNSIIPEDTFFPSPESSCDVKLVEKSFETDTNLNFQILYEILLGKATLYAVLVSALVLMAMVKRKDSRG

SEQ ID NO: 14040 - protein, 889 aa, synthetic construct
MALPVTALLLPLALLLHAARPEVQLVESGGGLVQPGGSLRLSCAASGFSFSDFWMSWVRQAPGKGLEWVATISQAGSEKDYVDSVKGRFTISRDNAKKSLYLQMNSLRAEDTAVYYCASGVYSFDYRGQGTLVTVSSGTGGGGSGGGGSGGGGSEFDIQMTQSPSSLSASVGDRVTITCRASQSISLWLNWYQQKPGKAPKLLIYAASTLQSGVPSRFSGSGSGTDFTLTISSLQPEDFATYYCQQYYTSPYTFGQGTKVEIKRLEDLKNVFPPEVAVFEPSEAEISHTQKATLVCLATGFYPDHVELSWWVNGKEVHSGVCTDPQPLKEQPALNDSRYCLSSRLRVSATFWQNPRNHFRCQVQFYGLSENDEWTQDRAKPVTQIVSAEAWGRADCGFTSESYQQGVLSATNLSVIGFRILLLKVAGFNLLMTLRLWSSRAKRSGSGATNFSLLKQAGDVEENPGPTSMDWIWRILFLVGAATGAHSGPQLQLQESGPGLVKPSETLSLTCTVSGDSISSGDYYWGWIRQPPGKGLEWIGHIYYSGVTYYNPSLKSRVTISVDTSRNQFSLKLSSVTAADTAVYYCTREDSSNWRSRGQGTLVTVSSGSGGGGSGGGGSGGGGSFEQVQLLESGGGLVQPGGSLRLSCAASGFTFSSYAMSWVRQAPGKGLEWVSVIRSSGSSTYYADSVKGRFTISRDNSKNTLYLQMNSLRAEDTAVYYCARGGGYFDYWGQGTLVTVSSTRIQNPDPAVYQLRDSKSSDKSVCLFTDFDSQTNVSQSKDSDVYITDKCVLDMRSMDFKSNSAVAWSNKSDFACANAFNNSIIPEDTFFPSPESSCDVKLVEKSFETDTNLNFQILYEILLGKATLYAVLVSALVLMAMVKRKDSRG

SEQ ID NO: 14041 - protein, 892 aa, synthetic construct
MALPVTALLLPLALLLHAARPEVQLVESGGGLVQPGGSLRLSCAASGFSFSDFWMSWVRQAPGKGLEWVATISQAGSEKDYVDSVKGRFTISRDNAKKSLYLQMNSLRAEDTAVYYCASGVYSFDYRGQGTLVTVSSGTGGGGSGGGGSGGGGSEFDIQMTQSPSSLSASVGDRVTITCRASQSISSYLNWYQQKPGKAPKLLIYAVSTLQSGVPSRFSGSGSGTDFTLTISSLQPEDFATYYCQQSGTFPPTTFGQGTKVEIKRLEDLKNVFPPEVAVFEPSEAEISHTQKATLVCLATGFYPDHVELSWWVNGKEVHSGVCTDPQPLKEQPALNDSRYCLSSRLRVSATFWQNPRNHFRCQVQFYGLSENDEWTQDRAKPVTQIVSAEAWGRADCGFTSESYQQGVLSATNLSVIGFRILLLKVAGFNLLMTLRLWSSRAKRSGSGATNFSLLKQAGDVEENPGPTSMDWIWRILFLVGAATGAHSGPQLQLQESGPGLVKPSETLSLTCTVSGDSISSGDYYWGWIRQPPGKGLEWIGHIYYSGVTYYNPSLKSRVTISVDTSRNQFSLKLSSVTAADTAVYYCTREDSSNWRSRGQGTLVTVSSGSGGGGSGGGGSGGGGSFEQVQLLESGGGLVQPGGSLRLSCAASGFTFSSHGMHWVRQAPGKGLEWVSVISGSGSNTGYADSVKGRFTISRDNSKNTLYLQMNSLRAEDTAVYYCARQWGSYAFDSWGQGTLVTVSSTRIQNPDPAVYQLRDSKSSDKSVCLFTDFDSQTNVSQSKDSDVYITDKCVLDMRSMDFKSNSAVAWSNKSDFACANAFNNSIIPEDTFFPSPESSCDVKLVEKSFETDTNLNFQILYEILLGKATLYAVLVSALVLMAMVKRKDSRG

SEQ ID NO: 14042 - protein, 902 aa, synthetic construct
MALPVTALLLPLALLLHAARPEVQLVESGGGLVQPGGSLRLSCAASGFSFSDFWMSWVRQAPGKGLEWVATISQAGSEKDYVDSVKGRFTISRDNAKKSLYLQMNSLRAEDTAVYYCASGVYSFDYRGQGTLVTVSSGTGGGGSGGGGSGGGGSEFDIVMSQSPSSLAVSVGEKVTMSCKSSQSLLHSSNQKNYLAWYQQKPGQSPKVLIYWASTRESGVPDRFTGSGSGTDFTLTITSVKSEDLAVYYCQQYYSYPWTFGGGTRLEIKRLEDLKNVFPPEVAVFEPSEAEISHTQKATLVCLATGFYPDHVELSWWVNGKEVHSGVCTDPQPLKEQPALNDSRYCLSSRLRVSATFWQNPRNHFRCQVQFYGLSENDEWTQDRAKPVTQIVSAEAWGRADCGFTSESYQQGVLSATNLSVIGFRILLLKVAGFNLLMTLRLWSSRAKRSGSGATNFSLLKQAGDVEENPGPTSMDWIWRILFLVGAATGAHSGPQLQLQESGPGLVKPSETLSLTCTVSGDSISSGDYYWGWIRQPPGKGLEWIGHIYYSGVTYYNPSLKSRVTISVDTSRNQFSLKLSSVTAADTAVYYCTREDSSNWRSRGQGTLVTVSSGSGGGGSGGGGSGGGGSFEEVQLQQSVAELVKPGASVKMSCKVSGYTLTDHTIHWMKQRPEQGLEWIGYIYPRDGITGYNEKFKGKATLTADTSSSTAYMQLNSLTSEDSAVYFCARWGYSYRNYAYYYDYWGQGTTLTVSSTRIQNPDPAVYQLRDSKSSDKSVCLFTDFDSQTNVSQSKDSDVYITDKCVLDMRSMDFKSNSAVAWSNKSDFACANAFNNSIIPEDTFFPSPESSCDVKLVEKSFETDTNLNFQILYEILLGKATLYAVLVSALVLMAMVKRKDSRG

SEQ ID NO: 14043 - protein, 899 aa, synthetic construct
MALPVTALLLPLALLLHAARPEVQLVESGGGLVQPGGSLRLSCAASGFSFSDFWMSWVRQAPGKGLEWVATISQAGSEKDYVDSVKGRFTISRDNAKKSLYLQMNSLRAEDTAVYYCASGVYSFDYRGQGTLVTVSSGTGGGGSGGGGSGGGGSEFEIVLTQSPGTLSLSPGERATLSCRASQSVSSSYLAWYQQKPGQAPRLLIYGTSSRATGIPDRFSGSGSGTDFTLTISRLEPEDFAVYYCQQYGSSPFTFGGGTKVEIKRLEDLKNVFPPEVAVFEPSEAEISHTQKATLVCLATGFYPDHVELSWWVNGKEVHSGVCTDPQPLKEQPALNDSRYCLSSRLRVSATFWQNPRNHFRCQVQFYGLSENDEWTQDRAKPVTQIVSAEAWGRADCGFTSESYQQGVLSATNLSVIGFRILLLKVAGFNLLMTLRLWSSRAKRSGSGATNFSLLKQAGDVEENPGPTSMDWIWRILFLVGAATGAHSGPQLQLQESGPGLVKPSETLSLTCTVSGDSISSGDYYWGWIRQPPGKGLEWIGHIYYSGVTYYNPSLKSRVTISVDTSRNQFSLKLSSVTAADTAVYYCTREDSSNWRSRGQGTLVTVSSGSGGGGSGGGGSGGGGSFEQVQLQESGPGLAKPSETLSLTCTVSGDSITSYYWSWIRQPPGKGLEWIGYIYYSGSTNYNPSLKSRVTISVDTSKNQFSLKLSSVTAADTAVYYCARDQRRIAAAGTHFYGMDVWGQGTTVTVSSTRIQNPDPAVYQLRDSKSSDKSVCLFTDFDSQTNVSQSKDSDVYITDKCVLDMRSMDFKSNSAVAWSNKSDFACANAFNNSIIPEDTFFPSPESSCDVKLVEKSFETDTNLNFQILYEILLGKATLYAVLVSALVLMAMVKRKDSRG

SEQ ID NO: 14044 - protein, 891 aa, synthetic construct
MALPVTALLLPLALLLHAARPEVQLVESGGGLVQPGGSLRLSCAASGFSFSDFWMSWVRQAPGKGLEWVATISQAGSEKDYVDSVKGRFTISRDNAKKSLYLQMNSLRAEDTAVYYCASGVYSFDYRGQGTLVTVSSGTGGGGSGGGGSGGGGSEFDILLTQSPVILSVSPGERVSFSCRASQSIGTNIHWYQQRTNGSPRLLIKYASESISGIPSRFSGSGSGTDFTLSINSVESEDIADYYCQQNNNWPTTFGAGTKLELKLEDLKNVFPPEVAVFEPSEAEISHTQKATLVCLATGFYPDHVELSWWVNGKEVHSGVCTDPQPLKEQPALNDSRYCLSSRLRVSATFWQNPRNHFRCQVQFYGLSENDEWTQDRAKPVTQIVSAEAWGRADCGFTSESYQQGVLSATNLSVIGFRILLLKVAGFNLLMTLRLWSSRAKRSGSGATNFSLLKQAGDVEENPGPTSMDWIWRILFLVGAATGAHSGPQLQLQESGPGLVKPSETLSLTCTVSGDSISSGDYYWGWIRQPPGKGLEWIGHIYYSGVTYYNPSLKSRVTISVDTSRNQFSLKLSSVTAADTAVYYCTREDSSNWRSRGQGTLVTVSSGSGGGGSGGGGSGGGGSFEQVQLKQSGPGLVQPSQSLSITCTVSGFSLTNYGVHWVRQSPGKGLEWLGVIWSGGNTDYNTPFTSRLSINKDNSKSQVFFKMNSLQSNDTAIYYCARALTYYDYEFAYWGQGTLVTVSATRIQNPDPAVYQLRDSKSSDKSVCLFTDFDSQTNVSQSKDSDVYITDKCVLDMRSMDFKSNSAVAWSNKSDFACANAFNNSIIPEDTFFPSPESSCDVKLVEKSFETDTNLNFQILYEILLGKATLYAVLVSALVLMAMVKRKDSRG

SEQ ID NO: 14045 - protein, 884 aa, synthetic construct
MALPVTALLLPLALLLHAARPEVQLVESGGGLVQPGGSLRLSCAASGFSFSDFWMSWVRQAPGKGLEWVATISQAGSEKDYVDSVKGRFTISRDNAKKSLYLQMNSLRAEDTAVYYCASGVYSFDYRGQGTLVTVSSGTGGGGSGGGGSGGGGSEFMTQSPKFLLVSAGDRVTLTCKASQSVNNDVYWYQQEPGQSPKLLIYWASTRESGVPDRFTGSGSGTDFTLTISSVQAEDLAVYYCKQSYNLYTFGGGTKLEIKRLEDLKNVFPPEVAVFEPSEAEISHTQKATLVCLATGFYPDHVELSWWVNGKEVHSGVCTDPQPLKEQPALNDSRYCLSSRLRVSATFWQNPRNHFRCQVQFYGLSENDEWTQDRAKPVTQIVSAEAWGRADCGFTSESYQQGVLSATNLSVIGFRILLLKVAGFNLLMTLRLWSSRAKRSGSGATNFSLLKQAGDVEENPGPTSMDWIWRILFLVGAATGAHSGPQLQLQESGPGLVKPSETLSLTCTVSGDSISSGDYYWGWIRQPPGKGLEWIGHIYYSGVTYYNPSLKSRVTISVDTSRNQFSLKLSSVTAADTAVYYCTREDSSNWRSRGQGTLVTVSSGSGGGGSGGGGSGGGGSFEESGRGLVQPGGSRKLSCAASGFTFSTSGMHWVRQAPEKGLEWVAYISSGSTTIYHADTVKGRFTISRDNPKNTLFLQMTSLRSEDTAMYYCCARSGQFGNYFDYWGQGTTLTVSSTRIQNPDPAVYQLRDSKSSDKSVCLFTDFDSQTNVSQSKDSDVYITDKCVLDMRSMDFKSNSAVAWSNKSDFACANAFNNSIIPEDTFFPSPESSCDVKLVEKSFETDTNLNFQILYEILLGKATLYAVLVSALVLMAMVKRKDSRG

SEQ ID NO: 14046 - protein, 889 aa, synthetic construct
MALPVTALLLPLALLLHAARPEVQLVESGGGLVQPGGSLRLSCAASGFSFSDFWMSWVRQAPGKGLEWVATISQAGSEKDYVDSVKGRFTISRDNAKKSLYLQMNSLRAEDTAVYYCASGVYSFDYRGQGTLVTVSSGTGGGGSGGGGSGGGGSEFQSPSSLAVSAGEKVTMSCKSSQSLLNSRTRKNYLAWYQQKPGQSPKLLIYWASTRESGVPDRFTGSGSGTDFTLTISSVQAEDLAVYYCKQSNLYTFGGGTKLEIKLEDLKNVFPPEVAVFEPSEAEISHTQKATLVCLATGFYPDHVELSWWVNGKEVHSGVCTDPQPLKEQPALNDSRYCLSSRLRVSATFWQNPRNHFRCQVQFYGLSENDEWTQDRAKPVTQIVSAEAWGRADCGFTSESYQQGVLSATNLSVIGFRILLLKVAGFNLLMTLRLWSSRAKRSGSGATNFSLLKQAGDVEENPGPTSMDWIWRILFLVGAATGAHSGPQLQLQESGPGLVKPSETLSLTCTVSGDSISSGDYYWGWIRQPPGKGLEWIGHIYYSGVTYYNPSLKSRVTISVDTSRNQFSLKLSSVTAADTAVYYCTREDSSNWRSRGQGTLVTVSSGSGGGGSGGGGSGGGGSFEQVQLEESGPELVKPGASVKLSCKASGYTFTEYIIHWVKQRSGQGLEWIGWFYPGSGSIKYNEKFKDKATLTADKSSSTVYMELSGLTSEDSAVYFCARHDGYSYFDYWGQGTTLTVSSTRIQNPDPAVYQLRDSKSSDKSVCLFTDFDSQTNVSQSKDSDVYITDKCVLDMRSMDFKSNSAVAWSNKSDFACANAFNNSIIPEDTFFPSPESSCDVKLVEKSFETDTNLNFQILYEILLGKATLYAVLVSALVLMAMVKRKDSRG

SEQ ID NO: 14047 - protein, 892 aa, synthetic construct
MALPVTALLLPLALLLHAARPEVQLVESGGGLVQPGGSLRLSCAASGFSFSDFWMSWVRQAPGKGLEWVATISQAGSEKDYVDSVKGRFTISRDNAKKSLYLQMNSLRAEDTAVYYCASGVYSFDYRGQGTLVTVSSGTGGGGSGGGGSGGGGSEFDIQMTQSPSSLSASLGERVSLTCRATQELSGYLSWLQQKPDGTIKRLIYAASTLDSGVPKRFSGNRSGSDYSLTISSLESEDFADYYCLQYAIYPYTFGGGTKLEIKLEDLKNVFPPEVAVFEPSEAEISHTQKATLVCLATGFYPDHVELSWWVNGKEVHSGVCTDPQPLKEQPALNDSRYCLSSRLRVSATFWQNPRNHFRCQVQFYGLSENDEWTQDRAKPVTQIVSAEAWGRADCGFTSESYQQGVLSATNLSVIGFRILLLKVAGFNLLMTLRLWSSRAKRSGSGATNFSLLKQAGDVEENPGPTSMDWIWRILFLVGAATGAHSGPQLQLQESGPGLVKPSETLSLTCTVSGDSISSGDYYWGWIRQPPGKGLEWIGHIYYSGVTYYNPSLKSRVTISVDTSRNQFSLKLSSVTAADTAVYYCTREDSSNWRSRGQGTLVTVSSGSGGGGSGGGGSGGGGSFEEVQLQQSGPELVKPGASVKMSCKASGYTFTSYFIHWVKQKPGQGLEWIGFINPYNDGSKYNEKFKGKATLTSDKSSSTAYMELSSLTSEDSAVYYCTRDDGYYGYAMDYWGQGTSVTVSSTRIQNPDPAVYQLRDSKSSDKSVCLFTDFDSQTNVSQSKDSDVYITDKCVLDMRSMDFKSNSAVAWSNKSDFACANAFNNSIIPEDTFFPSPESSCDVKLVEKSFETDTNLNFQILYEILLGKATLYAVLVSALVLMAMVKRKDSRG

SEQ ID NO: 14048 - protein, 897 aa, synthetic construct
MALPVTALLLPLALLLHAARPEVQLVESGGGLVQPGGSLRLSCAASGFSFSDFWMSWVRQAPGKGLEWVATISQAGSEKDYVDSVKGRFTISRDNAKKSLYLQMNSLRAEDTAVYYCASGVYSFDYRGQGTLVTVSSGTGGGGSGGGGSGGGGSEFDTIVLTQSPASLAVSLGQRATISCRASESVDSYGNSFMHWYQQKPGQPPKLLIYLASNLESGVPARFSGSGSRTDFTLTIDPVEADDAATYYCQQNNYDPWTFGGGTKLEIKLEDLKNVFPPEVAVFEPSEAEISHTQKATLVCLATGFYPDHVELSWWVNGKEVHSGVCTDPQPLKEQPALNDSRYCLSSRLRVSATFWQNPRNHFRCQVQFYGLSENDEWTQDRAKPVTQIVSAEAWGRADCGFTSESYQQGVLSATNLSVIGFRILLLKVAGFNLLMTLRLWSSRAKRSGSGATNFSLLKQAGDVEENPGPTSMDWIWRILFLVGAATGAHSGPQLQLQESGPGLVKPSETLSLTCTVSGDSISSGDYYWGWIRQPPGKGLEWIGHIYYSGVTYYNPSLKSRVTISVDTSRNQFSLKLSSVTAADTAVYYCTREDSSNWRSRGQGTLVTVSSGSGGGGSGGGGSGGGGSFEEVQLQQSGPELVKPGASVKMSCKASGYTFTSYVMHWVKQKPGQGLEWIGYINPYNDGTKYNEKFKGKATLTSDTSSSTAYMELNSLTSEDSAVYFCARPIYFDNDYFDYWGQGTTLKVSSTRIQNPDPAVYQLRDSKSSDKSVCLFTDFDSQTNVSQSKDSDVYITDKCVLDMRSMDFKSNSAVAWSNKSDFACANAFNNSIIPEDTFFPSPESSCDVKLVEKSFETDTNLNFQILYEILLGKATLYAVLVSALVLMAMVKRKDSRG

SEQ ID NO: 14049 - protein, 892 aa, synthetic construct
MALPVTALLLPLALLLHAARPEVQLVESGGGLVQPGGSLRLSCAASGFSFSDFWMSWVRQAPGKGLEWVATISQAGSEKDYVDSVKGRFTISRDNAKKSLYLQMNSLRAEDTAVYYCASGVYSFDYRGQGTLVTVSSGTGGGGSGGGGSGGGGSEFDIQMTQSPSSLSASVGDRVTITCKASQDVGIAVAWYQQKPGKVPKLLIYWASTRHTGVPDRFSGSGSGTDFTLTISSLQPEDVATYYCQQYSSYPYTFGQGTKVEIKRLEDLKNVFPPEVAVFEPSEAEISHTQKATLVCLATGFYPDHVELSWWVNGKEVHSGVCTDPQPLKEQPALNDSRYCLSSRLRVSATFWQNPRNHFRCQVQFYGLSENDEWTQDRAKPVTQIVSAEAWGRADCGFTSESYQQGVLSATNLSVIGFRILLLKVAGFNLLMTLRLWSSRAKRSGSGATNFSLLKQAGDVEENPGPTSMDWIWRILFLVGAATGAHSGPQLQLQESGPGLVKPSETLSLTCTVSGDSISSGDYYWGWIRQPPGKGLEWIGHIYYSGVTYYNPSLKSRVTISVDTSRNQFSLKLSSVTAADTAVYYCTREDSSNWRSRGQGTLVTVSSGSGGGGSGGGGSGGGGSFEEVQLVESGGGLVQPGGSLRLSCAASGFDFSRYWMSWVRQAPGKGLEWIGEINPDSSTINYAPSLKDKFIISRDNAKNSLYLQMNSLRAEDTAVYYCARPDGNYWYFDVWGQGTLVTVSSTRIQNPDPAVYQLRDSKSSDKSVCLFTDFDSQTNVSQSKDSDVYITDKCVLDMRSMDFKSNSAVAWSNKSDFACANAFNNSIIPEDTFFPSPESSCDVKLVEKSFETDTNLNFQILYEILLGKATLYAVLVSALVLMAMVKRKDSRG

SEQ ID NO: 14050 - protein, 892 aa, synthetic construct
MALPVTALLLPLALLLHAARPEVQLVESGGGLVQPGGSLRLSCAASGFSFSDFWMSWVRQAPGKGLEWVATISQAGSEKDYVDSVKGRFTISRDNAKKSLYLQMNSLRAEDTAVYYCASGVYSFDYRGQGTLVTVSSGTGGGGSGGGGSGGGGSEFDIVMTQSQKSMSTSVGDRVSITCKASQDVITGVAWYQQKPGQSPKLLIYSASYRYTGVPDRFTGSGSGTDFTFTISNVQAEDLAVYYCQQHYSTPLTFGAGTKLELKLEDLKNVFPPEVAVFEPSEAEISHTQKATLVCLATGFYPDHVELSWWVNGKEVHSGVCTDPQPLKEQPALNDSRYCLSSRLRVSATFWQNPRNHFRCQVQFYGLSENDEWTQDRAKPVTQIVSAEAWGRADCGFTSESYQQGVLSATNLSVIGFRILLLKVAGFNLLMTLRLWSSRAKRSGSGATNFSLLKQAGDVEENPGPTSMDWIWRILFLVGAATGAHSGPQLQLQESGPGLVKPSETLSLTCTVSGDSISSGDYYWGWIRQPPGKGLEWIGHIYYSGVTYYNPSLKSRVTISVDTSRNQFSLKLSSVTAADTAVYYCTREDSSNWRSRGQGTLVTVSSGSGGGGSGGGGSGGGGSFEQVQLQQPGAELVRPGASVKLSCKASGYSFTTYWMNWVKQRPGQGLEWIGMIHPSDSETRLNQKFKDKATLTVDKSSSTAYMQLSSPTSEDSAVYYCARSTMIATRAMDYWGQGTSVTVSSTRIQNPDPAVYQLRDSKSSDKSVCLFTDFDSQTNVSQSKDSDVYITDKCVLDMRSMDFKSNSAVAWSNKSDFACANAFNNSIIPEDTFFPSPESSCDVKLVEKSFETDTNLNFQILYEILLGKATLYAVLVSALVLMAMVKRKDSRG

SEQ ID NO: 14051 - protein, 898 aa, synthetic construct
MALPVTALLLPLALLLHAARPEVQLVESGGGLVQPGGSLRLSCAASGFSFSDFWMSWVRQAPGKGLEWVATISQAGSEKDYVDSVKGRFTISRDNAKKSLYLQMNSLRAEDTAVYYCASGVYSFDYRGQGTLVTVSSGTGGGGSGGGGSGGGGSEFQSVLTQPPSVSGAPGQRVTISCTGSGSNIGAPYDVSWYQQLPGTAPKLLIYHNNKRPSGVPDRFSGSKSGTSASLAITGLQAEDEADYYCATVEAGLSGSVFGGGTKLTVLGALEDLKNVFPPEVAVFEPSEAEISHTQKATLVCLATGFYPDHVELSWWVNGKEVHSGVCTDPQPLKEQPALNDSRYCLSSRLRVSATFWQNPRNHFRCQVQFYGLSENDEWTQDRAKPVTQIVSAEAWGRADCGFTSESYQQGVLSATNLSVIGFRILLLKVAGFNLLMTLRLWSSRAKRSGSGATNFSLLKQAGDVEENPGPTSMDWIWRILFLVGAATGAHSGPQLQLQESGPGLVKPSETLSLTCTVSGDSISSGDYYWGWIRQPPGKGLEWIGHIYYSGVTYYNPSLKSRVTISVDTSRNQFSLKLSSVTAADTAVYYCTREDSSNWRSRGQGTLVTVSSGSGGGGSGGGGSGGGGSFEQVQLVQSGAEVKKPGASVKVSCKVSGYTLTELSIHWVRQAPGKGLEWMGGFDPEENEIVYAQRFQGRVTMTEDTSTDTAYMELSSLRSEDTAVYYCAIVGSFSPLTLGLWGQGTMVTVSSTRIQNPDPAVYQLRDSKSSDKSVCLFTDFDSQTNVSQSKDSDVYITDKCVLDMRSMDFKSNSAVAWSNKSDFACANAFNNSIIPEDTFFPSPESSCDVKLVEKSFETDTNLNFQILYEILLGKATLYAVLVSALVLMAMVKRKDSRG

SEQ ID NO: 14052 - protein, 898 aa, synthetic construct
MALPVTALLLPLALLLHAARPEVQLVESGGGLVQPGGSLRLSCAASGFSFSDFWMSWVRQAPGKGLEWVATISQAGSEKDYVDSVKGRFTISRDNAKKSLYLQMNSLRAEDTAVYYCASGVYSFDYRGQGTLVTVSSGTGGGGSGGGGSGGGGSEFQSVLTQPPSVSGAPGQRVTISCTGSGSNIGAPYDVSWYQQLPGTAPKLLIYHNNKRPSGVPDRFSGSKSGTSASLAITGLQAEDEADYYCQSYDSSSISTIFGGGTKLTVLGALEDLKNVFPPEVAVFEPSEAEISHTQKATLVCLATGFYPDHVELSWWVNGKEVHSGVCTDPQPLKEQPALNDSRYCLSSRLRVSATFWQNPRNHFRCQVQFYGLSENDEWTQDRAKPVTQIVSAEAWGRADCGFTSESYQQGVLSATNLSVIGFRILLLKVAGFNLLMTLRLWSSRAKRSGSGATNFSLLKQAGDVEENPGPTSMDWIWRILFLVGAATGAHSGPQLQLQESGPGLVKPSETLSLTCTVSGDSISSGDYYWGWIRQPPGKGLEWIGHIYYSGVTYYNPSLKSRVTISVDTSRNQFSLKLSSVTAADTAVYYCTREDSSNWRSRGQGTLVTVSSGSGGGGSGGGGSGGGGSFEQVQLVQSGAEVKKPGASVKVSCKVSGYTLTELSIHWVRQAPGKGLEWMGGFDPEENEIVYAQRFQGRVTMTEDTSTDTAYMELSSLRSEDTAVYYCAIVGSFSGIAYRPWGQGTMVTVSSTRIQNPDPAVYQLRDSKSSDKSVCLFTDFDSQTNVSQSKDSDVYITDKCVLDMRSMDFKSNSAVAWSNKSDFACANAFNNSIIPEDTFFPSPESSCDVKLVEKSFETDTNLNFQILYEILLGKATLYAVLVSALVLMAMVKRKDSRG

SEQ ID NO: 14053 - protein, 886 aa, synthetic construct
MALPVTALLLPLALLLHAARPEVQLVESGGGLVQPGGSLRLSCAASGFSFSDFWMSWVRQAPGKGLEWVATISQAGSEKDYVDSVKGRFTISRDNAKKSLYLQMNSLRAEDTAVYYCASGVYSFDYRGQGTLVTVSSGTGGGGSGGGGSGGGGSEFDIQMTQSPSSLSASVGDRVTITCRASQGIRNNLAWYQQKPGKAPKRLIYAASNLQSGVPSRFTGSGSGTEFTLIVSSLQPEDFATYYCLQHHSYPLTSGGGTKVELEDLKNVFPPEVAVFEPSEAEISHTQKATLVCLATGFYPDHVELSWWVNGKEVHSGVCTDPQPLKEQPALNDSRYCLSSRLRVSATFWQNPRNHFRCQVQFYGLSENDEWTQDRAKPVTQIVSAEAWGRADCGFTSESYQQGVLSATNLSVIGFRILLLKVAGFNLLMTLRLWSSRAKRSGSGATNFSLLKQAGDVEENPGPTSMDWIWRILFLVGAATGAHSGPQLQLQESGPGLVKPSETLSLTCTVSGDSISSGDYYWGWIRQPPGKGLEWIGHIYYSGVTYYNPSLKSRVTISVDTSRNQFSLKLSSVTAADTAVYYCTREDSSNWRSRGQGTLVTVSSGSGGGGSGGGGSGGGGSFEEVQVLESGGGLVQPGGSLRLSCAASGFTFSSYAMSWVRQAPGKGLEWVSAISGSGGSTNYADSVKGRFTISRDNSKNTLYLQMNSLRAEDTAVYYCAGSSGWSEYWGQGTLVTVSSTRIQNPDPAVYQLRDSKSSDKSVCLFTDFDSQTNVSQSKDSDVYITDKCVLDMRSMDFKSNSAVAWSNKSDFACANAFNNSIIPEDTFFPSPESSCDVKLVEKSFETDTNLNFQILYEILLGKATLYAVLVSALVLMAMVKRKDSRG

SEQ ID NO: 14054 - protein, 892 aa, synthetic construct
MALPVTALLLPLALLLHAARPEVQLVESGGGLVQPGGSLRLSCAASGFSFSDFWMSWVRQAPGKGLEWVATISQAGSEKDYVDSVKGRFTISRDNAKKSLYLQMNSLRAEDTAVYYCASGVYSFDYRGQGTLVTVSSGTGGGGSGGGGSGGGGSEFDEIQLVQSGAEVKKPGESLRISCKGSGFNIEDYYIHWVRQMPGKGLEWMGRIDPENDETKYGPIFQGHVTISADTSINTVYLQWSSLKASDTAMYYCAFRGGVYWGQGTTVTVSSLEDLKNVFPPEVAVFEPSEAEISHTQKATLVCLATGFYPDHVELSWWVNGKEVHSGVCTDPQPLKEQPALNDSRYCLSSRLRVSATFWQNPRNHFRCQVQFYGLSENDEWTQDRAKPVTQIVSAEAWGRADCGFTSESYQQGVLSATNLSVIGFRILLLKVAGFNLLMTLRLWSSRAKRSGSGATNFSLLKQAGDVEENPGPTSMDWIWRILFLVGAATGAHSGPQLQLQESGPGLVKPSETLSLTCTVSGDSISSGDYYWGWIRQPPGKGLEWIGHIYYSGVTYYNPSLKSRVTISVDTSRNQFSLKLSSVTAADTAVYYCTREDSSNWRSRGQGTLVTVSSGSGGGGSGGGGSGGGGSFEDVVMTQSPDSLAVSLGERATINCKSSQSLLDSDGKTYLNWLQQKPGQPPKRLISLVSKLDSGVPDRFSGSGSGTDFTLTISSLQAEDVAVYYCWQGTHFPGTFGGGTKVEIKTRIQNPDPAVYQLRDSKSSDKSVCLFTDFDSQTNVSQSKDSDVYITDKCVLDMRSMDFKSNSAVAWSNKSDFACANAFNNSIIPEDTFFPSPESSCDVKLVEKSFETDTNLNFQILYEILLGKATLYAVLVSALVLMAMVKRKDSRG

SEQ ID NO: 14055 - protein, 899 aa, synthetic construct
MALPVTALLLPLALLLHAARPEVQLVESGGGLVQPGGSLRLSCAASGFSFSDFWMSWVRQAPGKGLEWVATISQAGSEKDYVDSVKGRFTISRDNAKKSLYLQMNSLRAEDTAVYYCASGVYSFDYRGQGTLVTVSSGTGGGGSGGGGSGGGGSEFDELVMTQSPSSLTVTAGEKVTMSCKSSQSLLNSGNQKNYLTWYQQKPGQPPKLLIYWASTRESGVPDRFTGSGSGTDFTLTISSVQAEDLAVYYCQNDYSYPLTFGAGTKLEIKLEDLKNVFPPEVAVFEPSEAEISHTQKATLVCLATGFYPDHVELSWWVNGKEVHSGVCTDPQPLKEQPALNDSRYCLSSRLRVSATFWQNPRNHFRCQVQFYGLSENDEWTQDRAKPVTQIVSAEAWGRADCGFTSESYQQGVLSATNLSVIGFRILLLKVAGFNLLMTLRLWSSRAKRSGSGATNFSLLKQAGDVEENPGPTSMDWIWRILFLVGAATGAHSGPQLQLQESGPGLVKPSETLSLTCTVSGDSISSGDYYWGWIRQPPGKGLEWIGHIYYSGVTYYNPSLKSRVTISVDTSRNQFSLKLSSVTAADTAVYYCTREDSSNWRSRGQGTLVTVSSGSGGGGSGGGGSGGGGSFEEVQLLEQSGAELVRPGTSVKISCKASGYAFTNYWLGWVKQRPGHGLEWIGDIFPGSGNIHYNEKFKGKATLTADKSSSTAYMQLSSLTFEDSAVYFCARLRNWDEPMDYWGQGTTVTVSSTRIQNPDPAVYQLRDSKSSDKSVCLFTDFDSQTNVSQSKDSDVYITDKCVLDMRSMDFKSNSAVAWSNKSDFACANAFNNSIIPEDTFFPSPESSCDVKLVEKSFETDTNLNFQILYEILLGKATLYAVLVSALVLMAMVKRKDSRG

SEQ ID NO: 14056 - protein, 900 aa, synthetic construct
MALPVTALLLPLALLLHAARPEVQLVESGGGLVQPGGSLRLSCAASGFSFSDFWMSWVRQAPGKGLEWVATISQAGSEKDYVDSVKGRFTISRDNAKKSLYLQMNSLRAEDTAVYYCASGVYSFDYRGQGTLVTVSSGTGGGGSGGGGSGGGGSEFDELQMTQSPSSLSASVGDRVTITCRASQSISSYLNWYQQKPGQPPKLLIYWASTRESGVPDRFSGSESGTNYTLTISSLQPEDFATYFCQQSDSLPITFGQGTRLDIQLEDLKNVFPPEVAVFEPSEAEISHTQKATLVCLATGFYPDHVELSWWVNGKEVHSGVCTDPQPLKEQPALNDSRYCLSSRLRVSATFWQNPRNHFRCQVQFYGLSENDEWTQDRAKPVTQIVSAEAWGRADCGFTSESYQQGVLSATNLSVIGFRILLLKVAGFNLLMTLRLWSSRAKRSGSGATNFSLLKQAGDVEENPGPTSMDWIWRILFLVGAATGAHSGPQLQLQESGPGLVKPSETLSLTCTVSGDSISSGDYYWGWIRQPPGKGLEWIGHIYYSGVTYYNPSLKSRVTISVDTSRNQFSLKLSSVTAADTAVYYCTREDSSNWRSRGQGTLVTVSSGSGGGGSGGGGSGGGGSFEEVQLLESGGGVVQPGRSLRLSCAASGFTFSSYGMHWVRQAPGKGLEWVAVISYDGSNKYYADSVKGRFTISRDNSKNTLYLQMNSLRAEDTAVYYCAKDMGWGSGWRPYYYYGMDVWGQGTTVTVSSTRIQNPDPAVYQLRDSKSSDKSVCLFTDFDSQTNVSQSKDSDVYITDKCVLDMRSMDFKSNSAVAWSNKSDFACANAFNNSIIPEDTFFPSPESSCDVKLVEKSFETDTNLNFQILYEILLGKATLYAVLVSALVLMAMVKRKDSRG

SEQ ID NO: 14057 - protein, 897 aa, synthetic construct
MALPVTALLLPLALLLHAARPEVQLVESGGGLVQPGGSLRLSCAASGFSFSDFWMSWVRQAPGKGLEWVATISQAGSEKDYVDSVKGRFTISRDNAKKSLYLQMNSLRAEDTAVYYCASGVYSFDYRGQGTLVTVSSGTGGGGSGGGGSGGGGSEFDDIQMTQSPSSLSASVGDRVTITCRASQSISSYLNWYQQKPGKAPKLLIYAASSLQSGVPSRFSGSGSGTDFTLTISSLQPEDLATYYCQQSYSTPFTFGPGTKVDIKLEDLKNVFPPEVAVFEPSEAEISHTQKATLVCLATGFYPDHVELSWWVNGKEVHSGVCTDPQPLKEQPALNDSRYCLSSRLRVSATFWQNPRNHFRCQVQFYGLSENDEWTQDRAKPVTQIVSAEAWGRADCGFTSESYQQGVLSATNLSVIGFRILLLKVAGFNLLMTLRLWSSRAKRSGSGATNFSLLKQAGDVEENPGPTSMDWIWRILFLVGAATGAHSGPQLQLQESGPGLVKPSETLSLTCTVSGDSISSGDYYWGWIRQPPGKGLEWIGHIYYSGVTYYNPSLKSRVTISVDTSRNQFSLKLSSVTAADTAVYYCTREDSSNWRSRGQGTLVTVSSGSGGGGSGGGGSGGGGSFEVHEVQLVQSGAEVKKPGSSVKVSCKASGGTFSSYAISWVRQAPGQGLEWMGGIIPIFGTANYAQKFQGRVTITADKSTSTAYMELSSLRSEDTAVYYCATFALFGFREQAFDIWGQGTTVTVSSTRIQNPDPAVYQLRDSKSSDKSVCLFTDFDSQTNVSQSKDSDVYITDKCVLDMRSMDFKSNSAVAWSNKSDFACANAFNNSIIPEDTFFPSPESSCDVKLVEKSFETDTNLNFQILYEILLGKATLYAVLVSALVLMAMVKRKDSRG

SEQ ID NO: 14058 - protein, 895 aa, synthetic construct
MALPVTALLLPLALLLHAARPEVQLVESGGGLVQPGGSLRLSCAASGFSFSDFWMSWVRQAPGKGLEWVATISQAGSEKDYVDSVKGRFTISRDNAKKSLYLQMNSLRAEDTAVYYCASGVYSFDYRGQGTLVTVSSGTGGGGSGGGGSGGGGSEFDIVLTQSPLSLAVSLGQPAIISCKASQSVSFAGTSLMHWYHQKPGQQPRLLIYRASNLEAGVPDRFSGSGSKTDFTLTISPVEAEDAATYYCQQSREYPYTFGGGTKLEIKRLEDLKNVFPPEVAVFEPSEAEISHTQKATLVCLATGFYPDHVELSWWVNGKEVHSGVCTDPQPLKEQPALNDSRYCLSSRLRVSATFWQNPRNHFRCQVQFYGLSENDEWTQDRAKPVTQIVSAEAWGRADCGFTSESYQQGVLSATNLSVIGFRILLLKVAGFNLLMTLRLWSSRAKRSGSGATNFSLLKQAGDVEENPGPTSMDWIWRILFLVGAATGAHSGPQLQLQESGPGLVKPSETLSLTCTVSGDSISSGDYYWGWIRQPPGKGLEWIGHIYYSGVTYYNPSLKSRVTISVDTSRNQFSLKLSSVTAADTAVYYCTREDSSNWRSRGQGTLVTVSSGSGGGGSGGGGSGGGGSFEQVQLVQSGAEVVKPGASVKISCKASGYTFTGYFMNWVKQSPGQSLEWIGRIHPYDGDTFYNQKFQGKATLTVDKSSNTAHMELLSLTSEDFAVYYCTRYDGSRAMDYWGQGTTVTVSSTRIQNPDPAVYQLRDSKSSDKSVCLFTDFDSQTNVSQSKDSDVYITDKCVLDMRSMDFKSNSAVAWSNKSDFACANAFNNSIIPEDTFFPSPESSCDVKLVEKSFETDTNLNFQILYEILLGKATLYAVLVSALVLMAMVKRKDSRG

SEQ ID NO: 14059 - protein, 892 aa, synthetic construct
MALPVTALLLPLALLLHAARPEVQLVESGGGLVQPGGSLRLSCAASGFSFSDFWMSWVRQAPGKGLEWVATISQAGSEKDYVDSVKGRFTISRDNAKKSLYLQMNSLRAEDTAVYYCASGVYSFDYRGQGTLVTVSSGTGGGGSGGGGSGGGGSEFDDVVMTQTPLSLPVTPGEPASISCRSSQSLVHRNGNTYLHWYLQKPGQSPKLLIHKVSNRFSGVPDRFSGSGSGTDFTLKISRVEAEDLGVYFCSQSTHVPPLTFGAGTKLELKLEDLKNVFPPEVAVFEPSEAEISHTQKATLVCLATGFYPDHVELSWWVNGKEVHSGVCTDPQPLKEQPALNDSRYCLSSRLRVSATFWQNPRNHFRCQVQFYGLSENDEWTQDRAKPVTQIVSAEAWGRADCGFTSESYQQGVLSATNLSVIGFRILLLKVAGFNLLMTLRLWSSRAKRSGSGATNFSLLKQAGDVEENPGPTSMDWIWRILFLVGAATGAHSGPQLQLQESGPGLVKPSETLSLTCTVSGDSISSGDYYWGWIRQPPGKGLEWIGHIYYSGVTYYNPSLKSRVTISVDTSRNQFSLKLSSVTAADTAVYYCTREDSSNWRSRGQGTLVTVSSGSGGGGSGGGGSGGGGSFEEVQLVQSGAEVEKPGASVKISCKASGSSFTGYNMNWVRQNIGKSLEWIGAIDPYYGGTSYNQKFKGRATLTVDKSTSTAYMHLKSLRSEDTAVYYCVSGMEYWGQGTSVTVSSTRIQNPDPAVYQLRDSKSSDKSVCLFTDFDSQTNVSQSKDSDVYITDKCVLDMRSMDFKSNSAVAWSNKSDFACANAFNNSIIPEDTFFPSPESSCDVKLVEKSFETDTNLNFQILYEILLGKATLYAVLVSALVLMAMVKRKDSRG

SEQ ID NO: 14060 - protein, 890 aa, synthetic construct
MALPVTALLLPLALLLHAARPEVQLVESGGGLVQPGGSLRLSCAASGFSFSDFWMSWVRQAPGKGLEWVATISQAGSEKDYVDSVKGRFTISRDNAKKSLYLQMNSLRAEDTAVYYCASGVYSFDYRGQGTLVTVSSGTGGGGSGGGGSGGGGSEFDEIVMTQTPATLSVSAGERVTITCKASQSVSNDVTWYQQKPGQAPRLLIYSASNRYSGVPARFSGSGYGTEFTFTISSVQSEDFAVYFCQQDYSSFGQGTKLEIKRLEDLKNVFPPEVAVFEPSEAEISHTQKATLVCLATGFYPDHVELSWWVNGKEVHSGVCTDPQPLKEQPALNDSRYCLSSRLRVSATFWQNPRNHFRCQVQFYGLSENDEWTQDRAKPVTQIVSAEAWGRADCGFTSESYQQGVLSATNLSVIGFRILLLKVAGFNLLMTLRLWSSRAKRSGSGATNFSLLKQAGDVEENPGPTSMDWIWRILFLVGAATGAHSGPQLQLQESGPGLVKPSETLSLTCTVSGDSISSGDYYWGWIRQPPGKGLEWIGHIYYSGVTYYNPSLKSRVTISVDTSRNQFSLKLSSVTAADTAVYYCTREDSSNWRSRGQGTLVTVSSGSGGGGSGGGGSGGGGSFEQVQLVESGPGVVQPGRSLRISCAVSGFSVTNYGVHWVRQPPGKGLEWLGVIWAGGITNYNSAFMSRLTISKDNSKNTVYLQMNSLRAEDTAMYYCASRGGHYGYALDYWGQGTLVTVSSTRIQNPDPAVYQLRDSKSSDKSVCLFTDFDSQTNVSQSKDSDVYITDKCVLDMRSMDFKSNSAVAWSNKSDFACANAFNNSIIPEDTFFPSPESSCDVKLVEKSFETDTNLNFQILYEILLGKATLYAVLVSALVLMAMVKRKDSRG

SEQ ID NO: 14061 - protein, 892 aa, synthetic construct
MALPVTALLLPLALLLHAARPEVQLVESGGGLVQPGGSLRLSCAASGFSFSDFWMSWVRQAPGKGLEWVATISQAGSEKDYVDSVKGRFTISRDNAKKSLYLQMNSLRAEDTAVYYCASGVYSFDYRGQGTLVTVSSGTGGGGSGGGGSGGGGSEFDIQMTQTASSLPASLGDRVTISCSASQDISNYLNWYQQKPDGTVKLLIFYSSNLHSGVPSRFSGGGSGTDYSLTISNLEPEDIATYFCHQYSKLPWTFGGGTKLEIKRLEDLKNVFPPEVAVFEPSEAEISHTQKATLVCLATGFYPDHVELSWWVNGKEVHSGVCTDPQPLKEQPALNDSRYCLSSRLRVSATFWQNPRNHFRCQVQFYGLSENDEWTQDRAKPVTQIVSAEAWGRADCGFTSESYQQGVLSATNLSVIGFRILLLKVAGFNLLMTLRLWSSRAKRSGSGATNFSLLKQAGDVEENPGPTSMDWIWRILFLVGAATGAHSGPQLQLQESGPGLVKPSETLSLTCTVSGDSISSGDYYWGWIRQPPGKGLEWIGHIYYSGVTYYNPSLKSRVTISVDTSRNQFSLKLSSVTAADTAVYYCTREDSSNWRSRGQGTLVTVSSGSGGGGSGGGGSGGGGSFEEVTLVESGGDFVKPGGSLKVSCAASGFAFSHYAMSWVRQTPAKRLEWVAYISSGGSGTYYSDSVKGRFTISRDNAKNTLYLQMRSLRSEDSAMYFCTRVKLGTYYFDSWGQGTTLTVSSTRIQNPDPAVYQLRDSKSSDKSVCLFTDFDSQTNVSQSKDSDVYITDKCVLDMRSMDFKSNSAVAWSNKSDFACANAFNNSIIPEDTFFPSPESSCDVKLVEKSFETDTNLNFQILYEILLGKATLYAVLVSALVLMAMVKRKDSRG

SEQ ID NO: 14062 - protein, 894 aa, synthetic construct
MALPVTALLLPLALLLHAARPEVQLVESGGGLVQPGGSLRLSCAASGFSFSDFWMSWVRQAPGKGLEWVATISQAGSEKDYVDSVKGRFTISRDNAKKSLYLQMNSLRAEDTAVYYCASGVYSFDYRGQGTLVTVSSGTGGGGSGGGGSGGGGSEFQFVLTQSPSASAALGASAKLTCTLSSAHKTYTIDWYQQQKGKAPRYLIQVKSDGTYTKATGVPDRFSGSSSGADRYLIIPSVQADDEADYYCGTDYTGGYVFGGGTQLTVTLEDLKNVFPPEVAVFEPSEAEISHTQKATLVCLATGFYPDHVELSWWVNGKEVHSGVCTDPQPLKEQPALNDSRYCLSSRLRVSATFWQNPRNHFRCQVQFYGLSENDEWTQDRAKPVTQIVSAEAWGRADCGFTSESYQQGVLSATNLSVIGFRILLLKVAGFNLLMTLRLWSSRAKRSGSGATNFSLLKQAGDVEENPGPTSMDWIWRILFLVGAATGAHSGPQLQLQESGPGLVKPSETLSLTCTVSGDSISSGDYYWGWIRQPPGKGLEWIGHIYYSGVTYYNPSLKSRVTISVDTSRNQFSLKLSSVTAADTAVYYCTREDSSNWRSRGQGTLVTVSSGSGGGGSGGGGSGGGGSFEEQLKESGGGLFKPTDTLTLTCTVSGFSLSYYGVNWVRQAPGNGLEWIGTIGGSGDTYYASWAKSRSTIIRNTNENTVTLKMTSLTAADTATYFCVRYANIGYEYFNVWGPGTLVTVSSTRIQNPDPAVYQLRDSKSSDKSVCLFTDFDSQTNVSQSKDSDVYITDKCVLDMRSMDFKSNSAVAWSNKSDFACANAFNNSIIPEDTFFPSPESSCDVKLVEKSFETDTNLNFQILYEILLGKATLYAVLVSALVLMAMVKRKDSRG

SEQ ID NO: 14063 - protein, 899 aa, synthetic construct
MALPVTALLLPLALLLHAARPEVQLVESGGGLVQPGGSLRLSCAASGFSFSDFWMSWVRQAPGKGLEWVATISQAGSEKDYVDSVKGRFTISRDNAKKSLYLQMNSLRAEDTAVYYCASGVYSFDYRGQGTLVTVSSGTGGGGSGGGGSGGGGSEFQFVLTQSPSVSAALGASAKLTCTLSSAHKTYTIDWYQQQQGEAPRYLMQVKSDGSYTKGTGVPDRFSGSSSGADRYLIIPSVQADDEAGYVCGADDNGGYVFGGGTQLTVTLEDLKNVFPPEVAVFEPSEAEISHTQKATLVCLATGFYPDHVELSWWVNGKEVHSGVCTDPQPLKEQPALNDSRYCLSSRLRVSATFWQNPRNHFRCQVQFYGLSENDEWTQDRAKPVTQIVSAEAWGRADCGFTSESYQQGVLSATNLSVIGFRILLLKVAGFNLLMTLRLWSSRAKRSGSGATNFSLLKQAGDVEENPGPTSMDWIWRILFLVGAATGAHSGPQLQLQESGPGLVKPSETLSLTCTVSGDSISSGDYYWGWIRQPPGKGLEWIGHIYYSGVTYYNPSLKSRVTISVDTSRNQFSLKLSSVTAADTAVYYCTREDSSNWRSRGQGTLVTVSSGSGGGGSGGGGSGGGGSFEQSVKESEGGLFKPTDTLTLTCTVSGFSLSRHALTWVRQAPGNGLEWIGAIDNAGTTYYASWAKSRSTITRNTDLHTVTLKMTSLTASDTATYFCARVFYDINSGYYLDGMDLWGPGTLVTVSSTRIQNPDPAVYQLRDSKSSDKSVCLFTDFDSQTNVSQSKDSDVYITDKCVLDMRSMDFKSNSAVAWSNKSDFACANAFNNSIIPEDTFFPSPESSCDVKLVEKSFETDTNLNFQILYEILLGKATLYAVLVSALVLMAMVKRKDSRG

SEQ ID NO: 14064 - protein, 893 aa, synthetic construct
MALPVTALLLPLALLLHAARPEVQLVESGGGLVQPGGSLRLSCAASGFSFSDFWMSWVRQAPGKGLEWVATISQAGSEKDYVDSVKGRFTISRDNAKKSLYLQMNSLRAEDTAVYYCASGVYSFDYRGQGTLVTVSSGTGGGGSGGGGSGGGGSEFDIQMTQSPSSLSASVGDRVTITCRASQGISSWLAWYQQKPEKAPKSLIYAASSLQSGVPSRFSGSGSGTDFTLTISSLQPEDFATYYCQQYNSYPPTFGGGTKVEIKLEDLKNVFPPEVAVFEPSEAEISHTQKATLVCLATGFYPDHVELSWWVNGKEVHSGVCTDPQPLKEQPALNDSRYCLSSRLRVSATFWQNPRNHFRCQVQFYGLSENDEWTQDRAKPVTQIVSAEAWGRADCGFTSESYQQGVLSATNLSVIGFRILLLKVAGFNLLMTLRLWSSRAKRSGSGATNFSLLKQAGDVEENPGPTSMDWIWRILFLVGAATGAHSGPQLQLQESGPGLVKPSETLSLTCTVSGDSISSGDYYWGWIRQPPGKGLEWIGHIYYSGVTYYNPSLKSRVTISVDTSRNQFSLKLSSVTAADTAVYYCTREDSSNWRSRGQGTLVTVSSGSGGGGSGGGGSGGGGSFEEVQLVESGGGLVQPGESLRLSCVASGFTFSRYKMNWVRQAPGKGLEWVSYISRSGRDIYYADSVKGRFTISRDNAKNSLYLQMNSLRDEDTAVYYCAGTVTTYYYFGMDVWGHGTTVTVSSTRIQNPDPAVYQLRDSKSSDKSVCLFTDFDSQTNVSQSKDSDVYITDKCVLDMRSMDFKSNSAVAWSNKSDFACANAFNNSIIPEDTFFPSPESSCDVKLVEKSFETDTNLNFQILYEILLGKATLYAVLVSALVLMAMVKRKDSRG

SEQ ID NO: 14065 - protein, 894 aa, synthetic construct
MALPVTALLLPLALLLHAARPEVQLVESGGGLVQPGGSLRLSCAASGFSFSDFWMSWVRQAPGKGLEWVATISQAGSEKDYVDSVKGRFTISRDNAKKSLYLQMNSLRAEDTAVYYCASGVYSFDYRGQGTLVTVSSGTGGGGSGGGGSGGGGSEFDIQMTQSPSSLSASVGDRVTITCRASQGISSWLAWYQQKPEKAPKSLIYAASSLQSGVPSRFSGSGSGTDFTLTISSLQPEDFATYYCQQYNSYPPTFGGGTKVEIKLEDLKNVFPPEVAVFEPSEAEISHTQKATLVCLATGFYPDHVELSWWVNGKEVHSGVCTDPQPLKEQPALNDSRYCLSSRLRVSATFWQNPRNHFRCQVQFYGLSENDEWTQDRAKPVTQIVSAEAWGRADCGFTSESYQQGVLSATNLSVIGFRILLLKVAGFNLLMTLRLWSSRAKRSGSGATNFSLLKQAGDVEENPGPTSMDWIWRILFLVGAATGAHSGPQLQLQESGPGLVKPSETLSLTCTVSGDSISSGDYYWGWIRQPPGKGLEWIGHIYYSGVTYYNPSLKSRVTISVDTSRNQFSLKLSSVTAADTAVYYCTREDSSNWRSRGQGTLVTVSSGSGGGGSGGGGSGGGGSFEEVQLVESGGGSVQPGESLRLSCVASGFTFSRYKMNWVRQAPGKGLEWVSYISRSGRDIYYADSVKGRFTISRDNAKNSLYLQMNSLRDEDTAVYYCAGTVTTYYYDFGMDVWGQGTTVTVSSTRIQNPDPAVYQLRDSKSSDKSVCLFTDFDSQTNVSQSKDSDVYITDKCVLDMRSMDFKSNSAVAWSNKSDFACANAFNNSIIPEDTFFPSPESSCDVKLVEKSFETDTNLNFQILYEILLGKATLYAVLVSALVLMAMVKRKDSRG

SEQ ID NO: 14066 - protein, 892 aa, synthetic construct
MALPVTALLLPLALLLHAARPEVQLVESGGGLVQPGGSLRLSCAASGFSFSDFWMSWVRQAPGKGLEWVATISQAGSEKDYVDSVKGRFTISRDNAKKSLYLQMNSLRAEDTAVYYCASGVYSFDYRGQGTLVTVSSGTGGGGSGGGGSGGGGSEFQSVLTQPPSASGTPGQRVTISCSGSRSNVGGNYVFWYQQVPGATPKLLIYRSNQRPSGVPDRFAGSKSGSSASLAISGLRSEDEADYYCATWDDSLSGFVFGTGTKVTVLGLEDLKNVFPPEVAVFEPSEAEISHTQKATLVCLATGFYPDHVELSWWVNGKEVHSGVCTDPQPLKEQPALNDSRYCLSSRLRVSATFWQNPRNHFRCQVQFYGLSENDEWTQDRAKPVTQIVSAEAWGRADCGFTSESYQQGVLSATNLSVIGFRILLLKVAGFNLLMTLRLWSSRAKRSGSGATNFSLLKQAGDVEENPGPTSMDWIWRILFLVGAATGAHSGPQLQLQESGPGLVKPSETLSLTCTVSGDSISSGDYYWGWIRQPPGKGLEWIGHIYYSGVTYYNPSLKSRVTISVDTSRNQFSLKLSSVTAADTAVYYCTREDSSNWRSRGQGTLVTVSSGSGGGGSGGGGSGGGGSFEVQLVESGGGLVKPGGSLRLSCAASGFTFSDYYMSWIRQAPGKGLEWVSYISSSGSTIYYADSVKGRFTISRDNAKNSLYLQMNSLRAEDTAVYYCARGYGKAYDQWGQGTLVTVSSTRIQNPDPAVYQLRDSKSSDKSVCLFTDFDSQTNVSQSKDSDVYITDKCVLDMRSMDFKSNSAVAWSNKSDFACANAFNNSIIPEDTFFPSPESSCDVKLVEKSFETDTNLNFQILYEILLGKATLYAVLVSALVLMAMVKRKDSRG

SEQ ID NO: 14067 - protein, 891 aa, synthetic construct
MALPVTALLLPLALLLHAARPEVQLVESGGGLVQPGGSLRLSCAASGFSFSDFWMSWVRQAPGKGLEWVATISQAGSEKDYVDSVKGRFTISRDNAKKSLYLQMNSLRAEDTAVYYCASGVYSFDYRGQGTLVTVSSGTGGGGSGGGGSGGGGSEFQSVVTQPPSMSAAPGQQVTISCSGGNSNIERNYVSWYLQLPGTAPKLVIFDNDRRPSGIPDRFSGSKSGTSATLGITGLQTGDEADYYCGTWDSSLRGWVFGGGTKLTVLGLEDLKNVFPPEVAVFEPSEAEISHTQKATLVCLATGFYPDHVELSWWVNGKEVHSGVCTDPQPLKEQPALNDSRYCLSSRLRVSATFWQNPRNHFRCQVQFYGLSENDEWTQDRAKPVTQIVSAEAWGRADCGFTSESYQQGVLSATNLSVIGFRILLLKVAGFNLLMTLRLWSSRAKRSGSGATNFSLLKQAGDVEENPGPTSMDWIWRILFLVGAATGAHSGPQLQLQESGPGLVKPSETLSLTCTVSGDSISSGDYYWGWIRQPPGKGLEWIGHIYYSGVTYYNPSLKSRVTISVDTSRNQFSLKLSSVTAADTAVYYCTREDSSNWRSRGQGTLVTVSSGSGGGGSGGGGSGGGGSFEVQLVESGGGLIQPGGSLRLSCAASGFTFSNYAMNWVRQAPGKGLEWVSTINGRGSSTIYADSVKGRFTISRDNSKNTLYLQMNSLRAEDTATYYCARYISRGLGDSWGQGTLVTVTRIQNPDPAVYQLRDSKSSDKSVCLFTDFDSQTNVSQSKDSDVYITDKCVLDMRSMDFKSNSAVAWSNKSDFACANAFNNSIIPEDTFFPSPESSCDVKLVEKSFETDTNLNFQILYEILLGKATLYAVLVSALVLMAMVKRKDSRG

SEQ ID NO: 14068 - protein, 892 aa, synthetic construct
MALPVTALLLPLALLLHAARPEVQLVESGGGLVQPGGSLRLSCAASGFSFSDFWMSWVRQAPGKGLEWVATISQAGSEKDYVDSVKGRFTISRDNAKKSLYLQMNSLRAEDTAVYYCASGVYSFDYRGQGTLVTVSSGTGGGGSGGGGSGGGGSEFDVVMTQTPLSLPVSLGDQASISCRSSQSLVHSNGNTYLHWYLQKPGQSPKLLIYKVSNRFSGVPDRFSGSGSGTDFTLKISRVEAEDLGVYFCSQNTPVPPKFGSGTKLEIKLEDLKNVFPPEVAVFEPSEAEISHTQKATLVCLATGFYPDHVELSWWVNGKEVHSGVCTDPQPLKEQPALNDSRYCLSSRLRVSATFWQNPRNHFRCQVQFYGLSENDEWTQDRAKPVTQIVSAEAWGRADCGFTSESYQQGVLSATNLSVIGFRILLLKVAGFNLLMTLRLWSSRAKRSGSGATNFSLLKQAGDVEENPGPTSMDWIWRILFLVGAATGAHSGPQLQLQESGPGLVKPSETLSLTCTVSGDSISSGDYYWGWIRQPPGKGLEWIGHIYYSGVTYYNPSLKSRVTISVDTSRNQFSLKLSSVTAADTAVYYCTREDSSNWRSRGQGTLVTVSSGSGGGGSGGGGSGGGGSFEQVQLQQSGAELVRPGASVKLSCKASGYTFNDYEMHWVKQTPVHGLKWIGALEPKTGDTAYSQKFKGKATLTADKSSSTAYMELRSLTSEDSAVYYCTSCYYYTYSGQGTLVTVSATRIQNPDPAVYQLRDSKSSDKSVCLFTDFDSQTNVSQSKDSDVYITDKCVLDMRSMDFKSNSAVAWSNKSDFACANAFNNSIIPEDTFFPSPESSCDVKLVEKSFETDTNLNFQILYEILLGKATLYAVLVSALVLMAMVKRKDSRG

SEQ ID NO: 14069 - protein, 891 aa, synthetic construct
MALPVTALLLPLALLLHAARPEVQLVESGGGLVQPGGSLRLSCAASGFSFSDFWMSWVRQAPGKGLEWVATISQAGSEKDYVDSVKGRFTISRDNAKKSLYLQMNSLRAEDTAVYYCASGVYSFDYRGQGTLVTVSSGTGGGGSGGGGSGGGGSEFDIQLTQSPSSLSASVGDRVTITCRASQGIRNDLGWYQQKPGKAPKRLIYAASSLQNGVPSRFSGSGSGTEFTLTISSLQPEDFATYYCLQHNTYPAFGQGTKVEIKRLEDLKNVFPPEVAVFEPSEAEISHTQKATLVCLATGFYPDHVELSWWVNGKEVHSGVCTDPQPLKEQPALNDSRYCLSSRLRVSATFWQNPRNHFRCQVQFYGLSENDEWTQDRAKPVTQIVSAEAWGRADCGFTSESYQQGVLSATNLSVIGFRILLLKVAGFNLLMTLRLWSSRAKRSGSGATNFSLLKQAGDVEENPGPTSMDWIWRILFLVGAATGAHSGPQLQLQESGPGLVKPSETLSLTCTVSGDSISSGDYYWGWIRQPPGKGLEWIGHIYYSGVTYYNPSLKSRVTISVDTSRNQFSLKLSSVTAADTAVYYCTREDSSNWRSRGQGTLVTVSSGSGGGGSGGGGSGGGGSFEQVQLQESGPGLVKPSQTLSLTCTVSGGSISSFNYYWSWIRHHPGKGLEWIGYIYYSGSTYSNPSLKSRVTISVDTSKNQFSLTLSSVTAADTAVYYCARGYNWNYFDYWGQGTLVTVSSTRIQNPDPAVYQLRDSKSSDKSVCLFTDFDSQTNVSQSKDSDVYITDKCVLDMRSMDFKSNSAVAWSNKSDFACANAFNNSIIPEDTFFPSPESSCDVKLVEKSFETDTNLNFQILYEILLGKATLYAVLVSALVLMAMVKRKDSRG

SEQ ID NO: 14070 - protein, 893 aa, synthetic construct
MALPVTALLLPLALLLHAARPEVQLVESGGGLVQPGGSLRLSCAASGFSFSDFWMSWVRQAPGKGLEWVATISQAGSEKDYVDSVKGRFTISRDNAKKSLYLQMNSLRAEDTAVYYCASGVYSFDYRGQGTLVTVSSGTGGGGSGGGGSGGGGSEFDDIVLTQSPASLAVSLGQSVTISCRASESVEYYGTSLMQWYQQKPGQPPKLLIYATSNVESGVPARFSGSGSGTDFSLNIHPVEEDDIAMYFCQQSRKLPSTFGGGTKLEIKLEDLKNVFPPEVAVFEPSEAEISHTQKATLVCLATGFYPDHVELSWWVNGKEVHSGVCTDPQPLKEQPALNDSRYCLSSRLRVSATFWQNPRNHFRCQVQFYGLSENDEWTQDRAKPVTQIVSAEAWGRADCGFTSESYQQGVLSATNLSVIGFRILLLKVAGFNLLMTLRLWSSRAKRSGSGATNFSLLKQAGDVEENPGPTSMDWIWRILFLVGAATGAHSGPQLQLQESGPGLVKPSETLSLTCTVSGDSISSGDYYWGWIRQPPGKGLEWIGHIYYSGVTYYNPSLKSRVTISVDTSRNQFSLKLSSVTAADTAVYYCTREDSSNWRSRGQGTLVTVSSGSGGGGSGGGGSGGGGSFEDVRLQESGPGQVKPSQTVSLTCSVTGYSITNGNHWWNWIRQVSGSKLEWIGYISSSGSTDSNPSLKSRISITRDTSKNQLFLQLNSVTTEDIATYYCARGYYFDYWGQGTTLTVSSTRIQNPDPAVYQLRDSKSSDKSVCLFTDFDSQTNVSQSKDSDVYITDKCVLDMRSMDFKSNSAVAWSNKSDFACANAFNNSIIPEDTFFPSPESSCDVKLVEKSFETDTNLNFQILYEILLGKATLYAVLVSALVLMAMVKRKDSRG

SEQ ID NO: 14071 - protein, 892 aa, synthetic construct
MALPVTALLLPLALLLHAARPEVQLVESGGGLVQPGGSLRLSCAASGFSFSDFWMSWVRQAPGKGLEWVATISQAGSEKDYVDSVKGRFTISRDNAKKSLYLQMNSLRAEDTAVYYCASGVYSFDYRGQGTLVTVSSGTGGGGSGGGGSGGGGSEFDIQMTQSPSSLSASVGDRVTITCRASQDVNTAVAWYQQKPGKAPKLLIYSASFLESGVPSRFSGSRSGTDFTLTISSLQPEDFATYYCQQHYTTPPTFGQTKVEIKRLEDLKNVFPPEVAVFEPSEAEISHTQKATLVCLATGFYPDHVELSWWVNGKEVHSGVCTDPQPLKEQPALNDSRYCLSSRLRVSATFWQNPRNHFRCQVQFYGLSENDEWTQDRAKPVTQIVSAEAWGRADCGFTSESYQQGVLSATNLSVIGFRILLLKVAGFNLLMTLRLWSSRAKRSGSGATNFSLLKQAGDVEENPGPTSMDWIWRILFLVGAATGAHSGPQLQLQESGPGLVKPSETLSLTCTVSGDSISSGDYYWGWIRQPPGKGLEWIGHIYYSGVTYYNPSLKSRVTISVDTSRNQFSLKLSSVTAADTAVYYCTREDSSNWRSRGQGTLVTVSSGSGGGGSGGGGSGGGGSFEEVQLVESGGGLVQPGGSLRLSCAASGFNIKDTYIHWVRQAPGKGLEWVARIYPTNGYTRYADSVKGRFTISADTSKNTAYLQMNSLRAEDTAVYYCSRWGGDGFYAMDVWGQGTLVTVSSTRIQNPDPAVYQLRDSKSSDKSVCLFTDFDSQTNVSQSKDSDVYITDKCVLDMRSMDFKSNSAVAWSNKSDFACANAFNNSIIPEDTFFPSPESSCDVKLVEKSFETDTNLNFQILYEILLGKATLYAVLVSALVLMAMVKRKDSRG

SEQ ID NO: 14072 - protein, 891 aa, synthetic construct
MALPVTALLLPLALLLHAARPEVQLVESGGGLVQPGGSLRLSCAASGFSFSDFWMSWVRQAPGKGLEWVATISQAGSEKDYVDSVKGRFTISRDNAKKSLYLQMNSLRAEDTAVYYCASGVYSFDYRGQGTLVTVSSGTGGGGSGGGGSGGGGSEFDQSVLTQPPSVSVAPGKTARIPCEGNYIGSSNVHWYQQKPGQAPVLVIHFDSDRPSGIPDRFSGSNSGNMATLTISRVEAGDEADYYCQVWENHGWVFGGGTKLTVLSLEDLKNVFPPEVAVFEPSEAEISHTQKATLVCLATGFYPDHVELSWWVNGKEVHSGVCTDPQPLKEQPALNDSRYCLSSRLRVSATFWQNPRNHFRCQVQFYGLSENDEWTQDRAKPVTQIVSAEAWGRADCGFTSESYQQGVLSATNLSVIGFRILLLKVAGFNLLMTLRLWSSRAKRSGSGATNFSLLKQAGDVEENPGPTSMDWIWRILFLVGAATGAHSGPQLQLQESGPGLVKPSETLSLTCTVSGDSISSGDYYWGWIRQPPGKGLEWIGHIYYSGVTYYNPSLKSRVTISVDTSRNQFSLKLSSVTAADTAVYYCTREDSSNWRSRGQGTLVTVSSGSGGGGSGGGGSGGGGSFEEVQLVETGGGLVQPGESLRLSCAASGFTFSDYEMNWVRQAPGKGLEWVSYISSSGSTIYYADSVKGRFTIYRDNAKNSLYLQMNSLRAEDTALYYCARAWGVGPPDYWGQGTLVTVSSTRIQNPDPAVYQLRDSKSSDKSVCLFTDFDSQTNVSQSKDSDVYITDKCVLDMRSMDFKSNSAVAWSNKSDFACANAFNNSIIPEDTFFPSPESSCDVKLVEKSFETDTNLNFQILYEILLGKATLYAVLVSALVLMAMVKRKDSRG

SEQ ID NO: 14073 - protein, 899 aa, synthetic construct
MALPVTALLLPLALLLHAARPEVQLVESGGGLVQPGGSLRLSCAASGFSFSDFWMSWVRQAPGKGLEWVATISQAGSEKDYVDSVKGRFTISRDNAKKSLYLQMNSLRAEDTAVYYCASGVYSFDYRGQGTLVTVSSGTGGGGSGGGGSGGGGSEFDIQMTQSPSSLSASVGDTVTITCQANGYLNWYQQRRGKAPKLLIYDGSKLERGVPSRFSGRRWGQEYNLTINNLQPEDIATYFCQVYEFVVPGTRLDLKRTVAAPLEDLKNVFPPEVAVFEPSEAEISHTQKATLVCLATGFYPDHVELSWWVNGKEVHSGVCTDPQPLKEQPALNDSRYCLSSRLRVSATFWQNPRNHFRCQVQFYGLSENDEWTQDRAKPVTQIVSAEAWGRADCGFTSESYQQGVLSATNLSVIGFRILLLKVAGFNLLMTLRLWSSRAKRSGSGATNFSLLKQAGDVEENPGPTSMDWIWRILFLVGAATGAHSGPQLQLQESGPGLVKPSETLSLTCTVSGDSISSGDYYWGWIRQPPGKGLEWIGHIYYSGVTYYNPSLKSRVTISVDTSRNQFSLKLSSVTAADTAVYYCTREDSSNWRSRGQGTLVTVSSGSGGGGSGGGGSGGGGSFEQVQLLQSGAAVTKPGASVRVSCEASGYNIRDYFIHWWRQAPGQGLQWVGWINPKTGQPNNPRQFQGRVSLTRHASWDFDTFSFYMDLKALRSDDTAVYFCARQRSDYWDFDVWGSGTQVTVSSASTKGPTRIQNPDPAVYQLRDSKSSDKSVCLFTDFDSQTNVSQSKDSDVYITDKCVLDMRSMDFKSNSAVAWSNKSDFACANAFNNSIIPEDTFFPSPESSCDVKLVEKSFETDTNLNFQILYEILLGKATLYAVLVSALVLMAMVKRKDSRG

SEQ ID NO: 14074 - protein, 905 aa, synthetic construct
MALPVTALLLPLALLLHAARPEVQLVESGGGLVQPGGSLRLSCAASGFSFSDFWMSWVRQAPGKGLEWVATISQAGSEKDYVDSVKGRFTISRDNAKKSLYLQMNSLRAEDTAVYYCASGVYSFDYRGQGTLVTVSSGTGGGGSGGGGSGGGGSEFQSALTQPPSASGSPGQSITISCTGTSNNFVSWYQQHAGKAPKLVIYDVNKRPSGVPDRFSGSKSGNTASLTVSGLQTDDEAVYYCGSLVGNWDVIFGGGTKLTVLLEDLKNVFPPEVAVFEPSEAEISHTQKATLVCLATGFYPDHVELSWWVNGKEVHSGVCTDPQPLKEQPALNDSRYCLSSRLRVSATFWQNPRNHFRCQVQFYGLSENDEWTQDRAKPVTQIVSAEAWGRADCGFTSESYQQGVLSATNLSVIGFRILLLKVAGFNLLMTLRLWSSRAKRSGSGATNFSLLKQAGDVEENPGPTSMDWIWRILFLVGAATGAHSGPQLQLQESGPGLVKPSETLSLTCTVSGDSISSGDYYWGWIRQPPGKGLEWIGHIYYSGVTYYNPSLKSRVTISVDTSRNQFSLKLSSVTAADTAVYYCTREDSSNWRSRGQGTLVTVSSGSGGGGSGGGGSGGGGSFEQPQLQESGPTLVEASETLSLTCAVSGDSTAACNSFWGWVRQPPGKGLEWVGSLSHCASYWNRGWTYHNPSLKSRLTLALDTPKNLVFLKLNSVTAADTATYYCARFGGEVLRYTDWPKPAWVDLWGRGTLVTVSSTRIQNPDPAVYQLRDSKSSDKSVCLFTDFDSQTNVSQSKDSDVYITDKCVLDMRSMDFKSNSAVAWSNKSDFACANAFNNSIIPEDTFFPSPESSCDVKLVEKSFETDTNLNFQILYEILLGKATLYAVLVSALVLMAMVKRKDSRG

SEQ ID NO: 14075 - protein, 890 aa, synthetic construct
MALPVTALLLPLALLLHAARPEVQLVESGGGLVQPGGSLRLSCAASGFSFSDFWMSWVRQAPGKGLEWVATISQAGSEKDYVDSVKGRFTISRDNAKKSLYLQMNSLRAEDTAVYYCASGVYSFDYRGQGTLVTVSSGTGGGGSGGGGSGGGGSEFEIVLTQSPGTLSLSPGETAIISCRTSQYGSLAWYQQRPGQAPRLVIYSGSTRAAGIPDRFSGSRWGPDYNLTISNLESGDFGVYYCQQYEFFGQGTKVQVDIKRLEDLKNVFPPEVAVFEPSEAEISHTQKATLVCLATGFYPDHVELSWWVNGKEVHSGVCTDPQPLKEQPALNDSRYCLSSRLRVSATFWQNPRNHFRCQVQFYGLSENDEWTQDRAKPVTQIVSAEAWGRADCGFTSESYQQGVLSATNLSVIGFRILLLKVAGFNLLMTLRLWSSRAKRSGSGATNFSLLKQAGDVEENPGPTSMDWIWRILFLVGAATGAHSGPQLQLQESGPGLVKPSETLSLTCTVSGDSISSGDYYWGWIRQPPGKGLEWIGHIYYSGVTYYNPSLKSRVTISVDTSRNQFSLKLSSVTAADTAVYYCTREDSSNWRSRGQGTLVTVSSGSGGGGSGGGGSGGGGSFEQVQLVQSGGQMKKPGESMRISCRASGYEFIDCTLNWIRLAPGKRPEWMGWLKPRGGAVNYARPLQGRVTMTRDVYSDTAFLELRSLTVDDTAVYFCTRGKNCDYNWDFEHWGRGTPVIVSSTRIQNPDPAVYQLRDSKSSDKSVCLFTDFDSQTNVSQSKDSDVYITDKCVLDMRSMDFKSNSAVAWSNKSDFACANAFNNSIIPEDTFFPSPESSCDVKLVEKSFETDTNLNFQILYEILLGKATLYAVLVSALVLMAMVKRKDSRG

SEQ ID NO: 14076 - protein, 900 aa, synthetic construct
MALPVTALLLPLALLLHAARPEVQLVESGGGLVQPGGSLRLSCAASGFSFSDFWMSWVRQAPGKGLEWVATISQAGSEKDYVDSVKGRFTISRDNAKKSLYLQMNSLRAEDTAVYYCASGVYSFDYRGQGTLVTVSSGTGGGGSGGGGSGGGGSEFELVLTQSPGTLSLSAGERATLSCRASQSVSSGSLAWYQQKPGQAPRLLIYGASTRATGIPDRFSGSGSGTDFTLTIGRLEPEDLAVYYCQQYGTSPYTFGQGTKLEILEDLKNVFPPEVAVFEPSEAEISHTQKATLVCLATGFYPDHVELSWWVNGKEVHSGVCTDPQPLKEQPALNDSRYCLSSRLRVSATFWQNPRNHFRCQVQFYGLSENDEWTQDRAKPVTQIVSAEAWGRADCGFTSESYQQGVLSATNLSVIGFRILLLKVAGFNLLMTLRLWSSRAKRSGSGATNFSLLKQAGDVEENPGPTSMDWIWRILFLVGAATGAHSGPQLQLQESGPGLVKPSETLSLTCTVSGDSISSGDYYWGWIRQPPGKGLEWIGHIYYSGVTYYNPSLKSRVTISVDTSRNQFSLKLSSVTAADTAVYYCTREDSSNWRSRGQGTLVTVSSGSGGGGSGGGGSGGGGSFELEQSGAEVKKPGSSVQVSCKASGGTFSMYGFNWVRQAPGHGLEWMGGIIPIFGTSNYAQKFRGRVTFTADQATSTAYMELTNLRSDDTAVYYCARDFGPDWEDGDSYDGSGRGFFDFWGQGTLVTVSSTRIQNPDPAVYQLRDSKSSDKSVCLFTDFDSQTNVSQSKDSDVYITDKCVLDMRSMDFKSNSAVAWSNKSDFACANAFNNSIIPEDTFFPSPESSCDVKLVEKSFETDTNLNFQILYEILLGKATLYAVLVSALVLMAMVKRKDSRG

SEQ ID NO: 14077 - protein, 880 aa, synthetic construct
MALPVTALLLPLALLLHAARPEVQLVESGGGLVQPGGSLRLSCAASGFSFSDFWMSWVRQAPGKGLEWVATISQAGSEKDYVDSVKGRFTISRDNAKKSLYLQMNSLRAEDTAVYYCASGVYSFDYRGQGTLVTVSSGTGGGGSGGGGSGGGGSEFDIQMTQSPSSLSASVGDRVTITCQASQDINNYLNWYQQKPGKAPKLLIYDASNLQTGVPSRFSGSGSGTDFTFTIEDIATYYCQQYTFGPGTKVDIKLEDLKNVFPPEVAVFEPSEAEISHTQKATLVCLATGFYPDHVELSWWVNGKEVHSGVCTDPQPLKEQPALNDSRYCLSSRLRVSATFWQNPRNHFRCQVQFYGLSENDEWTQDRAKPVTQIVSAEAWGRADCGFTSESYQQGVLSATNLSVIGFRILLLKVAGFNLLMTLRLWSSRAKRSGSGATNFSLLKQAGDVEENPGPTSMDWIWRILFLVGAATGAHSGPQLQLQESGPGLVKPSETLSLTCTVSGDSISSGDYYWGWIRQPPGKGLEWIGHIYYSGVTYYNPSLKSRVTISVDTSRNQFSLKLSSVTAADTAVYYCTREDSSNWRSRGQGTLVTVSSGSGGGGSGGGGSGGGGSFEEVQLLESGGGLVQPGGSLRLSCAASGFTFSWYSMTWVRQAPGKGLEWVSSIVPWGDFTQYADSVKGRFTISRDNSKNTLYLQMNSLRAEDTAVYYCAKGPGWGSFDLWGRGTLVTVSSTRIQNPDPAVYQLRDSKSSDKSVCLFTDFDSQTNVSQSKDSDVYITDKCVLDMRSMDFKSNSAVAWSNKSDFACANAFNNSIIPEDTFFPSPESSCDVKLVEKSFETDTNLNFQILYEILLGKATLYAVLVSALVLMAMVKRKDSRG

SEQ ID NO: 14078 - protein, 890 aa, synthetic construct
MALPVTALLLPLALLLHAARPEVQLVESGGGLVQPGGSLRLSCAASGFSFSDFWMSWVRQAPGKGLEWVATISQAGSEKDYVDSVKGRFTISRDNAKKSLYLQMNSLRAEDTAVYYCASGVYSFDYRGQGTLVTVSSGTGGGGSGGGGSGGGGSEFDIQMTQSPSSLSASVGDRVTITCTASLSVSSTYLHWYQQKPGSSPKLWIYSTSNLASGVPSRFSGSGSGTSYTLTISSLQPEDFATYYCHQYHRSPLTFGGGTKVEIKRLEDLKNVFPPEVAVFEPSEAEISHTQKATLVCLATGFYPDHVELSWWVNGKEVHSGVCTDPQPLKEQPALNDSRYCLSSRLRVSATFWQNPRNHFRCQVQFYGLSENDEWTQDRAKPVTQIVSAEAWGRADCGFTSESYQQGVLSATNLSVIGFRILLLKVAGFNLLMTLRLWSSRAKRSGSGATNFSLLKQAGDVEENPGPTSMDWIWRILFLVGAATGAHSGPQLQLQESGPGLVKPSETLSLTCTVSGDSISSGDYYWGWIRQPPGKGLEWIGHIYYSGVTYYNPSLKSRVTISVDTSRNQFSLKLSSVTAADTAVYYCTREDSSNWRSRGQGTLVTVSSGSGGGGSGGGGSGGGGSFEEVQLVESGGGLVQPGGSLRLSCAASGFSLTKYGVHWVRQAPGKGLEWVGVKWAGGSTDYNSALMSRFTISKDNAKNSLYLQMNSLRAEDTAVYYCARDHRDAMDYWGQGTLVTVSSTRIQNPDPAVYQLRDSKSSDKSVCLFTDFDSQTNVSQSKDSDVYITDKCVLDMRSMDFKSNSAVAWSNKSDFACANAFNNSIIPEDTFFPSPESSCDVKLVEKSFETDTNLNFQILYEILLGKATLYAVLVSALVLMAMVKRKDSRG

SEQ ID NO: 14079 - protein, 894 aa, synthetic construct
MALPVTALLLPLALLLHAARPEVQLVESGGGLVQPGGSLRLSCAASGFSFSDFWMSWVRQAPGKGLEWVATISQAGSEKDYVDSVKGRFTISRDNAKKSLYLQMNSLRAEDTAVYYCASGVYSFDYRGQGTLVTVSSGTGGGGSGGGGSGGGGSEFDIQMTQSPSSLSASVGDRVTITCKASQDVGTAVAWYQQKPGKAPKLLIYSASYRSTGVPSRFSGSGSGTDFTLTISSLQPEDFATYYCQHHYSAPWTFGGGTKVEIKLEDLKNVFPPEVAVFEPSEAEISHTQKATLVCLATGFYPDHVELSWWVNGKEVHSGVCTDPQPLKEQPALNDSRYCLSSRLRVSATFWQNPRNHFRCQVQFYGLSENDEWTQDRAKPVTQIVSAEAWGRADCGFTSESYQQGVLSATNLSVIGFRILLLKVAGFNLLMTLRLWSSRAKRSGSGATNFSLLKQAGDVEENPGPTSMDWIWRILFLVGAATGAHSGPQLQLQESGPGLVKPSETLSLTCTVSGDSISSGDYYWGWIRQPPGKGLEWIGHIYYSGVTYYNPSLKSRVTISVDTSRNQFSLKLSSVTAADTAVYYCTREDSSNWRSRGQGTLVTVSSGSGGGGSGGGGSGGGGSFEEVQLVESGGGLVQPGGSLRLSCAASGFTFSRNGMSWVRQAPGKGLEWVATVSSGGSYIYYADSVKGRFTISRDNAKNSLYLQMNSLRAEDTAVYYCARQGTTALATRFFDVWGQGTLVTVSSTRIQNPDPAVYQLRDSKSSDKSVCLFTDFDSQTNVSQSKDSDVYITDKCVLDMRSMDFKSNSAVAWSNKSDFACANAFNNSIIPEDTFFPSPESSCDVKLVEKSFETDTNLNFQILYEILLGKATLYAVLVSALVLMAMVKRKDSRG

SEQ ID NO: 14080 - protein, 890 aa, synthetic construct
MALPVTALLLPLALLLHAARPEVQLVESGGGLVQPGGSLRLSCAASGFSFSDFWMSWVRQAPGKGLEWVATISQAGSEKDYVDSVKGRFTISRDNAKKSLYLQMNSLRAEDTAVYYCASGVYSFDYRGQGTLVTVSSGTGGGGSGGGGSGGGGSEFDIQMTQSPPSLSASVGGKVTITCKASQDIDRYMAWYQDKPGKGPKLLIHDTSTLQPGIPSRFSGSGSGRDYSFSISNLEPEDIATYYCLQYDNLWTFGGGTKLEIKRLEDLKNVFPPEVAVFEPSEAEISHTQKATLVCLATGFYPDHVELSWWVNGKEVHSGVCTDPQPLKEQPALNDSRYCLSSRLRVSATFWQNPRNHFRCQVQFYGLSENDEWTQDRAKPVTQIVSAEAWGRADCGFTSESYQQGVLSATNLSVIGFRILLLKVAGFNLLMTLRLWSSRAKRSGSGATNFSLLKQAGDVEENPGPTSMDWIWRILFLVGAATGAHSGPQLQLQESGPGLVKPSETLSLTCTVSGDSISSGDYYWGWIRQPPGKGLEWIGHIYYSGVTYYNPSLKSRVTISVDTSRNQFSLKLSSVTAADTAVYYCTREDSSNWRSRGQGTLVTVSSGSGGGGSGGGGSGGGGSFEQVQLVQSGAELVKPGASVKMSCKASGYIFTNYNIHWVKKSPGQGLEWIGAIYPGNGDAPYSQKFQDRATLTADTSSSTTYMELSSLTSEDSAVYYCVRANWDVAFAYWGQGTLVSVSSTRIQNPDPAVYQLRDSKSSDKSVCLFTDFDSQTNVSQSKDSDVYITDKCVLDMRSMDFKSNSAVAWSNKSDFACANAFNNSIIPEDTFFPSPESSCDVKLVEKSFETDTNLNFQILYEILLGKATLYAVLVSALVLMAMVKRKDSRG

SEQ ID NO: 14081 - protein, 891 aa, synthetic construct
MALPVTALLLPLALLLHAARPEVQLVESGGGLVQPGGSLRLSCAASGFSFSDFWMSWVRQAPGKGLEWVATISQAGSEKDYVDSVKGRFTISRDNAKKSLYLQMNSLRAEDTAVYYCASGVYSFDYRGQGTLVTVSSGTGGGGSGGGGSGGGGSEFDIQMTQSPASLSASVGETVTITCRVSGNIHNYLAWYQQKQGKSPQLLVYNAKTLADGVPSRFSGSGSGTQYSLKINSLQPEDFGSYYCQHFWSNPYTFGGGTKLEIKLEDLKNVFPPEVAVFEPSEAEISHTQKATLVCLATGFYPDHVELSWWVNGKEVHSGVCTDPQPLKEQPALNDSRYCLSSRLRVSATFWQNPRNHFRCQVQFYGLSENDEWTQDRAKPVTQIVSAEAWGRADCGFTSESYQQGVLSATNLSVIGFRILLLKVAGFNLLMTLRLWSSRAKRSGSGATNFSLLKQAGDVEENPGPTSMDWIWRILFLVGAATGAHSGPQLQLQESGPGLVKPSETLSLTCTVSGDSISSGDYYWGWIRQPPGKGLEWIGHIYYSGVTYYNPSLKSRVTISVDTSRNQFSLKLSSVTAADTAVYYCTREDSSNWRSRGQGTLVTVSSGSGGGGSGGGGSGGGGSFEQVQLQQSGASVKVSCKASELVRPGTGYAFTNYLIEWVKQRPGQGLEWIGVINPGSGGTNYNEKFKGKATLTADKSSSTAYMQLSSLTSDDSAVYFCARYRSYDWYFDVWGAGTTVTVSSTRIQNPDPAVYQLRDSKSSDKSVCLFTDFDSQTNVSQSKDSDVYITDKCVLDMRSMDFKSNSAVAWSNKSDFACANAFNNSIIPEDTFFPSPESSCDVKLVEKSFETDTNLNFQILYEILLGKATLYAVLVSALVLMAMVKRKDSRG

SEQ ID NO: 14082 - protein, 890 aa, synthetic construct
MALPVTALLLPLALLLHAARPEVQLVESGGGLVQPGGSLRLSCAASGFSFSDFWMSWVRQAPGKGLEWVATISQAGSEKDYVDSVKGRFTISRDNAKKSLYLQMNSLRAEDTAVYYCASGVYSFDYRGQGTLVTVSSGTGGGGSGGGGSGGGGSEFDIQMTQSFSSLSASVGDRVTITCRASQDISNYLNWYQQKPGKAPKLLIYYTSRLHSGVPSRFSGSGSGTDYTLTISSLQPEDFATYFCQQGNTLPWTFGGGTKLEIKRLEDLKNVFPPEVAVFEPSEAEISHTQKATLVCLATGFYPDHVELSWWVNGKEVHSGVCTDPQPLKEQPALNDSRYCLSSRLRVSATFWQNPRNHFRCQVQFYGLSENDEWTQDRAKPVTQIVSAEAWGRADCGFTSESYQQGVLSATNLSVIGFRILLLKVAGFNLLMTLRLWSSRAKRSGSGATNFSLLKQAGDVEENPGPTSMDWIWRILFLVGAATGAHSGPQLQLQESGPGLVKPSETLSLTCTVSGDSISSGDYYWGWIRQPPGKGLEWIGHIYYSGVTYYNPSLKSRVTISVDTSRNQFSLKLSSVTAADTAVYYCTREDSSNWRSRGQGTLVTVSSGSGGGGSGGGGSGGGGSFEEVQLVQSGGGLVQSGGSLRLSCRASGYTFTRYWMLWVRQRPGKGLEWVAEINPRNDRTNYNEKFKTRFTISVDRSKNTLYLQMDSLRAEDTAVYFCALGGGYAMDYWGQGTLVTVSSTRIQNPDPAVYQLRDSKSSDKSVCLFTDFDSQTNVSQSKDSDVYITDKCVLDMRSMDFKSNSAVAWSNKSDFACANAFNNSIIPEDTFFPSPESSCDVKLVEKSFETDTNLNFQILYEILLGKATLYAVLVSALVLMAMVKRKDSRG

SEQ ID NO: 14083 - protein, 891 aa, synthetic construct
MALPVTALLLPLALLLHAARPEVQLVESGGGLVQPGGSLRLSCAASGFSFSDFWMSWVRQAPGKGLEWVATISQAGSEKDYVDSVKGRFTISRDNAKKSLYLQMNSLRAEDTAVYYCASGVYSFDYRGQGTLVTVSSGTGGGGSGGGGSGGGGSEFDIQMTQSPASLSASVGETVTIICRASVNIYSYLAWYQQKQGKSPQLLVYNAKILAEGVPSRFSGSGSGTQFSLKINSLQPEDFGSYYCQHHYGTFTFGSGTKLEIKRLEDLKNVFPPEVAVFEPSEAEISHTQKATLVCLATGFYPDHVELSWWVNGKEVHSGVCTDPQPLKEQPALNDSRYCLSSRLRVSATFWQNPRNHFRCQVQFYGLSENDEWTQDRAKPVTQIVSAEAWGRADCGFTSESYQQGVLSATNLSVIGFRILLLKVAGFNLLMTLRLWSSRAKRSGSGATNFSLLKQAGDVEENPGPTSMDWIWRILFLVGAATGAHSGPQLQLQESGPGLVKPSETLSLTCTVSGDSISSGDYYWGWIRQPPGKGLEWIGHIYYSGVTYYNPSLKSRVTISVDTSRNQFSLKLSSVTAADTAVYYCTREDSSNWRSRGQGTLVTVSSGSGGGGSGGGGSGGGGSFEQVQLKESGPGLVAPSQSLSITCTISGFSLTSYGVHWVRQPPGKGLEWLVVIWSDGSTTYNSALKSRLSISKDNSKSQVFLKMNSLQTDDTAIYYCASHYGSTLAFASWGHGTLVTVSAATRIQNPDPAVYQLRDSKSSDKSVCLFTDFDSQTNVSQSKDSDVYITDKCVLDMRSMDFKSNSAVAWSNKSDFACANAFNNSIIPEDTFFPSPESSCDVKLVEKSFETDTNLNFQILYEILLGKATLYAVLVSALVLMAMVKRKDSRG

SEQ ID NO: 14084 - protein, 899 aa, synthetic construct
MALPVTALLLPLALLLHAARPEVQLVESGGGLVQPGGSLRLSCAASGFSFSDFWMSWVRQAPGKGLEWVATISQAGSEKDYVDSVKGRFTISRDNAKKSLYLQMNSLRAEDTAVYYCASGVYSFDYRGQGTLVTVSSGTGGGGSGGGGSGGGGSEFDIVMTQSHKFMSTSVGDRVSVTCKASQNVGNNVAWYQQKPGQSPKVLIYSASYRYSGVPDRFTGSGSGTDFTLTISNVQSEDLAEYFCQQYNTYPFTFGSGTKLEIKLEDLKNVFPPEVAVFEPSEAEISHTQKATLVCLATGFYPDHVELSWWVNGKEVHSGVCTDPQPLKEQPALNDSRYCLSSRLRVSATFWQNPRNHFRCQVQFYGLSENDEWTQDRAKPVTQIVSAEAWGRADCGFTSESYQQGVLSATNLSVIGFRILLLKVAGFNLLMTLRLWSSRAKRSGSGATNFSLLKQAGDVEENPGPTSMDWIWRILFLVGAATGAHSGPQLQLQESGPGLVKPSETLSLTCTVSGDSISSGDYYWGWIRQPPGKGLEWIGHIYYSGVTYYNPSLKSRVTISVDTSRNQFSLKLSSVTAADTAVYYCTREDSSNWRSRGQGTLVTVSSGSGGGGSGGGGSGGGGSFEEVQLEESGGGLVQPGGSMKLSCVASGFTFSNYWMNWVRQSPEKGLEWVAEIRFKSHNYATHFAESVKGRFTISRDDSKSSVYLQMNNLRAEDTGIYYCTRRIGNSDYDWWYFDVWGAGTSVTVSSASTRIQNPDPAVYQLRDSKSSDKSVCLFTDFDSQTNVSQSKDSDVYITDKCVLDMRSMDFKSNSAVAWSNKSDFACANAFNNSIIPEDTFFPSPESSCDVKLVEKSFETDTNLNFQILYEILLGKATLYAVLVSALVLMAMVKRKDSRG

SEQ ID NO: 14085 - protein, 892 aa, synthetic construct
MALPVTALLLPLALLLHAARPEVQLVESGGGLVQPGGSLRLSCAASGFSFSDFWMSWVRQAPGKGLEWVATISQAGSEKDYVDSVKGRFTISRDNAKKSLYLQMNSLRAEDTAVYYCASGVYSFDYRGQGTLVTVSSGTGGGGSGGGGSGGGGSEFDQIVLTQSPAIMSASPGEKVTISCSASSSVSYMYWYQQKPGSSPKPWIYRTSNLASGVPARFSGSGSGTSYSLTISNMEAEDAAAYYCQQYHSYPTTFGGGTKLEVKLEDLKNVFPPEVAVFEPSEAEISHTQKATLVCLATGFYPDHVELSWWVNGKEVHSGVCTDPQPLKEQPALNDSRYCLSSRLRVSATFWQNPRNHFRCQVQFYGLSENDEWTQDRAKPVTQIVSAEAWGRADCGFTSESYQQGVLSATNLSVIGFRILLLKVAGFNLLMTLRLWSSRAKRSGSGATNFSLLKQAGDVEENPGPTSMDWIWRILFLVGAATGAHSGPQLQLQESGPGLVKPSETLSLTCTVSGDSISSGDYYWGWIRQPPGKGLEWIGHIYYSGVTYYNPSLKSRVTISVDTSRNQFSLKLSSVTAADTAVYYCTREDSSNWRSRGQGTLVTVSSGSGGGGSGGGGSGGGGSFEEVQLVESGGGLVQPKGSLKLSCAASGFSFNTYAMNWVRQAPGKGLEWIAHIRSKSNNFATYYADSVKDRFSISRDASENILFLQMNNLKTEDTAMYYCVRQGGDFPMDYWGQGTSVTVSSTRIQNPDPAVYQLRDSKSSDKSVCLFTDFDSQTNVSQSKDSDVYITDKCVLDMRSMDFKSNSAVAWSNKSDFACANAFNNSIIPEDTFFPSPESSCDVKLVEKSFETDTNLNFQILYEILLGKATLYAVLVSALVLMAMVKRKDSRG

SEQ ID NO: 14086 - protein, 891 aa, synthetic construct
MALPVTALLLPLALLLHAARPEVQLVESGGGLVQPGGSLRLSCAASGFSFSDFWMSWVRQAPGKGLEWVATISQAGSEKDYVDSVKGRFTISRDNAKKSLYLQMNSLRAEDTAVYYCASGVYSFDYRGQGTLVTVSSGTGGGGSGGGGSGGGGSEFDDIQMTQSSSSFSVSLGDRVTITCMASEDIYIRLAWYQQKPGNAPRLLISAATSLETGVPSRFSGSGSGKDYTLSITSLQTEDVGTYYCQQYWSSPWTFGGGTKLEINLEDLKNVFPPEVAVFEPSEAEISHTQKATLVCLATGFYPDHVELSWWVNGKEVHSGVCTDPQPLKEQPALNDSRYCLSSRLRVSATFWQNPRNHFRCQVQFYGLSENDEWTQDRAKPVTQIVSAEAWGRADCGFTSESYQQGVLSATNLSVIGFRILLLKVAGFNLLMTLRLWSSRAKRSGSGATNFSLLKQAGDVEENPGPTSMDWIWRILFLVGAATGAHSGPQLQLQESGPGLVKPSETLSLTCTVSGDSISSGDYYWGWIRQPPGKGLEWIGHIYYSGVTYYNPSLKSRVTISVDTSRNQFSLKLSSVTAADTAVYYCTREDSSNWRSRGQGTLVTVSSGSGGGGSGGGGSGGGGSFEDVQLQESGPGLVKPSQSLSLTCTVTGYSITSDYTWNWIRQFPGNKLEWMGYITYSGSTSYNPSLKSRNSITRDTSKNQFFLQLNSVTTEDTATYYCARLGRRYTMDYWGQGTSVTVSSTRIQNPDPAVYQLRDSKSSDKSVCLFTDFDSQTNVSQSKDSDVYITDKCVLDMRSMDFKSNSAVAWSNKSDFACANAFNNSIIPEDTFFPSPESSCDVKLVEKSFETDTNLNFQILYEILLGKATLYAVLVSALVLMAMVKRKDSRG

SEQ ID NO: 14087 - protein, 894 aa, synthetic construct
MALPVTALLLPLALLLHAARPEVQLVESGGGLVQPGGSLRLSCAASGFSFSDFWMSWVRQAPGKGLEWVATISQAGSEKDYVDSVKGRFTISRDNAKKSLYLQMNSLRAEDTAVYYCASGVYSFDYRGQGTLVTVSSGTGGGGSGGGGSGGGGSEFDDIQMTQSPSSLSASVGDRVTITCRASQSISSYLNWYQQKPGKAPKLLIYDASNLETGVPSRFSGSGSGTDFTFTISSLQPEDIATYYCQQYDNLPLTFGGGTKVDIKRLEDLKNVFPPEVAVFEPSEAEISHTQKATLVCLATGFYPDHVELSWWVNGKEVHSGVCTDPQPLKEQPALNDSRYCLSSRLRVSATFWQNPRNHFRCQVQFYGLSENDEWTQDRAKPVTQIVSAEAWGRADCGFTSESYQQGVLSATNLSVIGFRILLLKVAGFNLLMTLRLWSSRAKRSGSGATNFSLLKQAGDVEENPGPTSMDWIWRILFLVGAATGAHSGPQLQLQESGPGLVKPSETLSLTCTVSGDSISSGDYYWGWIRQPPGKGLEWIGHIYYSGVTYYNPSLKSRVTISVDTSRNQFSLKLSSVTAADTAVYYCTREDSSNWRSRGQGTLVTVSSGSGGGGSGGGGSGGGGSFEQVQLVESGGGVVQPGRSLRLSCAASGFTFSSYAMHWVRQAPGKGLEWVAVISYDGSNKYYADSVKGRFTISRDNSKNTLYLQMNSLRAEDTAVYYCARAHNSSSWSFDYWGQGTLVTVSSTRIQNPDPAVYQLRDSKSSDKSVCLFTDFDSQTNVSQSKDSDVYITDKCVLDMRSMDFKSNSAVAWSNKSDFACANAFNNSIIPEDTFFPSPESSCDVKLVEKSFETDTNLNFQILYEILLGKATLYAVLVSALVLMAMVKRKDSRG

SEQ ID NO: 14088 - protein, 903 aa, synthetic construct
MALPVTALLLPLALLLHAARPEVQLVESGGGLVQPGGSLRLSCAASGFSFSDFWMSWVRQAPGKGLEWVATISQAGSEKDYVDSVKGRFTISRDNAKKSLYLQMNSLRAEDTAVYYCASGVYSFDYRGQGTLVTVSSGTGGGGSGGGGSGGGGSEFDDVVMTQSPLSLPVSLGDQASISCRSSQRLVHSNGNTYLHWYLQKPGQSPKLLIYRVSNRFPGVPDRFSGSGSGTDFTLKISRVEAEDLGIYFCSQSTHVPYTFGGGTKLEIKRLEDLKNVFPPEVAVFEPSEAEISHTQKATLVCLATGFYPDHVELSWWVNGKEVHSGVCTDPQPLKEQPALNDSRYCLSSRLRVSATFWQNPRNHFRCQVQFYGLSENDEWTQDRAKPVTQIVSAEAWGRADCGFTSESYQQGVLSATNLSVIGFRILLLKVAGFNLLMTLRLWSSRAKRSGSGATNFSLLKQAGDVEENPGPTSMDWIWRILFLVGAATGAHSGPQLQLQESGPGLVKPSETLSLTCTVSGDSISSGDYYWGWIRQPPGKGLEWIGHIYYSGVTYYNPSLKSRVTISVDTSRNQFSLKLSSVTAADTAVYYCTREDSSNWRSRGQGTLVTVSSGSGGGGSGGGGSGGGGSFEEVRLQQSGPDLIKPGASVKMSCKASGYTFTGYVMHWVKQRPGQGLEWIGFINPYNDDIQSNERFRGKATLTSDKSSTTAYMELSSLTSEDSAVYYCARGAGYNFDGAYRFFDFWGQGTTLTVSSTRIQNPDPAVYQLRDSKSSDKSVCLFTDFDSQTNVSQSKDSDVYITDKCVLDMRSMDFKSNSAVAWSNKSDFACANAFNNSIIPEDTFFPSPESSCDVKLVEKSFETDTNLNFQILYEILLGKATLYAVLVSALVLMAMVKRKDSRG

SEQ ID NO: 14089 - protein, 894 aa, synthetic construct
MALPVTALLLPLALLLHAARPEVQLVESGGGLVQPGGSLRLSCAASGFSFSDFWMSWVRQAPGKGLEWVATISQAGSEKDYVDSVKGRFTISRDNAKKSLYLQMNSLRAEDTAVYYCASGVYSFDYRGQGTLVTVSSGTGGGGSGGGGSGGGGSEFDSYELTQPPSVSVSPGQTATISCSGDQLGGKYGHWYQKKPGQSPVLVLYQDRKRPAGIPERFSGSSSGNTITLTISGTQAVDEADYYCQAWDTNLGGVFGGGTKVTVLGQLEDLKNVFPPEVAVFEPSEAEISHTQKATLVCLATGFYPDHVELSWWVNGKEVHSGVCTDPQPLKEQPALNDSRYCLSSRLRVSATFWQNPRNHFRCQVQFYGLSENDEWTQDRAKPVTQIVSAEAWGRADCGFTSESYQQGVLSATNLSVIGFRILLLKVAGFNLLMTLRLWSSRAKRSGSGATNFSLLKQAGDVEENPGPTSMDWIWRILFLVGAATGAHSGPQLQLQESGPGLVKPSETLSLTCTVSGDSISSGDYYWGWIRQPPGKGLEWIGHIYYSGVTYYNPSLKSRVTISVDTSRNQFSLKLSSVTAADTAVYYCTREDSSNWRSRGQGTLVTVSSGSGGGGSGGGGSGGGGSFEQVQLVESGAEVKKPGASVKVSCKASGYTFTGYYMHWVRQAPGQGLEWMGRINPNSGGTNYAQKFQGRVTMTRDTSISTAYMELSRLRSDDTAVYYCASPRGRGSAFDIWGQGTLVTVSSTRIQNPDPAVYQLRDSKSSDKSVCLFTDFDSQTNVSQSKDSDVYITDKCVLDMRSMDFKSNSAVAWSNKSDFACANAFNNSIIPEDTFFPSPESSCDVKLVEKSFETDTNLNFQILYEILLGKATLYAVLVSALVLMAMVKRKDSRG

SEQ ID NO: 14090 - protein, 897 aa, synthetic construct
MALPVTALLLPLALLLHAARPEVQLVESGGGLVQPGGSLRLSCAASGFSFSDFWMSWVRQAPGKGLEWVATISQAGSEKDYVDSVKGRFTISRDNAKKSLYLQMNSLRAEDTAVYYCASGVYSFDYRGQGTLVTVSSGTGGGGSGGGGSGGGGSEFDNFMLTQPHSVSESPGKTVTISCTRSSGSIASKYVQWYQQRPGSSPTTVIYEDNQRPSGVPDRFSGSIDTSSNSASLTISGLRTEDEADYYCHSYDSNNHSVFGGGTKVTVLGQLEDLKNVFPPEVAVFEPSEAEISHTQKATLVCLATGFYPDHVELSWWVNGKEVHSGVCTDPQPLKEQPALNDSRYCLSSRLRVSATFWQNPRNHFRCQVQFYGLSENDEWTQDRAKPVTQIVSAEAWGRADCGFTSESYQQGVLSATNLSVIGFRILLLKVAGFNLLMTLRLWSSRAKRSGSGATNFSLLKQAGDVEENPGPTSMDWIWRILFLVGAATGAHSGPQLQLQESGPGLVKPSETLSLTCTVSGDSISSGDYYWGWIRQPPGKGLEWIGHIYYSGVTYYNPSLKSRVTISVDTSRNQFSLKLSSVTAADTAVYYCTREDSSNWRSRGQGTLVTVSSGSGGGGSGGGGSGGGGSFEEVQLVESGGGVVQPGGSLRLSCAASGFTFSSYAMSWVRQAPGKGLEWVSAISGSGGSTYYADSVKGRFSISRDNSKNTLYLQMNSLRAEDTAVYYCARTRSSGAFDIWGQGTLVTVSSTRIQNPDPAVYQLRDSKSSDKSVCLFTDFDSQTNVSQSKDSDVYITDKCVLDMRSMDFKSNSAVAWSNKSDFACANAFNNSIIPEDTFFPSPESSCDVKLVEKSFETDTNLNFQILYEILLGKATLYAVLVSALVLMAMVKRKDSRG

SEQ ID NO: 14091 - protein, 892 aa, synthetic construct
MALPVTALLLPLALLLHAARPEVQLVESGGGLVQPGGSLRLSCAASGFSFSDFWMSWVRQAPGKGLEWVATISQAGSEKDYVDSVKGRFTISRDNAKKSLYLQMNSLRAEDTAVYYCASGVYSFDYRGQGTLVTVSSGTGGGGSGGGGSGGGGSEFDIQMNQSPSSLSASLGDTITITCHASQNINVWLSWYQQKPGNIPKLLIYKASNLHTGVPSRFSGSGSGTGFTITISSLQPEDIATYYCQQGQSYPWTFGGGTKLEIKRLEDLKNVFPPEVAVFEPSEAEISHTQKATLVCLATGFYPDHVELSWWVNGKEVHSGVCTDPQPLKEQPALNDSRYCLSSRLRVSATFWQNPRNHFRCQVQFYGLSENDEWTQDRAKPVTQIVSAEAWGRADCGFTSESYQQGVLSATNLSVIGFRILLLKVAGFNLLMTLRLWSSRAKRSGSGATNFSLLKQAGDVEENPGPTSMDWIWRILFLVGAATGAHSGPQLQLQESGPGLVKPSETLSLTCTVSGDSISSGDYYWGWIRQPPGKGLEWIGHIYYSGVTYYNPSLKSRVTISVDTSRNQFSLKLSSVTAADTAVYYCTREDSSNWRSRGQGTLVTVSSGSGGGGSGGGGSGGGGSFEEVQLQQSGPELVKPGASVKISCKASGYSFTGYFMNWVKQSHGKSLEYIGRFNPYNGETLYNQKFKGKATLTVDKSSSTVHMELLSVTSEDSAVYYCGRSGNDDAMDYWGQGTSVTVSSATRIQNPDPAVYQLRDSKSSDKSVCLFTDFDSQTNVSQSKDSDVYITDKCVLDMRSMDFKSNSAVAWSNKSDFACANAFNNSIIPEDTFFPSPESSCDVKLVEKSFETDTNLNFQILYEILLGKATLYAVLVSALVLMAMVKRKDSRG

SEQ ID NO: 14092 - protein, 893 aa, synthetic construct
MALPVTALLLPLALLLHAARPEVQLVESGGGLVQPGGSLRLSCAASGFSFSDFWMSWVRQAPGKGLEWVATISQAGSEKDYVDSVKGRFTISRDNAKKSLYLQMNSLRAEDTAVYYCASGVYSFDYRGQGTLVTVSSGTGGGGSGGGGSGGGGSEFEIVLTQSPATLSLSPGERATLSCRASQSVRSYLAWYQQKPGQAPRLLIYDASNRATGIPARFSGSGSGTDFTLTISSLEPEDFAVYYCQQRSNWPPTFGQGTKVEIKLEDLKNVFPPEVAVFEPSEAEISHTQKATLVCLATGFYPDHVELSWWVNGKEVHSGVCTDPQPLKEQPALNDSRYCLSSRLRVSATFWQNPRNHFRCQVQFYGLSENDEWTQDRAKPVTQIVSAEAWGRADCGFTSESYQQGVLSATNLSVIGFRILLLKVAGFNLLMTLRLWSSRAKRSGSGATNFSLLKQAGDVEENPGPTSMDWIWRILFLVGAATGAHSGPQLQLQESGPGLVKPSETLSLTCTVSGDSISSGDYYWGWIRQPPGKGLEWIGHIYYSGVTYYNPSLKSRVTISVDTSRNQFSLKLSSVTAADTAVYYCTREDSSNWRSRGQGTLVTVSSGSGGGGSGGGGSGGGGSFEQLQVQESGPGLVKPSETLSLTCTVSGGSISNSYFSWGWIRQPPGKGLEWIGSFYYGEKTYYNPSLKSRATISIDTSKSQFSLKLSSVTAADTAVYYCPRGPTMIRGVIDSWGQGTLVTVSSTRIQNPDPAVYQLRDSKSSDKSVCLFTDFDSQTNVSQSKDSDVYITDKCVLDMRSMDFKSNSAVAWSNKSDFACANAFNNSIIPEDTFFPSPESSCDVKLVEKSFETDTNLNFQILYEILLGKATLYAVLVSALVLMAMVKRKDSRG

SEQ ID NO: 14093 - protein, 902 aa, synthetic construct
MALPVTALLLPLALLLHAARPEVQLVESGGGLVQPGGSLRLSCAASGFSFSDFWMSWVRQAPGKGLEWVATISQAGSEKDYVDSVKGRFTISRDNAKKSLYLQMNSLRAEDTAVYYCASGVYSFDYRGQGTLVTVSSGTGGGGSGGGGSGGGGSEFDIVMTQTPLSLPVTPGEPASISCRSSRSLLDSDDGNTYLDWYLQKPGQSPQLLIYTLSYRASGVPDRFSGSGSGTDFTLKISRVEAEDVGVYYCMQRVEFPITFGQGTRLEIKRLEDLKNVFPPEVAVFEPSEAEISHTQKATLVCLATGFYPDHVELSWWVNGKEVHSGVCTDPQPLKEQPALNDSRYCLSSRLRVSATFWQNPRNHFRCQVQFYGLSENDEWTQDRAKPVTQIVSAEAWGRADCGFTSESYQQGVLSATNLSVIGFRILLLKVAGFNLLMTLRLWSSRAKRSGSGATNFSLLKQAGDVEENPGPTSMDWIWRILFLVGAATGAHSGPQLQLQESGPGLVKPSETLSLTCTVSGDSISSGDYYWGWIRQPPGKGLEWIGHIYYSGVTYYNPSLKSRVTISVDTSRNQFSLKLSSVTAADTAVYYCTREDSSNWRSRGQGTLVTVSSGSGGGGSGGGGSGGGGSFEQVQLVESGGGVVQPGRSLRLSCAASGFIFSRYGMHWVRQAPGKGLKWVAVIWYDGSNKLYADSVKGRFTISRDNSKNTLYLQMNSLRAEDTAVYYCARDYYDNSRHHWGFDYWGQGTLVTVSSTRIQNPDPAVYQLRDSKSSDKSVCLFTDFDSQTNVSQSKDSDVYITDKCVLDMRSMDFKSNSAVAWSNKSDFACANAFNNSIIPEDTFFPSPESSCDVKLVEKSFETDTNLNFQILYEILLGKATLYAVLVSALVLMAMVKRKDSRG

SEQ ID NO: 14094 - protein, 892 aa, synthetic construct
MALPVTALLLPLALLLHAARPEVQLVESGGGLVQPGGSLRLSCAASGFSFSDFWMSWVRQAPGKGLEWVATISQAGSEKDYVDSVKGRFTISRDNAKKSLYLQMNSLRAEDTAVYYCASGVYSFDYRGQGTLVTVSSGTGGGGSGGGGSGGGGSEFEIQMTQSPSSMSASLGDTITITCQATQDIFKNLNWYQQKPGKPPSLLIYYATELAEGVPSRFSGSGSGSDYSLTISNLESEDFAAYYCLQFFEFPFTFGSGTKLEMKLEDLKNVFPPEVAVFEPSEAEISHTQKATLVCLATGFYPDHVELSWWVNGKEVHSGVCTDPQPLKEQPALNDSRYCLSSRLRVSATFWQNPRNHFRCQVQFYGLSENDEWTQDRAKPVTQIVSAEAWGRADCGFTSESYQQGVLSATNLSVIGFRILLLKVAGFNLLMTLRLWSSRAKRSGSGATNFSLLKQAGDVEENPGPTSMDWIWRILFLVGAATGAHSGPQLQLQESGPGLVKPSETLSLTCTVSGDSISSGDYYWGWIRQPPGKGLEWIGHIYYSGVTYYNPSLKSRVTISVDTSRNQFSLKLSSVTAADTAVYYCTREDSSNWRSRGQGTLVTVSSGSGGGGSGGGGSGGGGSFEQVQLQQSGAELVRPGTSVKVSCKASGYVFTNYWIEWIKQRPGQGLEWIGVMNPGSGETTYNEKFKGKATLTADKSSSTAYMQLSSLTSVDSAVYFCARDHDRDYYAMDYWGQGTSVTVSSTRIQNPDPAVYQLRDSKSSDKSVCLFTDFDSQTNVSQSKDSDVYITDKCVLDMRSMDFKSNSAVAWSNKSDFACANAFNNSIIPEDTFFPSPESSCDVKLVEKSFETDTNLNFQILYEILLGKATLYAVLVSALVLMAMVKRKDSRG

SEQ ID NO: 14095 - protein, 889 aa, synthetic construct
MALPVTALLLPLALLLHAARPEVQLVESGGGLVQPGGSLRLSCAASGFSFSDFWMSWVRQAPGKGLEWVATISQAGSEKDYVDSVKGRFTISRDNAKKSLYLQMNSLRAEDTAVYYCASGVYSFDYRGQGTLVTVSSGTGGGGSGGGGSGGGGSEFDILLTQSPAILSVSPGERVSFSCRASQNIGTSIHWYQQRTNGSPRLLIKYASESVSGIPSRFSGSGSGTDFTLSINSVESEDIADYYCQHTNSWPTTFGGGTKLEIKRLEDLKNVFPPEVAVFEPSEAEISHTQKATLVCLATGFYPDHVELSWWVNGKEVHSGVCTDPQPLKEQPALNDSRYCLSSRLRVSATFWQNPRNHFRCQVQFYGLSENDEWTQDRAKPVTQIVSAEAWGRADCGFTSESYQQGVLSATNLSVIGFRILLLKVAGFNLLMTLRLWSSRAKRSGSGATNFSLLKQAGDVEENPGPTSMDWIWRILFLVGAATGAHSGPQLQLQESGPGLVKPSETLSLTCTVSGDSISSGDYYWGWIRQPPGKGLEWIGHIYYSGVTYYNPSLKSRVTISVDTSRNQFSLKLSSVTAADTAVYYCTREDSSNWRSRGQGTLVTVSSGSGGGGSGGGGSGGGGSFEQVQLQQSDAELVKPGASVKISCKASGYTFTDHAIHWVKQKPEQGLEWIGYFSPGNGDIKYNEKFKGKATLTADKSSSTAYMQLNSLTSEDSAVYFCKRSYGNYDYWGQGTTLTVSSTRIQNPDPAVYQLRDSKSSDKSVCLFTDFDSQTNVSQSKDSDVYITDKCVLDMRSMDFKSNSAVAWSNKSDFACANAFNNSIIPEDTFFPSPESSCDVKLVEKSFETDTNLNFQILYEILLGKATLYAVLVSALVLMAMVKRKDSRG

SEQ ID NO: 14096 - protein, 894 aa, synthetic construct
MALPVTALLLPLALLLHAARPEVQLVESGGGLVQPGGSLRLSCAASGFSFSDFWMSWVRQAPGKGLEWVATISQAGSEKDYVDSVKGRFTISRDNAKKSLYLQMNSLRAEDTAVYYCASGVYSFDYRGQGTLVTVSSGTGGGGSGGGGSGGGGSEFDIVMTQSPDSLAVSLGERATINCKSSQSLLNSGDQKNYLTWYQQKPGQPPKLLIYWASTRESGVPDRFSGSGSGTDFTLTISSLQAEDVAVYYCQNDYSYPLTFGQGTKVEIKLEDLKNVFPPEVAVFEPSEAEISHTQKATLVCLATGFYPDHVELSWWVNGKEVHSGVCTDPQPLKEQPALNDSRYCLSSRLRVSATFWQNPRNHFRCQVQFYGLSENDEWTQDRAKPVTQIVSAEAWGRADCGFTSESYQQGVLSATNLSVIGFRILLLKVAGFNLLMTLRLWSSRAKRSGSGATNFSLLKQAGDVEENPGPTSMDWIWRILFLVGAATGAHSGPQLQLQESGPGLVKPSETLSLTCTVSGDSISSGDYYWGWIRQPPGKGLEWIGHIYYSGVTYYNPSLKSRVTISVDTSRNQFSLKLSSVTAADTAVYYCTREDSSNWRSRGQGTLVTVSSGSGGGGSGGGGSGGGGSFEQVQLVQSGAEVKKTGSSVKVSCKASGYTFTDHAIHVWRQAPGQALEWMGHFSPGNTDIKYNDKFKGRVTLTVDRSMSTAYMELSSLRSEDTAMYYCKTSTFFFDYWGQGTMVTVSSTRIQNPDPAVYQLRDSKSSDKSVCLFTDFDSQTNVSQSKDSDVYITDKCVLDMRSMDFKSNSAVAWSNKSDFACANAFNNSIIPEDTFFPSPESSCDVKLVEKSFETDTNLNFQILYEILLGKATLYAVLVSALVLMAMVKRKDSRG

SEQ ID NO: 14097 - protein, 893 aa, synthetic construct
MALPVTALLLPLALLLHAARPEVQLVESGGGLVQPGGSLRLSCAASGFSFSDFWMSWVRQAPGKGLEWVATISQAGSEKDYVDSVKGRFTISRDNAKKSLYLQMNSLRAEDTAVYYCASGVYSFDYRGQGTLVTVSSGTGGGGSGGGGSGGGGSEFDIQMTQSPSSLSASVGDRVTITCKASQDVSIAVAWYQQKPGKAPKVLIYSASYRYTGVPDRFSGSGSGTDFTFTISSLQPEDIAVYYCQQHYITPLTFGGGTKVEIKLEDLKNVFPPEVAVFEPSEAEISHTQKATLVCLATGFYPDHVELSWWVNGKEVHSGVCTDPQPLKEQPALNDSRYCLSSRLRVSATFWQNPRNHFRCQVQFYGLSENDEWTQDRAKPVTQIVSAEAWGRADCGFTSESYQQGVLSATNLSVIGFRILLLKVAGFNLLMTLRLWSSRAKRSGSGATNFSLLKQAGDVEENPGPTSMDWIWRILFLVGAATGAHSGPQLQLQESGPGLVKPSETLSLTCTVSGDSISSGDYYWGWIRQPPGKGLEWIGHIYYSGVTYYNPSLKSRVTISVDTSRNQFSLKLSSVTAADTAVYYCTREDSSNWRSRGQGTLVTVSSGSGGGGSGGGGSGGGGSFEQIQLVQSGHEVKKPGASVKVSCKASGYTFTNYGMNWVRQAPGQGLEWMGWINTKTGEPTYAEEFKGRFVFSLETSASTAYLQISSLKAEDTAMYFCGRGGYGSSYWYFDVWGQGTTVTVSSTRIQNPDPAVYQLRDSKSSDKSVCLFTDFDSQTNVSQSKDSDVYITDKCVLDMRSMDFKSNSAVAWSNKSDFACANAFNNSIIPEDTFFPSPESSCDVKLVEKSFETDTNLNFQILYEILLGKATLYAVLVSALVLMAMVKRKDSRG

SEQ ID NO: 14098 - protein, 895 aa, synthetic construct
MALPVTALLLPLALLLHAARPEVQLVESGGGLVQPGGSLRLSCAASGFSFSDFWMSWVRQAPGKGLEWVATISQAGSEKDYVDSVKGRFTISRDNAKKSLYLQMNSLRAEDTAVYYCASGVYSFDYRGQGTLVTVSSGTGGGGSGGGGSGGGGSEFDIVMTQSPDSLAVSLGERATINCRASKSVSTSGYSYMHWYQQKPGQPPKLLIYLASNLESGVPDRFSGSGSGTDFTLTISSLQAEDVAVYYCQHSRELPYTFGQGTKLEIKLEDLKNVFPPEVAVFEPSEAEISHTQKATLVCLATGFYPDHVELSWWVNGKEVHSGVCTDPQPLKEQPALNDSRYCLSSRLRVSATFWQNPRNHFRCQVQFYGLSENDEWTQDRAKPVTQIVSAEAWGRADCGFTSESYQQGVLSATNLSVIGFRILLLKVAGFNLLMTLRLWSSRAKRSGSGATNFSLLKQAGDVEENPGPTSMDWIWRILFLVGAATGAHSGPQLQLQESGPGLVKPSETLSLTCTVSGDSISSGDYYWGWIRQPPGKGLEWIGHIYYSGVTYYNPSLKSRVTISVDTSRNQFSLKLSSVTAADTAVYYCTREDSSNWRSRGQGTLVTVSSGSGGGGSGGGGSGGGGSFEQVQLQESGPGLVKPSETLSLTCTVSGGSISSYGVHWIRQPPGKGLEWIGVIWTSGVTDYNSALMGRVTISVDTSKNQFSLKLSSVTAADTAVYYCARDGDYDRYTMDYWGQGTLVTVSSTRIQNPDPAVYQLRDSKSSDKSVCLFTDFDSQTNVSQSKDSDVYITDKCVLDMRSMDFKSNSAVAWSNKSDFACANAFNNSIIPEDTFFPSPESSCDVKLVEKSFETDTNLNFQILYEILLGKATLYAVLVSALVLMAMVKRKDSRG

SEQ ID NO: 14099 - protein, 895 aa, synthetic construct
MALPVTALLLPLALLLHAARPEVQLVESGGGLVQPGGSLRLSCAASGFSFSDFWMSWVRQAPGKGLEWVATISQAGSEKDYVDSVKGRFTISRDNAKKSLYLQMNSLRAEDTAVYYCASGVYSFDYRGQGTLVTVSSGTGGGGSGGGGSGGGGSEFDIQMTQSPSSLSASVGDRVTITCRASQSIGTSLHWYQQKPGKAPKLLIKFASRLQSGVPSRFSGSGSGTDFTLTISSLQPEDFATYYCQQSPGFPPTFGQGTKLEIKRLEDLKNVFPPEVAVFEPSEAEISHTQKATLVCLATGFYPDHVELSWWVNGKEVHSGVCTDPQPLKEQPALNDSRYCLSSRLRVSATFWQNPRNHFRCQVQFYGLSENDEWTQDRAKPVTQIVSAEAWGRADCGFTSESYQQGVLSATNLSVIGFRILLLKVAGFNLLMTLRLWSSRAKRSGSGATNFSLLKQAGDVEENPGPTSMDWIWRILFLVGAATGAHSGPQLQLQESGPGLVKPSETLSLTCTVSGDSISSGDYYWGWIRQPPGKGLEWIGHIYYSGVTYYNPSLKSRVTISVDTSRNQFSLKLSSVTAADTAVYYCTREDSSNWRSRGQGTLVTVSSGSGGGGSGGGGSGGGGSFEQVQLVESGGGLVKPGGSLRLSCAASGFSITTSGYYWTWIRQFPGKGLEWMGYIGYNSKTYYNPALKSRITISRDNAKNSLYLQMNSLRAEDTAVYYCARSLYGGYKDAFDSWGQGTLVTVSSTRIQNPDPAVYQLRDSKSSDKSVCLFTDFDSQTNVSQSKDSDVYITDKCVLDMRSMDFKSNSAVAWSNKSDFACANAFNNSIIPEDTFFPSPESSCDVKLVEKSFETDTNLNFQILYEILLGKATLYAVLVSALVLMAMVKRKDSRG

SEQ ID NO: 14100 - protein, 900 aa, synthetic construct
MALPVTALLLPLALLLHAARPEVQLVESGGGLVQPGGSLRLSCAASGFSFSDFWMSWVRQAPGKGLEWVATISQAGSEKDYVDSVKGRFTISRDNAKKSLYLQMNSLRAEDTAVYYCASGVYSFDYRGQGTLVTVSSGTGGGGSGGGGSGGGGSEFDEIVLTQSPLSLPVTPGEPASISCRSSQSLLHSIGYNYLDWYLQKPGQSPQLLIYLGSNRASGVPDRFSGSGSGTDFTLKISRVEAEDVGVYYCMQALQTPLTFGGGTKVEIKRLEDLKNVFPPEVAVFEPSEAEISHTQKATLVCLATGFYPDHVELSWWVNGKEVHSGVCTDPQPLKEQPALNDSRYCLSSRLRVSATFWQNPRNHFRCQVQFYGLSENDEWTQDRAKPVTQIVSAEAWGRADCGFTSESYQQGVLSATNLSVIGFRILLLKVAGFNLLMTLRLWSSRAKRSGSGATNFSLLKQAGDVEENPGPTSMDWIWRILFLVGAATGAHSGPQLQLQESGPGLVKPSETLSLTCTVSGDSISSGDYYWGWIRQPPGKGLEWIGHIYYSGVTYYNPSLKSRVTISVDTSRNQFSLKLSSVTAADTAVYYCTREDSSNWRSRGQGTLVTVSSGSGGGGSGGGGSGGGGSFEEVQLVESGGGVVQPGRSLRLSCAASGFTFRSYGMHWVRQAPGKGLEWVAVISYDGSNKYYTDSVNGRFTISRDNSKNTLYLQMNSLRAEDTAVYYCARGGGYYETSGPDYWGQGTLVTVSSTRIQNPDPAVYQLRDSKSSDKSVCLFTDFDSQTNVSQSKDSDVYITDKCVLDMRSMDFKSNSAVAWSNKSDFACANAFNNSIIPEDTFFPSPESSCDVKLVEKSFETDTNLNFQILYEILLGKATLYAVLVSALVLMAMVKRKDSRG

SEQ ID NO: 14101 - protein, 898 aa, synthetic construct
MALPVTALLLPLALLLHAARPEVQLVESGGGLVQPGGSLRLSCAASGFSFSDFWMSWVRQAPGKGLEWVATISQAGSEKDYVDSVKGRFTISRDNAKKSLYLQMNSLRAEDTAVYYCASGVYSFDYRGQGTLVTVSSGTGGGGSGGGGSGGGGSEFDDVVMTQSPLSLPVTPGEPASISCRSSQSLLHSIGYNYLHWFLQKPGQSPQLLIYLGSNRASGVPDRFSGSGSGTDFTLKISRVEAEDVGVYYCMQALQTPPTFGQGTRLEIKRLEDLKNVFPPEVAVFEPSEAEISHTQKATLVCLATGFYPDHVELSWWVNGKEVHSGVCTDPQPLKEQPALNDSRYCLSSRLRVSATFWQNPRNHFRCQVQFYGLSENDEWTQDRAKPVTQIVSAEAWGRADCGFTSESYQQGVLSATNLSVIGFRILLLKVAGFNLLMTLRLWSSRAKRSGSGATNFSLLKQAGDVEENPGPTSMDWIWRILFLVGAATGAHSGPQLQLQESGPGLVKPSETLSLTCTVSGDSISSGDYYWGWIRQPPGKGLEWIGHIYYSGVTYYNPSLKSRVTISVDTSRNQFSLKLSSVTAADTAVYYCTREDSSNWRSRGQGTLVTVSSGSGGGGSGGGGSGGGGSFEQLQLQESGPGLVKPSGTLSLTCAVSGGSISSSNWWSWVRQPPGKGLEWIGEIYHSGSTNYNPSLKSRVTISVDKSKNQFSLKLSSVTAADTAVYYCVGSPYGDYVLDYWGQGTLVTVSSTRIQNPDPAVYQLRDSKSSDKSVCLFTDFDSQTNVSQSKDSDVYITDKCVLDMRSMDFKSNSAVAWSNKSDFACANAFNNSIIPEDTFFPSPESSCDVKLVEKSFETDTNLNFQILYEILLGKATLYAVLVSALVLMAMVKRKDSRG

SEQ ID NO: 14102 - protein, 896 aa, synthetic construct
MALPVTALLLPLALLLHAARPEVQLVESGGGLVQPGGSLRLSCAASGFSFSDFWMSWVRQAPGKGLEWVATISQAGSEKDYVDSVKGRFTISRDNAKKSLYLQMNSLRAEDTAVYYCASGVYSFDYRGQGTLVTVSSGTGGGGSGGGGSGGGGSEFDEIVLTQSPGTLSLSLGERATLSCRASQSISSSFLAWYQQKPGQAPKLLIYAASTRATGIPDRFSGSGSGTDFTLTISRLEPEDFAVYYCQQYGRSLSFGGGTKVEVKLEDLKNVFPPEVAVFEPSEAEISHTQKATLVCLATGFYPDHVELSWWVNGKEVHSGVCTDPQPLKEQPALNDSRYCLSSRLRVSATFWQNPRNHFRCQVQFYGLSENDEWTQDRAKPVTQIVSAEAWGRADCGFTSESYQQGVLSATNLSVIGFRILLLKVAGFNLLMTLRLWSSRAKRSGSGATNFSLLKQAGDVEENPGPTSMDWIWRILFLVGAATGAHSGPQLQLQESGPGLVKPSETLSLTCTVSGDSISSGDYYWGWIRQPPGKGLEWIGHIYYSGVTYYNPSLKSRVTISVDTSRNQFSLKLSSVTAADTAVYYCTREDSSNWRSRGQGTLVTVSSGSGGGGSGGGGSGGGGSFEQVQLQQSGPGLVKPSQTLSLTCAISGDSVSGNSATWNWIRQSPSRGLEWLGRTYYRSKWNHDYAESVKSRITINPDTSKNQFSLQLNSVTPEDTAVYYCARGDSSSWYAFDYWGQGTLVTVSSTRIQNPDPAVYQLRDSKSSDKSVCLFTDFDSQTNVSQSKDSDVYITDKCVLDMRSMDFKSNSAVAWSNKSDFACANAFNNSIIPEDTFFPSPESSCDVKLVEKSFETDTNLNFQILYEILLGKATLYAVLVSALVLMAMVKRKDSRG

SEQ ID NO: 14103 - protein, 895 aa, synthetic construct
MALPVTALLLPLALLLHAARPEVQLVESGGGLVQPGGSLRLSCAASGFSFSDFWMSWVRQAPGKGLEWVATISQAGSEKDYVDSVKGRFTISRDNAKKSLYLQMNSLRAEDTAVYYCASGVYSFDYRGQGTLVTVSSGTGGGGSGGGGSGGGGSEFDQSVVTQPPSVSVAPGKTARITCGRNNIGSKSVHWYQQKPGQAPVLVVYDDSDRPSGIPERFSGSNSGNTATLTISRVEAGDEADYYCQVWDSSSDHVVFGGGTKLTVLGLEDLKNVFPPEVAVFEPSEAEISHTQKATLVCLATGFYPDHVELSWWVNGKEVHSGVCTDPQPLKEQPALNDSRYCLSSRLRVSATFWQNPRNHFRCQVQFYGLSENDEWTQDRAKPVTQIVSAEAWGRADCGFTSESYQQGVLSATNLSVIGFRILLLKVAGFNLLMTLRLWSSRAKRSGSGATNFSLLKQAGDVEENPGPTSMDWIWRILFLVGAATGAHSGPQLQLQESGPGLVKPSETLSLTCTVSGDSISSGDYYWGWIRQPPGKGLEWIGHIYYSGVTYYNPSLKSRVTISVDTSRNQFSLKLSSVTAADTAVYYCTREDSSNWRSRGQGTLVTVSSGSGGGGSGGGGSGGGGSFEVQLVQSGGGVMRPGGSLRLSCAASGFTFDDYGMSWVRQAPGKGLEWVSGINWNGGSTGYADSVRGRFTISRDNAKNSLYLQMNSLRAEDTALYYCARERGYGYHDPHDYWGQGTLVTVSSTRIQNPDPAVYQLRDSKSSDKSVCLFTDFDSQTNVSQSKDSDVYITDKCVLDMRSMDFKSNSAVAWSNKSDFACANAFNNSIIPEDTFFPSPESSCDVKLVEKSFETDTNLNFQILYEILLGKATLYAVLVSALVLMAMVKRKDSRG

SEQ ID NO: 14104 - protein, 908 aa, synthetic construct
MALPVTALLLPLALLLHAARPEVQLVESGGGLVQPGGSLRLSCAASGFSFSDFWMSWVRQAPGKGLEWVATISQAGSEKDYVDSVKGRFTISRDNAKKSLYLQMNSLRAEDTAVYYCASGVYSFDYRGQGTLVTVSSGTGGGGSGGGGSGGGGSEFEQKLISEEDLEFQAVVTQPPSASGTPGQRVTISCSGSSSNIGSNTVNWYQQVPGTAPKLLIYSNNQRPSGVPDRFSGSKSGTSASLAISGLQSEDEADYYCAAWDDSLNGWVFGGGTKLTVLLEDLKNVFPPEVAVFEPSEAEISHTQKATLVCLATGFYPDHVELSWWVNGKEVHSGVCTDPQPLKEQPALNDSRYCLSSRLRVSATFWQNPRNHFRCQVQFYGLSENDEWTQDRAKPVTQIVSAEAWGRADCGFTSESYQQGVLSATNLSVIGFRILLLKVAGFNLLMTLRLWSSRAKRSGSGATNFSLLKQAGDVEENPGPTSMDWIWRILFLVGAATGAHSGPQLQLQESGPGLVKPSETLSLTCTVSGDSISSGDYYWGWIRQPPGKGLEWIGHIYYSGVTYYNPSLKSRVTISVDTSRNQFSLKLSSVTAADTAVYYCTREDSSNWRSRGQGTLVTVSSGSGGGGSGGGGSGGGGSFEQMQLVQSGAEVKEPGESLRISCKGSGYSFTNFWISWVRQMPGKGLEWMGRVDPGYSYSTYSPSFQGHVTISADKSTSTAYLQWNSLKASDTAMYYCARVQYSGYYDWFDPWGQGTLVTVSSTRIQNPDPAVYQLRDSKSSDKSVCLFTDFDSQTNVSQSKDSDVYITDKCVLDMRSMDFKSNSAVAWSNKSDFACANAFNNSIIPEDTFFPSPESSCDVKLVEKSFETDTNLNFQILYEILLGKATLYAVLVSALVLMAMVKRKDSRG

SEQ ID NO: 14105 - protein, 902 aa, synthetic construct
MALPVTALLLPLALLLHAARPEVQLVESGGGLVQPGGSLRLSCAASGFSFSDFWMSWVRQAPGKGLEWVATISQAGSEKDYVDSVKGRFTISRDNAKKSLYLQMNSLRAEDTAVYYCASGVYSFDYRGQGTLVTVSSGTGGGGSGGGGSGGGGSEFEQKLISEEDLEFDIQMTQSPSTLSASVGDRVTITCRASQNINKWLAWYQQRPGKAPQLLIYKASSLESGVPSRFSGSGSGTEYTLTISSLQPDDFATYYCQQYNSYATFGQGTKVEIKRLEDLKNVFPPEVAVFEPSEAEISHTQKATLVCLATGFYPDHVELSWWVNGKEVHSGVCTDPQPLKEQPALNDSRYCLSSRLRVSATFWQNPRNHFRCQVQFYGLSENDEWTQDRAKPVTQIVSAEAWGRADCGFTSESYQQGVLSATNLSVIGFRILLLKVAGFNLLMTLRLWSSRAKRSGSGATNFSLLKQAGDVEENPGPTSMDWIWRILFLVGAATGAHSGPQLQLQESGPGLVKPSETLSLTCTVSGDSISSGDYYWGWIRQPPGKGLEWIGHIYYSGVTYYNPSLKSRVTISVDTSRNQFSLKLSSVTAADTAVYYCTREDSSNWRSRGQGTLVTVSSGSGGGGSGGGGSGGGGSFEQVQLVQSGAEVKKPGESLKISCKGSGYNFSNKWIGWVRQLPGRGLEWIAIIYPGYSDITYSPSFQGRVTISADTSINTAYLHWHSLKASDTAMYYCVRHTALAGFDYWGLGTLVTVSSTRIQNPDPAVYQLRDSKSSDKSVCLFTDFDSQTNVSQSKDSDVYITDKCVLDMRSMDFKSNSAVAWSNKSDFACANAFNNSIIPEDTFFPSPESSCDVKLVEKSFETDTNLNFQILYEILLGKATLYAVLVSALVLMAMVKRKDSRG

SEQ ID NO: 14106 - protein, 893 aa, synthetic construct
MALPVTALLLPLALLLHAARPEVQLVESGGGLVQPGGSLRLSCAASGFSFSDFWMSWVRQAPGKGLEWVATISQAGSEKDYVDSVKGRFTISRDNAKKSLYLQMNSLRAEDTAVYYCASGVYSFDYRGQGTLVTVSSGTGGGGSGGGGSGGGGSEFIVLTQSPASLAVSLGQRATISCRASESVDNYGNTFMHWYQQKPGQPPKLLIYRASNLESGIPARFSGSGSRTDFTLTINPVEADDVATYYCQQSNEDPPTFGAGTKLELKLEDLKNVFPPEVAVFEPSEAEISHTQKATLVCLATGFYPDHVELSWWVNGKEVHSGVCTDPQPLKEQPALNDSRYCLSSRLRVSATFWQNPRNHFRCQVQFYGLSENDEWTQDRAKPVTQIVSAEAWGRADCGFTSESYQQGVLSATNLSVIGFRILLLKVAGFNLLMTLRLWSSRAKRSGSGATNFSLLKQAGDVEENPGPTSMDWIWRILFLVGAATGAHSGPQLQLQESGPGLVKPSETLSLTCTVSGDSISSGDYYWGWIRQPPGKGLEWIGHIYYSGVTYYNPSLKSRVTISVDTSRNQFSLKLSSVTAADTAVYYCTREDSSNWRSRGQGTLVTVSSGSGGGGSGGGGSGGGGSFEQIQLVQSGPELKKPGETVKISCKASGYIFTNYGMNWVKQAPGKSFKWMGWINTYTGESTYSADFKGRFAFSLETSASTAYLHINDLKNEDTATYFCARSGGYDPMDYWGQGTSVTVSSTRIQNPDPAVYQLRDSKSSDKSVCLFTDFDSQTNVSQSKDSDVYITDKCVLDMRSMDFKSNSAVAWSNKSDFACANAFNNSIIPEDTFFPSPESSCDVKLVEKSFETDTNLNFQILYEILLGKATLYAVLVSALVLMAMVKRKDSRG

SEQ ID NO: 14107 - protein, 892 aa, synthetic construct
MALPVTALLLPLALLLHAARPEVQLVESGGGLVQPGGSLRLSCAASGFSFSDFWMSWVRQAPGKGLEWVATISQAGSEKDYVDSVKGRFTISRDNAKKSLYLQMNSLRAEDTAVYYCASGVYSFDYRGQGTLVTVSSGTGGGGSGGGGSGGGGSEFEIVLTQSPGTLSLSPGERATLSCRASQSVSNTYLAWYHQRPGQAPRLLIYGASSRATGIPDRFSGSGSGTDFALTISSLEPEDFAVYYCQQYSNSWTFGQGTKVEIKRLEDLKNVFPPEVAVFEPSEAEISHTQKATLVCLATGFYPDHVELSWWVNGKEVHSGVCTDPQPLKEQPALNDSRYCLSSRLRVSATFWQNPRNHFRCQVQFYGLSENDEWTQDRAKPVTQIVSAEAWGRADCGFTSESYQQGVLSATNLSVIGFRILLLKVAGFNLLMTLRLWSSRAKRSGSGATNFSLLKQAGDVEENPGPTSMDWIWRILFLVGAATGAHSGPQLQLQESGPGLVKPSETLSLTCTVSGDSISSGDYYWGWIRQPPGKGLEWIGHIYYSGVTYYNPSLKSRVTISVDTSRNQFSLKLSSVTAADTAVYYCTREDSSNWRSRGQGTLVTVSSGSGGGGSGGGGSGGGGSFEQVQLVESGGGVVQPGRSLRLSCAASGFTFSSYDMHWVRQAPGKGLEWVAVISYDGTNEYYADSVKGRFTISRDTSKNTLYLQMNSLRAEDTAVYYCARERYFDWSFDYWGQGTLVSVSSTRIQNPDPAVYQLRDSKSSDKSVCLFTDFDSQTNVSQSKDSDVYITDKCVLDMRSMDFKSNSAVAWSNKSDFACANAFNNSIIPEDTFFPSPESSCDVKLVEKSFETDTNLNFQILYEILLGKATLYAVLVSALVLMAMVKRKDSRG

SEQ ID NO: 14108 - protein, 891 aa, synthetic construct
MALPVTALLLPLALLLHAARPEVQLVESGGGLVQPGGSLRLSCAASGFSFSDFWMSWVRQAPGKGLEWVATISQAGSEKDYVDSVKGRFTISRDNAKKSLYLQMNSLRAEDTAVYYCASGVYSFDYRGQGTLVTVSSGTGGGGSGGGGSGGGGSEFELTQDPAVSVALGQTVRITCQGDSLRSNYANWYQQKPGQAPVLVIYGQNNRPSGIPDRFSGSSSGNTASLTITGAQAADEADYYCDSRVSTGNHVVFGGGTKLTVLGQLEDLKNVFPPEVAVFEPSEAEISHTQKATLVCLATGFYPDHVELSWWVNGKEVHSGVCTDPQPLKEQPALNDSRYCLSSRLRVSATFWQNPRNHFRCQVQFYGLSENDEWTQDRAKPVTQIVSAEAWGRADCGFTSESYQQGVLSATNLSVIGFRILLLKVAGFNLLMTLRLWSSRAKRSGSGATNFSLLKQAGDVEENPGPTSMDWIWRILFLVGAATGAHSGPQLQLQESGPGLVKPSETLSLTCTVSGDSISSGDYYWGWIRQPPGKGLEWIGHIYYSGVTYYNPSLKSRVTISVDTSRNQFSLKLSSVTAADTAVYYCTREDSSNWRSRGQGTLVTVSSGSGGGGSGGGGSGGGGSFEEVQLVQSGAEVKKPGASVKVSCKASGYTFTSYAMHWVRQAPGQRLEWMGWINAGNGNTKYSQKFQGRVTITRDTSASTAYMELSSLRSEDTAVYYCARDISYGSFDYWGQGTLVTVSSTRIQNPDPAVYQLRDSKSSDKSVCLFTDFDSQTNVSQSKDSDVYITDKCVLDMRSMDFKSNSAVAWSNKSDFACANAFNNSIIPEDTFFPSPESSCDVKLVEKSFETDTNLNFQILYEILLGKATLYAVLVSALVLMAMVKRKDSRG

SEQ ID NO: 14109 - protein, 893 aa, synthetic construct
MALPVTALLLPLALLLHAARPEVQLVESGGGLVQPGGSLRLSCAASGFSFSDFWMSWVRQAPGKGLEWVATISQAGSEKDYVDSVKGRFTISRDNAKKSLYLQMNSLRAEDTAVYYCASGVYSFDYRGQGTLVTVSSGTGGGGSGGGGSGGGGSEFDIVLTQTPATLSVTPGDSVSLSCRASQSISNNLHWYQQKSHESPRLLIKNASQSISGIPSKFSGSGSGTDFTLRINSVETEDFGMYFCQQSNSWPYTFGSGTKLEIKLEDLKNVFPPEVAVFEPSEAEISHTQKATLVCLATGFYPDHVELSWWVNGKEVHSGVCTDPQPLKEQPALNDSRYCLSSRLRVSATFWQNPRNHFRCQVQFYGLSENDEWTQDRAKPVTQIVSAEAWGRADCGFTSESYQQGVLSATNLSVIGFRILLLKVAGFNLLMTLRLWSSRAKRSGSGATNFSLLKQAGDVEENPGPTSMDWIWRILFLVGAATGAHSGPQLQLQESGPGLVKPSETLSLTCTVSGDSISSGDYYWGWIRQPPGKGLEWIGHIYYSGVTYYNPSLKSRVTISVDTSRNQFSLKLSSVTAADTAVYYCTREDSSNWRSRGQGTLVTVSSGSGGGGSGGGGSGGGGSFEQVKLQQSGPELVKPGASVKISCKASGYSFTGYYMHWVKQSHGNILDWIGYIYPYNGVSSYNQKFKGKATLTVDKSSSTAYMELRSLTSEDSAVYYCARERGLYQLRAMDYWGQGTSVTVSSTRIQNPDPAVYQLRDSKSSDKSVCLFTDFDSQTNVSQSKDSDVYITDKCVLDMRSMDFKSNSAVAWSNKSDFACANAFNNSIIPEDTFFPSPESSCDVKLVEKSFETDTNLNFQILYEILLGKATLYAVLVSALVLMAMVKRKDSRG

SEQ ID NO: 14110 - protein, 884 aa, synthetic construct
MALPVTALLLPLALLLHAARPEVQLVESGGGLVQPGGSLRLSCAASGFSFSDFWMSWVRQAPGKGLEWVATISQAGSEKDYVDSVKGRFTISRDNAKKSLYLQMNSLRAEDTAVYYCASGVYSFDYRGQGTLVTVSSGTGGGGSGGGGSGGGGSEFDIVMTQTPAIMSASPGQKVTITCSASSSVNYMHWYQQKLGSSPKLWIYDTSKLAPGVPARFSGSGSGTSYSLTISSMEAEDAASYFCHQWSSYPYTFGSGTKLEIKLEDLKNVFPPEVAVFEPSEAEISHTQKATLVCLATGFYPDHVELSWWVNGKEVHSGVCTDPQPLKEQPALNDSRYCLSSRLRVSATFWQNPRNHFRCQVQFYGLSENDEWTQDRAKPVTQIVSAEAWGRADCGFTSESYQQGVLSATNLSVIGFRILLLKVAGFNLLMTLRLWSSRAKRSGSGATNFSLLKQAGDVEENPGPTSMDWIWRILFLVGAATGAHSGPQLQLQESGPGLVKPSETLSLTCTVSGDSISSGDYYWGWIRQPPGKGLEWIGHIYYSGVTYYNPSLKSRVTISVDTSRNQFSLKLSSVTAADTAVYYCTREDSSNWRSRGQGTLVTVSSGSGGGGSGGGGSGGGGSFEEVQLQESGPDLVKPSQSLSLTCTVTGYSITSGYGWHWIRQFPGNKLEWMGYIHYSGSTTYNPSLKSRISISRDTSKNQFFLQLNSVTTEDTATYYCARSLRYWGQGTTLTVSSTRIQNPDPAVYQLRDSKSSDKSVCLFTDFDSQTNVSQSKDSDVYITDKCVLDMRSMDFKSNSAVAWSNKSDFACANAFNNSIIPEDTFFPSPESSCDVKLVEKSFETDTNLNFQILYEILLGKATLYAVLVSALVLMAMVKRKDSRG

SEQ ID NO: 14111 - protein, 887 aa, synthetic construct
MALPVTALLLPLALLLHAARPEVQLVESGGGLVQPGGSLRLSCAASGFSFSDFWMSWVRQAPGKGLEWVATISQAGSEKDYVDSVKGRFTISRDNAKKSLYLQMNSLRAEDTAVYYCASGVYSFDYRGQGTLVTVSSGTGGGGSGGGGSGGGGSEFDIQMTQSPSSLSASVGDRVTITCSATSSISYMHWYQQKPGKAPKGWIYDTSKLAHGVPSRFSGSGSGTDFTLTISSLQPEDFATYYCHQRRSYPFTFGQGTKVEIKLEDLKNVFPPEVAVFEPSEAEISHTQKATLVCLATGFYPDHVELSWWVNGKEVHSGVCTDPQPLKEQPALNDSRYCLSSRLRVSATFWQNPRNHFRCQVQFYGLSENDEWTQDRAKPVTQIVSAEAWGRADCGFTSESYQQGVLSATNLSVIGFRILLLKVAGFNLLMTLRLWSSRAKRSGSGATNFSLLKQAGDVEENPGPTSMDWIWRILFLVGAATGAHSGPQLQLQESGPGLVKPSETLSLTCTVSGDSISSGDYYWGWIRQPPGKGLEWIGHIYYSGVTYYNPSLKSRVTISVDTSRNQFSLKLSSVTAADTAVYYCTREDSSNWRSRGQGTLVTVSSGSGGGGSGGGGSGGGGSFEEVQLVQSGAEVKKPGASVKVSCKASGYTFTNFWIHWVRQAPGQGLEWIGEIDPSDSYTNYNQKFKGRVTITRDTSTSTAYLELSSLRSEDTAVYYCAREITTVDYWGQGTLVTVSSTRIQNPDPAVYQLRDSKSSDKSVCLFTDFDSQTNVSQSKDSDVYITDKCVLDMRSMDFKSNSAVAWSNKSDFACANAFNNSIIPEDTFFPSPESSCDVKLVEKSFETDTNLNFQILYEILLGKATLYAVLVSALVLMAMVKRKDSRG

SEQ ID NO: 14112 - protein, 894 aa, synthetic construct
MALPVTALLLPLALLLHAARPEVQLVESGGGLVQPGGSLRLSCAASGFSFSDFWMSWVRQAPGKGLEWVATISQAGSEKDYVDSVKGRFTISRDNAKKSLYLQMNSLRAEDTAVYYCASGVYSFDYRGQGTLVTVSSGTGGGGSGGGGSGGGGSEFDIQMTQSPSSLSASVGDRVTITCKASQGFNKYVAWYQQKPGKAPKLLIYYTSTLQPGVPSRFSGSGSGRDYTLTISSLQPEDFATYYCLQYGNLLYAFGQGTKVEIKRLEDLKNVFPPEVAVFEPSEAEISHTQKATLVCLATGFYPDHVELSWWVNGKEVHSGVCTDPQPLKEQPALNDSRYCLSSRLRVSATFWQNPRNHFRCQVQFYGLSENDEWTQDRAKPVTQIVSAEAWGRADCGFTSESYQQGVLSATNLSVIGFRILLLKVAGFNLLMTLRLWSSRAKRSGSGATNFSLLKQAGDVEENPGPTSMDWIWRILFLVGAATGAHSGPQLQLQESGPGLVKPSETLSLTCTVSGDSISSGDYYWGWIRQPPGKGLEWIGHIYYSGVTYYNPSLKSRVTISVDTSRNQFSLKLSSVTAADTAVYYCTREDSSNWRSRGQGTLVTVSSGSGGGGSGGGGSGGGGSFEEVQLVQSGAEVKKPGASVKVSCKASGYTFTSYWIGWVRQAPGQGLEWIGDIYPGGGYTNYNEKFKGRVTITRDTSTSTAYLELSSLRSEDTAVYYCARLDGSSYRGAMDSWGQGTLVTVSSTRIQNPDPAVYQLRDSKSSDKSVCLFTDFDSQTNVSQSKDSDVYITDKCVLDMRSMDFKSNSAVAWSNKSDFACANAFNNSIIPEDTFFPSPESSCDVKLVEKSFETDTNLNFQILYEILLGKATLYAVLVSALVLMAMVKRKDSRG

SEQ ID NO: 14113 - protein, 890 aa, synthetic construct
MALPVTALLLPLALLLHAARPEVQLVESGGGLVQPGGSLRLSCAASGFSFSDFWMSWVRQAPGKGLEWVATISQAGSEKDYVDSVKGRFTISRDNAKKSLYLQMNSLRAEDTAVYYCASGVYSFDYRGQGTLVTVSSGTGGGGSGGGGSGGGGSEFDIQMTQSPSSLSASVGDRVTITCRASQDIRYYLNWYQQKPGKAPKLLIYVASSLQSGVPSRFSGSGSGTEFTLTVSSLQPEDFATYYCLQVYSTPRTFGQGTKVEIKLEDLKNVFPPEVAVFEPSEAEISHTQKATLVCLATGFYPDHVELSWWVNGKEVHSGVCTDPQPLKEQPALNDSRYCLSSRLRVSATFWQNPRNHFRCQVQFYGLSENDEWTQDRAKPVTQIVSAEAWGRADCGFTSESYQQGVLSATNLSVIGFRILLLKVAGFNLLMTLRLWSSRAKRSGSGATNFSLLKQAGDVEENPGPTSMDWIWRILFLVGAATGAHSGPQLQLQESGPGLVKPSETLSLTCTVSGDSISSGDYYWGWIRQPPGKGLEWIGHIYYSGVTYYNPSLKSRVTISVDTSRNQFSLKLSSVTAADTAVYYCTREDSSNWRSRGQGTLVTVSSGSGGGGSGGGGSGGGGSFEEVQLVESGGGLAKPGGSLRLSCAASGFRFTFNNYYMDWVRQAPGQGLEWVSRISSSGDPTWYADSVKGRFTISRENAKNTLFLQMNSLRAEDTAVYYCASLTTGSDSWGQGVLVTVSSTRIQNPDPAVYQLRDSKSSDKSVCLFTDFDSQTNVSQSKDSDVYITDKCVLDMRSMDFKSNSAVAWSNKSDFACANAFNNSIIPEDTFFPSPESSCDVKLVEKSFETDTNLNFQILYEILLGKATLYAVLVSALVLMAMVKRKDSRG

SEQ ID NO: 14114 - protein, 891 aa, synthetic construct
MALPVTALLLPLALLLHAARPEVQLVESGGGLVQPGGSLRLSCAASGFSFSDFWMSWVRQAPGKGLEWVATISQAGSEKDYVDSVKGRFTISRDNAKKSLYLQMNSLRAEDTAVYYCASGVYSFDYRGQGTLVTVSSGTGGGGSGGGGSGGGGSEFEIVMTQSPATLSVSPGERATLSCRASQSVSRNLAWYQQKPGQAPRLLIYGASTRATGIPARFSGSGSGTEFTLTIGSLQSEDFAVYYCQQYKTWPRTFGQGTNVEIKLEDLKNVFPPEVAVFEPSEAEISHTQKATLVCLATGFYPDHVELSWWVNGKEVHSGVCTDPQPLKEQPALNDSRYCLSSRLRVSATFWQNPRNHFRCQVQFYGLSENDEWTQDRAKPVTQIVSAEAWGRADCGFTSESYQQGVLSATNLSVIGFRILLLKVAGFNLLMTLRLWSSRAKRSGSGATNFSLLKQAGDVEENPGPTSMDWIWRILFLVGAATGAHSGPQLQLQESGPGLVKPSETLSLTCTVSGDSISSGDYYWGWIRQPPGKGLEWIGHIYYSGVTYYNPSLKSRVTISVDTSRNQFSLKLSSVTAADTAVYYCTREDSSNWRSRGQGTLVTVSSGSGGGGSGGGGSGGGGSFEQVQLQQWGAGLLKPSETLSLTCAVFGGSFSGYYWSWIRQPPGKGLEWIGEINHRGNTNDNPSLKSRVTISVDTSKNQFALKLSSVTAADTAVYYCARERGYTYGNFDHWGQGTLVTVSSTRIQNPDPAVYQLRDSKSSDKSVCLFTDFDSQTNVSQSKDSDVYITDKCVLDMRSMDFKSNSAVAWSNKSDFACANAFNNSIIPEDTFFPSPESSCDVKLVEKSFETDTNLNFQILYEILLGKATLYAVLVSALVLMAMVKRKDSRG

SEQ ID NO: 14115 - protein, 892 aa, synthetic construct
MALPVTALLLPLALLLHAARPEVQLVESGGGLVQPGGSLRLSCAASGFSFSDFWMSWVRQAPGKGLEWVATISQAGSEKDYVDSVKGRFTISRDNAKKSLYLQMNSLRAEDTAVYYCASGVYSFDYRGQGTLVTVSSGTGGGGSGGGGSGGGGSEFEIVMTPSSATLSVSPGERATLSCRASQSVSRNLAWYQQKPGQAPRLLIYGASTRATGIPARFSGSGSGTEFTLTISSLQSEDFAVYYCHQYSNWMCSFGQGTKLEIKLEDLKNVFPPEVAVFEPSEAEISHTQKATLVCLATGFYPDHVELSWWVNGKEVHSGVCTDPQPLKEQPALNDSRYCLSSRLRVSATFWQNPRNHFRCQVQFYGLSENDEWTQDRAKPVTQIVSAEAWGRADCGFTSESYQQGVLSATNLSVIGFRILLLKVAGFNLLMTLRLWSSRAKRSGSGATNFSLLKQAGDVEENPGPTSMDWIWRILFLVGAATGAHSGPQLQLQESGPGLVKPSETLSLTCTVSGDSISSGDYYWGWIRQPPGKGLEWIGHIYYSGVTYYNPSLKSRVTISVDTSRNQFSLKLSSVTAADTAVYYCTREDSSNWRSRGQGTLVTVSSGSGGGGSGGGGSGGGGSFEEVQLLESGGGLVQPGGSLRLSCAASGFTFSRYAMNWVRQAPGKGLEWVSGISGSGGRTYYADSVKGRFTISRDNSKNTLYLQMNSLRAEDTAVYYCAKDRDFWSGPFDYWGQGTLVTVSSTRIQNPDPAVYQLRDSKSSDKSVCLFTDFDSQTNVSQSKDSDVYITDKCVLDMRSMDFKSNSAVAWSNKSDFACANAFNNSIIPEDTFFPSPESSCDVKLVEKSFETDTNLNFQILYEILLGKATLYAVLVSALVLMAMVKRKDSRG

SEQ ID NO: 14116 - protein, 897 aa, synthetic construct
MALPVTALLLPLALLLHAARPEVQLVESGGGLVQPGGSLRLSCAASGFSFSDFWMSWVRQAPGKGLEWVATISQAGSEKDYVDSVKGRFTISRDNAKKSLYLQMNSLRAEDTAVYYCASGVYSFDYRGQGTLVTVSSGTGGGGSGGGGSGGGGSEFDIQMTQSPSSLSASVGDRVTITCKASKNIRSYLAWYQQKPGKAPKLLIYSGSTLHSGVPSRFSGSGSGTDFTLTISSLQPEDFATYYCQQHHEYPLTFGQGTKVEIKRLEDLKNVFPPEVAVFEPSEAEISHTQKATLVCLATGFYPDHVELSWWVNGKEVHSGVCTDPQPLKEQPALNDSRYCLSSRLRVSATFWQNPRNHFRCQVQFYGLSENDEWTQDRAKPVTQIVSAEAWGRADCGFTSESYQQGVLSATNLSVIGFRILLLKVAGFNLLMTLRLWSSRAKRSGSGATNFSLLKQAGDVEENPGPTSMDWIWRILFLVGAATGAHSGPQLQLQESGPGLVKPSETLSLTCTVSGDSISSGDYYWGWIRQPPGKGLEWIGHIYYSGVTYYNPSLKSRVTISVDTSRNQFSLKLSSVTAADTAVYYCTREDSSNWRSRGQGTLVTVSSGSGGGGSGGGGSGGGGSFEQVQLQESGPGLVKPSETLSLTCTVSGYTITSGYDWSWIRQPPGKGLEWIGYINYGGSTNYKPSLGSRVTISVDTSKNQFSLKLSSVTAADTAVYYCARYNEYKSYIYDWYFDFWGQGTLVTVSSTRIQNPDPAVYQLRDSKSSDKSVCLFTDFDSQTNVSQSKDSDVYITDKCVLDMRSMDFKSNSAVAWSNKSDFACANAFNNSIIPEDTFFPSPESSCDVKLVEKSFETDTNLNFQILYEILLGKATLYAVLVSALVLMAMVKRKDSRG

SEQ ID NO: 14117 - protein, 899 aa, synthetic construct
MALPVTALLLPLALLLHAARPEVQLVESGGGLVQPGGSLRLSCAASGFSFSDFWMSWVRQAPGKGLEWVATISQAGSEKDYVDSVKGRFTISRDNAKKSLYLQMNSLRAEDTAVYYCASGVYSFDYRGQGTLVTVSSGTGGGGSGGGGSGGGGSEFQSVVTQPPSVSAAPGQKVTISCSGSSSNIGNNYVSWYQQLPGTAPKLLIYDNNKRPSGIPDRFSGSKSGTSATLGITGLQTGDEADYYCGTWDGSLYTMLFGGGTKLTVLLEDLKNVFPPEVAVFEPSEAEISHTQKATLVCLATGFYPDHVELSWWVNGKEVHSGVCTDPQPLKEQPALNDSRYCLSSRLRVSATFWQNPRNHFRCQVQFYGLSENDEWTQDRAKPVTQIVSAEAWGRADCGFTSESYQQGVLSATNLSVIGFRILLLKVAGFNLLMTLRLWSSRAKRSGSGATNFSLLKQAGDVEENPGPTSMDWIWRILFLVGAATGAHSGPQLQLQESGPGLVKPSETLSLTCTVSGDSISSGDYYWGWIRQPPGKGLEWIGHIYYSGVTYYNPSLKSRVTISVDTSRNQFSLKLSSVTAADTAVYYCTREDSSNWRSRGQGTLVTVSSGSGGGGSGGGGSGGGGSFEEVQLVESGGGLVKPGGSLRLSCAASGFTFSNAWMSWVRQAPGKGLEWVGFIRSKAYGGTTEYAASVKGRFTISRDDSKSIAYLQMNNLKTEDTAVYYCARDGLYSSSWYDSDYWGQGTLVTVSSTRIQNPDPAVYQLRDSKSSDKSVCLFTDFDSQTNVSQSKDSDVYITDKCVLDMRSMDFKSNSAVAWSNKSDFACANAFNNSIIPEDTFFPSPESSCDVKLVEKSFETDTNLNFQILYEILLGKATLYAVLVSALVLMAMVKRKDSRG

SEQ ID NO: 14118 - protein, 904 aa, synthetic construct
MALPVTALLLPLALLLHAARPEVQLVESGGGLVQPGGSLRLSCAASGFSFSDFWMSWVRQAPGKGLEWVATISQAGSEKDYVDSVKGRFTISRDNAKKSLYLQMNSLRAEDTAVYYCASGVYSFDYRGQGTLVTVSSGTGGGGSGGGGSGGGGSEFQSVLTQPPSVSGAPGQRVTISCTGSSSNIGAGYDVHWYQQLPGTAPKLLIFGNSNRPSGVPDRFSGFKSGTSASLAITGLQAEDEADYFCQSYDSSLSGSGVFGTGTKVTVLGLEDLKNVFPPEVAVFEPSEAEISHTQKATLVCLATGFYPDHVELSWWVNGKEVHSGVCTDPQPLKEQPALNDSRYCLSSRLRVSATFWQNPRNHFRCQVQFYGLSENDEWTQDRAKPVTQIVSAEAWGRADCGFTSESYQQGVLSATNLSVIGFRILLLKVAGFNLLMTLRLWSSRAKRSGSGATNFSLLKQAGDVEENPGPTSMDWIWRILFLVGAATGAHSGPQLQLQESGPGLVKPSETLSLTCTVSGDSISSGDYYWGWIRQPPGKGLEWIGHIYYSGVTYYNPSLKSRVTISVDTSRNQFSLKLSSVTAADTAVYYCTREDSSNWRSRGQGTLVTVSSGSGGGGSGGGGSGGGGSFEQMQLVQSGGGLVQPGRSLRLSCAASGFTFDDYAMHWVRQAPGKGLEWVSGISWNSGSIGYADSVKGRFTISRDNAKNSLYLQMNSLRAEDTALYYCAKDIHSGSYYGLLYYAMDVWGQGTTVTVSSTRIQNPDPAVYQLRDSKSSDKSVCLFTDFDSQTNVSQSKDSDVYITDKCVLDMRSMDFKSNSAVAWSNKSDFACANAFNNSIIPEDTFFPSPESSCDVKLVEKSFETDTNLNFQILYEILLGKATLYAVLVSALVLMAMVKRKDSRG

SEQ ID NO: 14119 - protein, 904 aa, synthetic construct
MALPVTALLLPLALLLHAARPEVQLVESGGGLVQPGGSLRLSCAASGFSFSDFWMSWVRQAPGKGLEWVATISQAGSEKDYVDSVKGRFTISRDNAKKSLYLQMNSLRAEDTAVYYCASGVYSFDYRGQGTLVTVSSGTGGGGSGGGGSGGGGSEFLPVLTQPPSASGTPGQRVTISCSGRSSNIGSNSVNWYRQLPGAAPKLLIYSNNQRPPGVPVRFSGSKSGTSASLAISGLQSEDEATYYCATWDDNLNVHYVFGTGTKVTVLGSRLEDLKNVFPPEVAVFEPSEAEISHTQKATLVCLATGFYPDHVELSWWVNGKEVHSGVCTDPQPLKEQPALNDSRYCLSSRLRVSATFWQNPRNHFRCQVQFYGLSENDEWTQDRAKPVTQIVSAEAWGRADCGFTSESYQQGVLSATNLSVIGFRILLLKVAGFNLLMTLRLWSSRAKRSGSGATNFSLLKQAGDVEENPGPTSMDWIWRILFLVGAATGAHSGPQLQLQESGPGLVKPSETLSLTCTVSGDSISSGDYYWGWIRQPPGKGLEWIGHIYYSGVTYYNPSLKSRVTISVDTSRNQFSLKLSSVTAADTAVYYCTREDSSNWRSRGQGTLVTVSSGSGGGGSGGGGSGGGGSFELEMAQVQLVQSGAEVKKPGSSVKVSCKASGGTFSSYAISWVRQAPGQGLEWMGRIIPILGIANYAQKFQGRVTITADKSTSTAYMELSSLRSEDTAVYYCARGGYYSHDMWSEDWGQGTLVTVSSTRIQNPDPAVYQLRDSKSSDKSVCLFTDFDSQTNVSQSKDSDVYITDKCVLDMRSMDFKSNSAVAWSNKSDFACANAFNNSIIPEDTFFPSPESSCDVKLVEKSFETDTNLNFQILYEILLGKATLYAVLVSALVLMAMVKRKDSRG

SEQ ID NO: 14120 - protein, 898 aa, synthetic construct
MALPVTALLLPLALLLHAARPEVQLVESGGGLVQPGGSLRLSCAASGFSFSDFWMSWVRQAPGKGLEWVATISQAGSEKDYVDSVKGRFTISRDNAKKSLYLQMNSLRAEDTAVYYCASGVYSFDYRGQGTLVTVSSGTGGGGSGGGGSGGGGSEFDFVMTQSPDSLAVSLGERVTMSCKSSQSLLNSGNQKNYLTWYQQKPGQPPKLLIYWASTRESGVPDRFSGSGSGTDFTLTISSLQAEDVAVYYCQNDYSYPYTFGQGTKLEIKLEDLKNVFPPEVAVFEPSEAEISHTQKATLVCLATGFYPDHVELSWWVNGKEVHSGVCTDPQPLKEQPALNDSRYCLSSRLRVSATFWQNPRNHFRCQVQFYGLSENDEWTQDRAKPVTQIVSAEAWGRADCGFTSESYQQGVLSATNLSVIGFRILLLKVAGFNLLMTLRLWSSRAKRSGSGATNFSLLKQAGDVEENPGPTSMDWIWRILFLVGAATGAHSGPQLQLQESGPGLVKPSETLSLTCTVSGDSISSGDYYWGWIRQPPGKGLEWIGHIYYSGVTYYNPSLKSRVTISVDTSRNQFSLKLSSVTAADTAVYYCTREDSSNWRSRGQGTLVTVSSGSGGGGSGGGGSGGGGSFEEVQLVQSGAELKKPGASVKVSCKASGYTFTDYYMKWVRQAPGQGLEWIGDIIPSNGATFYNQKFKGRVTITVDKSTSTAYMELSSLRSEDTAVYYCARSHLLRASWFAYWGQGTLVTVSSTRIQNPDPAVYQLRDSKSSDKSVCLFTDFDSQTNVSQSKDSDVYITDKCVLDMRSMDFKSNSAVAWSNKSDFACANAFNNSIIPEDTFFPSPESSCDVKLVEKSFETDTNLNFQILYEILLGKATLYAVLVSALVLMAMVKRKDSRG

SEQ ID NO: 14121 - protein, 898 aa, synthetic construct
MALPVTALLLPLALLLHAARPEVQLVESGGGLVQPGGSLRLSCAASGFSFSDFWMSWVRQAPGKGLEWVATISQAGSEKDYVDSVKGRFTISRDNAKKSLYLQMNSLRAEDTAVYYCASGVYSFDYRGQGTLVTVSSGTGGGGSGGGGSGGGGSEFDFVMTQSPDSLAVSLGERVTMSCKSSQSLLNSGNQKNYLTWYQQKPGQPPKLLIYWASTRESGVPDRFSGSGSGTDFTLTISSLQAEDVAVYYCQNDYSYPYTFGQGTKLEIKLEDLKNVFPPEVAVFEPSEAEISHTQKATLVCLATGFYPDHVELSWWVNGKEVHSGVCTDPQPLKEQPALNDSRYCLSSRLRVSATFWQNPRNHFRCQVQFYGLSENDEWTQDRAKPVTQIVSAEAWGRADCGFTSESYQQGVLSATNLSVIGFRILLLKVAGFNLLMTLRLWSSRAKRSGSGATNFSLLKQAGDVEENPGPTSMDWIWRILFLVGAATGAHSGPQLQLQESGPGLVKPSETLSLTCTVSGDSISSGDYYWGWIRQPPGKGLEWIGHIYYSGVTYYNPSLKSRVTISVDTSRNQFSLKLSSVTAADTAVYYCTREDSSNWRSRGQGTLVTVSSGSGGGGSGGGGSGGGGSFEQVQLVQSGAELKKPGASVKVSCKASGYTFTDYYMKWVRQAPGQGLEWIGDIIPSNGATFYNQKFKGRVTITVDKSTSTAYMELSSLRSEDTAVYYCARSHLLRASWFAYWGQGTLVTVSSTRIQNPDPAVYQLRDSKSSDKSVCLFTDFDSQTNVSQSKDSDVYITDKCVLDMRSMDFKSNSAVAWSNKSDFACANAFNNSIIPEDTFFPSPESSCDVKLVEKSFETDTNLNFQILYEILLGKATLYAVLVSALVLMAMVKRKDSRG

SEQ ID NO: 14122 - protein, 888 aa, synthetic construct
MALPVTALLLPLALLLHAARPEVQLVESGGGLVQPGGSLRLSCAASGFSFSDFWMSWVRQAPGKGLEWVATISQAGSEKDYVDSVKGRFTISRDNAKKSLYLQMNSLRAEDTAVYYCASGVYSFDYRGQGTLVTVSSGTGGGGSGGGGSGGGGSEFDVQITQSPSYLAASPGETITINCRASKSISKDLAWYQEKPGKTNKLLIYSGSTLQSGIPSRFSGSGSGTDFTLTISSLEPEDFAMYYCQQHNKYPYTFGGGTKLEIKRLEDLKNVFPPEVAVFEPSEAEISHTQKATLVCLATGFYPDHVELSWWVNGKEVHSGVCTDPQPLKEQPALNDSRYCLSSRLRVSATFWQNPRNHFRCQVQFYGLSENDEWTQDRAKPVTQIVSAEAWGRADCGFTSESYQQGVLSATNLSVIGFRILLLKVAGFNLLMTLRLWSSRAKRSGSGATNFSLLKQAGDVEENPGPTSMDWIWRILFLVGAATGAHSGPQLQLQESGPGLVKPSETLSLTCTVSGDSISSGDYYWGWIRQPPGKGLEWIGHIYYSGVTYYNPSLKSRVTISVDTSRNQFSLKLSSVTAADTAVYYCTREDSSNWRSRGQGTLVTVSSGSGGGGSGGGGSGGGGSFEQVQLQQPGAELVRPGASVKLSCKASGYTFTSYWMNWVKQRPDQGLEWIGRIDPYDSETHYNQKFKDKAILTVDKSSSTAYMQLSSLTSEDSAVYYCARGNWDDYWGQGTTLTVSSTRIQNPDPAVYQLRDSKSSDKSVCLFTDFDSQTNVSQSKDSDVYITDKCVLDMRSMDFKSNSAVAWSNKSDFACANAFNNSIIPEDTFFPSPESSCDVKLVEKSFETDTNLNFQILYEILLGKATLYAVLVSALVLMAMVKRKDSRG

SEQ ID NO: 14123 - protein, 890 aa, synthetic construct
MALPVTALLLPLALLLHAARPEVQLVESGGGLVQPGGSLRLSCAASGFSFSDFWMSWVRQAPGKGLEWVATISQAGSEKDYVDSVKGRFTISRDNAKKSLYLQMNSLRAEDTAVYYCASGVYSFDYRGQGTLVTVSSGTGGGGSGGGGSGGGGSEFEIVLTQSPTSMTASPGEQVTITCRASSSINYMHWYQQKPGASPRPWIYETSKLASGVPDRFSGSASGTSYSLTINNMEAEDAATYYCQQWNYPSWTFGGGTKLELKLEDLKNVFPPEVAVFEPSEAEISHTQKATLVCLATGFYPDHVELSWWVNGKEVHSGVCTDPQPLKEQPALNDSRYCLSSRLRVSATFWQNPRNHFRCQVQFYGLSENDEWTQDRAKPVTQIVSAEAWGRADCGFTSESYQQGVLSATNLSVIGFRILLLKVAGFNLLMTLRLWSSRAKRSGSGATNFSLLKQAGDVEENPGPTSMDWIWRILFLVGAATGAHSGPQLQLQESGPGLVKPSETLSLTCTVSGDSISSGDYYWGWIRQPPGKGLEWIGHIYYSGVTYYNPSLKSRVTISVDTSRNQFSLKLSSVTAADTAVYYCTREDSSNWRSRGQGTLVTVSSGSGGGGSGGGGSGGGGSFEEVQLVESGGGLVQPGRSLKLSCAASGFTFSDYNMAWVRQAPKKGLEWVATILYDGGRTYYRGSVKGRFTISRDNAKSTLYLRMDSLRSEDTATYYCATHSRGTDYFDYWGQGVMVTVSSTRIQNPDPAVYQLRDSKSSDKSVCLFTDFDSQTNVSQSKDSDVYITDKCVLDMRSMDFKSNSAVAWSNKSDFACANAFNNSIIPEDTFFPSPESSCDVKLVEKSFETDTNLNFQILYEILLGKATLYAVLVSALVLMAMVKRKDSRG

SEQ ID NO: 14124 - protein, 899 aa, synthetic construct
MALPVTALLLPLALLLHAARPEVQLVESGGGLVQPGGSLRLSCAASGFSFSDFWMSWVRQAPGKGLEWVATISQAGSEKDYVDSVKGRFTISRDNAKKSLYLQMNSLRAEDTAVYYCASGVYSFDYRGQGTLVTVSSGTGGGGSGGGGSGGGGSEFDIVMTQSPSSLAVSEGETVTINCKSSQSFLSSGDGKNYVAWYQYKPGQSPKLLIYWASTRQSGVPDRFIGSGSGTDFTLTISTVQAEDLAIYYCQQYYDTPLTFGSGTKLEIKLEDLKNVFPPEVAVFEPSEAEISHTQKATLVCLATGFYPDHVELSWWVNGKEVHSGVCTDPQPLKEQPALNDSRYCLSSRLRVSATFWQNPRNHFRCQVQFYGLSENDEWTQDRAKPVTQIVSAEAWGRADCGFTSESYQQGVLSATNLSVIGFRILLLKVAGFNLLMTLRLWSSRAKRSGSGATNFSLLKQAGDVEENPGPTSMDWIWRILFLVGAATGAHSGPQLQLQESGPGLVKPSETLSLTCTVSGDSISSGDYYWGWIRQPPGKGLEWIGHIYYSGVTYYNPSLKSRVTISVDTSRNQFSLKLSSVTAADTAVYYCTREDSSNWRSRGQGTLVTVSSGSGGGGSGGGGSGGGGSFEEVKLQESGPSLVQSSQTLSLTCTVSGFSLTSYHIHWVRQTPGKGLEWMGVMWSDGDTSYNSALKSRLSISRDTSQSQVFLKMNSLQTEDTATYYCARGYYSSYLYLWFAYWGQGTLVTVSSTRIQNPDPAVYQLRDSKSSDKSVCLFTDFDSQTNVSQSKDSDVYITDKCVLDMRSMDFKSNSAVAWSNKSDFACANAFNNSIIPEDTFFPSPESSCDVKLVEKSFETDTNLNFQILYEILLGKATLYAVLVSALVLMAMVKRKDSRG

SEQ ID NO: 14125 - protein, 903 aa, synthetic construct
MALPVTALLLPLALLLHAARPEVQLVESGGGLVQPGGSLRLSCAASGFSFSDFWMSWVRQAPGKGLEWVATISQAGSEKDYVDSVKGRFTISRDNAKKSLYLQMNSLRAEDTAVYYCASGVYSFDYRGQGTLVTVSSGTGGGGSGGGGSGGGGSEFDVLMTQTPVSLPVSLGGQVSISCRSSQSLVHSDGDTYLHWYLQKPGQSPQLLIYRVSNRFSGVPDRFSGSGSGTDFTLKISRVEPEDLGLYYCLQTTHFPPWTFGGGTKLEMKLEDLKNVFPPEVAVFEPSEAEISHTQKATLVCLATGFYPDHVELSWWVNGKEVHSGVCTDPQPLKEQPALNDSRYCLSSRLRVSATFWQNPRNHFRCQVQFYGLSENDEWTQDRAKPVTQIVSAEAWGRADCGFTSESYQQGVLSATNLSVIGFRILLLKVAGFNLLMTLRLWSSRAKRSGSGATNFSLLKQAGDVEENPGPTSMDWIWRILFLVGAATGAHSGPQLQLQESGPGLVKPSETLSLTCTVSGDSISSGDYYWGWIRQPPGKGLEWIGHIYYSGVTYYNPSLKSRVTISVDTSRNQFSLKLSSVTAADTAVYYCTREDSSNWRSRGQGTLVTVSSGSGGGGSGGGGSGGGGSFEQVQLQQSGPELRRPGSSVRLSCKASGYRIKDFLIHWIKNRPEHGLEWIGWIDPEDGETKYAQKFQTKATLTADTSSNTAYMQLSSLTSEDTATYFCARWGDVYYGLMRGHVMDAWGQGTSVTVSSTRIQNPDPAVYQLRDSKSSDKSVCLFTDFDSQTNVSQSKDSDVYITDKCVLDMRSMDFKSNSAVAWSNKSDFACANAFNNSIIPEDTFFPSPESSCDVKLVEKSFETDTNLNFQILYEILLGKATLYAVLVSALVLMAMVKRKDSRG

SEQ ID NO: 14126 - protein, 898 aa, synthetic construct
MALPVTALLLPLALLLHAARPEVQLVESGGGLVQPGGSLRLSCAASGFSFSDFWMSWVRQAPGKGLEWVATISQAGSEKDYVDSVKGRFTISRDNAKKSLYLQMNSLRAEDTAVYYCASGVYSFDYRGQGTLVTVSSGTGGGGSGGGGSGGGGSEFDIVMTQSPATLSLSPGERATLSCRSSKSLQNVNGNTYLYWFQQKPGQSPQLLIYRMSNLNSGVPDRFSGSGSGTEFTLTISSLEPEDFAVYYCMQHLEYPITFGAGTKLEIKLEDLKNVFPPEVAVFEPSEAEISHTQKATLVCLATGFYPDHVELSWWVNGKEVHSGVCTDPQPLKEQPALNDSRYCLSSRLRVSATFWQNPRNHFRCQVQFYGLSENDEWTQDRAKPVTQIVSAEAWGRADCGFTSESYQQGVLSATNLSVIGFRILLLKVAGFNLLMTLRLWSSRAKRSGSGATNFSLLKQAGDVEENPGPTSMDWIWRILFLVGAATGAHSGPQLQLQESGPGLVKPSETLSLTCTVSGDSISSGDYYWGWIRQPPGKGLEWIGHIYYSGVTYYNPSLKSRVTISVDTSRNQFSLKLSSVTAADTAVYYCTREDSSNWRSRGQGTLVTVSSGSGGGGSGGGGSGGGGSFEEVQLVESGGGLVKPGGSLKLSCAASGYTFTSYVMHWVRQAPGKGLEWIGYINPYNDGTKYNEKFQGRVTISSDKSISTAYMELSSLRSEDTAMYYCARGTYYYGTRVFDYWGQGTLVTVSSTRIQNPDPAVYQLRDSKSSDKSVCLFTDFDSQTNVSQSKDSDVYITDKCVLDMRSMDFKSNSAVAWSNKSDFACANAFNNSIIPEDTFFPSPESSCDVKLVEKSFETDTNLNFQILYEILLGKATLYAVLVSALVLMAMVKRKDSRG

SEQ ID NO: 14127 - protein, 894 aa, synthetic construct
MALPVTALLLPLALLLHAARPEVQLVESGGGLVQPGGSLRLSCAASGFSFSDFWMSWVRQAPGKGLEWVATISQAGSEKDYVDSVKGRFTISRDNAKKSLYLQMNSLRAEDTAVYYCASGVYSFDYRGQGTLVTVSSGTGGGGSGGGGSGGGGSEFDIQMTQSPSSLSASVGDRVTITCKASDHINNWLAWYQQKPGQAPKLLIYGATTLETGVPSRFSGSGSGTDYTLTISSLQPEDFATYYCQQSWNTPWTFGQGTKLEIKRLEDLKNVFPPEVAVFEPSEAEISHTQKATLVCLATGFYPDHVELSWWVNGKEVHSGVCTDPQPLKEQPALNDSRYCLSSRLRVSATFWQNPRNHFRCQVQFYGLSENDEWTQDRAKPVTQIVSAEAWGRADCGFTSESYQQGVLSATNLSVIGFRILLLKVAGFNLLMTLRLWSSRAKRSGSGATNFSLLKQAGDVEENPGPTSMDWIWRILFLVGAATGAHSGPQLQLQESGPGLVKPSETLSLTCTVSGDSISSGDYYWGWIRQPPGKGLEWIGHIYYSGVTYYNPSLKSRVTISVDTSRNQFSLKLSSVTAADTAVYYCTREDSSNWRSRGQGTLVTVSSGSGGGGSGGGGSGGGGSFEQVQLQQPGAELVKPGASVKMSCKASGYAFSSYWINWMKQKPGQGLEWIGQIYPGDGDTNYNGKFKGRATLTADTSSSTAYMQLSSLTSEDSAVYFCARSITTVVGCAMDYWGQGTSVTVSSTRIQNPDPAVYQLRDSKSSDKSVCLFTDFDSQTNVSQSKDSDVYITDKCVLDMRSMDFKSNSAVAWSNKSDFACANAFNNSIIPEDTFFPSPESSCDVKLVEKSFETDTNLNFQILYEILLGKATLYAVLVSALVLMAMVKRKDSRG

SEQ ID NO: 14128 - protein, 896 aa, synthetic construct
MALPVTALLLPLALLLHAARPEVQLVESGGGLVQPGGSLRLSCAASGFSFSDFWMSWVRQAPGKGLEWVATISQAGSEKDYVDSVKGRFTISRDNAKKSLYLQMNSLRAEDTAVYYCASGVYSFDYRGQGTLVTVSSGTGGGGSGGGGSGGGGSEFQIVLSQSPAILSASPGEKVTMTCRASSSVSYMHWYQQKPGSSPKPWIYATSNLASGVPARFSGSGSGTSYSFTISRVEAEDAATYYCQQWTFNPPTFGGGTRLEIKRTVAALEDLKNVFPPEVAVFEPSEAEISHTQKATLVCLATGFYPDHVELSWWVNGKEVHSGVCTDPQPLKEQPALNDSRYCLSSRLRVSATFWQNPRNHFRCQVQFYGLSENDEWTQDRAKPVTQIVSAEAWGRADCGFTSESYQQGVLSATNLSVIGFRILLLKVAGFNLLMTLRLWSSRAKRSGSGATNFSLLKQAGDVEENPGPTSMDWIWRILFLVGAATGAHSGPQLQLQESGPGLVKPSETLSLTCTVSGDSISSGDYYWGWIRQPPGKGLEWIGHIYYSGVTYYNPSLKSRVTISVDTSRNQFSLKLSSVTAADTAVYYCTREDSSNWRSRGQGTLVTVSSGSGGGGSGGGGSGGGGSFEQAYLQQSGAELVRPGASVKMSCKASGYTFTSYNMHWVKQTPRQGLEWIGGIYPGNGDTSYNQKFKGKATLTVGKSSSTAYMQLSSLTSEDSAVYFCARYDYNYAMDYWGQGTSVTVSSASTRIQNPDPAVYQLRDSKSSDKSVCLFTDFDSQTNVSQSKDSDVYITDKCVLDMRSMDFKSNSAVAWSNKSDFACANAFNNSIIPEDTFFPSPESSCDVKLVEKSFETDTNLNFQILYEILLGKATLYAVLVSALVLMAMVKRKDSRG

SEQ ID NO: 14129 - protein, 894 aa, synthetic construct
MALPVTALLLPLALLLHAARPEVQLVESGGGLVQPGGSLRLSCAASGFSFSDFWMSWVRQAPGKGLEWVATISQAGSEKDYVDSVKGRFTISRDNAKKSLYLQMNSLRAEDTAVYYCASGVYSFDYRGQGTLVTVSSGTGGGGSGGGGSGGGGSEFEIVLTQSPATLSLSPGERATLSCRASQSVSSYLAWYQQKPGQAPRLLIYDASNRATGIPARFSGSGSGTDFTLTISSLEPEDFAVYYCQQRSNWPITFGQGTRLEIKLEDLKNVFPPEVAVFEPSEAEISHTQKATLVCLATGFYPDHVELSWWVNGKEVHSGVCTDPQPLKEQPALNDSRYCLSSRLRVSATFWQNPRNHFRCQVQFYGLSENDEWTQDRAKPVTQIVSAEAWGRADCGFTSESYQQGVLSATNLSVIGFRILLLKVAGFNLLMTLRLWSSRAKRSGSGATNFSLLKQAGDVEENPGPTSMDWIWRILFLVGAATGAHSGPQLQLQESGPGLVKPSETLSLTCTVSGDSISSGDYYWGWIRQPPGKGLEWIGHIYYSGVTYYNPSLKSRVTISVDTSRNQFSLKLSSVTAADTAVYYCTREDSSNWRSRGQGTLVTVSSGSGGGGSGGGGSGGGGSFEEVQLVESGGGLVQPDRSLRLSCAASGFTFHDYAMHWVRQAPGKGLEWVSTISWNSGTIGYADSVKGRFTISRDNAKNSLYLQMNSLRAEDTALYYCAKDIQYGNYYYGMDVWGQGTTVTVSSTRIQNPDPAVYQLRDSKSSDKSVCLFTDFDSQTNVSQSKDSDVYITDKCVLDMRSMDFKSNSAVAWSNKSDFACANAFNNSIIPEDTFFPSPESSCDVKLVEKSFETDTNLNFQILYEILLGKATLYAVLVSALVLMAMVKRKDSRG

SEQ ID NO: 14130 - protein, 889 aa, synthetic construct
MALPVTALLLPLALLLHAARPEVQLVESGGGLVQPGGSLRLSCAASGFSFSDFWMSWVRQAPGKGLEWVATISQAGSEKDYVDSVKGRFTISRDNAKKSLYLQMNSLRAEDTAVYYCASGVYSFDYRGQGTLVTVSSGTGGGGSGGGGSGGGGSEFDIQMTQSPSSLSASVGDRVTINCKASQDINSYLSWFQQKPGKAPKTLIYRANRLVDGVPSRFSGSGSGQDYTLTISSLQPEDFATYYCLQYDEFPLTFGGGTKVEIKLEDLKNVFPPEVAVFEPSEAEISHTQKATLVCLATGFYPDHVELSWWVNGKEVHSGVCTDPQPLKEQPALNDSRYCLSSRLRVSATFWQNPRNHFRCQVQFYGLSENDEWTQDRAKPVTQIVSAEAWGRADCGFTSESYQQGVLSATNLSVIGFRILLLKVAGFNLLMTLRLWSSRAKRSGSGATNFSLLKQAGDVEENPGPTSMDWIWRILFLVGAATGAHSGPQLQLQESGPGLVKPSETLSLTCTVSGDSISSGDYYWGWIRQPPGKGLEWIGHIYYSGVTYYNPSLKSRVTISVDTSRNQFSLKLSSVTAADTAVYYCTREDSSNWRSRGQGTLVTVSSGSGGGGSGGGGSGGGGSFEQVQLVQSGAEVKKPGASVKVSCKASGYTFTNYDINWVRQAPGQGLEWIGWIYPGDGSTKYNEKFKAKATLTADTSTSTAYMELRSLRSDDTAVYYCASGYEDAMDYWGQGTTVTVSSTRIQNPDPAVYQLRDSKSSDKSVCLFTDFDSQTNVSQSKDSDVYITDKCVLDMRSMDFKSNSAVAWSNKSDFACANAFNNSIIPEDTFFPSPESSCDVKLVEKSFETDTNLNFQILYEILLGKATLYAVLVSALVLMAMVKRKDSRG

SEQ ID NO: 14131 - protein, 891 aa, synthetic construct
MALPVTALLLPLALLLHAARPEVQLVESGGGLVQPGGSLRLSCAASGFSFSDFWMSWVRQAPGKGLEWVATISQAGSEKDYVDSVKGRFTISRDNAKKSLYLQMNSLRAEDTAVYYCASGVYSFDYRGQGTLVTVSSGTGGGGSGGGGSGGGGSEFDIVMTQTPLSLSVTPGQPASISCKSSQSLLDGDGKTYLNWLLQKPGQSPQRLIYLVSKLDSGVPDRFSGSGSGTDFTLKISRVEAEDVGVYYCWQGTHFPRTFGQGTKLEIKLEDLKNVFPPEVAVFEPSEAEISHTQKATLVCLATGFYPDHVELSWWVNGKEVHSGVCTDPQPLKEQPALNDSRYCLSSRLRVSATFWQNPRNHFRCQVQFYGLSENDEWTQDRAKPVTQIVSAEAWGRADCGFTSESYQQGVLSATNLSVIGFRILLLKVAGFNLLMTLRLWSSRAKRSGSGATNFSLLKQAGDVEENPGPTSMDWIWRILFLVGAATGAHSGPQLQLQESGPGLVKPSETLSLTCTVSGDSISSGDYYWGWIRQPPGKGLEWIGHIYYSGVTYYNPSLKSRVTISVDTSRNQFSLKLSSVTAADTAVYYCTREDSSNWRSRGQGTLVTVSSGSGGGGSGGGGSGGGGSFEQVQLVQSGAEVKKPGASVKVSCKASGYTFKDTYIHWVRQAPGQGLEWMGRIDPANGNTKYDPKFQGRVTMTRDTSISTAYMELSRLRSDDTAVYYCARRGGVDWGQGTLVTVSSTRIQNPDPAVYQLRDSKSSDKSVCLFTDFDSQTNVSQSKDSDVYITDKCVLDMRSMDFKSNSAVAWSNKSDFACANAFNNSIIPEDTFFPSPESSCDVKLVEKSFETDTNLNFQILYEILLGKATLYAVLVSALVLMAMVKRKDSRG

SEQ ID NO: 14132 - protein, 892 aa, synthetic construct
MALPVTALLLPLALLLHAARPEVQLVESGGGLVQPGGSLRLSCAASGFSFSDFWMSWVRQAPGKGLEWVATISQAGSEKDYVDSVKGRFTISRDNAKKSLYLQMNSLRAEDTAVYYCASGVYSFDYRGQGTLVTVSSGTGGGGSGGGGSGGGGSEFDIQMTQSPSSLSASVGDRVTITCKASQDVSTAVAWFQQKPGKAPKLLIYSPSYRYTGVPSRFSGSGSGTDFTLTISSLQPEDFTYYCQQLYSTPYTFGQGTKVEIKLEDLKNVFPPEVAVFEPSEAEISHTQKATLVCLATGFYPDHVELSWWVNGKEVHSGVCTDPQPLKEQPALNDSRYCLSSRLRVSATFWQNPRNHFRCQVQFYGLSENDEWTQDRAKPVTQIVSAEAWGRADCGFTSESYQQGVLSATNLSVIGFRILLLKVAGFNLLMTLRLWSSRAKRSGSGATNFSLLKQAGDVEENPGPTSMDWIWRILFLVGAATGAHSGPQLQLQESGPGLVKPSETLSLTCTVSGDSISSGDYYWGWIRQPPGKGLEWIGHIYYSGVTYYNPSLKSRVTISVDTSRNQFSLKLSSVTAADTAVYYCTREDSSNWRSRGQGTLVTVSSGSGGGGSGGGGSGGGGSFEEVQLVQSGAEVKKPGASVKVSCKASGYTFTDYYLDVVVRQAPGQGLEWIGRVNPYNGGTIYNQKFKGRVTLTRDTSTSTAYLELSSLRSEDTAVYYCARDHYRYDPLLDYWGQGTLVTVSSTRIQNPDPAVYQLRDSKSSDKSVCLFTDFDSQTNVSQSKDSDVYITDKCVLDMRSMDFKSNSAVAWSNKSDFACANAFNNSIIPEDTFFPSPESSCDVKLVEKSFETDTNLNFQILYEILLGKATLYAVLVSALVLMAMVKRKDSRG

SEQ ID NO: 14133 - protein, 898 aa, synthetic construct
MALPVTALLLPLALLLHAARPEVQLVESGGGLVQPGGSLRLSCAASGFSFSDFWMSWVRQAPGKGLEWVATISQAGSEKDYVDSVKGRFTISRDNAKKSLYLQMNSLRAEDTAVYYCASGVYSFDYRGQGTLVTVSSGTGGGGSGGGGSGGGGSEFDIQMTQSPSSLSASVGDRVTITCRASQSVSTSSYNYMHWYQQKPGKPPKLLIKYASNLESGVPSRFSGSGSGTDFTLTISSLQPEDFATYYCQHSWEIPLTFGQGTKVEIKLEDLKNVFPPEVAVFEPSEAEISHTQKATLVCLATGFYPDHVELSWWVNGKEVHSGVCTDPQPLKEQPALNDSRYCLSSRLRVSATFWQNPRNHFRCQVQFYGLSENDEWTQDRAKPVTQIVSAEAWGRADCGFTSESYQQGVLSATNLSVIGFRILLLKVAGFNLLMTLRLWSSRAKRSGSGATNFSLLKQAGDVEENPGPTSMDWIWRILFLVGAATGAHSGPQLQLQESGPGLVKPSETLSLTCTVSGDSISSGDYYWGWIRQPPGKGLEWIGHIYYSGVTYYNPSLKSRVTISVDTSRNQFSLKLSSVTAADTAVYYCTREDSSNWRSRGQGTLVTVSSGSGGGGSGGGGSGGGGSFEEVQLVQSGAEVKKPGASVKVSCKASGYSFTDYYMHWVRQAPGQGLEWIGRINPYNGAAFYSQNFKDRVTLTVDTSTSTAYLELSSLRSEDTAVYYCAIERGADLEGYAMDYWGQGTLVTVSSTRIQNPDPAVYQLRDSKSSDKSVCLFTDFDSQTNVSQSKDSDVYITDKCVLDMRSMDFKSNSAVAWSNKSDFACANAFNNSIIPEDTFFPSPESSCDVKLVEKSFETDTNLNFQILYEILLGKATLYAVLVSALVLMAMVKRKDSRG

SEQ ID NO: 14134 - protein, 896 aa, synthetic construct
MALPVTALLLPLALLLHAARPEVQLVESGGGLVQPGGSLRLSCAASGFSFSDFWMSWVRQAPGKGLEWVATISQAGSEKDYVDSVKGRFTISRDNAKKSLYLQMNSLRAEDTAVYYCASGVYSFDYRGQGTLVTVSSGTGGGGSGGGGSGGGGSEFEIVLTQSPATLSASPGERVTLTCRASSNVISSYVHWYQQKPGSSPRLFLYSTSNLASGVPSRFSGSGSGTDFTFTISSLEAEDAATYYCQQYSGYPLTFGQGTRLEIKLEDLKNVFPPEVAVFEPSEAEISHTQKATLVCLATGFYPDHVELSWWVNGKEVHSGVCTDPQPLKEQPALNDSRYCLSSRLRVSATFWQNPRNHFRCQVQFYGLSENDEWTQDRAKPVTQIVSAEAWGRADCGFTSESYQQGVLSATNLSVIGFRILLLKVAGFNLLMTLRLWSSRAKRSGSGATNFSLLKQAGDVEENPGPTSMDWIWRILFLVGAATGAHSGPQLQLQESGPGLVKPSETLSLTCTVSGDSISSGDYYWGWIRQPPGKGLEWIGHIYYSGVTYYNPSLKSRVTISVDTSRNQFSLKLSSVTAADTAVYYCTREDSSNWRSRGQGTLVTVSSGSGGGGSGGGGSGGGGSFEQVQLQESGPGLVKPSETLSLTCAVSGYSITSAYYWNWIRQPPGKGLEWIGYISYDGRNNYNPSLKNRITINPDTSKNQFSLQLNSVTPEDTAVYYCAREGDYDVGNYYAMDYWGQGTLVTVSSTRIQNPDPAVYQLRDSKSSDKSVCLFTDFDSQTNVSQSKDSDVYITDKCVLDMRSMDFKSNSAVAWSNKSDFACANAFNNSIIPEDTFFPSPESSCDVKLVEKSFETDTNLNFQILYEILLGKATLYAVLVSALVLMAMVKRKDSRG

SEQ ID NO: 14135 - protein, 896 aa, synthetic construct
MALPVTALLLPLALLLHAARPEVQLVESGGGLVQPGGSLRLSCAASGFSFSDFWMSWVRQAPGKGLEWVATISQAGSEKDYVDSVKGRFTISRDNAKKSLYLQMNSLRAEDTAVYYCASGVYSFDYRGQGTLVTVSSGTGGGGSGGGGSGGGGSEFEIVLTQSPATLSLSPGERATLSCRASSNVISSYVHWYQQKPGQAPRLLIYSTSNLASGIPARFSGSGSGTDFTLTISSLEPEDFAVYYCQQYSGYPLTFGQGTRLEIKLEDLKNVFPPEVAVFEPSEAEISHTQKATLVCLATGFYPDHVELSWWVNGKEVHSGVCTDPQPLKEQPALNDSRYCLSSRLRVSATFWQNPRNHFRCQVQFYGLSENDEWTQDRAKPVTQIVSAEAWGRADCGFTSESYQQGVLSATNLSVIGFRILLLKVAGFNLLMTLRLWSSRAKRSGSGATNFSLLKQAGDVEENPGPTSMDWIWRILFLVGAATGAHSGPQLQLQESGPGLVKPSETLSLTCTVSGDSISSGDYYWGWIRQPPGKGLEWIGHIYYSGVTYYNPSLKSRVTISVDTSRNQFSLKLSSVTAADTAVYYCTREDSSNWRSRGQGTLVTVSSGSGGGGSGGGGSGGGGSFEEVQLVESGGGLVQPGRSLRLSCAASGYSITSAYYWNWVRQAPGKGLEWVSYISYDGRNNYNPSLKNRFTISRDNAKKSLYLQMNSLRAEDTALYYCAKEGDYDVGNYYAMDYWGQGTTVTVSSTRIQNPDPAVYQLRDSKSSDKSVCLFTDFDSQTNVSQSKDSDVYITDKCVLDMRSMDFKSNSAVAWSNKSDFACANAFNNSIIPEDTFFPSPESSCDVKLVEKSFETDTNLNFQILYEILLGKATLYAVLVSALVLMAMVKRKDSRG

SEQ ID NO: 14136 - protein, 895 aa, synthetic construct
MALPVTALLLPLALLLHAARPEVQLVESGGGLVQPGGSLRLSCAASGFSFSDFWMSWVRQAPGKGLEWVATISQAGSEKDYVDSVKGRFTISRDNAKKSLYLQMNSLRAEDTAVYYCASGVYSFDYRGQGTLVTVSSGTGGGGSGGGGSGGGGSEFDVVMTQTPLSLPVSLGDQASISCRSSQSLVHSNGNTYLRWYLQKPGQSPKVLIYKVSNRVSGVPDRFSGSGSGTDFTLKINRVEAEDLGVYFCSQSTHVPWTFGGGTKLEIKLEDLKNVFPPEVAVFEPSEAEISHTQKATLVCLATGFYPDHVELSWWVNGKEVHSGVCTDPQPLKEQPALNDSRYCLSSRLRVSATFWQNPRNHFRCQVQFYGLSENDEWTQDRAKPVTQIVSAEAWGRADCGFTSESYQQGVLSATNLSVIGFRILLLKVAGFNLLMTLRLWSSRAKRSGSGATNFSLLKQAGDVEENPGPTSMDWIWRILFLVGAATGAHSGPQLQLQESGPGLVKPSETLSLTCTVSGDSISSGDYYWGWIRQPPGKGLEWIGHIYYSGVTYYNPSLKSRVTISVDTSRNQFSLKLSSVTAADTAVYYCTREDSSNWRSRGQGTLVTVSSGSGGGGSGGGGSGGGGSFEGVKLDETGGGLVQPGGAMKLSCVTSGFTFGHYWMNWVRQSPEKGLEWVAQFRNKPYNYETYYSDSVKGRFTISRDDSKSSVYLQMNNLRVEDTGIYYCTGASYGMEYLGQGTSVTVSTTRIQNPDPAVYQLRDSKSSDKSVCLFTDFDSQTNVSQSKDSDVYITDKCVLDMRSMDFKSNSAVAWSNKSDFACANAFNNSIIPEDTFFPSPESSCDVKLVEKSFETDTNLNFQILYEILLGKATLYAVLVSALVLMAMVKRKDSRG

SEQ ID NO: 14137 - protein, 901 aa, synthetic construct
MALPVTALLLPLALLLHAARPEVQLVESGGGLVQPGGSLRLSCAASGFSFSDFWMSWVRQAPGKGLEWVATISQAGSEKDYVDSVKGRFTISRDNAKKSLYLQMNSLRAEDTAVYYCASGVYSFDYRGQGTLVTVSSGTGGGGSGGGGSGGGGSEFQVQLVESGGNLVQPGGSLRLSCAASGFTFGSFSMSWVRQAPGGGLEWVAGLSARSSLTHYADSVKGRFTISRDNAKNSVYLQMNSLRVEDTAVYYCARRSYDSSGYWGHFYSYMDVWGQGTLVTVSLEDLKNVFPPEVAVFEPSEAEISHTQKATLVCLATGFYPDHVELSWWVNGKEVHSGVCTDPQPLKEQPALNDSRYCLSSRLRVSATFWQNPRNHFRCQVQFYGLSENDEWTQDRAKPVTQIVSAEAWGRADCGFTSESYQQGVLSATNLSVIGFRILLLKVAGFNLLMTLRLWSSRAKRSGSGATNFSLLKQAGDVEENPGPTSMDWIWRILFLVGAATGAHSGPQLQLQESGPGLVKPSETLSLTCTVSGDSISSGDYYWGWIRQPPGKGLEWIGHIYYSGVTYYNPSLKSRVTISVDTSRNQFSLKLSSVTAADTAVYYCTREDSSNWRSRGQGTLVTVSSGSGGGGSGGGGSGGGGSFESVLTQPSSVSAAPGQKVTISCSGSTSNIGNNYVSWYQQHPGKAPKLMIYDVSKRPSGVPDRFSGSKSGNSASLDISGLQSEDEADYYCAAWDDSLSEFLFGTGTKLTVLGTRIQNPDPAVYQLRDSKSSDKSVCLFTDFDSQTNVSQSKDSDVYITDKCVLDMRSMDFKSNSAVAWSNKSDFACANAFNNSIIPEDTFFPSPESSCDVKLVEKSFETDTNLNFQILYEILLGKATLYAVLVSALVLMAMVKRKDSRG

SEQ ID NO: 14138 - protein, 896 aa, synthetic construct
MALPVTALLLPLALLLHAARPEVQLVESGGGLVQPGGSLRLSCAASGFSFSDFWMSWVRQAPGKGLEWVATISQAGSEKDYVDSVKGRFTISRDNAKKSLYLQMNSLRAEDTAVYYCASGVYSFDYRGQGTLVTVSSGTGGGGSGGGGSGGGGSEFDVVMTQSPSSLSASVGDRVTITCQSSLDISHYLNWYQQKPGKAPKLLIYDASNLETGVPSRFSGSGSGTHFTFTISSLQPEDFATYYCQQYDNLPLTFGGGTKLEIKRLEDLKNVFPPEVAVFEPSEAEISHTQKATLVCLATGFYPDHVELSWWVNGKEVHSGVCTDPQPLKEQPALNDSRYCLSSRLRVSATFWQNPRNHFRCQVQFYGLSENDEWTQDRAKPVTQIVSAEAWGRADCGFTSESYQQGVLSATNLSVIGFRILLLKVAGFNLLMTLRLWSSRAKRSGSGATNFSLLKQAGDVEENPGPTSMDWIWRILFLVGAATGAHSGPQLQLQESGPGLVKPSETLSLTCTVSGDSISSGDYYWGWIRQPPGKGLEWIGHIYYSGVTYYNPSLKSRVTISVDTSRNQFSLKLSSVTAADTAVYYCTREDSSNWRSRGQGTLVTVSSGSGGGGSGGGGSGGGGSFEQVQLVQSGGGVVQPGGSLRVSCAASGVTLSDYGMHWVRQAPGKGLEWVAFIRNDGSDKYYADSVKGRFTISRDNSEKTVSLQMSSLRAEDTAVYYCAKNGESGPLDYWYLDLWGRGTLVTVSSTRIQNPDPAVYQLRDSKSSDKSVCLFTDFDSQTNVSQSKDSDVYITDKCVLDMRSMDFKSNSAVAWSNKSDFACANAFNNSIIPEDTFFPSPESSCDVKLVEKSFETDTNLNFQILYEILLGKATLYAVLVSALVLMAMVKRKDSRG

SEQ ID NO: 14139 - protein, 900 aa, synthetic construct
MALPVTALLLPLALLLHAARPEVQLVESGGGLVQPGGSLRLSCAASGFSFSDFWMSWVRQAPGKGLEWVATISQAGSEKDYVDSVKGRFTISRDNAKKSLYLQMNSLRAEDTAVYYCASGVYSFDYRGQGTLVTVSSGTGGGGSGGGGSGGGGSEFSYELTQPPSVSGTPGQRVAISCSGSSSNIGTRMVTWYQHVPGTAPKLLIFNNNQRPSGVPDRFSASKSGTSASLAIIGLQSDDEADYYCATWDDNVKSYVFGTGTKVTVLGSRLEDLKNVFPPEVAVFEPSEAEISHTQKATLVCLATGFYPDHVELSWWVNGKEVHSGVCTDPQPLKEQPALNDSRYCLSSRLRVSATFWQNPRNHFRCQVQFYGLSENDEWTQDRAKPVTQIVSAEAWGRADCGFTSESYQQGVLSATNLSVIGFRILLLKVAGFNLLMTLRLWSSRAKRSGSGATNFSLLKQAGDVEENPGPTSMDWIWRILFLVGAATGAHSGPQLQLQESGPGLVKPSETLSLTCTVSGDSISSGDYYWGWIRQPPGKGLEWIGHIYYSGVTYYNPSLKSRVTISVDTSRNQFSLKLSSVTAADTAVYYCTREDSSNWRSRGQGTLVTVSSGSGGGGSGGGGSGGGGSFELEMAQVQLQQWGAGLLKPSETLSLTCAVYGGSFSGYYWSWIRQPPGKGLEWIGEINHSGSTNYNPSLKSRVTISVDTSKNQFSLKLSSVTAADTAVYYCARAPQSWYVGDVWGQGTLVTVSSTRIQNPDPAVYQLRDSKSSDKSVCLFTDFDSQTNVSQSKDSDVYITDKCVLDMRSMDFKSNSAVAWSNKSDFACANAFNNSIIPEDTFFPSPESSCDVKLVEKSFETDTNLNFQILYEILLGKATLYAVLVSALVLMAMVKRKDSRG

SEQ ID NO: 14140 - protein, 897 aa, synthetic construct
MALPVTALLLPLALLLHAARPEVQLVESGGGLVQPGGSLRLSCAASGFSFSDFWMSWVRQAPGKGLEWVATISQAGSEKDYVDSVKGRFTISRDNAKKSLYLQMNSLRAEDTAVYYCASGVYSFDYRGQGTLVTVSSGTGGGGSGGGGSGGGGSEFQSVLTQPPSLSVAPGKTASITCGGNNIGMKSVHWYQQRPGQAPVLVIYYDSDRPSGIPGRFSGSNSGNTATLTISRVEAGDEADYYCQVWDTTGDHPGYVFGTGTKVTVLLEDLKNVFPPEVAVFEPSEAEISHTQKATLVCLATGFYPDHVELSWWVNGKEVHSGVCTDPQPLKEQPALNDSRYCLSSRLRVSATFWQNPRNHFRCQVQFYGLSENDEWTQDRAKPVTQIVSAEAWGRADCGFTSESYQQGVLSATNLSVIGFRILLLKVAGFNLLMTLRLWSSRAKRSGSGATNFSLLKQAGDVEENPGPTSMDWIWRILFLVGAATGAHSGPQLQLQESGPGLVKPSETLSLTCTVSGDSISSGDYYWGWIRQPPGKGLEWIGHIYYSGVTYYNPSLKSRVTISVDTSRNQFSLKLSSVTAADTAVYYCTREDSSNWRSRGQGTLVTVSSGSGGGGSGGGGSGGGGSFEQVQLVQSGAEVKKPGSSVKVSCKASGGTFSSYAISWVRQAPGQGLEWMGGIIPIFGTANYAQKFQGRVTITADESTSTAYMELSSLRSEDTAVYYCARGVYGYSGSAPYDEWGQGTLVTVSSTRIQNPDPAVYQLRDSKSSDKSVCLFTDFDSQTNVSQSKDSDVYITDKCVLDMRSMDFKSNSAVAWSNKSDFACANAFNNSIIPEDTFFPSPESSCDVKLVEKSFETDTNLNFQILYEILLGKATLYAVLVSALVLMAMVKRKDSRG

SEQ ID NO: 14141 - protein, 895 aa, synthetic construct
MALPVTALLLPLALLLHAARPEVQLVESGGGLVQPGGSLRLSCAASGFSFSDFWMSWVRQAPGKGLEWVATISQAGSEKDYVDSVKGRFTISRDNAKKSLYLQMNSLRAEDTAVYYCASGVYSFDYRGQGTLVTVSSGTGGGGSGGGGSGGGGSEFEVQLVESGGGLVQPGRSLRLSCAASGFTFDDYAMHWVRQAPGKGLEWVSGISWNSGSIGYADSVKGRFTISRDNAKNSLYLQMNSLRAEDTALYYCAKDKGGGYYDFWSGSDYWGQGTLVTVSSLEDLKNVFPPEVAVFEPSEAEISHTQKATLVCLATGFYPDHVELSWWVNGKEVHSGVCTDPQPLKEQPALNDSRYCLSSRLRVSATFWQNPRNHFRCQVQFYGLSENDEWTQDRAKPVTQIVSAEAWGRADCGFTSESYQQGVLSATNLSVIGFRILLLKVAGFNLLMTLRLWSSRAKRSGSGATNFSLLKQAGDVEENPGPTSMDWIWRILFLVGAATGAHSGPQLQLQESGPGLVKPSETLSLTCTVSGDSISSGDYYWGWIRQPPGKGLEWIGHIYYSGVTYYNPSLKSRVTISVDTSRNQFSLKLSSVTAADTAVYYCTREDSSNWRSRGQGTLVTVSSGSGGGGSGGGGSGGGGSFESSELTQDPAVSVALGQTVRITCQGDSLRSYYASWYQQKPGQAPVLVIYGKNNRPSGIPDRFSGSSSGNTASLTITGAQAEDEADYYCNSRDSSGWVFGGGTKLTVLTRIQNPDPAVYQLRDSKSSDKSVCLFTDFDSQTNVSQSKDSDVYITDKCVLDMRSMDFKSNSAVAWSNKSDFACANAFNNSIIPEDTFFPSPESSCDVKLVEKSFETDTNLNFQILYEILLGKATLYAVLVSALVLMAMVKRKDSRG

SEQ ID NO: 14142 - protein, 904 aa, synthetic construct
MALPVTALLLPLALLLHAARPEVQLVESGGGLVQPGGSLRLSCAASGFSFSDFWMSWVRQAPGKGLEWVATISQAGSEKDYVDSVKGRFTISRDNAKKSLYLQMNSLRAEDTAVYYCASGVYSFDYRGQGTLVTVSSGTGGGGSGGGGSGGGGSEFEVQLQQSGPGLVKPSQTLSLTCAISGDSVLSNSDTWNWIRQSPSRGLEWLGRTYHRSTWYDDYASSVRGRVSINVDTSKNQYSLQLNAVTPEDTGVYYCARDRLQDGNSWSDAFDVWGQGTMVTVSSLEDLKNVFPPEVAVFEPSEAEISHTQKATLVCLATGFYPDHVELSWWVNGKEVHSGVCTDPQPLKEQPALNDSRYCLSSRLRVSATFWQNPRNHFRCQVQFYGLSENDEWTQDRAKPVTQIVSAEAWGRADCGFTSESYQQGVLSATNLSVIGFRILLLKVAGFNLLMTLRLWSSRAKRSGSGATNFSLLKQAGDVEENPGPTSMDWIWRILFLVGAATGAHSGPQLQLQESGPGLVKPSETLSLTCTVSGDSISSGDYYWGWIRQPPGKGLEWIGHIYYSGVTYYNPSLKSRVTISVDTSRNQFSLKLSSVTAADTAVYYCTREDSSNWRSRGQGTLVTVSSGSGGGGSGGGGSGGGGSFEQSALTQPASVSGSPGQSITISCTGTSSDVGGYNYVSWYQQHPGKAPKLMIYDVSNRPSGVSNRFSGSKSGNTASLTISGLQAEDEADYYCSSYTSSSTLVYVFGTGTKVTVLTRIQNPDPAVYQLRDSKSSDKSVCLFTDFDSQTNVSQSKDSDVYITDKCVLDMRSMDFKSNSAVAWSNKSDFACANAFNNSIIPEDTFFPSPESSCDVKLVEKSFETDTNLNFQILYEILLGKATLYAVLVSALVLMAMVKRKDSRG

SEQ ID NO: 14143 - protein, 882 aa, synthetic construct
MALPVTALLLPLALLLHAARPEVQLVESGGGLVQPGGSLRLSCAASGFSFSDFWMSWVRQAPGKGLEWVATISQAGSEKDYVDSVKGRFTISRDNAKKSLYLQMNSLRAEDTAVYYCASGVYSFDYRGQGTLVTVSSGTGGGGSGGGGSGGGGSEFQVQLVQSGAEVKKPGASVKVSCKASGYTFTSYDINWVRQATGQGLEWMGWMNPNSGNTGYAQKFQGRVTMTRNTSISTAYMELSSLRSEDTAVYYCARGDSTKVEIKLEDLKNVFPPEVAVFEPSEAEISHTQKATLVCLATGFYPDHVELSWWVNGKEVHSGVCTDPQPLKEQPALNDSRYCLSSRLRVSATFWQNPRNHFRCQVQFYGLSENDEWTQDRAKPVTQIVSAEAWGRADCGFTSESYQQGVLSATNLSVIGFRILLLKVAGFNLLMTLRLWSSRAKRSGSGATNFSLLKQAGDVEENPGPTSMDWIWRILFLVGAATGAHSGPQLQLQESGPGLVKPSETLSLTCTVSGDSISSGDYYWGWIRQPPGKGLEWIGHIYYSGVTYYNPSLKSRVTISVDTSRNQFSLKLSSVTAADTAVYYCTREDSSNWRSRGQGTLVTVSSGSGGGGSGGGGSGGGGSFEQSVLTQPRSVSGSPGQSVTISCTGTSSDVGGYNYVSWYQQHPGEAPKLIIYDADKRPSGISNRFSSGKSGNTASLTISGLQVEDEADYYCCSYAGGSTWVFGGGTKVTVLTRIQNPDPAVYQLRDSKSSDKSVCLFTDFDSQTNVSQSKDSDVYITDKCVLDMRSMDFKSNSAVAWSNKSDFACANAFNNSIIPEDTFFPSPESSCDVKLVEKSFETDTNLNFQILYEILLGKATLYAVLVSALVLMAMVKRKDSRG

SEQ ID NO: 14144 - protein, 904 aa, synthetic construct
MALPVTALLLPLALLLHAARPEVQLVESGGGLVQPGGSLRLSCAASGFSFSDFWMSWVRQAPGKGLEWVATISQAGSEKDYVDSVKGRFTISRDNAKKSLYLQMNSLRAEDTAVYYCASGVYSFDYRGQGTLVTVSSGTGGGGSGGGGSGGGGSEFEVQLQQSGPGLVKPSQTLSLTCAISGDSVSSNSAAWNWIRQSPSRGLEWLGRTYYRSKWYSDYAVSVKSRITINPDTSKNQFSLQLNSVTPEDTAVYYCARDPYDFWSGYPDAFDIWGQGTMVTVSSLEDLKNVFPPEVAVFEPSEAEISHTQKATLVCLATGFYPDHVELSWWVNGKEVHSGVCTDPQPLKEQPALNDSRYCLSSRLRVSATFWQNPRNHFRCQVQFYGLSENDEWTQDRAKPVTQIVSAEAWGRADCGFTSESYQQGVLSATNLSVIGFRILLLKVAGFNLLMTLRLWSSRAKRSGSGATNFSLLKQAGDVEENPGPTSMDWIWRILFLVGAATGAHSGPQLQLQESGPGLVKPSETLSLTCTVSGDSISSGDYYWGWIRQPPGKGLEWIGHIYYSGVTYYNPSLKSRVTISVDTSRNQFSLKLSSVTAADTAVYYCTREDSSNWRSRGQGTLVTVSSGSGGGGSGGGGSGGGGSFEQSALTQPASVSGSPGQSITISCTGTSSDVGGYNYVSWYQQHPGKAPKVIISEVNNRPSGVSHRFSGSKSGNTASLTISGLQAEDEADYFCSSYTSGRTLYVFGTGSKVTVLGTRIQNPDPAVYQLRDSKSSDKSVCLFTDFDSQTNVSQSKDSDVYITDKCVLDMRSMDFKSNSAVAWSNKSDFACANAFNNSIIPEDTFFPSPESSCDVKLVEKSFETDTNLNFQILYEILLGKATLYAVLVSALVLMAMVKRKDSRG

SEQ ID NO: 14145 - protein, 903 aa, synthetic construct
MALPVTALLLPLALLLHAARPEVQLVESGGGLVQPGGSLRLSCAASGFSFSDFWMSWVRQAPGKGLEWVATISQAGSEKDYVDSVKGRFTISRDNAKKSLYLQMNSLRAEDTAVYYCASGVYSFDYRGQGTLVTVSSGTGGGGSGGGGSGGGGSEFQSALTQPASASGSPGQSVTISCTGTSSDVGGYNYVSWYQQHPGKAPKLMIYDVSNRPSGVSNRFSGSKSGNTASLTISGLQAEDEADYYCSSYTSSSTLYVFGTGTQLTVLLEDLKNVFPPEVAVFEPSEAEISHTQKATLVCLATGFYPDHVELSWWVNGKEVHSGVCTDPQPLKEQPALNDSRYCLSSRLRVSATFWQNPRNHFRCQVQFYGLSENDEWTQDRAKPVTQIVSAEAWGRADCGFTSESYQQGVLSATNLSVIGFRILLLKVAGFNLLMTLRLWSSRAKRSGSGATNFSLLKQAGDVEENPGPTSMDWIWRILFLVGAATGAHSGPQLQLQESGPGLVKPSETLSLTCTVSGDSISSGDYYWGWIRQPPGKGLEWIGHIYYSGVTYYNPSLKSRVTISVDTSRNQFSLKLSSVTAADTAVYYCTREDSSNWRSRGQGTLVTVSSGSGGGGSGGGGSGGGGSFEEVQLQQSGPGLVKPSQTLSLTCAISGDSMLSNSDTWNWIRQSPSRGLEWLGRTYHRSTWYDDYASSVRGRVSINVDTSKNQYSLQLNAVTPEDTGVYYCARVRLQDGNSWSDAFDVWGQGTMVTVSSTRIQNPDPAVYQLRDSKSSDKSVCLFTDFDSQTNVSQSKDSDVYITDKCVLDMRSMDFKSNSAVAWSNKSDFACANAFNNSIIPEDTFFPSPESSCDVKLVEKSFETDTNLNFQILYEILLGKATLYAVLVSALVLMAMVKRKDSRG

SEQ ID NO: 14146 - protein, 903 aa, synthetic construct
MALPVTALLLPLALLLHAARPEVQLVESGGGLVQPGGSLRLSCAASGFSFSDFWMSWVRQAPGKGLEWVATISQAGSEKDYVDSVKGRFTISRDNAKKSLYLQMNSLRAEDTAVYYCASGVYSFDYRGQGTLVTVSSGTGGGGSGGGGSGGGGSEFDVMLTQTPLSLPVSLGDQASISCRSSQSILHSTGDTYLEWYLQKPGQSPKLLINKVSNRLSGVPDRFSGSGSGTDFTLKISRVEAEDLGVYYCFQGSHVPWTFGGGTKLEIKRADAAPTVSIFPLEDLKNVFPPEVAVFEPSEAEISHTQKATLVCLATGFYPDHVELSWWVNGKEVHSGVCTDPQPLKEQPALNDSRYCLSSRLRVSATFWQNPRNHFRCQVQFYGLSENDEWTQDRAKPVTQIVSAEAWGRADCGFTSESYQQGVLSATNLSVIGFRILLLKVAGFNLLMTLRLWSSRAKRSGSGATNFSLLKQAGDVEENPGPTSMDWIWRILFLVGAATGAHSGPQLQLQESGPGLVKPSETLSLTCTVSGDSISSGDYYWGWIRQPPGKGLEWIGHIYYSGVTYYNPSLKSRVTISVDTSRNQFSLKLSSVTAADTAVYYCTREDSSNWRSRGQGTLVTVSSGSGGGGSGGGGSGGGGSFEQVKLQQSGPSLVKPGASVKMSCKASGYTFTDFYMKWVKQSHGKSLEWIGDINPNIGDTFYNQKFKGKATLTVDKSSSTAYMQLNSLTSEDSAVYFCSVGYFDVWGAGTTVTVSSTRIQNPDPAVYQLRDSKSSDKSVCLFTDFDSQTNVSQSKDSDVYITDKCVLDMRSMDFKSNSAVAWSNKSDFACANAFNNSIIPEDTFFPSPESSCDVKLVEKSFETDTNLNFQILYEILLGKATLYAVLVSALVLMAMVKRKDSRG

SEQ ID NO: 14147 - protein, 899 aa, synthetic construct
MALPVTALLLPLALLLHAARPEVQLVESGGGLVQPGGSLRLSCAASGFSFSDFWMSWVRQAPGKGLEWVATISQAGSEKDYVDSVKGRFTISRDNAKKSLYLQMNSLRAEDTAVYYCASGVYSFDYRGQGTLVTVSSGTGGGGSGGGGSGGGGSEFEIVLTQSPATLSLSPGERATLSCRASQSVSIYLAWYQQKPGQAPRLLIYDASNRATGIPARFSGSGSGTDFTLTISSLEPEDFAVYYCQQRSNWPPFTFGPGTKVDIKLEDLKNVFPPEVAVFEPSEAEISHTQKATLVCLATGFYPDHVELSWWVNGKEVHSGVCTDPQPLKEQPALNDSRYCLSSRLRVSATFWQNPRNHFRCQVQFYGLSENDEWTQDRAKPVTQIVSAEAWGRADCGFTSESYQQGVLSATNLSVIGFRILLLKVAGFNLLMTLRLWSSRAKRSGSGATNFSLLKQAGDVEENPGPTSMDWIWRILFLVGAATGAHSGPQLQLQESGPGLVKPSETLSLTCTVSGDSISSGDYYWGWIRQPPGKGLEWIGHIYYSGVTYYNPSLKSRVTISVDTSRNQFSLKLSSVTAADTAVYYCTREDSSNWRSRGQGTLVTVSSGSGGGGSGGGGSGGGGSFEQVQLVESGGGVVQPGRSLRLSCAASGFTFSSYGMHWVRQAPGKGLEWVAVIWDDGSNKYYVDSVKGRFTISRDNSKNTLYLQMNSLRAEDTAVYYCARDDYYGSGSFNSYYGTDVWGQGTTVTVSSTRIQNPDPAVYQLRDSKSSDKSVCLFTDFDSQTNVSQSKDSDVYITDKCVLDMRSMDFKSNSAVAWSNKSDFACANAFNNSIIPEDTFFPSPESSCDVKLVEKSFETDTNLNFQILYEILLGKATLYAVLVSALVLMAMVKRKDSRG

SEQ ID NO: 14148 - protein, 884 aa, synthetic construct
MALPVTALLLPLALLLHAARPEVQLVESGGGLVQPGGSLRLSCAASGFSFSDFWMSWVRQAPGKGLEWVATISQAGSEKDYVDSVKGRFTISRDNAKKSLYLQMNSLRAEDTAVYYCASGVYSFDYRGQGTLVTVSSGTGGGGSGGGGSGGGGSEFDIQMTQSPSSLSASVGDRVTITCRASQGISSWLAWYQQKPEKAPKSLIYAASSLQSGVPSRFSGSGSGTDFTLTISSLQPEDFATYYCQQYNSYPYTFGQGTKLEIKLEDLKNVFPPEVAVFEPSEAEISHTQKATLVCLATGFYPDHVELSWWVNGKEVHSGVCTDPQPLKEQPALNDSRYCLSSRLRVSATFWQNPRNHFRCQVQFYGLSENDEWTQDRAKPVTQIVSAEAWGRADCGFTSESYQQGVLSATNLSVIGFRILLLKVAGFNLLMTLRLWSSRAKRSGSGATNFSLLKQAGDVEENPGPTSMDWIWRILFLVGAATGAHSGPQLQLQESGPGLVKPSETLSLTCTVSGDSISSGDYYWGWIRQPPGKGLEWIGHIYYSGVTYYNPSLKSRVTISVDTSRNQFSLKLSSVTAADTAVYYCTREDSSNWRSRGQGTLVTVSSGSGGGGSGGGGSGGGGSFEEVQLVQSGGGLVHPGGSLRLSCAGSGFTFSTYLMYWVRQAPGKTLEWVSAIGSGGDTYYADSVKGRFTISRDNAKNSLYLQMNSLRAEDMAVYYCARGLGYWGQGTLVTVSSTRIQNPDPAVYQLRDSKSSDKSVCLFTDFDSQTNVSQSKDSDVYITDKCVLDMRSMDFKSNSAVAWSNKSDFACANAFNNSIIPEDTFFPSPESSCDVKLVEKSFETDTNLNFQILYEILLGKATLYAVLVSALVLMAMVKRKDSRG

SEQ ID NO: 14149 - protein, 903 aa, synthetic construct
MALPVTALLLPLALLLHAARPEVQLVESGGGLVQPGGSLRLSCAASGFSFSDFWMSWVRQAPGKGLEWVATISQAGSEKDYVDSVKGRFTISRDNAKKSLYLQMNSLRAEDTAVYYCASGVYSFDYRGQGTLVTVSSGTGGGGSGGGGSGGGGSEFLPVLTQPPSVSVAPGKTARITCGGNNIGSKSVHWYQQKPGQAPVLVVYDDSDRPSGIPERFSGSNSGNTATLTISRVEAGDEADYYCQVWDSSSDYVVFGGGTKLTVLLEDLKNVFPPEVAVFEPSEAEISHTQKATLVCLATGFYPDHVELSWWVNGKEVHSGVCTDPQPLKEQPALNDSRYCLSSRLRVSATFWQNPRNHFRCQVQFYGLSENDEWTQDRAKPVTQIVSAEAWGRADCGFTSESYQQGVLSATNLSVIGFRILLLKVAGFNLLMTLRLWSSRAKRSGSGATNFSLLKQAGDVEENPGPTSMDWIWRILFLVGAATGAHSGPQLQLQESGPGLVKPSETLSLTCTVSGDSISSGDYYWGWIRQPPGKGLEWIGHIYYSGVTYYNPSLKSRVTISVDTSRNQFSLKLSSVTAADTAVYYCTREDSSNWRSRGQGTLVTVSSGSGGGGSGGGGSGGGGSFEEVQLVQSGAEVKKPGESLKISCKGSGYSFTSYWIGWVRQMPGKGLEWMGIIYPGDSDTRYSPSFQGQVTISADKSISTAYLQWSSLKASDTAMYYCARQVWGWQGGMYPRSNWWYNLDSWGQGTLVTVSSTRIQNPDPAVYQLRDSKSSDKSVCLFTDFDSQTNVSQSKDSDVYITDKCVLDMRSMDFKSNSAVAWSNKSDFACANAFNNSIIPEDTFFPSPESSCDVKLVEKSFETDTNLNFQILYEILLGKATLYAVLVSALVLMAMVKRKDSRG

SEQ ID NO: 14150 - protein, 896 aa, synthetic construct
MALPVTALLLPLALLLHAARPEVQLVESGGGLVQPGGSLRLSCAASGFSFSDFWMSWVRQAPGKGLEWVATISQAGSEKDYVDSVKGRFTISRDNAKKSLYLQMNSLRAEDTAVYYCASGVYSFDYRGQGTLVTVSSGTGGGGSGGGGSGGGGSEFELVMTQSPASLAVSLGQRATISCRASESVDSYGKSFMHWYQLKPGQPPKLLIYRASNLESGVPARFSGSGSRTDFTLTIDPVEADDAATYYCQQNNEDPWTFGGGTKLEIKLEDLKNVFPPEVAVFEPSEAEISHTQKATLVCLATGFYPDHVELSWWVNGKEVHSGVCTDPQPLKEQPALNDSRYCLSSRLRVSATFWQNPRNHFRCQVQFYGLSENDEWTQDRAKPVTQIVSAEAWGRADCGFTSESYQQGVLSATNLSVIGFRILLLKVAGFNLLMTLRLWSSRAKRSGSGATNFSLLKQAGDVEENPGPTSMDWIWRILFLVGAATGAHSGPQLQLQESGPGLVKPSETLSLTCTVSGDSISSGDYYWGWIRQPPGKGLEWIGHIYYSGVTYYNPSLKSRVTISVDTSRNQFSLKLSSVTAADTAVYYCTREDSSNWRSRGQGTLVTVSSGSGGGGSGGGGSGGGGSFEEVQLEQSGPELVKPGASVKMSCKASGYTFTNYYMKWVKQSHGKSLEWIGDLNPNNGDTFYNQKFKGKATLTVDKSSNTAYMQLNSLTSEDSAVYYCARTGRYEENAMDYWGQGTSVTVSSTRIQNPDPAVYQLRDSKSSDKSVCLFTDFDSQTNVSQSKDSDVYITDKCVLDMRSMDFKSNSAVAWSNKSDFACANAFNNSIIPEDTFFPSPESSCDVKLVEKSFETDTNLNFQILYEILLGKATLYAVLVSALVLMAMVKRKDSRG

SEQ ID NO: 14151 - protein, 890 aa, synthetic construct
MALPVTALLLPLALLLHAARPEVQLVESGGGLVQPGGSLRLSCAASGFSFSDFWMSWVRQAPGKGLEWVATISQAGSEKDYVDSVKGRFTISRDNAKKSLYLQMNSLRAEDTAVYYCASGVYSFDYRGQGTLVTVSSGTGGGGSGGGGSGGGGSEFDVVMTQSPSSLSASVGDRVTITCMASEDIYIRLAWYQQKPGNAPKLLIYAATSLETGVPSRFSGSGSGTDFTLTISSLQPEDFATYYCQQYWSSPWTFGGGTKVEIKLEDLKNVFPPEVAVFEPSEAEISHTQKATLVCLATGFYPDHVELSWWVNGKEVHSGVCTDPQPLKEQPALNDSRYCLSSRLRVSATFWQNPRNHFRCQVQFYGLSENDEWTQDRAKPVTQIVSAEAWGRADCGFTSESYQQGVLSATNLSVIGFRILLLKVAGFNLLMTLRLWSSRAKRSGSGATNFSLLKQAGDVEENPGPTSMDWIWRILFLVGAATGAHSGPQLQLQESGPGLVKPSETLSLTCTVSGDSISSGDYYWGWIRQPPGKGLEWIGHIYYSGVTYYNPSLKSRVTISVDTSRNQFSLKLSSVTAADTAVYYCTREDSSNWRSRGQGTLVTVSSGSGGGGSGGGGSGGGGSFEQVQLQESGPGLVKPSQTLSLTCTVSGYSITSDYTWNWIRQPPGNGLEWIGYITYSGSTSYNPSLKSRVLISVDTSKNQVSLKLSSVTAADTAVYYCARLGRRYTMDYWGQGTTVTVSSTRIQNPDPAVYQLRDSKSSDKSVCLFTDFDSQTNVSQSKDSDVYITDKCVLDMRSMDFKSNSAVAWSNKSDFACANAFNNSIIPEDTFFPSPESSCDVKLVEKSFETDTNLNFQILYEILLGKATLYAVLVSALVLMAMVKRKDSRG

SEQ ID NO: 14152 - protein, 894 aa, synthetic construct; identical to SEQ ID NO: 14015

SEQ ID NO: 14153 - protein, 894 aa, synthetic construct
MALPVTALLLPLALLLHAARPEVQLVESGGGLVQPGGSLRLSCAASGFSFSDFWMSWVRQAPGKGLEWVATISQAGSEKDYVDSVKGRFTISRDNAKKSLYLQMNSLRAEDTAVYYCASGVYSFDYRGQGTLVTVSSGTGGGGSGGGGSGGGGSEFDIVLTQSPATLSLSPGDRATLSCRASESVTILGSHLIYWYQQKPGQAPRLLIQLASNVQTGIPARFSGSGSRTDFTLTISSLEPEDFAVYYCLQSRTIPRTFGQGTKLEIKRLEDLKNVFPPEVAVFEPSEAEISHTQKATLVCLATGFYPDHVELSWWVNGKEVHSGVCTDPQPLKEQPALNDSRYCLSSRLRVSATFWQNPRNHFRCQVQFYGLSENDEWTQDRAKPVTQIVSAEAWGRADCGFTSESYQQGVLSATNLSVIGFRILLLKVAGFNLLMTLRLWSSRAKRSGSGATNFSLLKQAGDVEENPGPTSMDWIWRILFLVGAATGAHSGPQLQLQESGPGLVKPSETLSLTCTVSGDSISSGDYYWGWIRQPPGKGLEWIGHIYYSGVTYYNPSLKSRVTISVDTSRNQFSLKLSSVTAADTAVYYCTREDSSNWRSRGQGTLVTVSSGSGGGGSGGGGSGGGGSFEQVQLVQSGSELKKPGESVKISCKASGYTFTHYSMNWVRQAPGQGLEWMGRINTETGEPLYADDFKGRFVFSLDTSASTAYLQISSLKAEDTAVYYCSNDYLYSLDYWGQGTLVTVSSTRIQNPDPAVYQLRDSKSSDKSVCLFTDFDSQTNVSQSKDSDVYITDKCVLDMRSMDFKSNSAVAWSNKSDFACANAFNNSIIPEDTFFPSPESSCDVKLVEKSFETDTNLNFQILYEILLGKATLYAVLVSALVLMAMVKRKDSRG

SEQ ID NO: 14154 - protein, 895 aa, synthetic construct
MALPVTALLLPLALLLHAARPEVQLVESGGGLVQPGGSLRLSCAASGFSFSDFWMSWVRQAPGKGLEWVATISQAGSEKDYVDSVKGRFTISRDNAKKSLYLQMNSLRAEDTAVYYCASGVYSFDYRGQGTLVTVSSGTGGGGSGGGGSGGGGSEFDIQLTQSPSFLSASVGDRVTITCRASQGISTDLNWYQQKPGKAPKLLIYAASNLESGVPSRFSGSGSGTEFTLTISSLQPEDFATYYCQQSYNWPYTFGGGTKVEIKRLEDLKNVFPPEVAVFEPSEAEISHTQKATLVCLATGFYPDHVELSWWVNGKEVHSGVCTDPQPLKEQPALNDSRYCLSSRLRVSATFWQNPRNHFRCQVQFYGLSENDEWTQDRAKPVTQIVSAEAWGRADCGFTSESYQQGVLSATNLSVIGFRILLLKVAGFNLLMTLRLWSSRAKRSGSGATNFSLLKQAGDVEENPGPTSMDWIWRILFLVGAATGAHSGPQLQLQESGPGLVKPSETLSLTCTVSGDSISSGDYYWGWIRQPPGKGLEWIGHIYYSGVTYYNPSLKSRVTISVDTSRNQFSLKLSSVTAADTAVYYCTREDSSNWRSRGQGTLVTVSSGSGGGGSGGGGSGGGGSFEEVQLVESGGGLVKPGGSLRLSCAASGFTFSNFEMNWVRQAPGKGLEWVSGISSNGRYINYADSVKGRFTISRDNAKNSLYLQMNSLRAEDTAVYYCARVVDFDQDYNGFDYWGQGTLVTVSSTRIQNPDPAVYQLRDSKSSDKSVCLFTDFDSQTNVSQSKDSDVYITDKCVLDMRSMDFKSNSAVAWSNKSDFACANAFNNSIIPEDTFFPSPESSCDVKLVEKSFETDTNLNFQILYEILLGKATLYAVLVSALVLMAMVKRKDSRG

SEQ ID NO: 14155 - protein, 893 aa, synthetic construct
MALPVTALLLPLALLLHAARPEVQLVESGGGLVQPGGSLRLSCAASGFSFSDFWMSWVRQAPGKGLEWVATISQAGSEKDYVDSVKGRFTISRDNAKKSLYLQMNSLRAEDTAVYYCASGVYSFDYRGQGTLVTVSSGTGGGGSGGGGSGGGGSEFDIQLTQSPSFLSASVGDRVTITCSLSLGISTWRDWFPPRLGRGLEPLTYAASTLQSGVPSRFSGSGSGTEFTLTISSLQPEDFATYYCQQLNSYPLTFGGGTKVEIKRLEDLKNVFPPEVAVFEPSEAEISHTQKATLVCLATGFYPDHVELSWWVNGKEVHSGVCTDPQPLKEQPALNDSRYCLSSRLRVSATFWQNPRNHFRCQVQFYGLSENDEWTQDRAKPVTQIVSAEAWGRADCGFTSESYQQGVLSATNLSVIGFRILLLKVAGFNLLMTLRLWSSRAKRSGSGATNFSLLKQAGDVEENPGPTSMDWIWRILFLVGAATGAHSGPQLQLQESGPGLVKPSETLSLTCTVSGDSISSGDYYWGWIRQPPGKGLEWIGHIYYSGVTYYNPSLKSRVTISVDTSRNQFSLKLSSVTAADTAVYYCTREDSSNWRSRGQGTLVTVSSGSGGGGSGGGGSGGGGSFEEVQLVESGGGLVKPGGSLRLSCAASGFTFSTYGMSWVRQAPGKGLEWVAYINNGSGYIYYADSVKGRFTISRDNAKNSLYLQMNSLRAEDTAVYYCARGQWWSGGDFDYWGQGTLVTVSSTRIQNPDPAVYQLRDSKSSDKSVCLFTDFDSQTNVSQSKDSDVYITDKCVLDMRSMDFKSNSAVAWSNKSDFACANAFNNSIIPEDTFFPSPESSCDVKLVEKSFETDTNLNFQILYEILLGKATLYAVLVSALVLMAMVKRKDSRG

SEQ ID NO: 14156 - protein, 894 aa, synthetic construct
MALPVTALLLPLALLLHAARPEVQLVESGGGLVQPGGSLRLSCAASGFSFSDFWMSWVRQAPGKGLEWVATISQAGSEKDYVDSVKGRFTISRDNAKKSLYLQMNSLRAEDTAVYYCASGVYSFDYRGQGTLVTVSSGTGGGGSGGGGSGGGGSEFEIVLTQSPATLSLSPGERATLSCSASSSVSYMYWYQQKPGQAPRLLIYRTSNLASGIPARFSGSGSGTDFTLTISSLEPEDFAVYYCQQYHSYPTTFGQGTKVEIKRTVLEDLKNVFPPEVAVFEPSEAEISHTQKATLVCLATGFYPDHVELSWWVNGKEVHSGVCTDPQPLKEQPALNDSRYCLSSRLRVSATFWQNPRNHFRCQVQFYGLSENDEWTQDRAKPVTQIVSAEAWGRADCGFTSESYQQGVLSATNLSVIGFRILLLKVAGFNLLMTLRLWSSRAKRSGSGATNFSLLKQAGDVEENPGPTSMDWIWRILFLVGAATGAHSGPQLQLQESGPGLVKPSETLSLTCTVSGDSISSGDYYWGWIRQPPGKGLEWIGHIYYSGVTYYNPSLKSRVTISVDTSRNQFSLKLSSVTAADTAVYYCTREDSSNWRSRGQGTLVTVSSGSGGGGSGGGGSGGGGSFEEVQLVESGGGLVQPGGSLRLSCAASGFSFNTYAMNWVRQAPGKGLEWVSHIRSKSNNFATYYADSVKDRFTISRDNAKNSLYLQMNSLRAEDTAVYYCARQGGDFPMDYWGQGTLVTVSSTRIQNPDPAVYQLRDSKSSDKSVCLFTDFDSQTNVSQSKDSDVYITDKCVLDMRSMDFKSNSAVAWSNKSDFACANAFNNSIIPEDTFFPSPESSCDVKLVEKSFETDTNLNFQILYEILLGKATLYAVLVSALVLMAMVKRKDSRG

SEQ ID NO: 14157 - protein, 890 aa, synthetic construct
MALPVTALLLPLALLLHAARPEVQLVESGGGLVQPGGSLRLSCAASGFSFSDFWMSWVRQAPGKGLEWVATISQAGSEKDYVDSVKGRFTISRDNAKKSLYLQMNSLRAEDTAVYYCASGVYSFDYRGQGTLVTVSSGTGGGGSGGGGSGGGGSEFDVVMTQSPSSLSASVGDRVTITCKASEDIYIRLAWYQQKPGKAPKLLIYAATSLETGVPSRFSGSGSGTDFTLTISSLQPEDFATYYCQQYWTTPWTFGGGTKVEIKLEDLKNVFPPEVAVFEPSEAEISHTQKATLVCLATGFYPDHVELSWWVNGKEVHSGVCTDPQPLKEQPALNDSRYCLSSRLRVSATFWQNPRNHFRCQVQFYGLSENDEWTQDRAKPVTQIVSAEAWGRADCGFTSESYQQGVLSATNLSVIGFRILLLKVAGFNLLMTLRLWSSRAKRSGSGATNFSLLKQAGDVEENPGPTSMDWIWRILFLVGAATGAHSGPQLQLQESGPGLVKPSETLSLTCTVSGDSISSGDYYWGWIRQPPGKGLEWIGHIYYSGVTYYNPSLKSRVTISVDTSRNQFSLKLSSVTAADTAVYYCTREDSSNWRSRGQGTLVTVSSGSGGGGSGGGGSGGGGSFEQVQLQESGPGLVKPSQTLSLTCTVSGYSITIDYTWNWIRQPPGKGLEWIGYITYSGSTDYNPSLKSRVLISVDTSKNQVSLKLSSVTAADTAVYYCARLGRRYALDYWGQGTTVTVSSTRIQNPDPAVYQLRDSKSSDKSVCLFTDFDSQTNVSQSKDSDVYITDKCVLDMRSMDFKSNSAVAWSNKSDFACANAFNNSIIPEDTFFPSPESSCDVKLVEKSFETDTNLNFQILYEILLGKATLYAVLVSALVLMAMVKRKDSRG

SEQ ID NO: 14158 - protein, 895 aa, synthetic construct
MALPVTALLLPLALLLHAARPEVQLVESGGGLVQPGGSLRLSCAASGFSFSDFWMSWVRQAPGKGLEWVATISQAGSEKDYVDSVKGRFTISRDNAKKSLYLQMNSLRAEDTAVYYCASGVYSFDYRGQGTLVTVSSGTGGGGSGGGGSGGGGSEFDIQMTQTTSSLSASLGDRVTISCRASQDISNYLNWYQQKPDGTVKLLIYYTSILHSGVPSRFSGSGSGTDYSLTISNLEQEDFATYFCQQGNTLPWTFGGGTKLEIKALEDLKNVFPPEVAVFEPSEAEISHTQKATLVCLATGFYPDHVELSWWVNGKEVHSGVCTDPQPLKEQPALNDSRYCLSSRLRVSATFWQNPRNHFRCQVQFYGLSENDEWTQDRAKPVTQIVSAEAWGRADCGFTSESYQQGVLSATNLSVIGFRILLLKVAGFNLLMTLRLWSSRAKRSGSGATNFSLLKQAGDVEENPGPTSMDWIWRILFLVGAATGAHSGPQLQLQESGPGLVKPSETLSLTCTVSGDSISSGDYYWGWIRQPPGKGLEWIGHIYYSGVTYYNPSLKSRVTISVDTSRNQFSLKLSSVTAADTAVYYCTREDSSNWRSRGQGTLVTVSSGSGGGGSGGGGSGGGGSFEEVQLVESGGGLVKPGGSLKLSCAASGFAFSIYDMSWVRQTPEKRLEWVAYISSGGGTYYPDTVKGRFTISRDNAKNTLYLQMSSLKSEDTAMYYCARHSGYGTHWGVLFAYWGQGTLVTVSATRIQNPDPAVYQLRDSKSSDKSVCLFTDFDSQTNVSQSKDSDVYITDKCVLDMRSMDFKSNSAVAWSNKSDFACANAFNNSIIPEDTFFPSPESSCDVKLVEKSFETDTNLNFQILYEILLGKATLYAVLVSALVLMAMVKRKDSRG

SEQ ID NO: 14159 - protein, 905 aa, synthetic construct
MALPVTALLLPLALLLHAARPEVQLVESGGGLVQPGGSLRLSCAASGFSFSDFWMSWVRQAPGKGLEWVATISQAGSEKDYVDSVKGRFTISRDNAKKSLYLQMNSLRAEDTAVYYCASGVYSFDYRGQGTLVTVSSGTGGGGSGGGGSGGGGSEFDIVMTQSPDSLAVSLGERATINCKSSQSLLYRSNQKNYLAWYQQKPGQPPKLLIYWASTRESGVPDRFSGSGSGTDFTLTISSLQAEDVAVYYCQQYYNYPRTFGQGTKVEIKRTVLEDLKNVFPPEVAVFEPSEAEISHTQKATLVCLATGFYPDHVELSWWVNGKEVHSGVCTDPQPLKEQPALNDSRYCLSSRLRVSATFWQNPRNHFRCQVQFYGLSENDEWTQDRAKPVTQIVSAEAWGRADCGFTSESYQQGVLSATNLSVIGFRILLLKVAGFNLLMTLRLWSSRAKRSGSGATNFSLLKQAGDVEENPGPTSMDWIWRILFLVGAATGAHSGPQLQLQESGPGLVKPSETLSLTCTVSGDSISSGDYYWGWIRQPPGKGLEWIGHIYYSGVTYYNPSLKSRVTISVDTSRNQFSLKLSSVTAADTAVYYCTREDSSNWRSRGQGTLVTVSSGSGGGGSGGGGSGGGGSFEEVQLLESGGGLVQPGGSLRLSCAASGYSITSDYAWNWVRQAPGKGLEWVSYISNSGSTSYNPSLKSRFTISRDNSKNTLYLQMNSLRAEDTAVYYCAKERNYDYDDYYYAMDYWGQGTLVTVSSTRIQNPDPAVYQLRDSKSSDKSVCLFTDFDSQTNVSQSKDSDVYITDKCVLDMRSMDFKSNSAVAWSNKSDFACANAFNNSIIPEDTFFPSPESSCDVKLVEKSFETDTNLNFQILYEILLGKATLYAVLVSALVLMAMVKRKDSRG

SEQ ID NO: 14160 - protein, 898 aa, synthetic construct
MALPVTALLLPLALLLHAARPEVQLVESGGGLVQPGGSLRLSCAASGFSFSDFWMSWVRQAPGKGLEWVATISQAGSEKDYVDSVKGRFTISRDNAKKSLYLQMNSLRAEDTAVYYCASGVYSFDYRGQGTLVTVSSGTGGGGSGGGGSGGGGSEFDVVMTQSPLSLPVTLGQPASISCRSSQSLLHSSGNTYLEWYQQRPGQSPRPLIYKISTRFSGVPDRFSGSGSGTDFTLKISRVEAEDVGVYYCFQGSHVPYTFGGGTKVEIKRLEDLKNVFPPEVAVFEPSEAEISHTQKATLVCLATGFYPDHVELSWWVNGKEVHSGVCTDPQPLKEQPALNDSRYCLSSRLRVSATFWQNPRNHFRCQVQFYGLSENDEWTQDRAKPVTQIVSAEAWGRADCGFTSESYQQGVLSATNLSVIGFRILLLKVAGFNLLMTLRLWSSRAKRSGSGATNFSLLKQAGDVEENPGPTSMDWIWRILFLVGAATGAHSGPQLQLQESGPGLVKPSETLSLTCTVSGDSISSGDYYWGWIRQPPGKGLEWIGHIYYSGVTYYNPSLKSRVTISVDTSRNQFSLKLSSVTAADTAVYYCTREDSSNWRSRGQGTLVTVSSGSGGGGSGGGGSGGGGSFEQVQLVQSGAEVKKPGASVKVSCKASGLTIEDYYMHWVRQAPGQGLEWMGWIDPENGDTEYGPKFQGRVTMTRDTSINTAYMELSRLRSDDTAVYYCAVHNAHYGTWFAYWGQGTLVTVSSTRIQNPDPAVYQLRDSKSSDKSVCLFTDFDSQTNVSQSKDSDVYITDKCVLDMRSMDFKSNSAVAWSNKSDFACANAFNNSIIPEDTFFPSPESSCDVKLVEKSFETDTNLNFQILYEILLGKATLYAVLVSALVLMAMVKRKDSRG

SEQ ID NO: 14161 - protein, 890 aa, synthetic construct
MALPVTALLLPLALLLHAARPEVQLVESGGGLVQPGGSLRLSCAASGFSFSDFWMSWVRQAPGKGLEWVATISQAGSEKDYVDSVKGRFTISRDNAKKSLYLQMNSLRAEDTAVYYCASGVYSFDYRGQGTLVTVSSGTGGGGSGGGGSGGGGSEFDIQMTQSPSSLSASVGDRVTITCRASENIYSNLAWYQQKPGKAPKLLIYAATNLADGVPSRFSGSGSGTDFTLTISSLQPEDFATYYCQHFWGTPTFGQGTKVEIKRTVLEDLKNVFPPEVAVFEPSEAEISHTQKATLVCLATGFYPDHVELSWWVNGKEVHSGVCTDPQPLKEQPALNDSRYCLSSRLRVSATFWQNPRNHFRCQVQFYGLSENDEWTQDRAKPVTQIVSAEAWGRADCGFTSESYQQGVLSATNLSVIGFRILLLKVAGFNLLMTLRLWSSRAKRSGSGATNFSLLKQAGDVEENPGPTSMDWIWRILFLVGAATGAHSGPQLQLQESGPGLVKPSETLSLTCTVSGDSISSGDYYWGWIRQPPGKGLEWIGHIYYSGVTYYNPSLKSRVTISVDTSRNQFSLKLSSVTAADTAVYYCTREDSSNWRSRGQGTLVTVSSGSGGGGSGGGGSGGGGSFEEVQLVESGGGLVQPGGSLRLSCAASGFSLTNYGVHWVRQAPGKGLEWVSVIWSGGSTDYNAAFISRFTISADTSKNTAYLQMNSLRAEDTAVYYCARELIHAMDNWGQGTLVTVSSTRIQNPDPAVYQLRDSKSSDKSVCLFTDFDSQTNVSQSKDSDVYITDKCVLDMRSMDFKSNSAVAWSNKSDFACANAFNNSIIPEDTFFPSPESSCDVKLVEKSFETDTNLNFQILYEILLGKATLYAVLVSALVLMAMVKRKDSRG

SEQ ID NO: 14162 - protein, 897 aa, synthetic construct
MALPVTALLLPLALLLHAARPEVQLVESGGGLVQPGGSLRLSCAASGFSFSDFWMSWVRQAPGKGLEWVATISQAGSEKDYVDSVKGRFTISRDNAKKSLYLQMNSLRAEDTAVYYCASGVYSFDYRGQGTLVTVSSGTGGGGSGGGGSGGGGSEFDFVMTQSPLSLPVTPGEPASISCRSSQSIVHSNGNTYLEWYLQKPGQSPQLLIYKVSNRFSGVPDRFSGSGSGTDFTLKISRVEAEDVGVYYCFQGSHVPLTFGQGTKLEIKRLEDLKNVFPPEVAVFEPSEAEISHTQKATLVCLATGFYPDHVELSWWVNGKEVHSGVCTDPQPLKEQPALNDSRYCLSSRLRVSATFWQNPRNHFRCQVQFYGLSENDEWTQDRAKPVTQIVSAEAWGRADCGFTSESYQQGVLSATNLSVIGFRILLLKVAGFNLLMTLRLWSSRAKRSGSGATNFSLLKQAGDVEENPGPTSMDWIWRILFLVGAATGAHSGPQLQLQESGPGLVKPSETLSLTCTVSGDSISSGDYYWGWIRQPPGKGLEWIGHIYYSGVTYYNPSLKSRVTISVDTSRNQFSLKLSSVTAADTAVYYCTREDSSNWRSRGQGTLVTVSSGSGGGGSGGGGSGGGGSFEEVQLVESGAEVKKPGASVKVSCKASGYTFTSYWIHWVRQAPGQGLEWMGENDPSNGRTNYNEKFKNRVTLTVDTSISTAYMELSRLRSDDTAVYYCARGPNYFYSMDYWGQGTMVTVSSTRIQNPDPAVYQLRDSKSSDKSVCLFTDFDSQTNVSQSKDSDVYITDKCVLDMRSMDFKSNSAVAWSNKSDFACANAFNNSIIPEDTFFPSPESSCDVKLVEKSFETDTNLNFQILYEILLGKATLYAVLVSALVLMAMVKRKDSRG

SEQ ID NO: 14163 - protein, 890 aa, synthetic construct
MALPVTALLLPLALLLHAARPEVQLVESGGGLVQPGGSLRLSCAASGFSFSDFWMSWVRQAPGKGLEWVATISQAGSEKDYVDSVKGRFTISRDNAKKSLYLQMNSLRAEDTAVYYCASGVYSFDYRGQGTLVTVSSGTGGGGSGGGGSGGGGSEFDIQLTQSPSFLSASVGDRVTITCSARSSISFMYWYQQKPGKAPKLLIYDTSNLASGVPSRFSGSGSGTEFTLTISSLEAEDAATYYCQQWSSYPLTFGQGTKLEIKLEDLKNVFPPEVAVFEPSEAEISHTQKATLVCLATGFYPDHVELSWWVNGKEVHSGVCTDPQPLKEQPALNDSRYCLSSRLRVSATFWQNPRNHFRCQVQFYGLSENDEWTQDRAKPVTQIVSAEAWGRADCGFTSESYQQGVLSATNLSVIGFRILLLKVAGFNLLMTLRLWSSRAKRSGSGATNFSLLKQAGDVEENPGPTSMDWIWRILFLVGAATGAHSGPQLQLQESGPGLVKPSETLSLTCTVSGDSISSGDYYWGWIRQPPGKGLEWIGHIYYSGVTYYNPSLKSRVTISVDTSRNQFSLKLSSVTAADTAVYYCTREDSSNWRSRGQGTLVTVSSGSGGGGSGGGGSGGGGSFEQVQLVQSGAEVKKPGASVKVSCKASGYTFTGSWMNWVRQAPGQGLEWIGRIYPGDGETNYNGKFKDRVTITADKSTSTAYMELSSLRSEDTAVYYCARIYGNNVYFDVWGQGTTVTVSSTRIQNPDPAVYQLRDSKSSDKSVCLFTDFDSQTNVSQSKDSDVYITDKCVLDMRSMDFKSNSAVAWSNKSDFACANAFNNSIIPEDTFFPSPESSCDVKLVEKSFETDTNLNFQILYEILLGKATLYAVLVSALVLMAMVKRKDSRG

SEQ ID NO: 14164 - protein, 898 aa, synthetic construct
MALPVTALLLPLALLLHAARPEVQLVESGGGLVQPGGSLRLSCAASGFSFSDFWMSWVRQAPGKGLEWVATISQAGSEKDYVDSVKGRFTISRDNAKKSLYLQMNSLRAEDTAVYYCASGVYSFDYRGQGTLVTVSSGTGGGGSGGGGSGGGGSEFQLVLTQSPSASASLGSSVKLTCTLSSGHKTDTIDWYQQQPGKAPRYLMKLEGSGSYNKGSGVPDRFSGSSSGADWYLTISSLQSEDEADYYCGTDYPGNYLFGGGTQLTVLGLEDLKNVFPPEVAVFEPSEAEISHTQKATLVCLATGFYPDHVELSWWVNGKEVHSGVCTDPQPLKEQPALNDSRYCLSSRLRVSATFWQNPRNHFRCQVQFYGLSENDEWTQDRAKPVTQIVSAEAWGRADCGFTSESYQQGVLSATNLSVIGFRILLLKVAGFNLLMTLRLWSSRAKRSGSGATNFSLLKQAGDVEENPGPTSMDWIWRILFLVGAATGAHSGPQLQLQESGPGLVKPSETLSLTCTVSGDSISSGDYYWGWIRQPPGKGLEWIGHIYYSGVTYYNPSLKSRVTISVDTSRNQFSLKLSSVTAADTAVYYCTREDSSNWRSRGQGTLVTVSSGSGGGGSGGGGSGGGGSFEQEQLVESGGGLVQPGGSLRLSCAASGFTFSDYYMSWIRQAPGKGLEWVATIYPSSGKTYYADSAKGRLTISSDNAKDSLYLQMNSLRAEDTAVYYCTRDSYADDAALFDIWGQGTTVTVSSTRIQNPDPAVYQLRDSKSSDKSVCLFTDFDSQTNVSQSKDSDVYITDKCVLDMRSMDFKSNSAVAWSNKSDFACANAFNNSIIPEDTFFPSPESSCDVKLVEKSFETDTNLNFQILYEILLGKATLYAVLVSALVLMAMVKRKDSRG

SEQ ID NO: 14165 - protein, 890 aa, synthetic construct; identical to SEQ ID NO: 14161

SEQ ID NO: 14166 - protein, 897 aa, synthetic construct; identical to SEQ ID NO: 14162

SEQ ID NO: 14167 - protein, 890 aa, synthetic construct; identical to SEQ ID NO: 14163

SEQ ID NO: 14168 - protein, 898 aa, synthetic construct; identical to SEQ ID NO: 14164

SEQ ID NO: 14169 - protein, 897 aa, synthetic construct
MALPVTALLLPLALLLHAARPEVQLVESGGGLVQPGGSLRLSCAASGFSFSDFWMSWVRQAPGKGLEWVATISQAGSEKDYVDSVKGRFTISRDNAKKSLYLQMNSLRAEDTAVYYCASGVYSFDYRGQGTLVTVSSGTGGGGSGGGGSGGGGSEFDIQLTQSPSSLSASVGDRVSFTCQASQDINNFLNWYQQKPGKAPKLLIYDASNLETGVPSRFSGSGSGTDFTFTISSLQPEDIATYYCQQYGNLPFTFGGGTKVEIKRLEDLKNVFPPEVAVFEPSEAEISHTQKATLVCLATGFYPDHVELSWWVNGKEVHSGVCTDPQPLKEQPALNDSRYCLSSRLRVSATFWQNPRNHFRCQVQFYGLSENDEWTQDRAKPVTQIVSAEAWGRADCGFTSESYQQGVLSATNLSVIGFRILLLKVAGFNLLMTLRLWSSRAKRSGSGATNFSLLKQAGDVEENPGPTSMDWIWRILFLVGAATGAHSGPQLQLQESGPGLVKPSETLSLTCTVSGDSISSGDYYWGWIRQPPGKGLEWIGHIYYSGVTYYNPSLKSRVTISVDTSRNQFSLKLSSVTAADTAVYYCTREDSSNWRSRGQGTLVTVSSGSGGGGSGGGGSGGGGSFEQVQLQESGPGLVKPSQTLSLTCTVSGGSISSGGFYWSWIRQHPGKGLEWIGYIHHSGSTHYNPSLKSRVTISIDTSKNLFSLRLSSVTAADTAVYYCASLVYCGGDCYSGFDYWGQGTLVTVSSTRIQNPDPAVYQLRDSKSSDKSVCLFTDFDSQTNVSQSKDSDVYITDKCVLDMRSMDFKSNSAVAWSNKSDFACANAFNNSIIPEDTFFPSPESSCDVKLVEKSFETDTNLNFQILYEILLGKATLYAVLVSALVLMAMVKRKDSRG

SEQ ID NO: 14170 - protein, 893 aa, synthetic construct
MALPVTALLLPLALLLHAARPEVQLVESGGGLVQPGGSLRLSCAASGFSFSDFWMSWVRQAPGKGLEWVATISQAGSEKDYVDSVKGRFTISRDNAKKSLYLQMNSLRAEDTAVYYCASGVYSFDYRGQGTLVTVSSGTGGGGSGGGGSGGGGSEFDIQMTQSPSSLSASVGDRVTITCKSSQSVLYSSNQKNYLAWFQQKPGKAPKLLIYWASTRESGVPSRFSGSGSGTDFTLTISSLQPEDFATYFCHQYLSSYTFGQGTKVEIKRLEDLKNVFPPEVAVFEPSEAEISHTQKATLVCLATGFYPDHVELSWWVNGKEVHSGVCTDPQPLKEQPALNDSRYCLSSRLRVSATFWQNPRNHFRCQVQFYGLSENDEWTQDRAKPVTQIVSAEAWGRADCGFTSESYQQGVLSATNLSVIGFRILLLKVAGFNLLMTLRLWSSRAKRSGSGATNFSLLKQAGDVEENPGPTSMDWIWRILFLVGAATGAHSGPQLQLQESGPGLVKPSETLSLTCTVSGDSISSGDYYWGWIRQPPGKGLEWIGHIYYSGVTYYNPSLKSRVTISVDTSRNQFSLKLSSVTAADTAVYYCTREDSSNWRSRGQGTLVTVSSGSGGGGSGGGGSGGGGSFEEVQLVESGGGLVQPGGSLRLSCAASGYTFTTYWMHWVRQAPGKGLEWVGYIRPSTGYTEYNQKFKDRFTISADTSKNTAYLQMNSLRAEDTAVYYCARSRWLLDYWGQGTLVTVSTRIQNPDPAVYQLRDSKSSDKSVCLFTDFDSQTNVSQSKDSDVYITDKCVLDMRSMDFKSNSAVAWSNKSDFACANAFNNSIIPEDTFFPSPESSCDVKLVEKSFETDTNLNFQILYEILLGKATLYAVLVSALVLMAMVKRKDSRG

SEQ ID NO: 14171 - protein, 890 aa, synthetic construct
MALPVTALLLPLALLLHAARPEVQLVESGGGLVQPGGSLRLSCAASGFSFSDFWMSWVRQAPGKGLEWVATISQAGSEKDYVDSVKGRFTISRDNAKKSLYLQMNSLRAEDTAVYYCASGVYSFDYRGQGTLVTVSSGTGGGGSGGGGSGGGGSEFDIQMTQSPSSLSASVGDRVTITCRASQDISNYLNWYQQKPGKAPKLLIYYTSRLHSGVPSRFSGSGSGTDFTLTISSLQPEDFATYYCQQGNTLPYTFGQGTKVEIKRLEDLKNVFPPEVAVFEPSEAEISHTQKATLVCLATGFYPDHVELSWWVNGKEVHSGVCTDPQPLKEQPALNDSRYCLSSRLRVSATFWQNPRNHFRCQVQFYGLSENDEWTQDRAKPVTQIVSAEAWGRADCGFTSESYQQGVLSATNLSVIGFRILLLKVAGFNLLMTLRLWSSRAKRSGSGATNFSLLKQAGDVEENPGPTSMDWIWRILFLVGAATGAHSGPQLQLQESGPGLVKPSETLSLTCTVSGDSISSGDYYWGWIRQPPGKGLEWIGHIYYSGVTYYNPSLKSRVTISVDTSRNQFSLKLSSVTAADTAVYYCTREDSSNWRSRGQGTLVTVSSGSGGGGSGGGGSGGGGSFEEVQLVESGGGLVQPGGSLRLSCAASGFTFSDYFMSWVRQAPGKGLEWVATISNGGTYTYYPDSVKGRFTISRDNSKNTLYLQMNSLRAEDTAVYYCARFDGYIFDYWGQGTLVTVSSTRIQNPDPAVYQLRDSKSSDKSVCLFTDFDSQTNVSQSKDSDVYITDKCVLDMRSMDFKSNSAVAWSNKSDFACANAFNNSIIPEDTFFPSPESSCDVKLVEKSFETDTNLNFQILYEILLGKATLYAVLVSALVLMAMVKRKDSRG

SEQ ID NO: 14172 - protein, 895 aa, synthetic construct
MALPVTALLLPLALLLHAARPEVQLVESGGGLVQPGGSLRLSCAASGFSFSDFWMSWVRQAPGKGLEWVATISQAGSEKDYVDSVKGRFTISRDNAKKSLYLQMNSLRAEDTAVYYCASGVYSFDYRGQGTLVTVSSGTGGGGSGGGGSGGGGSEFDIQMTQTTSSLSASLGDRVTISCRASQDISKYLNWYQQKPDGTVKLLIYHTSRLHSGVPSRFSGSGSGTDYSLTISNLEQEDIATYFCQQGNTLPYTFGGGTKLEITLEIQNPDPAVYQLRDSKSSDKSVCLFTDFDSQTNVSQSKDSDVYITDKCVLDMRSMDFKSNSAVAWSNKSDFACANAFNNSIIPEDTFFPSPESSCDVKLVEKSFETDTNLNFQILYEILLGKATLYAVLVSALVLMAMVKRKDSRGRAKRSGSGVKQTLNFDLLKLAGDVESNPGPTSMDWIWRILFLVGAATGAHSGPQLQLQESGPGLVKPSETLSLTCTVSGDSISSGDYYWGWIRQPPGKGLEWIGHIYYSGVTYYNPSLKSRVTISVDTSRNQFSLKLSSVTAADTAVYYCTREDSSNWRSRGQGTLVTVSSGSGGGGSGGGGSGGGGSFEVKLQESGPGLVAPSQSLSVTCTVSGVSLPDYGVSWIRQPPRKGLEWLGVIWGSETTYYNSALKSRLTIIKDNSKSQVFLKMNSLQTDDTAIYYCAKHYYYGGSYAMDYWGQGTSVTVSSTREDLKNVFPPEVAVFEPSEAEISHTQKATLVCLATGFYPDHVELSWWVNGKEVHSGVCTDPQPLKEQPALNDSRYCLSSRLRVSATFWQNPRNHFRCQVQFYGLSENDEWTQDRAKPVTQIVSAEAWGRADCGFTSESYQQGVLSATNLSVIGFRILLLKVAGFNLLMTLRLWSS

SEQ ID NO: 14173 - protein, 896 aa, synthetic construct
MALPVTALLLPLALLLHAARPEVQLVESGGGLVQPGGSLRLSCAASGFSFSDFWMSWVRQAPGKGLEWVATISQAGSEKDYVDSVKGRFTISRDNAKKSLYLQMNSLRAEDTAVYYCASGVYSFDYRGQGTLVTVSSGTGGGGSGGGGSGGGGSEFEIVMTQSPATLSLSPGERATLSCRASQDISKYLNWYQQKPGQAPRLLIYHTSRLHSGIPARFSGSGSGTDYTLTISSLQPEDFAVYFCQQGNTLPYTFGQGTKLEIKLEIQNPDPAVYQLRDSKSSDKSVCLFTDFDSQTNVSQSKDSDVYITDKCVLDMRSMDFKSNSAVAWSNKSDFACANAFNNSIIPEDTFFPSPESSCDVKLVEKSFETDTNLNFQILYEILLGKATLYAVLVSALVLMAMVKRKDSRGRAKRSGSGVKQTLNFDLLKLAGDVESNPGPTSMDWIWRILFLVGAATGAHSGPQLQLQESGPGLVKPSETLSLTCTVSGDSISSGDYYWGWIRQPPGKGLEWIGHIYYSGVTYYNPSLKSRVTISVDTSRNQFSLKLSSVTAADTAVYYCTREDSSNWRSRGQGTLVTVSSGSGGGGSGGGGSGGGGSFEQVQLQESGPGLVKPSETLSLTCTVSGVSLPDYGVSWIRQPPGKGLEWIGVIWGSETTYYNSSLKSRVTISKDNSKNQVSLKLSSVTAADTAVYYCAKHYYYGGSYAMDYWGQGTLVTVSSTREDLKNVFPPEVAVFEPSEAEISHTQKATLVCLATGFYPDHVELSWWVNGKEVHSGVCTDPQPLKEQPALNDSRYCLSSRLRVSATFWQNPRNHFRCQVQFYGLSENDEWTQDRAKPVTQIVSAEAWGRADCGFTSESYQQGVLSATNLSVIGFRILLLKVAGFNLLMTLRLWSS

SEQ ID NO: 14174 - protein, 897 aa, synthetic construct
MALPVTALLLPLALLLHAARPEVQLVESGGGLVQPGGSLRLSCAASGFSFSDFWMSWVRQAPGKGLEWVATISQAGSEKDYVDSVKGRFTISRDNAKKSLYLQMNSLRAEDTAVYYCASGVYSFDYRGQGTLVTVSSGTGGGGSGGGGSGGGGSEFDEIVLTQSPATLSLSPGERATLSCSASSSVSYMHWYQQKPGQAPRLLIYDTSKLASGIPARFSGSGSGTDFTLTISSLEPEDVAVYYCFQGSVYPFTFGQGTKLEIKRLEIQNPDPAVYQLRDSKSSDKSVCLFTDFDSQTNVSQSKDSDVYITDKCVLDMRSMDFKSNSAVAWSNKSDFACANAFNNSIIPEDTFFPSPESSCDVKLVEKSFETDTNLNFQILYEILLGKATLYAVLVSALVLMAMVKRKDSRGRAKRSGSGVKQTLNFDLLKLAGDVESNPGPTSMDWIWRILFLVGAATGAHSGPQLQLQESGPGLVKPSETLSLTCTVSGDSISSGDYYWGWIRQPPGKGLEWIGHIYYSGVTYYNPSLKSRVTISVDTSRNQFSLKLSSVTAADTAVYYCTREDSSNWRSRGQGTLVTVSSGSGGGGSGGGGSGGGGSFEQVQLQESGPGLVKPSQTLSLTCTVSGGSISTSGMGVGWIRQHPGKGLEWIGHIWWDDDKRYNPALKSRVTISVDTSKNQFSLKLSSVTAADTAVYYCARMELWSYYFDYWGQGTLVTVSSTREDLKNVFPPEVAVFEPSEAEISHTQKATLVCLATGFYPDHVELSWWVNGKEVHSGVCTDPQPLKEQPALNDSRYCLSSRLRVSATFWQNPRNHFRCQVQFYGLSENDEWTQDRAKPVTQIVSAEAWGRADCGFTSESYQQGVLSATNLSVIGFRILLLKVAGFNLLMTLRLWSS

SEQ ID NO: 14175 - protein, 895 aa, synthetic construct
MALPVTALLLPLALLLHAARPEVQLVESGGGLVQPGGSLRLSCAASGFSFSDFWMSWVRQAPGKGLEWVATISQAGSEKDYVDSVKGRFTISRDNAKKSLYLQMNSLRAEDTAVYYCASGVYSFDYRGQGTLVTVSSGTGGGGSGGGGSGGGGSEFDYIHVTQSPSSLSVSIGDRVTINCQTSQGVGSDLHWYQHKPGRAPKLLIHHASSVEDGVPSRFSGTGFHTSFNLTINDLQADDIGTYYCQVLQSFGRGSRLDTKLEIQNPDPAVYQLRDSKSSDKSVCLFTDFDSQTNVSQSKDSDVYITDKCVLDMRSMDFKSNSAVAWSNKSDFACANAFNNSIIPEDTFFPSPESSCDVKLVEKSFETDTNLNFQILYEILLGKATLYAVLVSALVLMAMVKRKDSRGRAKRSGSGVKQTLNFDLLKLAGDVESNPGPTSMDWIWRILFLVGAATGAHSGPQLQLQESGPGLVKPSETLSLTCTVSGDSISSGDYYWGWIRQPPGKGLEWIGHIYYSGVTYYNPSLKSRVTISVDTSRNQFSLKLSSVTAADTAVYYCTREDSSNWRSRGQGTLVTVSSGSGGGGSGGGGSGGGGSFERAHLVQSGTAMKKPGASVRVSCQTSGYTFTAHILFWFRQAPGRGLEWVGWIKPQYGAVNFGGGFRDRVTLTRDVYREIAYMDIRGLKPDDTAVYYCARDRSYGDSSWALDAWGQGTTVVVSATREDLKNVFPPEVAVFEPSEAEISHTQKATLVCLATGFYPDHVELSWWVNGKEVHSGVCTDPQPLKEQPALNDSRYCLSSRLRVSATFWQNPRNHFRCQVQFYGLSENDEWTQDRAKPVTQIVSAEAWGRADCGFTSESYQQGVLSATNLSVIGFRILLLKVAGFNLLMTLRLWSS

SEQ ID NO: 14176 - protein, 905 aa, synthetic construct
MALPVTALLLPLALLLHAARPEVQLVESGGGLVQPGGSLRLSCAASGFSFSDFWMSWVRQAPGKGLEWVATISQAGSEKDYVDSVKGRFTISRDNAKKSLYLQMNSLRAEDTAVYYCASGVYSFDYRGQGTLVTVSSGTGGGGSGGGGSGGGGSEFDVQMIQTPDSLAVSLGQRATISCRASESVDNYGISFMHWYQQKPGQSPKLLIYRASNLESGIPARFSGSGSRTDFTLTINPVETDDVATYYCQQNNKDPPTFGGGTKLEIKLEIQNPDPAVYQLRDSKSSDKSVCLFTDFDSQTNVSQSKDSDVYITDKCVLDMRSMDFKSNSAVAWSNKSDFACANAFNNSIIPEDTFFPSPESSCDVKLVEKSFETDTNLNFQILYEILLGKATLYAVLVSALVLMAMVKRKDSRGRAKRSGSGVKQTLNFDLLKLAGDVESNPGPTSMDWIWRILFLVGAATGAHSGPQLQLQESGPGLVKPSETLSLTCTVSGDSISSGDYYWGWIRQPPGKGLEWIGHIYYSGVTYYNPSLKSRVTISVDTSRNQFSLKLSSVTAADTAVYYCTREDSSNWRSRGQGTLVTVSSGSGGGGSGGGGSGGGGSFEGGGGSQVQLQQSGAELVKPGASVKISCKASGYAFSSYWMNWVKQRPGKGLEWIGQIYPGDGDTTYNGKFKGKATLTADKSSSTVYMQLNSLTSEDSAVYFCVRYYYGSSGYFDYWGQGTTLTVSSTREDLKNVFPPEVAVFEPSEAEISHTQKATLVCLATGFYPDHVELSWWVNGKEVHSGVCTDPQPLKEQPALNDSRYCLSSRLRVSATFWQNPRNHFRCQVQFYGLSENDEWTQDRAKPVTQIVSAEAWGRADCGFTSESYQQGVLSATNLSVIGFRILLLKVAGFNLLMTLRLWSS

SEQ ID NO: 14177 - protein, 896 aa, synthetic construct
MALPVTALLLPLALLLHAARPEVQLVESGGGLVQPGGSLRLSCAASGFSFSDFWMSWVRQAPGKGLEWVATISQAGSEKDYVDSVKGRFTISRDNAKKSLYLQMNSLRAEDTAVYYCASGVYSFDYRGQGTLVTVSSGTGGGGSGGGGSGGGGSEFDVQMIQTPSSLSASLGDRVTISCRASQDIGNYLNWYQQKPDGTVKLLIYYTSRLHSGVPSRFSGSGSGTEYSLTISNLEQEDIATYFCQQGSALPPTFGGGTKLEINLEIQNPDPAVYQLRDSKSSDKSVCLFTDFDSQTNVSQSKDSDVYITDKCVLDMRSMDFKSNSAVAWSNKSDFACANAFNNSIIPEDTFFPSPESSCDVKLVEKSFETDTNLNFQILYEILLGKATLYAVLVSALVLMAMVKRKDSRGRAKRSGSGVKQTLNFDLLKLAGDVESNPGPTSMDWIWRILFLVGAATGAHSGPQLQLQESGPGLVKPSETLSLTCTVSGDSISSGDYYWGWIRQPPGKGLEWIGHIYYSGVTYYNPSLKSRVTISVDTSRNQFSLKLSSVTAADTAVYYCTREDSSNWRSRGQGTLVTVSSGSGGGGSGGGGSGGGGSFEALQLQQSGAELVRPGASVTLSCKASGYTFTDYEMHWVKQTPVHGLEWIGAIDPETGGTAYNQKFEGKAILTADKSSSTAYMELRSLTSEDSPVYYCARRRYYGSSSFDYWGQGTTLTVSSTREDLKNVFPPEVAVFEPSEAEISHTQKATLVCLATGFYPDHVELSWWVNGKEVHSGVCTDPQPLKEQPALNDSRYCLSSRLRVSATFWQNPRNHFRCQVQFYGLSENDEWTQDRAKPVTQIVSAEAWGRADCGFTSESYQQGVLSATNLSVIGFRILLLKVAGFNLLMTLRLWSS

SEQ ID NO: 14178 - protein, 900 aa, synthetic construct
MALPVTALLLPLALLLHAARPEVQLVESGGGLVQPGGSLRLSCAASGFSFSDFWMSWVRQAPGKGLEWVATISQAGSEKDYVDSVKGRFTISRDNAKKSLYLQMNSLRAEDTAVYYCASGVYSFDYRGQGTLVTVSSGTGGGGSGGGGSGGGGSEFDIVLTQSPASLAVSLGQRATISCRASKSVSTSGYSYLHWYQQKPGQPPKLLIYLASNLESGVPARFSGSGSGTDFTLNIHPVEEEDAATYYCQHSRELPFTFGSGTKLEIKLEIQNPDPAVYQLRDSKSSDKSVCLFTDFDSQTNVSQSKDSDVYITDKCVLDMRSMDFKSNSAVAWSNKSDFACANAFNNSIIPEDTFFPSPESSCDVKLVEKSFETDTNLNFQILYEILLGKATLYAVLVSALVLMAMVKRKDSRGRAKRSGSGVKQTLNFDLLKLAGDVESNPGPTSMDWIWRILFLVGAATGAHSGPQLQLQESGPGLVKPSETLSLTCTVSGDSISSGDYYWGWIRQPPGKGLEWIGHIYYSGVTYYNPSLKSRVTISVDTSRNQFSLKLSSVTAADTAVYYCTREDSSNWRSRGQGTLVTVSSGSGGGGSGGGGSGGGGSFEQVQLVESGGGLVQPGGSLKLSCAASGFDFSRYWMSWVRQAPGKGLEWIGEINPTSSTINFTPSLKDKVFISRDNAKNTLYLQMSKVRSEDTALYYCARGNYYRYGDAMDYWGQGTSVTVSTREDLKNVFPPEVAVFEPSEAEISHTQKATLVCLATGFYPDHVELSWWVNGKEVHSGVCTDPQPLKEQPALNDSRYCLSSRLRVSATFWQNPRNHFRCQVQFYGLSENDEWTQDRAKPVTQIVSAEAWGRADCGFTSESYQQGVLSATNLSVIGFRILLLKVAGFNLLMTLRLWSS

SEQ ID NO: 14179 - protein, 898 aa, synthetic construct
MALPVTALLLPLALLLHAARPEVQLVESGGGLVQPGGSLRLSCAASGFSFSDFWMSWVRQAPGKGLEWVATISQAGSEKDYVDSVKGRFTISRDNAKKSLYLQMNSLRAEDTAVYYCASGVYSFDYRGQGTLVTVSSGTGGGGSGGGGSGGGGSEFDIQMTQSPSSLSASVGDRVTITCSASQDISNYLNWYQQKPGKAPKLLIYYTSNLHSGVPSRFSGSGSGTDFTLTISSLQPEDFATYYCQQYRKLPWTFGQGTKLEIKRLEIQNPDPAVYQLRDSKSSDKSVCLFTDFDSQTNVSQSKDSDVYITDKCVLDMRSMDFKSNSAVAWSNKSDFACANAFNNSIIPEDTFFPSPESSCDVKLVEKSFETDTNLNFQILYEILLGKATLYAVLVSALVLMAMVKRKDSRGRAKRSGSGVKQTLNFDLLKLAGDVESNPGPTSMDWIWRILFLVGAATGAHSGPQLQLQESGPGLVKPSETLSLTCTVSGDSISSGDYYWGWIRQPPGKGLEWIGHIYYSGVTYYNPSLKSRVTISVDTSRNQFSLKLSSVTAADTAVYYCTREDSSNWRSRGQGTLVTVSSGSGGGGSGGGGSGGGGSFEQVQLVQSGAEVKKPGSSVKVSCKASGGTFSNYWMHWVRQAPGQGLEWMGATYRGHSDTYYNQKFKGRVTITADKSTSTAYMELSSLRSEDTAVYYCARGAIYDGYDVLDNWGQGTLVTVSSTREDLKNVFPPEVAVFEPSEAEISHTQKATLVCLATGFYPDHVELSWWVNGKEVHSGVCTDPQPLKEQPALNDSRYCLSSRLRVSATFWQNPRNHFRCQVQFYGLSENDEWTQDRAKPVTQIVSAEAWGRADCGFTSESYQQGVLSATNLSVIGFRILLLKVAGFNLLMTLRLWSS

SEQ ID NO: 14180 - protein, 898 aa, synthetic construct
MALPVTALLLPLALLLHAARPEVQLVESGGGLVQPGGSLRLSCAASGFSFSDFWMSWVRQAPGKGLEWVATISQAGSEKDYVDSVKGRFTISRDNAKKSLYLQMNSLRAEDTAVYYCASGVYSFDYRGQGTLVTVSSGTGGGGSGGGGSGGGGSEFDIVLTQSPATLSLSPGDRATISCRASESVTILGSHLIYWYQQKPGQPPRLLIQLASNVQTGVPARFSGSGSRTDFTLTISSVEPEDFAVYYCLQSRTIPRTFGQGTKLEIKRLEIQNPDPAVYQLRDSKSSDKSVCLFTDFDSQTNVSQSKDSDVYITDKCVLDMRSMDFKSNSAVAWSNKSDFACANAFNNSIIPEDTFFPSPESSCDVKLVEKSFETDTNLNFQILYEILLGKATLYAVLVSALVLMAMVKRKDSRGRAKRSGSGVKQTLNFDLLKLAGDVESNPGPTSMDWIWRILFLVGAATGAHSGPQLQLQESGPGLVKPSETLSLTCTVSGDSISSGDYYWGWIRQPPGKGLEWIGHIYYSGVTYYNPSLKSRVTISVDTSRNQFSLKLSSVTAADTAVYYCTREDSSNWRSRGQGTLVTVSSGSGGGGSGGGGSGGGGSFEQVQLVQSGPEVKKPGESVKISCKASGYTFRHYSMNWVKQAPGQGLKWMGRINTESGVPIYADDFKGRFSFTVDTSASTAYLEISSLTSEDTAVYFCSNDYLYSLDFWGQGTTLTVSSTREDLKNVFPPEVAVFEPSEAEISHTQKATLVCLATGFYPDHVELSWWVNGKEVHSGVCTDPQPLKEQPALNDSRYCLSSRLRVSATFWQNPRNHFRCQVQFYGLSENDEWTQDRAKPVTQIVSAEAWGRADCGFTSESYQQGVLSATNLSVIGFRILLLKVAGFNLLMTLRLWSS

SEQ ID NO: 14181 - protein, 899 aa, synthetic construct
MALPVTALLLPLALLLHAARPEVQLVESGGGLVQPGGSLRLSCAASGFSFSDFWMSWVRQAPGKGLEWVATISQAGSEKDYVDSVKGRFTISRDNAKKSLYLQMNSLRAEDTAVYYCASGVYSFDYRGQGTLVTVSSGTGGGGSGGGGSGGGGSEFQSVLTQPPSVSGAPGQRVTISCTGSSSNIGAGFDVHWYQQLPGTAPKLLIYGNSNRPSGVPDRFSGSKSGTSASLAITGLQAEDEADYYCQSYDSSLSGYVFGTGTKVTVLGLEIQNPDPAVYQLRDSKSSDKSVCLFTDFDSQTNVSQSKDSDVYITDKCVLDMRSMDFKSNSAVAWSNKSDFACANAFNNSIIPEDTFFPSPESSCDVKLVEKSFETDTNLNFQILYEILLGKATLYAVLVSALVLMAMVKRKDSRGRAKRSGSGVKQTLNFDLLKLAGDVESNPGPTSMDWIWRILFLVGAATGAHSGPQLQLQESGPGLVKPSETLSLTCTVSGDSISSGDYYWGWIRQPPGKGLEWIGHIYYSGVTYYNPSLKSRVTISVDTSRNQFSLKLSSVTAADTAVYYCTREDSSNWRSRGQGTLVTVSSGSGGGGSGGGGSGGGGSFEQVQLVQSGAEVKKPGASVKVSCKASGYTFTDYYMHWVRQAPGQRLEWMGWINPNSGGTNYAQKFQDRITVTRDTSSNTGYMELTRLRSDDTAVYYCARSPYSGVLDKWGQGTLVTVSSTREDLKNVFPPEVAVFEPSEAEISHTQKATLVCLATGFYPDHVELSWWVNGKEVHSGVCTDPQPLKEQPALNDSRYCLSSRLRVSATFWQNPRNHFRCQVQFYGLSENDEWTQDRAKPVTQIVSAEAWGRADCGFTSESYQQGVLSATNLSVIGFRILLLKVAGFNLLMTLRLWSS

SEQ ID NO: 14182 - protein, 896 aa, synthetic construct
MALPVTALLLPLALLLHAARPEVQLVESGGGLVQPGGSLRLSCAASGFSFSDFWMSWVRQAPGKGLEWVATISQAGSEKDYVDSVKGRFTISRDNAKKSLYLQMNSLRAEDTAVYYCASGVYSFDYRGQGTLVTVSSGTGGGGSGGGGSGGGGSEFQAVLTQPPSASGTPGQRVTISCSGSSSNIGSYTVSWYQQLPGTAPKFLIYSNNQRPSGVPDRFSGSKSGTSASLAISGLQSEDEADYYCAAWDDSLNGYVFGTGTKVTVLGLEIQNPDPAVYQLRDSKSSDKSVCLFTDFDSQTNVSQSKDSDVYITDKCVLDMRSMDFKSNSAVAWSNKSDFACANAFNNSIIPEDTFFPSPESSCDVKLVEKSFETDTNLNFQILYEILLGKATLYAVLVSALVLMAMVKRKDSRGRAKRSGSGVKQTLNFDLLKLAGDVESNPGPTSMDWIWRILFLVGAATGAHSGPQLQLQESGPGLVKPSETLSLTCTVSGDSISSGDYYWGWIRQPPGKGLEWIGHIYYSGVTYYNPSLKSRVTISVDTSRNQFSLKLSSVTAADTAVYYCTREDSSNWRSRGQGTLVTVSSGSGGGGSGGGGSGGGGSFEVQLVQSGAEVKKPGESLKISCKGSGYDFTTYWIGWVRQMPGKGLEWMGIIYPGDSDTRYSPSVRGRVTISADKSINTAYLQWSSLEASDTAMYYCARMWTFSQDGWGQGTLVTVSSTREDLKNVFPPEVAVFEPSEAEISHTQKATLVCLATGFYPDHVELSWWVNGKEVHSGVCTDPQPLKEQPALNDSRYCLSSRLRVSATFWQNPRNHFRCQVQFYGLSENDEWTQDRAKPVTQIVSAEAWGRADCGFTSESYQQGVLSATNLSVIGFRILLLKVAGFNLLMTLRLWSS

SEQ ID NO: 14183 - protein, 899 aa, synthetic construct
MALPVTALLLPLALLLHAARPEVQLVESGGGLVQPGGSLRLSCAASGFSFSDFWMSWVRQAPGKGLEWVATISQAGSEKDYVDSVKGRFTISRDNAKKSLYLQMNSLRAEDTAVYYCASGVYSFDYRGQGTLVTVSSGTGGGGSGGGGSGGGGSEFDIVMTQSPDSLAVSLGERATINCKSSQSILYSSNQKNYLAWYQQKPGQSPKLLIYWASTRESGVPDRFSGSGSGTDFTLTISSLQAEDVAVYYCHQYISSYTFGQGTKLEIKLEIQNPDPAVYQLRDSKSSDKSVCLFTDFDSQTNVSQSKDSDVYITDKCVLDMRSMDFKSNSAVAWSNKSDFACANAFNNSIIPEDTFFPSPESSCDVKLVEKSFETDTNLNFQILYEILLGKATLYAVLVSALVLMAMVKRKDSRGRAKRSGSGVKQTLNFDLLKLAGDVESNPGPTSMDWIWRILFLVGAATGAHSGPQLQLQESGPGLVKPSETLSLTCTVSGDSISSGDYYWGWIRQPPGKGLEWIGHIYYSGVTYYNPSLKSRVTISVDTSRNQFSLKLSSVTAADTAVYYCTREDSSNWRSRGQGTLVTVSSGSGGGGSGGGGSGGGGSFEQVQLVQSGAEVKKPGASVKVSCKASGYTFASQWMHWMRQAPGQGLEWIGWINPGNVNTKYNEKFKGRATLTVDTSTNTAYMELSSLRSEDTAVYYCARSTWYRPLDYWGQGTLVTVSSTREDLKNVFPPEVAVFEPSEAEISHTQKATLVCLATGFYPDHVELSWWVNGKEVHSGVCTDPQPLKEQPALNDSRYCLSSRLRVSATFWQNPRNHFRCQVQFYGLSENDEWTQDRAKPVTQIVSAEAWGRADCGFTSESYQQGVLSATNLSVIGFRILLLKVAGFNLLMTLRLWSS

SEQ ID NO: 14184 - protein, 899 aa, synthetic construct
MALPVTALLLPLALLLHAARPEVQLVESGGGLVQPGGSLRLSCAASGFSFSDFWMSWVRQAPGKGLEWVATISQAGSEKDYVDSVKGRFTISRDNAKKSLYLQMNSLRAEDTAVYYCASGVYSFDYRGQGTLVTVSSGTGGGGSGGGGSGGGGSEFDHIVLTQSPSSLSASLGDRVTISCRASQDISTYLNWYQQKPDGTVKLLIFYTSRLHAGVPSRFSGSGSGTHHSLTISNLEQEDIATYFCQQGNSLPFTFGSGTKLEIKRLEIQNPDPAVYQLRDSKSSDKSVCLFTDFDSQTNVSQSKDSDVYITDKCVLDMRSMDFKSNSAVAWSNKSDFACANAFNNSIIPEDTFFPSPESSCDVKLVEKSFETDTNLNFQILYEILLGKATLYAVLVSALVLMAMVKRKDSRGRAKRSGSGVKQTLNFDLLKLAGDVESNPGPTSMDWIWRILFLVGAATGAHSGPQLQLQESGPGLVKPSETLSLTCTVSGDSISSGDYYWGWIRQPPGKGLEWIGHIYYSGVTYYNPSLKSRVTISVDTSRNQFSLKLSSVTAADTAVYYCTREDSSNWRSRGQGTLVTVSSGSGGGGSGGGGSGGGGSFEQVQLKESGPELEKPGASVKISCKASGYSFTAYSMNWVKQNNGMSLEWIGSIDPYYGDTKYAQKFKGKATLTVDKASSTAYLQLKSLTSEDSAVYYCARRMITTGDWYFDVWGAGTTVTVSSTREDLKNVFPPEVAVFEPSEAEISHTQKATLVCLATGFYPDHVELSWWVNGKEVHSGVCTDPQPLKEQPALNDSRYCLSSRLRVSATFWQNPRNHFRCQVQFYGLSENDEWTQDRAKPVTQIVSAEAWGRADCGFTSESYQQGVLSATNLSVIGFRILLLKVAGFNLLMTLRLWSS

SEQ ID NO: 14185 - protein, 899 aa, synthetic construct; identical to SEQ ID NO: 14184

SEQ ID NO: 14186 - protein, 899 aa, synthetic construct
MALPVTALLLPLALLLHAARPEVQLVESGGGLVQPGGSLRLSCAASGFSFSDFWMSWVRQAPGKGLEWVATISQAGSEKDYVDSVKGRFTISRDNAKKSLYLQMNSLRAEDTAVYYCASGVYSFDYRGQGTLVTVSSGTGGGGSGGGGSGGGGSEFDEIVLTQSPATLSLSPGERATLSCRASQSVSSYLAWYQQKPGQAPRLLIYDASNRATGIPARFSGSGSGTDFTLTISSLEPEDFAVYYCQQRSNWPITFGQGTRLEIKLEIQNPDPAVYQLRDSKSSDKSVCLFTDFDSQTNVSQSKDSDVYITDKCVLDMRSMDFKSNSAVAWSNKSDFACANAFNNSIIPEDTFFPSPESSCDVKLVEKSFETDTNLNFQILYEILLGKATLYAVLVSALVLMAMVKRKDSRGRAKRSGSGVKQTLNFDLLKLAGDVESNPGPTSMDWIWRILFLVGAATGAHSGPQLQLQESGPGLVKPSETLSLTCTVSGDSISSGDYYWGWIRQPPGKGLEWIGHIYYSGVTYYNPSLKSRVTISVDTSRNQFSLKLSSVTAADTAVYYCTREDSSNWRSRGQGTLVTVSSGSGGGGSGGGGSGGGGSFEEVQLVESGGGLVQPGRSLRLSCAASGFTFNDYAMHWVRQAPGKGLEWVSTISWNSGSIGYADSVKGRFTISRDNAKKSLYLQMNSLRAEDTALYYCAKDIQYGNYYYGMDVWGQGTTVTVSSTREDLKNVFPPEVAVFEPSEAEISHTQKATLVCLATGFYPDHVELSWWVNGKEVHSGVCTDPQPLKEQPALNDSRYCLSSRLRVSATFWQNPRNHFRCQVQFYGLSENDEWTQDRAKPVTQIVSAEAWGRADCGFTSESYQQGVLSATNLSVIGFRILLLKVAGFNLLMTLRLWSS

SEQ ID NO: 14187 - protein, 901 aa, synthetic construct
MALPVTALLLPLALLLHAARPEVQLVESGGGLVQPGGSLRLSCAASGFSFSDFWMSWVRQAPGKGLEWVATISQAGSEKDYVDSVKGRFTISRDNAKKSLYLQMNSLRAEDTAVYYCASGVYSFDYRGQGTLVTVSSGTGGGGSGGGGSGGGGSEFDIVMTQTPLSLPVTPGEPASISCRSSKSLLHSNGITYLYWYLQKPGQSPQLLIYQMSNLVSGVPDRFSGSGSGTDFTLKISRVEAEDVGVYYCAQNLELPYTFGGGTKVEIKRLEIQNPDPAVYQLRDSKSSDKSVCLFTDFDSQTNVSQSKDSDVYITDKCVLDMRSMDFKSNSAVAWSNKSDFACANAFNNSIIPEDTFFPSPESSCDVKLVEKSFETDTNLNFQILYEILLGKATLYAVLVSALVLMAMVKRKDSRGRAKRSGSGVKQTLNFDLLKLAGDVESNPGPTSMDWIWRILFLVGAATGAHSGPQLQLQESGPGLVKPSETLSLTCTVSGDSISSGDYYWGWIRQPPGKGLEWIGHIYYSGVTYYNPSLKSRVTISVDTSRNQFSLKLSSVTAADTAVYYCTREDSSNWRSRGQGTLVTVSSGSGGGGSGGGGSGGGGSFEQVQLVQSGAEVKKPGSSVKVSCKASGYAFSYSWINWVRQAPGQGLEWMGRIFPGDGDTDYNGKFKGRVTITADKSTSTAYMELSSLRSEDTAVYYCARNVFDGYWLVYWGQGTLVTVSSTREDLKNVFPPEVAVFEPSEAEISHTQKATLVCLATGFYPDHVELSWWVNGKEVHSGVCTDPQPLKEQPALNDSRYCLSSRLRVSATFWQNPRNHFRCQVQFYGLSENDEWTQDRAKPVTQIVSAEAWGRADCGFTSESYQQGVLSATNLSVIGFRILLLKVAGFNLLMTLRLWSS

SEQ ID NO: 14188 - protein, 902 aa, synthetic construct
MALPVTALLLPLALLLHAARPEVQLVESGGGLVQPGGSLRLSCAASGFSFSDFWMSWVRQAPGKGLEWVATISQAGSEKDYVDSVKGRFTISRDNAKKSLYLQMNSLRAEDTAVYYCASGVYSFDYRGQGTLVTVSSGTGGGGSGGGGSGGGGSEFDIQMTQSPSSLSASVGDRVTITCRSSQSIVHSVGNTFLEWYQQKPGKAPKLLIYKVSNRFSGVPSRFSGSGSGTDFTLTISSLQPEDFATYYCFQGSQFPYTFGQGTKVEIKRLEIQNPDPAVYQLRDSKSSDKSVCLFTDFDSQTNVSQSKDSDVYITDKCVLDMRSMDFKSNSAVAWSNKSDFACANAFNNSIIPEDTFFPSPESSCDVKLVEKSFETDTNLNFQILYEILLGKATLYAVLVSALVLMAMVKRKDSRGRAKRSGSGVKQTLNFDLLKLAGDVESNPGPTSMDWIWRILFLVGAATGAHSGPQLQLQESGPGLVKPSETLSLTCTVSGDSISSGDYYWGWIRQPPGKGLEWIGHIYYSGVTYYNPSLKSRVTISVDTSRNQFSLKLSSVTAADTAVYYCTREDSSNWRSRGQGTLVTVSSGSGGGGSGGGGSGGGGSFEEVQLVESGGGLVQPGGSLRLSCAASGYEFSRSWMNWVRQAPGKGLEWVGRIYPGDGDTNYSGKFKGRFTISADTSKNTAYLQMNSLRAEDTAVYYCARDGSSWDWYFDVWGQGTLVTVSSTREDLKNVFPPEVAVFEPSEAEISHTQKATLVCLATGFYPDHVELSWWVNGKEVHSGVCTDPQPLKEQPALNDSRYCLSSRLRVSATFWQNPRNHFRCQVQFYGLSENDEWTQDRAKPVTQIVSAEAWGRADCGFTSESYQQGVLSATNLSVIGFRILLLKVAGFNLLMTLRLWSS

SEQ ID NO: 14189 - protein, 900 aa, synthetic construct
MALPVTALLLPLALLLHAARPEVQLVESGGGLVQPGGSLRLSCAASGFSFSDFWMSWVRQAPGKGLEWVATISQAGSEKDYVDSVKGRFTISRDNAKKSLYLQMNSLRAEDTAVYYCASGVYSFDYRGQGTLVTVSSGTGGGGSGGGGSGGGGSEFDIQMTQSPSSLSASVGDRVTITCRASQTIWSYLNWYQQRPGKAPNLLIYAASSLQSGVPSRFSGRGSGTDFTLTISSLQAEDFATYYCQQSYSIPQIFGQGTKLEIKLEIQNPDPAVYQLRDSKSSDKSVCLFTDFDSQTNVSQSKDSDVYITDKCVLDMRSMDFKSNSAVAWSNKSDFACANAFNNSIIPEDTFFPSPESSCDVKLVEKSFETDTNLNFQILYEILLGKATLYAVLVSALVLMAMVKRKDSRGRAKRSGSGVKQTLNFDLLKLAGDVESNPGPTSMDWIWRILFLVGAATGAHSGPQLQLQESGPGLVKPSETLSLTCTVSGDSISSGDYYWGWIRQPPGKGLEWIGHIYYSGVTYYNPSLKSRVTISVDTSRNQFSLKLSSVTAADTAVYYCTREDSSNWRSRGQGTLVTVSSGSGGGGSGGGGSGGGGSFEQVQLQQSGPGLVKPSQTLSLTCAISGDSVSSNSAAWNWIRQSPSRGLEWLGRTYYRSKWYNDYAVSVKSRITINPDTSKNQFSLQLNSVTPEDTAVYYCAREVTGDLEDAFDIWGQGTMVTVSSTREDLKNVFPPEVAVFEPSEAEISHTQKATLVCLATGFYPDHVELSWWVNGKEVHSGVCTDPQPLKEQPALNDSRYCLSSRLRVSATFWQNPRNHFRCQVQFYGLSENDEWTQDRAKPVTQIVSAEAWGRADCGFTSESYQQGVLSATNLSVIGFRILLLKVAGFNLLMTLRLWSS

SEQ ID NO: 14190 - protein, 893 aa, synthetic construct
MALPVTALLLPLALLLHAARPEVQLVESGGGLVQPGGSLRLSCAASGFSFSDFWMSWVRQAPGKGLEWVATISQAGSEKDYVDSVKGRFTISRDNAKKSLYLQMNSLRAEDTAVYYCASGVYSFDYRGQGTLVTVSSGTGGGGSGGGGSGGGGSEFDIQMTQSPATIENTSLSASVGDRVTITCRASQGISSWLTWYQQKPEKAPKSLIYAASSLQSGVPSRFSGSGSGTDFTLTISSLQPEDFATYYCQQYDSYPITFGQGTRLEIKLEIQNPDPAVYQLRDSKSSDKSVCLFTDFDSQTNVSQSKDSDVYITDKCVLDMRSMDFKSNSAVAWSNKSDFACANAFNNSIIPEDTFFPSPESSCDVKLVEKSFETDTNLNFQILYEILLGKATLYAVLVSALVLMAMVKRKDSRGRAKRSGSGVKQTLNFDLLKLAGDVESNPGPTSMDWIWRILFLVGAATGAHSGPQLQLQESGPGLVKPSETLSLTCTVSGDSISSGDYYWGWIRQPPGKGLEWIGHIYYSGVTYYNPSLKSRVTISVDTSRNQFSLKLSSVTAADTAVYYCTREDSSNWRSRGQGTLVTVSSGSGGGGSGGGGSGGGGSFEQVQLQQWGAGLLKPSETLSLTCAVYGGSFSAYYWSWIRQPPGKGLEWIGDINHGGGTNYNPSLKSRVTISVDTSKNQFSLKLNSVTAADTAVYYCASLTAYWGQGSLVTVSSTREDLKNVFPPEVAVFEPSEAEISHTQKATLVCLATGFYPDHVELSWWVNGKEVHSGVCTDPQPLKEQPALNDSRYCLSSRLRVSATFWQNPRNHFRCQVQFYGLSENDEWTQDRAKPVTQIVSAEAWGRADCGFTSESYQQGVLSATNLSVIGFRILLLKVAGFNLLMTLRLWSS

SEQ ID NO: 14191 - protein, 898 aa, synthetic construct
MALPVTALLLPLALLLHAARPEVQLVESGGGLVQPGGSLRLSCAASGFSFSDFWMSWVRQAPGKGLEWVATISQAGSEKDYVDSVKGRFTISRDNAKKSLYLQMNSLRAEDTAVYYCASGVYSFDYRGQGTLVTVSSGTGGGGSGGGGSGGGGSEFDEIVLTQSPDSLAVSLGERATINCKASQSVDFDGDSYLNWYQQKPGQPPKVLIYAASTLQSGVPSRFSGSGSGTDFTLTINSLEAEDAATYYCQQSNEDPWTFGGGTKVEIKLEIQNPDPAVYQLRDSKSSDKSVCLFTDFDSQTNVSQSKDSDVYITDKCVLDMRSMDFKSNSAVAWSNKSDFACANAFNNSIIPEDTFFPSPESSCDVKLVEKSFETDTNLNFQILYEILLGKATLYAVLVSALVLMAMVKRKDSRGRAKRSGSGVKQTLNFDLLKLAGDVESNPGPTSMDWIWRILFLVGAATGAHSGPQLQLQESGPGLVKPSETLSLTCTVSGDSISSGDYYWGWIRQPPGKGLEWIGHIYYSGVTYYNPSLKSRVTISVDTSRNQFSLKLSSVTAADTAVYYCTREDSSNWRSRGQGTLVTVSSGSGGGGSGGGGSGGGGSFEQVQLVQSGAEVKKPGASVKVSCKVSGYTFTDYYITWVRQAPGQALEWMGWIYPGSGNTKYSQKFQGRFVFSVDTSASTAYLQLSSLKAEDTAVYYCANYGNYWFAYWGQGTLVTVSSTREDLKNVFPPEVAVFEPSEAEISHTQKATLVCLATGFYPDHVELSWWVNGKEVHSGVCTDPQPLKEQPALNDSRYCLSSRLRVSATFWQNPRNHFRCQVQFYGLSENDEWTQDRAKPVTQIVSAEAWGRADCGFTSESYQQGVLSATNLSVIGFRILLLKVAGFNLLMTLRLWSS

SEQ ID NO: 14192 - protein, 895 aa, synthetic construct
MALPVTALLLPLALLLHAARPEVQLVESGGGLVQPGGSLRLSCAASGFSFSDFWMSWVRQAPGKGLEWVATISQAGSEKDYVDSVKGRFTISRDNAKKSLYLQMNSLRAEDTAVYYCASGVYSFDYRGQGTLVTVSSGTGGGGSGGGGSGGGGSEFDIQMTQSPSSLSASVGDRVTITCRASQGISSWLAWYQQKPEKAPKSLIYAASSLQSGVPSRFSGSGSGTDFTLTISSLQPEDFATYYCQQYNSYPPTFGGGTKVEIKLEIQNPDPAVYQLRDSKSSDKSVCLFTDFDSQTNVSQSKDSDVYITDKCVLDMRSMDFKSNSAVAWSNKSDFACANAFNNSIIPEDTFFPSPESSCDVKLVEKSFETDTNLNFQILYEILLGKATLYAVLVSALVLMAMVKRKDSRGRAKRSGSGVKQTLNFDLLKLAGDVESNPGPTSMDWIWRILFLVGAATGAHSGPQLQLQESGPGLVKPSETLSLTCTVSGDSISSGDYYWGWIRQPPGKGLEWIGHIYYSGVTYYNPSLKSRVTISVDTSRNQFSLKLSSVTAADTAVYYCTREDSSNWRSRGQGTLVTVSSGSGGGGSGGGGSGGGGSFEEVQLVQSGGGLVHPGGSLRLSCAGSGFAFSSSTMHWIRQAPGKGLEWISLIGSGGGIYYGDSVKGRFTISRDNAKNSLYLQMNSLRAEDMAVYYCVRGYFDWVDYFDYWGQGTLVTVSSTREDLKNVFPPEVAVFEPSEAEISHTQKATLVCLATGFYPDHVELSWWVNGKEVHSGVCTDPQPLKEQPALNDSRYCLSSRLRVSATFWQNPRNHFRCQVQFYGLSENDEWTQDRAKPVTQIVSAEAWGRADCGFTSESYQQGVLSATNLSVIGFRILLLKVAGFNLLMTLRLWSS

SEQ ID NO: 14193 - protein, 905 aa, synthetic construct
MALPVTALLLPLALLLHAARPEVQLVESGGGLVQPGGSLRLSCAASGFSFSDFWMSWVRQAPGKGLEWVATISQAGSEKDYVDSVKGRFTISRDNAKKSLYLQMNSLRAEDTAVYYCASGVYSFDYRGQGTLVTVSSGTGGGGSGGGGSGGGGSEFDDIVMTQSPDSLTVSLGERTTINCKSSQSVLDSSKNKNSLAWYQQKPGQPPKLLLSWASTRESGIPDRFSGSGSGTDFTLTIDSLQPEDSATYYCQQSAHFPITFGQGTRLEIKLEIQNPDPAVYQLRDSKSSDKSVCLFTDFDSQTNVSQSKDSDVYITDKCVLDMRSMDFKSNSAVAWSNKSDFACANAFNNSIIPEDTFFPSPESSCDVKLVEKSFETDTNLNFQILYEILLGKATLYAVLVSALVLMAMVKRKDSRGRAKRSGSGVKQTLNFDLLKLAGDVESNPGPTSMDWIWRILFLVGAATGAHSGPQLQLQESGPGLVKPSETLSLTCTVSGDSISSGDYYWGWIRQPPGKGLEWIGHIYYSGVTYYNPSLKSRVTISVDTSRNQFSLKLSSVTAADTAVYYCTREDSSNWRSRGQGTLVTVSSGSGGGGSGGGGSGGGGSFEQVQLVQSGAEVKKPGASVKVSCKASGYTFTNYGMNWVKQAPGQGLKWMGWINTYTGEPTYADDFKGRVTMTSDTSTSTAYLELHNLRSDDTAVYYCARWSWSDGYYVYFDYWGQGTTVTVSSTREDLKNVFPPEVAVFEPSEAEISHTQKATLVCLATGFYPDHVELSWWVNGKEVHSGVCTDPQPLKEQPALNDSRYCLSSRLRVSATFWQNPRNHFRCQVQFYGLSENDEWTQDRAKPVTQIVSAEAWGRADCGFTSESYQQGVLSATNLSVIGFRILLLKVAGFNLLMTLRLWSS

SEQ ID NO: 14194 - protein, 901 aa, synthetic construct
MALPVTALLLPLALLLHAARPEVQLVESGGGLVQPGGSLRLSCAASGFSFSDFWMSWVRQAPGKGLEWVATISQAGSEKDYVDSVKGRFTISRDNAKKSLYLQMNSLRAEDTAVYYCASGVYSFDYRGQGTLVTVSSGTGGGGSGGGGSGGGGSEFDEIVLTQSPGSLAVSPGERVTMSCKSSQSVFFSSSQKNYLAWYQQIPGQSPRLLIYWASTRESGVPDRFTGSGSGTDFTLTISSVQPEDLAIYYCHQYLSSRTFGQGTKLEIKRLEIQNPDPAVYQLRDSKSSDKSVCLFTDFDSQTNVSQSKDSDVYITDKCVLDMRSMDFKSNSAVAWSNKSDFACANAFNNSIIPEDTFFPSPESSCDVKLVEKSFETDTNLNFQILYEILLGKATLYAVLVSALVLMAMVKRKDSRGRAKRSGSGVKQTLNFDLLKLAGDVESNPGPTSMDWIWRILFLVGAATGAHSGPQLQLQESGPGLVKPSETLSLTCTVSGDSISSGDYYWGWIRQPPGKGLEWIGHIYYSGVTYYNPSLKSRVTISVDTSRNQFSLKLSSVTAADTAVYYCTREDSSNWRSRGQGTLVTVSSGSGGGGSGGGGSGGGGSFEQVQLQQPGAEVVKPGASVKMSCKASGYTFTSYYIHWIKQTPGQGLEWVGVIYPGNDDISYNQKFQGKATLTADKSSTTAYMQLSSLTSEDSAVYYCAREVRLRYFDVWGQGTTVTVSSTREDLKNVFPPEVAVFEPSEAEISHTQKATLVCLATGFYPDHVELSWWVNGKEVHSGVCTDPQPLKEQPALNDSRYCLSSRLRVSATFWQNPRNHFRCQVQFYGLSENDEWTQDRAKPVTQIVSAEAWGRADCGFTSESYQQGVLSATNLSVIGFRILLLKVAGFNLLMTLRLWSS

SEQ ID NO: 14195 - protein, 905 aa, synthetic construct
MALPVTALLLPLALLLHAARPEVQLVESGGGLVQPGGSLRLSCAASGFSFSDFWMSWVRQAPGKGLEWVATISQAGSEKDYVDSVKGRFTISRDNAKKSLYLQMNSLRAEDTAVYYCASGVYSFDYRGQGTLVTVSSGTGGGGSGGGGSGGGGSEFDVLLTQSPLSLPVTLGQPASISCRSSQTIVHSNGNTYLEWFQQRPGQSPRLLIYQVSNRFSGVPDRFSGSGSGTDFTLKISRVEAEDVGVYYCFQGSHVPRTFGGGTKVEIKRALEIQNPDPAVYQLRDSKSSDKSVCLFTDFDSQTNVSQSKDSDVYITDKCVLDMRSMDFKSNSAVAWSNKSDFACANAFNNSIIPEDTFFPSPESSCDVKLVEKSFETDTNLNFQILYEILLGKATLYAVLVSALVLMAMVKRKDSRGRAKRSGSGVKQTLNFDLLKLAGDVESNPGPTSMDWIWRILFLVGAATGAHSGPQLQLQESGPGLVKPSETLSLTCTVSGDSISSGDYYWGWIRQPPGKGLEWIGHIYYSGVTYYNPSLKSRVTISVDTSRNQFSLKLSSVTAADTAVYYCTREDSSNWRSRGQGTLVTVSSGSGGGGSGGGGSGGGGSFEQIQLVQSGSELKKPGASVKVSCKASGYTFTNYGMNWVRQAPGQGLKWMGWINTNTGEPKYAEEFKGRFALSLDTSVSTAYLQINSLKAEDTAVYFCARGYGNYARGAWLAYWGQGTLVTVSSTREDLKNVFPPEVAVFEPSEAEISHTQKATLVCLATGFYPDHVELSWWVNGKEVHSGVCTDPQPLKEQPALNDSRYCLSSRLRVSATFWQNPRNHFRCQVQFYGLSENDEWTQDRAKPVTQIVSAEAWGRADCGFTSESYQQGVLSATNLSVIGFRILLLKVAGFNLLMTLRLWSS

SEQ ID NO: 14196 - protein, 890 aa, synthetic construct
MALPVTALLLPLALLLHAARPEVQLVESGGGLVQPGGSLRLSCAASGFSFSDFWMSWVRQAPGKGLEWVATISQAGSEKDYVDSVKGRFTISRDNAKKSLYLQMNSLRAEDTAVYYCASGVYSFDYRGQGTLVTVSSGTGGGGSGGGGSGGGGSEFDEIVLTQSPATLSLSPGERATLSCSASSSINYIYWLQQKPGQAPRILIYLTSNLASGVPARFSGSGSGTDFTLTISSLEPEDFAVYYCLQWSSNPLTFGGGTKVEIKLEIQNPDPAVYQLRDSKSSDKSVCLFTDFDSQTNVSQSKDSDVYITDKCVLDMRSMDFKSNSAVAWSNKSDFACANAFNNSIIPEDTFFPSPESSCDVKLVEKSFETDTNLNFQILYEILLGKATLYAVLVSALVLMAMVKRKDSRGRAKRSGSGVKQTLNFDLLKLAGDVESNPGPTSMDWIWRILFLVGAATGAHSGPQLQLQESGPGLVKPSETLSLTCTVSGDSISSGDYYWGWIRQPPGKGLEWIGHIYYSGVTYYNPSLKSRVTISVDTSRNQFSLKLSSVTAADTAVYYCTREDSSNWRSRGQGTLVTVSSGSGGGGSGGGGSGGGGSFEEVQLVESGGGLVKPGGSLRLSCAASGFTFSSYDMSWVRQAPGKGLEWVSTISSGGSYTYYLDSIKGRFTISRDNAKNSLYLQMNSLRAEDTAVYYCARQGLDYWGRGTLVTVSSTREDLKNVFPPEVAVFEPSEAEISHTQKATLVCLATGFYPDHVELSWWVNGKEVHSGVCTDPQPLKEQPALNDSRYCLSSRLRVSATFWQNPRNHFRCQVQFYGLSENDEWTQDRAKPVTQIVSAEAWGRADCGFTSESYQQGVLSATNLSVIGFRILLLKVAGFNLLMTLRLWSS

SEQ ID NO: 14197 - protein, 899 aa, synthetic construct
MALPVTALLLPLALLLHAARPEVQLVESGGGLVQPGGSLRLSCAASGFSFSDFWMSWVRQAPGKGLEWVATISQAGSEKDYVDSVKGRFTISRDNAKKSLYLQMNSLRAEDTAVYYCASGVYSFDYRGQGTLVTVSSGTGGGGSGGGGSGGGGSEFDIVMTQSPDSLAVSLGERATINCRASKSVSTSGYSFMHWYQQKPGQPPKLLIYLASNLESGVPDRFSGSGSGTDFTLTISSLQAEDVAVYYCQHSREVPWTFGQGTKVEIKRLEIQNPDPAVYQLRDSKSSDKSVCLFTDFDSQTNVSQSKDSDVYITDKCVLDMRSMDFKSNSAVAWSNKSDFACANAFNNSIIPEDTFFPSPESSCDVKLVEKSFETDTNLNFQILYEILLGKATLYAVLVSALVLMAMVKRKDSRGRAKRSGSGVKQTLNFDLLKLAGDVESNPGPTSMDWIWRILFLVGAATGAHSGPQLQLQESGPGLVKPSETLSLTCTVSGDSISSGDYYWGWIRQPPGKGLEWIGHIYYSGVTYYNPSLKSRVTISVDTSRNQFSLKLSSVTAADTAVYYCTREDSSNWRSRGQGTLVTVSSGSGGGGSGGGGSGGGGSFEQVQLVQSGAEVKKPGASVKVSCKASGYTFTNYGMNWVRQAPGQGLEWMGWINTYTGEPTYADAFKGRFAFSLDTSTSTAYLQINSLRSDDTAVYYCARDYGDYGMDYWGQGTTVTVSSTREDLKNVFPPEVAVFEPSEAEISHTQKATLVCLATGFYPDHVELSWWVNGKEVHSGVCTDPQPLKEQPALNDSRYCLSSRLRVSATFWQNPRNHFRCQVQFYGLSENDEWTQDRAKPVTQIVSAEAWGRADCGFTSESYQQGVLSATNLSVIGFRILLLKVAGFNLLMTLRLWSS

SEQ ID NO: 14198 - protein, 895 aa, synthetic construct
MALPVTALLLPLALLLHAARPEVQLVESGGGLVQPGGSLRLSCAASGFSFSDFWMSWVRQAPGKGLEWVATISQAGSEKDYVDSVKGRFTISRDNAKKSLYLQMNSLRAEDTAVYYCASGVYSFDYRGQGTLVTVSSGTGGGGSGGGGSGGGGSEFDIVMTQTPLTLSVTIGQPASISCKSSQSLLDSDGKTYLNWLLQRPGQSPERLIYLVSKLDSGVPDRFTGSGSGTDFTLKISRVEAEDLGVYCCWQGTHFPYTFGGGTKVEIKGLEIQNPDPAVYQLRDSKSSDKSVCLFTDFDSQTNVSQSKDSDVYITDKCVLDMRSMDFKSNSAVAWSNKSDFACANAFNNSIIPEDTFFPSPESSCDVKLVEKSFETDTNLNFQILYEILLGKATLYAVLVSALVLMAMVKRKDSRGRAKRSGSGVKQTLNFDLLKLAGDVESNPGPTSMDWIWRILFLVGAATGAHSGPQLQLQESGPGLVKPSETLSLTCTVSGDSISSGDYYWGWIRQPPGKGLEWIGHIYYSGVTYYNPSLKSRVTISVDTSRNQFSLKLSSVTAADTAVYYCTREDSSNWRSRGQGTLVTVSSGSGGGGSGGGGSGGGGSFEQVQLQQPGAELVRPGASVKLSCKASGYTFTSYWMNWVKQRPGQGLEWIGMIDPSDSETHYNHIFKDKATLTVDKSSSTAYLQLSSLTSEDSAVYYCARNLYLWGQGTSVTVSSTREDLKNVFPPEVAVFEPSEAEISHTQKATLVCLATGFYPDHVELSWWVNGKEVHSGVCTDPQPLKEQPALNDSRYCLSSRLRVSATFWQNPRNHFRCQVQFYGLSENDEWTQDRAKPVTQIVSAEAWGRADCGFTSESYQQGVLSATNLSVIGFRILLLKVAGFNLLMTLRLWSS

SEQ ID NO: 14199 - protein, 903 aa, synthetic construct
MALPVTALLLPLALLLHAARPEVQLVESGGGLVQPGGSLRLSCAASGFSFSDFWMSWVRQAPGKGLEWVATISQAGSEKDYVDSVKGRFTISRDNAKKSLYLQMNSLRAEDTAVYYCASGVYSFDYRGQGTLVTVSSGTGGGGSGGGGSGGGGSEFDIVMTQSPDSLAVSLGERATINCESSQSLLNSGNQKNYLTWYQQKPGQPPKPLIYWASTRESGVPDRFSGSGSGTDFTLTISSLQAEDVAVYYCQNDYSYPYTFGQGTKLEIKRLEIQNPDPAVYQLRDSKSSDKSVCLFTDFDSQTNVSQSKDSDVYITDKCVLDMRSMDFKSNSAVAWSNKSDFACANAFNNSIIPEDTFFPSPESSCDVKLVEKSFETDTNLNFQILYEILLGKATLYAVLVSALVLMAMVKRKDSRGRAKRSGSGVKQTLNFDLLKLAGDVESNPGPTSMDWIWRILFLVGAATGAHSGPQLQLQESGPGLVKPSETLSLTCTVSGDSISSGDYYWGWIRQPPGKGLEWIGHIYYSGVTYYNPSLKSRVTISVDTSRNQFSLKLSSVTAADTAVYYCTREDSSNWRSRGQGTLVTVSSGSGGGGSGGGGSGGGGSFEEVQLVQSGAEVKKPGESLKISCKGSGYSFTDYYMKWARQMPGKGLEWMGDIIPSNGATFYNQKFKGQVTISADKSISTTYLQWSSLKASDTAMYYCARSHLLRASWFAYWGQGTMVTVSSTREDLKNVFPPEVAVFEPSEAEISHTQKATLVCLATGFYPDHVELSWWVNGKEVHSGVCTDPQPLKEQPALNDSRYCLSSRLRVSATFWQNPRNHFRCQVQFYGLSENDEWTQDRAKPVTQIVSAEAWGRADCGFTSESYQQGVLSATNLSVIGFRILLLKVAGFNLLMTLRLWSS

SEQ ID NO: 14200 - protein, 898 aa, synthetic construct
MALPVTALLLPLALLLHAARPEVQLVESGGGLVQPGGSLRLSCAASGFSFSDFWMSWVRQAPGKGLEWVATISQAGSEKDYVDSVKGRFTISRDNAKKSLYLQMNSLRAEDTAVYYCASGVYSFDYRGQGTLVTVSSGTGGGGSGGGGSGGGGSEFDIQMTQSTSSLSASLGDRVTISCSASQGINNYLNWYQQKPDGTVELLIYYTSTLQSGVPSRFSGSGSGTDYSLTISNLEPEDIGTYYCQQYSKLPRTFGGGTKLEIKLEIQNPDPAVYQLRDSKSSDKSVCLFTDFDSQTNVSQSKDSDVYITDKCVLDMRSMDFKSNSAVAWSNKSDFACANAFNNSIIPEDTFFPSPESSCDVKLVEKSFETDTNLNFQILYEILLGKATLYAVLVSALVLMAMVKRKDSRGRAKRSGSGVKQTLNFDLLKLAGDVESNPGPTSMDWIWRILFLVGAATGAHSGPQLQLQESGPGLVKPSETLSLTCTVSGDSISSGDYYWGWIRQPPGKGLEWIGHIYYSGVTYYNPSLKSRVTISVDTSRNQFSLKLSSVTAADTAVYYCTREDSSNWRSRGQGTLVTVSSGSGGGGSGGGGSGGGGSFEQVQLQQSGSELMMPGASVKISCKATGYTFSNYWIEWVKQRPGHGLEWIGEILPGTGRTIYNEKFKGKATFTADISSNTVQMQLSSLTSEDSAVYYCARRDYYGNFYYAMDYWGQGTSVTVSSTREDLKNVFPPEVAVFEPSEAEISHTQKATLVCLATGFYPDHVELSWWVNGKEVHSGVCTDPQPLKEQPALNDSRYCLSSRLRVSATFWQNPRNHFRCQVQFYGLSENDEWTQDRAKPVTQIVSAEAWGRADCGFTSESYQQGVLSATNLSVIGFRILLLKVAGFNLLMTLRLWSS

SEQ ID NO: 14201 - protein, 893 aa, synthetic construct
MALPVTALLLPLALLLHAARPEVQLVESGGGLVQPGGSLRLSCAASGFSFSDFWMSWVRQAPGKGLEWVATISQAGSEKDYVDSVKGRFTISRDNAKKSLYLQMNSLRAEDTAVYYCASGVYSFDYRGQGTLVTVSSGTGGGGSGGGGSGGGGSEFDIQMTQSPASLSVSVGETVTITCRASENIYSNLAWYQQKQGKSPQLLVYAATNLADGVPSRFSGSGSGTQYSLKINSLQSEDFGSYYCQHFWGTWTFGGGTTLEIKLEIQNPDPAVYQLRDSKSSDKSVCLFTDFDSQTNVSQSKDSDVYITDKCVLDMRSMDFKSNSAVAWSNKSDFACANAFNNSIIPEDTFFPSPESSCDVKLVEKSFETDTNLNFQILYEILLGKATLYAVLVSALVLMAMVKRKDSRGRAKRSGSGVKQTLNFDLLKLAGDVESNPGPTSMDWIWRILFLVGAATGAHSGPQLQLQESGPGLVKPSETLSLTCTVSGDSISSGDYYWGWIRQPPGKGLEWIGHIYYSGVTYYNPSLKSRVTISVDTSRNQFSLKLSSVTAADTAVYYCTREDSSNWRSRGQGTLVTVSSGSGGGGSGGGGSGGGGSFEEVQLQQSGPELVKPGASVKMSCKASGYTFTDYYMKWMKQSHGKSLEWIGDINPNNGGTTYNQKFKGKATLTVDKSSSTAYMQLNSLTSEDSAVYYCARDYGYGYFDYWGQGTTLTVSSTREDLKNVFPPEVAVFEPSEAEISHTQKATLVCLATGFYPDHVELSWWVNGKEVHSGVCTDPQPLKEQPALNDSRYCLSSRLRVSATFWQNPRNHFRCQVQFYGLSENDEWTQDRAKPVTQIVSAEAWGRADCGFTSESYQQGVLSATNLSVIGFRILLLKVAGFNLLMTLRLWSS

SEQ ID NO: 14202 - protein, 896 aa, synthetic construct
MALPVTALLLPLALLLHAARPEVQLVESGGGLVQPGGSLRLSCAASGFSFSDFWMSWVRQAPGKGLEWVATISQAGSEKDYVDSVKGRFTISRDNAKKSLYLQMNSLRAEDTAVYYCASGVYSFDYRGQGTLVTVSSGTGGGGSGGGGSGGGGSEFEIVLTQSPGTLSLSPGERATLSCRASQSVGGYLAWYQQKPGQAPRLLIYDASNRATGIPARFSGSGSGTDFTLTISSLEPEDFAVYYCQQRNNWPPMYTFGQGTKLEIKRLEIQNPDPAVYQLRDSKSSDKSVCLFTDFDSQTNVSQSKDSDVYITDKCVLDMRSMDFKSNSAVAWSNKSDFACANAFNNSIIPEDTFFPSPESSCDVKLVEKSFETDTNLNFQILYEILLGKATLYAVLVSALVLMAMVKRKDSRGRAKRSGSGVKQTLNFDLLKLAGDVESNPGPTSMDWIWRILFLVGAATGAHSGPQLQLQESGPGLVKPSETLSLTCTVSGDSISSGDYYWGWIRQPPGKGLEWIGHIYYSGVTYYNPSLKSRVTISVDTSRNQFSLKLSSVTAADTAVYYCTREDSSNWRSRGQGTLVTVSSGSGGGGSGGGGSGGGGSFEQVQLVQSGAEVKKPGSSVKVSCKASGGTFSSYAISWVRQAPGQGLEWMGGIIPILGTANYAQKFQGRVTITADESTSTAYMELSSLRSEDTAVYYCARWGGGAFDIWGQGTMVTVSSTREDLKNVFPPEVAVFEPSEAEISHTQKATLVCLATGFYPDHVELSWWVNGKEVHSGVCTDPQPLKEQPALNDSRYCLSSRLRVSATFWQNPRNHFRCQVQFYGLSENDEWTQDRAKPVTQIVSAEAWGRADCGFTSESYQQGVLSATNLSVIGFRILLLKVAGFNLLMTLRLWSS

SEQ ID NO: 14203 - protein, 891 aa, synthetic construct
MALPVTALLLPLALLLHAARPEVQLVESGGGLVQPGGSLRLSCAASGFSFSDFWMSWVRQAPGKGLEWVATISQAGSEKDYVDSVKGRFTISRDNAKKSLYLQMNSLRAEDTAVYYCASGVYSFDYRGQGTLVTVSSGTGGGGSGGGGSGGGGSEFQIVLTQSPALMSASPGEKVTMTCSASSSVRYMYWYQQKPRSSPKPWIHLTSNLASGVPARFSGSGSGTSYSLTISSMEAEDAATYYCQQWSSHPFTFGSGTKLEIKLEIQNPDPAVYQLRDSKSSDKSVCLFTDFDSQTNVSQSKDSDVYITDKCVLDMRSMDFKSNSAVAWSNKSDFACANAFNNSIIPEDTFFPSPESSCDVKLVEKSFETDTNLNFQILYEILLGKATLYAVLVSALVLMAMVKRKDSRGRAKRSGSGVKQTLNFDLLKLAGDVESNPGPTSMDWIWRILFLVGAATGAHSGPQLQLQESGPGLVKPSETLSLTCTVSGDSISSGDYYWGWIRQPPGKGLEWIGHIYYSGVTYYNPSLKSRVTISVDTSRNQFSLKLSSVTAADTAVYYCTREDSSNWRSRGQGTLVTVSSGSGGGGSGGGGSGGGGSFEDVQLQESGPGLVKPSQSLSLTCTVTGFSITSDYSWNWIRQFPGNKLEWMGYISYSGHTSYNPSLESRISITRDTSKNQFFLQLNSVTTEDTATYYCTRGNWDVVYWGQGTLVTVSATREDLKNVFPPEVAVFEPSEAEISHTQKATLVCLATGFYPDHVELSWWVNGKEVHSGVCTDPQPLKEQPALNDSRYCLSSRLRVSATFWQNPRNHFRCQVQFYGLSENDEWTQDRAKPVTQIVSAEAWGRADCGFTSESYQQGVLSATNLSVIGFRILLLKVAGFNLLMTLRLWSS

SEQ ID NO: 14204 - protein, 901 aa, synthetic construct
MALPVTALLLPLALLLHAARPEVQLVESGGGLVQPGGSLRLSCAASGFSFSDFWMSWVRQAPGKGLEWVATISQAGSEKDYVDSVKGRFTISRDNAKKSLYLQMNSLRAEDTAVYYCASGVYSFDYRGQGTLVTVSSGTGGGGSGGGGSGGGGSEFDVVMTQSPLSLPVTLGQPASISCRSSQSIVHSDGNTYLEWYQQRPGQSPRRLIYKVSNRFSGVPDRFSGSGSGTDFTLKISRVEAEDVGVYYCFQGSHAPWTFGGGTKVEIKLEIQNPDPAVYQLRDSKSSDKSVCLFTDFDSQTNVSQSKDSDVYITDKCVLDMRSMDFKSNSAVAWSNKSDFACANAFNNSIIPEDTFFPSPESSCDVKLVEKSFETDTNLNFQILYEILLGKATLYAVLVSALVLMAMVKRKDSRGRAKRSGSGVKQTLNFDLLKLAGDVESNPGPTSMDWIWRILFLVGAATGAHSGPQLQLQESGPGLVKPSETLSLTCTVSGDSISSGDYYWGWIRQPPGKGLEWIGHIYYSGVTYYNPSLKSRVTISVDTSRNQFSLKLSSVTAADTAVYYCTREDSSNWRSRGQGTLVTVSSGSGGGGSGGGGSGGGGSFEEVQLVESGGGLVQPGGSLRLSCAASGFTFSSYGMHWVRQAPGKGLEWVAYITTRSSTIYYADSVKGRFTISRDNAKNSLYLQMNSLRAEDTAVYYCTREPLTGYYAMDYWGQGTSVTVSSTREDLKNVFPPEVAVFEPSEAEISHTQKATLVCLATGFYPDHVELSWWVNGKEVHSGVCTDPQPLKEQPALNDSRYCLSSRLRVSATFWQNPRNHFRCQVQFYGLSENDEWTQDRAKPVTQIVSAEAWGRADCGFTSESYQQGVLSATNLSVIGFRILLLKVAGFNLLMTLRLWSS

SEQ ID NO: 14205 - protein, 893 aa, synthetic construct
MALPVTALLLPLALLLHAARPEVQLVESGGGLVQPGGSLRLSCAASGFSFSDFWMSWVRQAPGKGLEWVATISQAGSEKDYVDSVKGRFTISRDNAKKSLYLQMNSLRAEDTAVYYCASGVYSFDYRGQGTLVTVSSGTGGGGSGGGGSGGGGSEFDIQMTQSPSSLSASVGDRVTITCRASQSISLWLNWYQQKPGKAPKLLIYAASTLQSGVPSRFSGSGSGTDFTLTISSLQPEDFATYYCQQYYTSPYTFGQGTKVEIKRLEIQNPDPAVYQLRDSKSSDKSVCLFTDFDSQTNVSQSKDSDVYITDKCVLDMRSMDFKSNSAVAWSNKSDFACANAFNNSIIPEDTFFPSPESSCDVKLVEKSFETDTNLNFQILYEILLGKATLYAVLVSALVLMAMVKRKDSRGRAKRSGSGVKQTLNFDLLKLAGDVESNPGPTSMDWIWRILFLVGAATGAHSGPQLQLQESGPGLVKPSETLSLTCTVSGDSISSGDYYWGWIRQPPGKGLEWIGHIYYSGVTYYNPSLKSRVTISVDTSRNQFSLKLSSVTAADTAVYYCTREDSSNWRSRGQGTLVTVSSGSGGGGSGGGGSGGGGSFEQVQLLESGGGLVQPGGSLRLSCAASGFTFSSYAMSWVRQAPGKGLEWVSVIRSSGSSTYYADSVKGRFTISRDNSKNTLYLQMNSLRAEDTAVYYCARGGGYFDYWGQGTLVTVSSTREDLKNVFPPEVAVFEPSEAEISHTQKATLVCLATGFYPDHVELSWWVNGKEVHSGVCTDPQPLKEQPALNDSRYCLSSRLRVSATFWQNPRNHFRCQVQFYGLSENDEWTQDRAKPVTQIVSAEAWGRADCGFTSESYQQGVLSATNLSVIGFRILLLKVAGFNLLMTLRLWSS

SEQ ID NO: 14206 - protein, 896 aa, synthetic construct
MALPVTALLLPLALLLHAARPEVQLVESGGGLVQPGGSLRLSCAASGFSFSDFWMSWVRQAPGKGLEWVATISQAGSEKDYVDSVKGRFTISRDNAKKSLYLQMNSLRAEDTAVYYCASGVYSFDYRGQGTLVTVSSGTGGGGSGGGGSGGGGSEFDIQMTQSPSSLSASVGDRVTITCRASQSISSYLNWYQQKPGKAPKLLIYAVSTLQSGVPSRFSGSGSGTDFTLTISSLQPEDFATYYCQQSGTFPPTTFGQGTKVEIKRLEIQNPDPAVYQLRDSKSSDKSVCLFTDFDSQTNVSQSKDSDVYITDKCVLDMRSMDFKSNSAVAWSNKSDFACANAFNNSIIPEDTFFPSPESSCDVKLVEKSFETDTNLNFQILYEILLGKATLYAVLVSALVLMAMVKRKDSRGRAKRSGSGVKQTLNFDLLKLAGDVESNPGPTSMDWIWRILFLVGAATGAHSGPQLQLQESGPGLVKPSETLSLTCTVSGDSISSGDYYWGWIRQPPGKGLEWIGHIYYSGVTYYNPSLKSRVTISVDTSRNQFSLKLSSVTAADTAVYYCTREDSSNWRSRGQGTLVTVSSGSGGGGSGGGGSGGGGSFEQVQLLESGGGLVQPGGSLRLSCAASGFTFSSHGMHWVRQAPGKGLEWVSVISGSGSNTGYADSVKGRFTISRDNSKNTLYLQMNSLRAEDTAVYYCARQWGSYAFDSWGQGTLVTVSSTREDLKNVFPPEVAVFEPSEAEISHTQKATLVCLATGFYPDHVELSWWVNGKEVHSGVCTDPQPLKEQPALNDSRYCLSSRLRVSATFWQNPRNHFRCQVQFYGLSENDEWTQDRAKPVTQIVSAEAWGRADCGFTSESYQQGVLSATNLSVIGFRILLLKVAGFNLLMTLRLWSS

SEQ ID NO: 14207 - protein, 906 aa, synthetic construct
MALPVTALLLPLALLLHAARPEVQLVESGGGLVQPGGSLRLSCAASGFSFSDFWMSWVRQAPGKGLEWVATISQAGSEKDYVDSVKGRFTISRDNAKKSLYLQMNSLRAEDTAVYYCASGVYSFDYRGQGTLVTVSSGTGGGGSGGGGSGGGGSEFDIVMSQSPSSLAVSVGEKVTMSCKSSQSLLHSSNQKNYLAWYQQKPGQSPKVLIYWASTRESGVPDRFTGSGSGTDFTLTITSVKSEDLAVYYCQQYYSYPWTFGGGTRLEIKRLEIQNPDPAVYQLRDSKSSDKSVCLFTDFDSQTNVSQSKDSDVYITDKCVLDMRSMDFKSNSAVAWSNKSDFACANAFNNSIIPEDTFFPSPESSCDVKLVEKSFETDTNLNFQILYEILLGKATLYAVLVSALVLMAMVKRKDSRGRAKRSGSGVKQTLNFDLLKLAGDVESNPGPTSMDWIWRILFLVGAATGAHSGPQLQLQESGPGLVKPSETLSLTCTVSGDSISSGDYYWGWIRQPPGKGLEWIGHIYYSGVTYYNPSLKSRVTISVDTSRNQFSLKLSSVTAADTAVYYCTREDSSNWRSRGQGTLVTVSSGSGGGGSGGGGSGGGGSFEEVQLQQSVAELVKPGASVKMSCKVSGYTLTDHTIHWMKQRPEQGLEWIGYIYPRDGITGYNEKFKGKATLTADTSSSTAYMQLNSLTSEDSAVYFCARWGYSYRNYAYYYDYWGQGTTLTVSSTREDLKNVFPPEVAVFEPSEAEISHTQKATLVCLATGFYPDHVELSWWVNGKEVHSGVCTDPQPLKEQPALNDSRYCLSSRLRVSATFWQNPRNHFRCQVQFYGLSENDEWTQDRAKPVTQIVSAEAWGRADCGFTSESYQQGVLSATNLSVIGFRILLLKVAGFNLLMTLRLWSS

SEQ ID NO: 14208 - protein, 903 aa, synthetic construct
MALPVTALLLPLALLLHAARPEVQLVESGGGLVQPGGSLRLSCAASGFSFSDFWMSWVRQAPGKGLEWVATISQAGSEKDYVDSVKGRFTISRDNAKKSLYLQMNSLRAEDTAVYYCASGVYSFDYRGQGTLVTVSSGTGGGGSGGGGSGGGGSEFEIVLTQSPGTLSLSPGERATLSCRASQSVSSSYLAWYQQKPGQAPRLLIYGTSSRATGIPDRFSGSGSGTDFTLTISRLEPEDFAVYYCQQYGSSPFTFGGGTKVEIKRLEIQNPDPAVYQLRDSKSSDKSVCLFTDFDSQTNVSQSKDSDVYITDKCVLDMRSMDFKSNSAVAWSNKSDFACANAFNNSIIPEDTFFPSPESSCDVKLVEKSFETDTNLNFQILYEILLGKATLYAVLVSALVLMAMVKRKDSRGRAKRSGSGVKQTLNFDLLKLAGDVESNPGPTSMDWIWRILFLVGAATGAHSGPQLQLQESGPGLVKPSETLSLTCTVSGDSISSGDYYWGWIRQPPGKGLEWIGHIYYSGVTYYNPSLKSRVTISVDTSRNQFSLKLSSVTAADTAVYYCTREDSSNWRSRGQGTLVTVSSGSGGGGSGGGGSGGGGSFEQVQLQESGPGLAKPSETLSLTCTVSGDSITSYYWSWIRQPPGKGLEWIGYIYYSGSTNYNPSLKSRVTISVDTSKNQFSLKLSSVTAADTAVYYCARDQRRIAAAGTHFYGMDVWGQGTTVTVSSTREDLKNVFPPEVAVFEPSEAEISHTQKATLVCLATGFYPDHVELSWWVNGKEVHSGVCTDPQPLKEQPALNDSRYCLSSRLRVSATFWQNPRNHFRCQVQFYGLSENDEWTQDRAKPVTQIVSAEAWGRADCGFTSESYQQGVLSATNLSVIGFRILLLKVAGFNLLMTLRLWSS

SEQ ID NO: 14209 - protein, 895 aa, synthetic construct
MALPVTALLLPLALLLHAARPEVQLVESGGGLVQPGGSLRLSCAASGFSFSDFWMSWVRQAPGKGLEWVATISQAGSEKDYVDSVKGRFTISRDNAKKSLYLQMNSLRAEDTAVYYCASGVYSFDYRGQGTLVTVSSGTGGGGSGGGGSGGGGSEFDILLTQSPVILSVSPGERVSFSCRASQSIGTNIHWYQQRTNGSPRLLIKYASESISGIPSRFSGSGSGTDFTLSINSVESEDIADYYCQQNNNWPTTFGAGTKLELKLEIQNPDPAVYQLRDSKSSDKSVCLFTDFDSQTNVSQSKDSDVYITDKCVLDMRSMDFKSNSAVAWSNKSDFACANAFNNSIIPEDTFFPSPESSCDVKLVEKSFETDTNLNFQILYEILLGKATLYAVLVSALVLMAMVKRKDSRGRAKRSGSGVKQTLNFDLLKLAGDVESNPGPTSMDWIWRILFLVGAATGAHSGPQLQLQESGPGLVKPSETLSLTCTVSGDSISSGDYYWGWIRQPPGKGLEWIGHIYYSGVTYYNPSLKSRVTISVDTSRNQFSLKLSSVTAADTAVYYCTREDSSNWRSRGQGTLVTVSSGSGGGGSGGGGSGGGGSFEQVQLKQSGPGLVQPSQSLSITCTVSGFSLTNYGVHWVRQSPGKGLEWLGVIWSGGNTDYNTPFTSRLSINKDNSKSQVFFKMNSLQSNDTAIYYCARALTYYDYEFAYWGQGTLVTVSATREDLKNVFPPEVAVFEPSEAEISHTQKATLVCLATGFYPDHVELSWWVNGKEVHSGVCTDPQPLKEQPALNDSRYCLSSRLRVSATFWQNPRNHFRCQVQFYGLSENDEWTQDRAKPVTQIVSAEAWGRADCGFTSESYQQGVLSATNLSVIGFRILLLKVAGFNLLMTLRLWSS

SEQ ID NO: 14210 - protein, 888 aa, synthetic construct
MALPVTALLLPLALLLHAARPEVQLVESGGGLVQPGGSLRLSCAASGFSFSDFWMSWVRQAPGKGLEWVATISQAGSEKDYVDSVKGRFTISRDNAKKSLYLQMNSLRAEDTAVYYCASGVYSFDYRGQGTLVTVSSGTGGGGSGGGGSGGGGSEFMTQSPKFLLVSAGDRVTLTCKASQSVNNDVYWYQQEPGQSPKLLIYWASTRESGVPDRFTGSGSGTDFTLTISSVQAEDLAVYYCKQSYNLYTFGGGTKLEIKRLEIQNPDPAVYQLRDSKSSDKSVCLFTDFDSQTNVSQSKDSDVYITDKCVLDMRSMDFKSNSAVAWSNKSDFACANAFNNSIIPEDTFFPSPESSCDVKLVEKSFETDTNLNFQILYEILLGKATLYAVLVSALVLMAMVKRKDSRGRAKRSGSGVKQTLNFDLLKLAGDVESNPGPTSMDWIWRILFLVGAATGAHSGPQLQLQESGPGLVKPSETLSLTCTVSGDSISSGDYYWGWIRQPPGKGLEWIGHIYYSGVTYYNPSLKSRVTISVDTSRNQFSLKLSSVTAADTAVYYCTREDSSNWRSRGQGTLVTVSSGSGGGGSGGGGSGGGGSFEESGRGLVQPGGSRKLSCAASGFTFSTSGMHWVRQAPEKGLEWVAYISSGSTTIYHADTVKGRFTISRDNPKNTLFLQMTSLRSEDTAMYYCCARSGQFGNYFDYWGQGTTLTVSSTREDLKNVFPPEVAVFEPSEAEISHTQKATLVCLATGFYPDHVELSWWVNGKEVHSGVCTDPQPLKEQPALNDSRYCLSSRLRVSATFWQNPRNHFRCQVQFYGLSENDEWTQDRAKPVTQIVSAEAWGRADCGFTSESYQQGVLSATNLSVIGFRILLLKVAGFNLLMTLRLWSS

SEQ ID NO: 14211 - protein, 893 aa, synthetic construct
MALPVTALLLPLALLLHAARPEVQLVESGGGLVQPGGSLRLSCAASGFSFSDFWMSWVRQAPGKGLEWVATISQAGSEKDYVDSVKGRFTISRDNAKKSLYLQMNSLRAEDTAVYYCASGVYSFDYRGQGTLVTVSSGTGGGGSGGGGSGGGGSEFQSPSSLAVSAGEKVTMSCKSSQSLLNSRTRKNYLAWYQQKPGQSPKLLIYWASTRESGVPDRFTGSGSGTDFTLTISSVQAEDLAVYYCKQSNLYTFGGGTKLEIKLEIQNPDPAVYQLRDSKSSDKSVCLFTDFDSQTNVSQSKDSDVYITDKCVLDMRSMDFKSNSAVAWSNKSDFACANAFNNSIIPEDTFFPSPESSCDVKLVEKSFETDTNLNFQILYEILLGKATLYAVLVSALVLMAMVKRKDSRGRAKRSGSGVKQTLNFDLLKLAGDVESNPGPTSMDWIWRILFLVGAATGAHSGPQLQLQESGPGLVKPSETLSLTCTVSGDSISSGDYYWGWIRQPPGKGLEWIGHIYYSGVTYYNPSLKSRVTISVDTSRNQFSLKLSSVTAADTAVYYCTREDSSNWRSRGQGTLVTVSSGSGGGGSGGGGSGGGGSFEQVQLEESGPELVKPGASVKLSCKASGYTFTEYIIHWVKQRSGQGLEWIGWFYPGSGSIKYNEKFKDKATLTADKSSSTVYMELSGLTSEDSAVYFCARHDGYSYFDYWGQGTTLTVSSTREDLKNVFPPEVAVFEPSEAEISHTQKATLVCLATGFYPDHVELSWWVNGKEVHSGVCTDPQPLKEQPALNDSRYCLSSRLRVSATFWQNPRNHFRCQVQFYGLSENDEWTQDRAKPVTQIVSAEAWGRADCGFTSESYQQGVLSATNLSVIGFRILLLKVAGFNLLMTLRLWSS

SEQ ID NO: 14212 - protein, 896 aa, synthetic construct
MALPVTALLLPLALLLHAARPEVQLVESGGGLVQPGGSLRLSCAASGFSFSDFWMSWVRQAPGKGLEWVATISQAGSEKDYVDSVKGRFTISRDNAKKSLYLQMNSLRAEDTAVYYCASGVYSFDYRGQGTLVTVSSGTGGGGSGGGGSGGGGSEFDIQMTQSPSSLSASLGERVSLTCRATQELSGYLSWLQQKPDGTIKRLIYAASTLDSGVPKRFSGNRSGSDYSLTISSLESEDFADYYCLQYAIYPYTFGGGTKLEIKLEIQNPDPAVYQLRDSKSSDKSVCLFTDFDSQTNVSQSKDSDVYITDKCVLDMRSMDFKSNSAVAWSNKSDFACANAFNNSIIPEDTFFPSPESSCDVKLVEKSFETDTNLNFQILYEILLGKATLYAVLVSALVLMAMVKRKDSRGRAKRSGSGVKQTLNFDLLKLAGDVESNPGPTSMDWIWRILFLVGAATGAHSGPQLQLQESGPGLVKPSETLSLTCTVSGDSISSGDYYWGWIRQPPGKGLEWIGHIYYSGVTYYNPSLKSRVTISVDTSRNQFSLKLSSVTAADTAVYYCTREDSSNWRSRGQGTLVTVSSGSGGGGSGGGGSGGGGSFEEVQLQQSGPELVKPGASVKMSCKASGYTFTSYFIHWVKQKPGQGLEWIGFINPYNDGSKYNEKFKGKATLTSDKSSSTAYMELSSLTSEDSAVYYCTRDDGYYGYAMDYWGQGTSVTVSSTREDLKNVFPPEVAVFEPSEAEISHTQKATLVCLATGFYPDHVELSWWVNGKEVHSGVCTDPQPLKEQPALNDSRYCLSSRLRVSATFWQNPRNHFRCQVQFYGLSENDEWTQDRAKPVTQIVSAEAWGRADCGFTSESYQQGVLSATNLSVIGFRILLLKVAGFNLLMTLRLWSS

SEQ ID NO: 14213 - protein, 901 aa, synthetic construct
MALPVTALLLPLALLLHAARPEVQLVESGGGLVQPGGSLRLSCAASGFSFSDFWMSWVRQAPGKGLEWVATISQAGSEKDYVDSVKGRFTISRDNAKKSLYLQMNSLRAEDTAVYYCASGVYSFDYRGQGTLVTVSSGTGGGGSGGGGSGGGGSEFDTIVLTQSPASLAVSLGQRATISCRASESVDSYGNSFMHWYQQKPGQPPKLLIYLASNLESGVPARFSGSGSRTDFTLTIDPVEADDAATYYCQQNNYDPWTFGGGTKLEIKLEIQNPDPAVYQLRDSKSSDKSVCLFTDFDSQTNVSQSKDSDVYITDKCVLDMRSMDFKSNSAVAWSNKSDFACANAFNNSIIPEDTFFPSPESSCDVKLVEKSFETDTNLNFQILYEILLGKATLYAVLVSALVLMAMVKRKDSRGRAKRSGSGVKQTLNFDLLKLAGDVESNPGPTSMDWIWRILFLVGAATGAHSGPQLQLQESGPGLVKPSETLSLTCTVSGDSISSGDYYWGWIRQPPGKGLEWIGHIYYSGVTYYNPSLKSRVTISVDTSRNQFSLKLSSVTAADTAVYYCTREDSSNWRSRGQGTLVTVSSGSGGGGSGGGGSGGGGSFEEVQLQQSGPELVKPGASVKMSCKASGYTFTSYVMHWVKQKPGQGLEWIGYINPYNDGTKYNEKFKGKATLTSDTSSSTAYMELNSLTSEDSAVYFCARPIYFDNDYFDYWGQGTTLKVSSTREDLKNVFPPEVAVFEPSEAEISHTQKATLVCLATGFYPDHVELSWWVNGKEVHSGVCTDPQPLKEQPALNDSRYCLSSRLRVSATFWQNPRNHFRCQVQFYGLSENDEWTQDRAKPVTQIVSAEAWGRADCGFTSESYQQGVLSATNLSVIGFRILLLKVAGFNLLMTLRLWSS

SEQ ID NO: 14214 - protein, 896 aa, synthetic construct
MALPVTALLLPLALLLHAARPEVQLVESGGGLVQPGGSLRLSCAASGFSFSDFWMSWVRQAPGKGLEWVATISQAGSEKDYVDSVKGRFTISRDNAKKSLYLQMNSLRAEDTAVYYCASGVYSFDYRGQGTLVTVSSGTGGGGSGGGGSGGGGSEFDIQMTQSPSSLSASVGDRVTITCKASQDVGIAVAWYQQKPGKVPKLLIYWASTRHTGVPDRFSGSGSGTDFTLTISSLQPEDVATYYCQQYSSYPYTFGQGTKVEIKRLEIQNPDPAVYQLRDSKSSDKSVCLFTDFDSQTNVSQSKDSDVYITDKCVLDMRSMDFKSNSAVAWSNKSDFACANAFNNSIIPEDTFFPSPESSCDVKLVEKSFETDTNLNFQILYEILLGKATLYAVLVSALVLMAMVKRKDSRGRAKRSGSGVKQTLNFDLLKLAGDVESNPGPTSMDWIWRILFLVGAATGAHSGPQLQLQESGPGLVKPSETLSLTCTVSGDSISSGDYYWGWIRQPPGKGLEWIGHIYYSGVTYYNPSLKSRVTISVDTSRNQFSLKLSSVTAADTAVYYCTREDSSNWRSRGQGTLVTVSSGSGGGGSGGGGSGGGGSFEEVQLVESGGGLVQPGGSLRLSCAASGFDFSRYWMSWVRQAPGKGLEWIGEINPDSSTINYAPSLKDKFIISRDNAKNSLYLQMNSLRAEDTAVYYCARPDGNYWYFDVWGQGTLVTVSSTREDLKNVFPPEVAVFEPSEAEISHTQKATLVCLATGFYPDHVELSWWVNGKEVHSGVCTDPQPLKEQPALNDSRYCLSSRLRVSATFWQNPRNHFRCQVQFYGLSENDEWTQDRAKPVTQIVSAEAWGRADCGFTSESYQQGVLSATNLSVIGFRILLLKVAGFNLLMTLRLWSS

SEQ ID NO: 14215 - protein, 896 aa, synthetic construct
MALPVTALLLPLALLLHAARPEVQLVESGGGLVQPGGSLRLSCAASGFSFSDFWMSWVRQAPGKGLEWVATISQAGSEKDYVDSVKGRFTISRDNAKKSLYLQMNSLRAEDTAVYYCASGVYSFDYRGQGTLVTVSSGTGGGGSGGGGSGGGGSEFDIVMTQSQKSMSTSVGDRVSITCKASQDVITGVAWYQQKPGQSPKLLIYSASYRYTGVPDRFTGSGSGTDFTFTISNVQAEDLAVYYCQQHYSTPLTFGAGTKLELKLEIQNPDPAVYQLRDSKSSDKSVCLFTDFDSQTNVSQSKDSDVYITDKCVLDMRSMDFKSNSAVAWSNKSDFACANAFNNSIIPEDTFFPSPESSCDVKLVEKSFETDTNLNFQILYEILLGKATLYAVLVSALVLMAMVKRKDSRGRAKRSGSGVKQTLNFDLLKLAGDVESNPGPTSMDWIWRILFLVGAATGAHSGPQLQLQESGPGLVKPSETLSLTCTVSGDSISSGDYYWGWIRQPPGKGLEWIGHIYYSGVTYYNPSLKSRVTISVDTSRNQFSLKLSSVTAADTAVYYCTREDSSNWRSRGQGTLVTVSSGSGGGGSGGGGSGGGGSFEQVQLQQPGAELVRPGASVKLSCKASGYSFTTYWMNWVKQRPGQGLEWIGMIHPSDSETRLNQKFKDKATLTVDKSSSTAYMQLSSPTSEDSAVYYCARSTMIATRAMDYWGQGTSVTVSSTREDLKNVFPPEVAVFEPSEAEISHTQKATLVCLATGFYPDHVELSWWVNGKEVHSGVCTDPQPLKEQPALNDSRYCLSSRLRVSATFWQNPRNHFRCQVQFYGLSENDEWTQDRAKPVTQIVSAEAWGRADCGFTSESYQQGVLSATNLSVIGFRILLLKVAGFNLLMTLRLWSS

SEQ ID NO: 14216 - protein, 902 aa, synthetic construct
MALPVTALLLPLALLLHAARPEVQLVESGGGLVQPGGSLRLSCAASGFSFSDFWMSWVRQAPGKGLEWVATISQAGSEKDYVDSVKGRFTISRDNAKKSLYLQMNSLRAEDTAVYYCASGVYSFDYRGQGTLVTVSSGTGGGGSGGGGSGGGGSEFQSVLTQPPSVSGAPGQRVTISCTGSGSNIGAPYDVSWYQQLPGTAPKLLIYHNNKRPSGVPDRFSGSKSGTSASLAITGLQAEDEADYYCATVEAGLSGSVFGGGTKLTVLGALEIQNPDPAVYQLRDSKSSDKSVCLFTDFDSQTNVSQSKDSDVYITDKCVLDMRSMDFKSNSAVAWSNKSDFACANAFNNSIIPEDTFFPSPESSCDVKLVEKSFETDTNLNFQILYEILLGKATLYAVLVSALVLMAMVKRKDSRGRAKRSGSGVKQTLNFDLLKLAGDVESNPGPTSMDWIWRILFLVGAATGAHSGPQLQLQESGPGLVKPSETLSLTCTVSGDSISSGDYYWGWIRQPPGKGLEWIGHIYYSGVTYYNPSLKSRVTISVDTSRNQFSLKLSSVTAADTAVYYCTREDSSNWRSRGQGTLVTVSSGSGGGGSGGGGSGGGGSFEQVQLVQSGAEVKKPGASVKVSCKVSGYTLTELSIHWVRQAPGKGLEWMGGFDPEENEIVYAQRFQGRVTMTEDTSTDTAYMELSSLRSEDTAVYYCAIVGSFSPLTLGLWGQGTMVTVSSTREDLKNVFPPEVAVFEPSEAEISHTQKATLVCLATGFYPDHVELSWWVNGKEVHSGVCTDPQPLKEQPALNDSRYCLSSRLRVSATFWQNPRNHFRCQVQFYGLSENDEWTQDRAKPVTQIVSAEAWGRADCGFTSESYQQGVLSATNLSVIGFRILLLKVAGFNLLMTLRLWSS

SEQ ID NO: 14217 - protein, 902 aa, synthetic construct
MALPVTALLLPLALLLHAARPEVQLVESGGGLVQPGGSLRLSCAASGFSFSDFWMSWVRQAPGKGLEWVATISQAGSEKDYVDSVKGRFTISRDNAKKSLYLQMNSLRAEDTAVYYCASGVYSFDYRGQGTLVTVSSGTGGGGSGGGGSGGGGSEFQSVLTQPPSVSGAPGQRVTISCTGSGSNIGAPYDVSWYQQLPGTAPKLLIYHNNKRPSGVPDRFSGSKSGTSASLAITGLQAEDEADYYCQSYDSSSISTIFGGGTKLTVLGALEIQNPDPAVYQLRDSKSSDKSVCLFTDFDSQTNVSQSKDSDVYITDKCVLDMRSMDFKSNSAVAWSNKSDFACANAFNNSIIPEDTFFPSPESSCDVKLVEKSFETDTNLNFQILYEILLGKATLYAVLVSALVLMAMVKRKDSRGRAKRSGSGVKQTLNFDLLKLAGDVESNPGPTSMDWIWRILFLVGAATGAHSGPQLQLQESGPGLVKPSETLSLTCTVSGDSISSGDYYWGWIRQPPGKGLEWIGHIYYSGVTYYNPSLKSRVTISVDTSRNQFSLKLSSVTAADTAVYYCTREDSSNWRSRGQGTLVTVSSGSGGGGSGGGGSGGGGSFEQVQLVQSGAEVKKPGASVKVSCKVSGYTLTELSIHWVRQAPGKGLEWMGGFDPEENEIVYAQRFQGRVTMTEDTSTDTAYMELSSLRSEDTAVYYCAIVGSFSGIAYRPWGQGTMVTVSSTREDLKNVFPPEVAVFEPSEAEISHTQKATLVCLATGFYPDHVELSWWVNGKEVHSGVCTDPQPLKEQPALNDSRYCLSSRLRVSATFWQNPRNHFRCQVQFYGLSENDEWTQDRAKPVTQIVSAEAWGRADCGFTSESYQQGVLSATNLSVIGFRILLLKVAGFNLLMTLRLWSS

SEQ ID NO: 14218 - protein, 890 aa, synthetic construct
MALPVTALLLPLALLLHAARPEVQLVESGGGLVQPGGSLRLSCAASGFSFSDFWMSWVRQAPGKGLEWVATISQAGSEKDYVDSVKGRFTISRDNAKKSLYLQMNSLRAEDTAVYYCASGVYSFDYRGQGTLVTVSSGTGGGGSGGGGSGGGGSEFDIQMTQSPSSLSASVGDRVTITCRASQGIRNNLAWYQQKPGKAPKRLIYAASNLQSGVPSRFTGSGSGTEFTLIVSSLQPEDFATYYCLQHHSYPLTSGGGTKVELEIQNPDPAVYQLRDSKSSDKSVCLFTDFDSQTNVSQSKDSDVYITDKCVLDMRSMDFKSNSAVAWSNKSDFACANAFNNSIIPEDTFFPSPESSCDVKLVEKSFETDTNLNFQILYEILLGKATLYAVLVSALVLMAMVKRKDSRGRAKRSGSGVKQTLNFDLLKLAGDVESNPGPTSMDWIWRILFLVGAATGAHSGPQLQLQESGPGLVKPSETLSLTCTVSGDSISSGDYYWGWIRQPPGKGLEWIGHIYYSGVTYYNPSLKSRVTISVDTSRNQFSLKLSSVTAADTAVYYCTREDSSNWRSRGQGTLVTVSSGSGGGGSGGGGSGGGGSFEEVQVLESGGGLVQPGGSLRLSCAASGFTFSSYAMSWVRQAPGKGLEWVSAISGSGGSTNYADSVKGRFTISRDNSKNTLYLQMNSLRAEDTAVYYCAGSSGWSEYWGQGTLVTVSSTREDLKNVFPPEVAVFEPSEAEISHTQKATLVCLATGFYPDHVELSWWVNGKEVHSGVCTDPQPLKEQPALNDSRYCLSSRLRVSATFWQNPRNHFRCQVQFYGLSENDEWTQDRAKPVTQIVSAEAWGRADCGFTSESYQQGVLSATNLSVIGFRILLLKVAGFNLLMTLRLWSS

SEQ ID NO: 14219 - protein, 896 aa, synthetic construct
MALPVTALLLPLALLLHAARPEVQLVESGGGLVQPGGSLRLSCAASGFSFSDFWMSWVRQAPGKGLEWVATISQAGSEKDYVDSVKGRFTISRDNAKKSLYLQMNSLRAEDTAVYYCASGVYSFDYRGQGTLVTVSSGTGGGGSGGGGSGGGGSEFDEIQLVQSGAEVKKPGESLRISCKGSGFNIEDYYIHWVRQMPGKGLEWMGRIDPENDETKYGPIFQGHVTISADTSINTVYLQWSSLKASDTAMYYCAFRGGVYWGQGTTVTVSSLEIQNPDPAVYQLRDSKSSDKSVCLFTDFDSQTNVSQSKDSDVYITDKCVLDMRSMDFKSNSAVAWSNKSDFACANAFNNSIIPEDTFFPSPESSCDVKLVEKSFETDTNLNFQILYEILLGKATLYAVLVSALVLMAMVKRKDSRGRAKRSGSGVKQTLNFDLLKLAGDVESNPGPTSMDWIWRILFLVGAATGAHSGPQLQLQESGPGLVKPSETLSLTCTVSGDSISSGDYYWGWIRQPPGKGLEWIGHIYYSGVTYYNPSLKSRVTISVDTSRNQFSLKLSSVTAADTAVYYCTREDSSNWRSRGQGTLVTVSSGSGGGGSGGGGSGGGGSFEDVVMTQSPDSLAVSLGERATINCKSSQSLLDSDGKTYLNWLQQKPGQPPKRLISLVSKLDSGVPDRFSGSGSGTDFTLTISSLQAEDVAVYYCWQGTHFPGTFGGGTKVEIKTREDLKNVFPPEVAVFEPSEAEISHTQKATLVCLATGFYPDHVELSWWVNGKEVHSGVCTDPQPLKEQPALNDSRYCLSSRLRVSATFWQNPRNHFRCQVQFYGLSENDEWTQDRAKPVTQIVSAEAWGRADCGFTSESYQQGVLSATNLSVIGFRILLLKVAGFNLLMTLRLWSS

SEQ ID NO: 14220 - protein, 903 aa, synthetic construct
MALPVTALLLPLALLLHAARPEVQLVESGGGLVQPGGSLRLSCAASGFSFSDFWMSWVRQAPGKGLEWVATISQAGSEKDYVDSVKGRFTISRDNAKKSLYLQMNSLRAEDTAVYYCASGVYSFDYRGQGTLVTVSSGTGGGGSGGGGSGGGGSEFDELVMTQSPSSLTVTAGEKVTMSCKSSQSLLNSGNQKNYLTWYQQKPGQPPKLLIYWASTRESGVPDRFTGSGSGTDFTLTISSVQAEDLAVYYCQNDYSYPLTFGAGTKLEIKLEIQNPDPAVYQLRDSKSSDKSVCLFTDFDSQTNVSQSKDSDVYITDKCVLDMRSMDFKSNSAVAWSNKSDFACANAFNNSIIPEDTFFPSPESSCDVKLVEKSFETDTNLNFQILYEILLGKATLYAVLVSALVLMAMVKRKDSRGRAKRSGSGVKQTLNFDLLKLAGDVESNPGPTSMDWIWRILFLVGAATGAHSGPQLQLQESGPGLVKPSETLSLTCTVSGDSISSGDYYWGWIRQPPGKGLEWIGHIYYSGVTYYNPSLKSRVTISVDTSRNQFSLKLSSVTAADTAVYYCTREDSSNWRSRGQGTLVTVSSGSGGGGSGGGGSGGGGSFEEVQLLEQSGAELVRPGTSVKISCKASGYAFTNYWLGWVKQRPGHGLEWIGDIFPGSGNIHYNEKFKGKATLTADKSSSTAYMQLSSLTFEDSAVYFCARLRNWDEPMDYWGQGTTVTVSSTREDLKNVFPPEVAVFEPSEAEISHTQKATLVCLATGFYPDHVELSWWVNGKEVHSGVCTDPQPLKEQPALNDSRYCLSSRLRVSATFWQNPRNHFRCQVQFYGLSENDEWTQDRAKPVTQIVSAEAWGRADCGFTSESYQQGVLSATNLSVIGFRILLLKVAGFNLLMTLRLWSS

SEQ ID NO: 14221 - protein, 904 aa, synthetic construct
MALPVTALLLPLALLLHAARPEVQLVESGGGLVQPGGSLRLSCAASGFSFSDFWMSWVRQAPGKGLEWVATISQAGSEKDYVDSVKGRFTISRDNAKKSLYLQMNSLRAEDTAVYYCASGVYSFDYRGQGTLVTVSSGTGGGGSGGGGSGGGGSEFDELQMTQSPSSLSASVGDRVTITCRASQSISSYLNWYQQKPGQPPKLLIYWASTRESGVPDRFSGSESGTNYTLTISSLQPEDFATYFCQQSDSLPITFGQGTRLDIQLEIQNPDPAVYQLRDSKSSDKSVCLFTDFDSQTNVSQSKDSDVYITDKCVLDMRSMDFKSNSAVAWSNKSDFACANAFNNSIIPEDTFFPSPESSCDVKLVEKSFETDTNLNFQILYEILLGKATLYAVLVSALVLMAMVKRKDSRGRAKRSGSGVKQTLNFDLLKLAGDVESNPGPTSMDWIWRILFLVGAATGAHSGPQLQLQESGPGLVKPSETLSLTCTVSGDSISSGDYYWGWIRQPPGKGLEWIGHIYYSGVTYYNPSLKSRVTISVDTSRNQFSLKLSSVTAADTAVYYCTREDSSNWRSRGQGTLVTVSSGSGGGGSGGGGSGGGGSFEEVQLLESGGGVVQPGRSLRLSCAASGFTFSSYGMHWVRQAPGKGLEWVAVISYDGSNKYYADSVKGRFTISRDNSKNTLYLQMNSLRAEDTAVYYCAKDMGWGSGWRPYYYYGMDVWGQGTTVTVSSTREDLKNVFPPEVAVFEPSEAEISHTQKATLVCLATGFYPDHVELSWWVNGKEVHSGVCTDPQPLKEQPALNDSRYCLSSRLRVSATFWQNPRNHFRCQVQFYGLSENDEWTQDRAKPVTQIVSAEAWGRADCGFTSESYQQGVLSATNLSVIGFRILLLKVAGFNLLMTLRLWSS

SEQ ID NO: 14222 - protein, 901 aa, synthetic construct
MALPVTALLLPLALLLHAARPEVQLVESGGGLVQPGGSLRLSCAASGFSFSDFWMSWVRQAPGKGLEWVATISQAGSEKDYVDSVKGRFTISRDNAKKSLYLQMNSLRAEDTAVYYCASGVYSFDYRGQGTLVTVSSGTGGGGSGGGGSGGGGSEFDDIQMTQSPSSLSASVGDRVTITCRASQSISSYLNWYQQKPGKAPKLLIYAASSLQSGVPSRFSGSGSGTDFTLTISSLQPEDLATYYCQQSYSTPFTFGPGTKVDIKLEIQNPDPAVYQLRDSKSSDKSVCLFTDFDSQTNVSQSKDSDVYITDKCVLDMRSMDFKSNSAVAWSNKSDFACANAFNNSIIPEDTFFPSPESSCDVKLVEKSFETDTNLNFQILYEILLGKATLYAVLVSALVLMAMVKRKDSRGRAKRSGSGVKQTLNFDLLKLAGDVESNPGPTSMDWIWRILFLVGAATGAHSGPQLQLQESGPGLVKPSETLSLTCTVSGDSISSGDYYWGWIRQPPGKGLEWIGHIYYSGVTYYNPSLKSRVTISVDTSRNQFSLKLSSVTAADTAVYYCTREDSSNWRSRGQGTLVTVSSGSGGGGSGGGGSGGGGSFEVHEVQLVQSGAEVKKPGSSVKVSCKASGGTFSSYAISWVRQAPGQGLEWMGGIIPIFGTANYAQKFQGRVTITADKSTSTAYMELSSLRSEDTAVYYCATFALFGFREQAFDIWGQGTTVTVSSTREDLKNVFPPEVAVFEPSEAEISHTQKATLVCLATGFYPDHVELSWWVNGKEVHSGVCTDPQPLKEQPALNDSRYCLSSRLRVSATFWQNPRNHFRCQVQFYGLSENDEWTQDRAKPVTQIVSAEAWGRADCGFTSESYQQGVLSATNLSVIGFRILLLKVAGFNLLMTLRLWSS

SEQ ID NO: 14223 - protein, 899 aa, synthetic construct
MALPVTALLLPLALLLHAARPEVQLVESGGGLVQPGGSLRLSCAASGFSFSDFWMSWVRQAPGKGLEWVATISQAGSEKDYVDSVKGRFTISRDNAKKSLYLQMNSLRAEDTAVYYCASGVYSFDYRGQGTLVTVSSGTGGGGSGGGGSGGGGSEFDIVLTQSPLSLAVSLGQPAIISCKASQSVSFAGTSLMHWYHQKPGQQPRLLIYRASNLEAGVPDRFSGSGSKTDFTLTISPVEAEDAATYYCQQSREYPYTFGGGTKLEIKRLEIQNPDPAVYQLRDSKSSDKSVCLFTDFDSQTNVSQSKDSDVYITDKCVLDMRSMDFKSNSAVAWSNKSDFACANAFNNSIIPEDTFFPSPESSCDVKLVEKSFETDTNLNFQILYEILLGKATLYAVLVSALVLMAMVKRKDSRGRAKRSGSGVKQTLNFDLLKLAGDVESNPGPTSMDWIWRILFLVGAATGAHSGPQLQLQESGPGLVKPSETLSLTCTVSGDSISSGDYYWGWIRQPPGKGLEWIGHIYYSGVTYYNPSLKSRVTISVDTSRNQFSLKLSSVTAADTAVYYCTREDSSNWRSRGQGTLVTVSSGSGGGGSGGGGSGGGGSFEQVQLVQSGAEVVKPGASVKISCKASGYTFTGYFMNWVKQSPGQSLEWIGRIHPYDGDTFYNQKFQGKATLTVDKSSNTAHMELLSLTSEDFAVYYCTRYDGSRAMDYWGQGTTVTVSSTREDLKNVFPPEVAVFEPSEAEISHTQKATLVCLATGFYPDHVELSWWVNGKEVHSGVCTDPQPLKEQPALNDSRYCLSSRLRVSATFWQNPRNHFRCQVQFYGLSENDEWTQDRAKPVTQIVSAEAWGRADCGFTSESYQQGVLSATNLSVIGFRILLLKVAGFNLLMTLRLWSS

SEQ ID NO: 14224 - protein, 896 aa, synthetic construct
MALPVTALLLPLALLLHAARPEVQLVESGGGLVQPGGSLRLSCAASGFSFSDFWMSWVRQAPGKGLEWVATISQAGSEKDYVDSVKGRFTISRDNAKKSLYLQMNSLRAEDTAVYYCASGVYSFDYRGQGTLVTVSSGTGGGGSGGGGSGGGGSEFDDVVMTQTPLSLPVTPGEPASISCRSSQSLVHRNGNTYLHWYLQKPGQSPKLLIHKVSNRFSGVPDRFSGSGSGTDFTLKISRVEAEDLGVYFCSQSTHVPPLTFGAGTKLELKLEIQNPDPAVYQLRDSKSSDKSVCLFTDFDSQTNVSQSKDSDVYITDKCVLDMRSMDFKSNSAVAWSNKSDFACANAFNNSIIPEDTFFPSPESSCDVKLVEKSFETDTNLNFQILYEILLGKATLYAVLVSALVLMAMVKRKDSRGRAKRSGSGVKQTLNFDLLKLAGDVESNPGPTSMDWIWRILFLVGAATGAHSGPQLQLQESGPGLVKPSETLSLTCTVSGDSISSGDYYWGWIRQPPGKGLEWIGHIYYSGVTYYNPSLKSRVTISVDTSRNQFSLKLSSVTAADTAVYYCTREDSSNWRSRGQGTLVTVSSGSGGGGSGGGGSGGGGSFEEVQLVQSGAEVEKPGASVKISCKASGSSFTGYNMNWVRQNIGKSLEWIGAIDPYYGGTSYNQKFKGRATLTVDKSTSTAYMHLKSLRSEDTAVYYCVSGMEYWGQGTSVTVSSTREDLKNVFPPEVAVFEPSEAEISHTQKATLVCLATGFYPDHVELSWWVNGKEVHSGVCTDPQPLKEQPALNDSRYCLSSRLRVSATFWQNPRNHFRCQVQFYGLSENDEWTQDRAKPVTQIVSAEAWGRADCGFTSESYQQGVLSATNLSVIGFRILLLKVAGFNLLMTLRLWSS

SEQ ID NO: 14225 - protein, 894 aa, synthetic construct
MALPVTALLLPLALLLHAARPEVQLVESGGGLVQPGGSLRLSCAASGFSFSDFWMSWVRQAPGKGLEWVATISQAGSEKDYVDSVKGRFTISRDNAKKSLYLQMNSLRAEDTAVYYCASGVYSFDYRGQGTLVTVSSGTGGGGSGGGGSGGGGSEFDEIVMTQTPATLSVSAGERVTITCKASQSVSNDVTWYQQKPGQAPRLLIYSASNRYSGVPARFSGSGYGTEFTFTISSVQSEDFAVYFCQQDYSSFGQGTKLEIKRLEIQNPDPAVYQLRDSKSSDKSVCLFTDFDSQTNVSQSKDSDVYITDKCVLDMRSMDFKSNSAVAWSNKSDFACANAFNNSIIPEDTFFPSPESSCDVKLVEKSFETDTNLNFQILYEILLGKATLYAVLVSALVLMAMVKRKDSRGRAKRSGSGVKQTLNFDLLKLAGDVESNPGPTSMDWIWRILFLVGAATGAHSGPQLQLQESGPGLVKPSETLSLTCTVSGDSISSGDYYWGWIRQPPGKGLEWIGHIYYSGVTYYNPSLKSRVTISVDTSRNQFSLKLSSVTAADTAVYYCTREDSSNWRSRGQGTLVTVSSGSGGGGSGGGGSGGGGSFEQVQLVESGPGVVQPGRSLRISCAVSGFSVTNYGVHWVRQPPGKGLEWLGVIWAGGITNYNSAFMSRLTISKDNSKNTVYLQMNSLRAEDTAMYYCASRGGHYGYALDYWGQGTLVTVSSTREDLKNVFPPEVAVFEPSEAEISHTQKATLVCLATGFYPDHVELSWWVNGKEVHSGVCTDPQPLKEQPALNDSRYCLSSRLRVSATFWQNPRNHFRCQVQFYGLSENDEWTQDRAKPVTQIVSAEAWGRADCGFTSESYQQGVLSATNLSVIGFRILLLKVAGFNLLMTLRLWSS

SEQ ID NO: 14226 - protein, 896 aa, synthetic construct
MALPVTALLLPLALLLHAARPEVQLVESGGGLVQPGGSLRLSCAASGFSFSDFWMSWVRQAPGKGLEWVATISQAGSEKDYVDSVKGRFTISRDNAKKSLYLQMNSLRAEDTAVYYCASGVYSFDYRGQGTLVTVSSGTGGGGSGGGGSGGGGSEFDIQMTQTASSLPASLGDRVTISCSASQDISNYLNWYQQKPDGTVKLLIFYSSNLHSGVPSRFSGGGSGTDYSLTISNLEPEDIATYFCHQYSKLPWTFGGGTKLEIKRLEIQNPDPAVYQLRDSKSSDKSVCLFTDFDSQTNVSQSKDSDVYITDKCVLDMRSMDFKSNSAVAWSNKSDFACANAFNNSIIPEDTFFPSPESSCDVKLVEKSFETDTNLNFQILYEILLGKATLYAVLVSALVLMAMVKRKDSRGRAKRSGSGVKQTLNFDLLKLAGDVESNPGPTSMDWIWRILFLVGAATGAHSGPQLQLQESGPGLVKPSETLSLTCTVSGDSISSGDYYWGWIRQPPGKGLEWIGHIYYSGVTYYNPSLKSRVTISVDTSRNQFSLKLSSVTAADTAVYYCTREDSSNWRSRGQGTLVTVSSGSGGGGSGGGGSGGGGSFEEVTLVESGGDFVKPGGSLKVSCAASGFAFSHYAMSWVRQTPAKRLEWVAYISSGGSGTYYSDSVKGRFTISRDNAKNTLYLQMRSLRSEDSAMYFCTRVKLGTYYFDSWGQGTTLTVSSTREDLKNVFPPEVAVFEPSEAEISHTQKATLVCLATGFYPDHVELSWWVNGKEVHSGVCTDPQPLKEQPALNDSRYCLSSRLRVSATFWQNPRNHFRCQVQFYGLSENDEWTQDRAKPVTQIVSAEAWGRADCGFTSESYQQGVLSATNLSVIGFRILLLKVAGFNLLMTLRLWSS

SEQ ID NO: 14227 - protein, 898 aa, synthetic construct
MALPVTALLLPLALLLHAARPEVQLVESGGGLVQPGGSLRLSCAASGFSFSDFWMSWVRQAPGKGLEWVATISQAGSEKDYVDSVKGRFTISRDNAKKSLYLQMNSLRAEDTAVYYCASGVYSFDYRGQGTLVTVSSGTGGGGSGGGGSGGGGSEFQFVLTQSPSASAALGASAKLTCTLSSAHKTYTIDWYQQQKGKAPRYLIQVKSDGTYTKATGVPDRFSGSSSGADRYLIIPSVQADDEADYYCGTDYTGGYVFGGGTQLTVTLEIQNPDPAVYQLRDSKSSDKSVCLFTDFDSQTNVSQSKDSDVYITDKCVLDMRSMDFKSNSAVAWSNKSDFACANAFNNSIIPEDTFFPSPESSCDVKLVEKSFETDTNLNFQILYEILLGKATLYAVLVSALVLMAMVKRKDSRGRAKRSGSGVKQTLNFDLLKLAGDVESNPGPTSMDWIWRILFLVGAATGAHSGPQLQLQESGPGLVKPSETLSLTCTVSGDSISSGDYYWGWIRQPPGKGLEWIGHIYYSGVTYYNPSLKSRVTISVDTSRNQFSLKLSSVTAADTAVYYCTREDSSNWRSRGQGTLVTVSSGSGGGGSGGGGSGGGGSFEEQLKESGGGLFKPTDTLTLTCTVSGFSLSYYGVNWVRQAPGNGLEWIGTIGGSGDTYYASWAKSRSTIIRNTNENTVTLKMTSLTAADTATYFCVRYANIGYEYFNVWGPGTLVTVSSTREDLKNVFPPEVAVFEPSEAEISHTQKATLVCLATGFYPDHVELSWWVNGKEVHSGVCTDPQPLKEQPALNDSRYCLSSRLRVSATFWQNPRNHFRCQVQFYGLSENDEWTQDRAKPVTQIVSAEAWGRADCGFTSESYQQGVLSATNLSVIGFRILLLKVAGFNLLMTLRLWSS

SEQ ID NO: 14228 - protein, 903 aa, synthetic construct
MALPVTALLLPLALLLHAARPEVQLVESGGGLVQPGGSLRLSCAASGFSFSDFWMSWVRQAPGKGLEWVATISQAGSEKDYVDSVKGRFTISRDNAKKSLYLQMNSLRAEDTAVYYCASGVYSFDYRGQGTLVTVSSGTGGGGSGGGGSGGGGSEFQFVLTQSPSVSAALGASAKLTCTLSSAHKTYTIDWYQQQQGEAPRYLMQVKSDGSYTKGTGVPDRFSGSSSGADRYLIIPSVQADDEAGYVCGADDNGGYVFGGGTQLTVTLEIQNPDPAVYQLRDSKSSDKSVCLFTDFDSQTNVSQSKDSDVYITDKCVLDMRSMDFKSNSAVAWSNKSDFACANAFNNSIIPEDTFFPSPESSCDVKLVEKSFETDTNLNFQILYEILLGKATLYAVLVSALVLMAMVKRKDSRGRAKRSGSGVKQTLNFDLLKLAGDVESNPGPTSMDWIWRILFLVGAATGAHSGPQLQLQESGPGLVKPSETLSLTCTVSGDSISSGDYYWGWIRQPPGKGLEWIGHIYYSGVTYYNPSLKSRVTISVDTSRNQFSLKLSSVTAADTAVYYCTREDSSNWRSRGQGTLVTVSSGSGGGGSGGGGSGGGGSFEQSVKESEGGLFKPTDTLTLTCTVSGFSLSRHALTWVRQAPGNGLEWIGAIDNAGTTYYASWAKSRSTITRNTDLHTVTLKMTSLTASDTATYFCARVFYDINSGYYLDGMDLWGPGTLVTVSSTREDLKNVFPPEVAVFEPSEAEISHTQKATLVCLATGFYPDHVELSWWVNGKEVHSGVCTDPQPLKEQPALNDSRYCLSSRLRVSATFWQNPRNHFRCQVQFYGLSENDEWTQDRAKPVTQIVSAEAWGRADCGFTSESYQQGVLSATNLSVIGFRILLLKVAGFNLLMTLRLWSS

SEQ ID NO: 14229 - protein, 897 aa, synthetic construct
MALPVTALLLPLALLLHAARPEVQLVESGGGLVQPGGSLRLSCAASGFSFSDFWMSWVRQAPGKGLEWVATISQAGSEKDYVDSVKGRFTISRDNAKKSLYLQMNSLRAEDTAVYYCASGVYSFDYRGQGTLVTVSSGTGGGGSGGGGSGGGGSEFDIQMTQSPSSLSASVGDRVTITCRASQGISSWLAWYQQKPEKAPKSLIYAASSLQSGVPSRFSGSGSGTDFTLTISSLQPEDFATYYCQQYNSYPPTFGGGTKVEIKLEIQNPDPAVYQLRDSKSSDKSVCLFTDFDSQTNVSQSKDSDVYITDKCVLDMRSMDFKSNSAVAWSNKSDFACANAFNNSIIPEDTFFPSPESSCDVKLVEKSFETDTNLNFQILYEILLGKATLYAVLVSALVLMAMVKRKDSRGRAKRSGSGVKQTLNFDLLKLAGDVESNPGPTSMDWIWRILFLVGAATGAHSGPQLQLQESGPGLVKPSETLSLTCTVSGDSISSGDYYWGWIRQPPGKGLEWIGHIYYSGVTYYNPSLKSRVTISVDTSRNQFSLKLSSVTAADTAVYYCTREDSSNWRSRGQGTLVTVSSGSGGGGSGGGGSGGGGSFEEVQLVESGGGLVQPGESLRLSCVASGFTFSRYKMNWVRQAPGKGLEWVSYISRSGRDIYYADSVKGRFTISRDNAKNSLYLQMNSLRDEDTAVYYCAGTVTTYYYFGMDVWGHGTTVTVSSTREDLKNVFPPEVAVFEPSEAEISHTQKATLVCLATGFYPDHVELSWWVNGKEVHSGVCTDPQPLKEQPALNDSRYCLSSRLRVSATFWQNPRNHFRCQVQFYGLSENDEWTQDRAKPVTQIVSAEAWGRADCGFTSESYQQGVLSATNLSVIGFRILLLKVAGFNLLMTLRLWSS

SEQ ID NO: 14230 - protein, 898 aa, synthetic construct
MALPVTALLLPLALLLHAARPEVQLVESGGGLVQPGGSLRLSCAASGFSFSDFWMSWVRQAPGKGLEWVATISQAGSEKDYVDSVKGRFTISRDNAKKSLYLQMNSLRAEDTAVYYCASGVYSFDYRGQGTLVTVSSGTGGGGSGGGGSGGGGSEFDIQMTQSPSSLSASVGDRVTITCRASQGISSWLAWYQQKPEKAPKSLIYAASSLQSGVPSRFSGSGSGTDFTLTISSLQPEDFATYYCQQYNSYPPTFGGGTKVEIKLEIQNPDPAVYQLRDSKSSDKSVCLFTDFDSQTNVSQSKDSDVYITDKCVLDMRSMDFKSNSAVAWSNKSDFACANAFNNSIIPEDTFFPSPESSCDVKLVEKSFETDTNLNFQILYEILLGKATLYAVLVSALVLMAMVKRKDSRGRAKRSGSGVKQTLNFDLLKLAGDVESNPGPTSMDWIWRILFLVGAATGAHSGPQLQLQESGPGLVKPSETLSLTCTVSGDSISSGDYYWGWIRQPPGKGLEWIGHIYYSGVTYYNPSLKSRVTISVDTSRNQFSLKLSSVTAADTAVYYCTREDSSNWRSRGQGTLVTVSSGSGGGGSGGGGSGGGGSFEEVQLVESGGGSVQPGESLRLSCVASGFTFSRYKMNWVRQAPGKGLEWVSYISRSGRDIYYADSVKGRFTISRDNAKNSLYLQMNSLRDEDTAVYYCAGTVTTYYYDFGMDVWGQGTTVTVSSTREDLKNVFPPEVAVFEPSEAEISHTQKATLVCLATGFYPDHVELSWWVNGKEVHSGVCTDPQPLKEQPALNDSRYCLSSRLRVSATFWQNPRNHFRCQVQFYGLSENDEWTQDRAKPVTQIVSAEAWGRADCGFTSESYQQGVLSATNLSVIGFRILLLKVAGFNLLMTLRLWSS

SEQ ID NO: 14231 - protein, 896 aa, synthetic construct
MALPVTALLLPLALLLHAARPEVQLVESGGGLVQPGGSLRLSCAASGFSFSDFWMSWVRQAPGKGLEWVATISQAGSEKDYVDSVKGRFTISRDNAKKSLYLQMNSLRAEDTAVYYCASGVYSFDYRGQGTLVTVSSGTGGGGSGGGGSGGGGSEFQSVLTQPPSASGTPGQRVTISCSGSRSNVGGNYVFWYQQVPGATPKLLIYRSNQRPSGVPDRFAGSKSGSSASLAISGLRSEDEADYYCATWDDSLSGFVFGTGTKVTVLGLEIQNPDPAVYQLRDSKSSDKSVCLFTDFDSQTNVSQSKDSDVYITDKCVLDMRSMDFKSNSAVAWSNKSDFACANAFNNSIIPEDTFFPSPESSCDVKLVEKSFETDTNLNFQILYEILLGKATLYAVLVSALVLMAMVKRKDSRGRAKRSGSGVKQTLNFDLLKLAGDVESNPGPTSMDWIWRILFLVGAATGAHSGPQLQLQESGPGLVKPSETLSLTCTVSGDSISSGDYYWGWIRQPPGKGLEWIGHIYYSGVTYYNPSLKSRVTISVDTSRNQFSLKLSSVTAADTAVYYCTREDSSNWRSRGQGTLVTVSSGSGGGGSGGGGSGGGGSFEVQLVESGGGLVKPGGSLRLSCAASGFTFSDYYMSWIRQAPGKGLEWVSYISSSGSTIYYADSVKGRFTISRDNAKNSLYLQMNSLRAEDTAVYYCARGYGKAYDQWGQGTLVTVSSTREDLKNVFPPEVAVFEPSEAEISHTQKATLVCLATGFYPDHVELSWWVNGKEVHSGVCTDPQPLKEQPALNDSRYCLSSRLRVSATFWQNPRNHFRCQVQFYGLSENDEWTQDRAKPVTQIVSAEAWGRADCGFTSESYQQGVLSATNLSVIGFRILLLKVAGFNLLMTLRLWSS

SEQ ID NO: 14232 - protein, 895 aa, synthetic construct
MALPVTALLLPLALLLHAARPEVQLVESGGGLVQPGGSLRLSCAASGFSFSDFWMSWVRQAPGKGLEWVATISQAGSEKDYVDSVKGRFTISRDNAKKSLYLQMNSLRAEDTAVYYCASGVYSFDYRGQGTLVTVSSGTGGGGSGGGGSGGGGSEFQSVVTQPPSMSAAPGQQVTISCSGGNSNIERNYVSWYLQLPGTAPKLVIFDNDRRPSGIPDRFSGSKSGTSATLGITGLQTGDEADYYCGTWDSSLRGWVFGGGTKLTVLGLEIQNPDPAVYQLRDSKSSDKSVCLFTDFDSQTNVSQSKDSDVYITDKCVLDMRSMDFKSNSAVAWSNKSDFACANAFNNSIIPEDTFFPSPESSCDVKLVEKSFETDTNLNFQILYEILLGKATLYAVLVSALVLMAMVKRKDSRGRAKRSGSGVKQTLNFDLLKLAGDVESNPGPTSMDWIWRILFLVGAATGAHSGPQLQLQESGPGLVKPSETLSLTCTVSGDSISSGDYYWGWIRQPPGKGLEWIGHIYYSGVTYYNPSLKSRVTISVDTSRNQFSLKLSSVTAADTAVYYCTREDSSNWRSRGQGTLVTVSSGSGGGGSGGGGSGGGGSFEVQLVESGGGLIQPGGSLRLSCAASGFTFSNYAMNWVRQAPGKGLEWVSTINGRGSSTIYADSVKGRFTISRDNSKNTLYLQMNSLRAEDTATYYCARYISRGLGDSWGQGTLVTVTREDLKNVFPPEVAVFEPSEAEISHTQKATLVCLATGFYPDHVELSWWVNGKEVHSGVCTDPQPLKEQPALNDSRYCLSSRLRVSATFWQNPRNHFRCQVQFYGLSENDEWTQDRAKPVTQIVSAEAWGRADCGFTSESYQQGVLSATNLSVIGFRILLLKVAGFNLLMTLRLWSS

SEQ ID NO: 14233 - protein, 896 aa, synthetic construct
MALPVTALLLPLALLLHAARPEVQLVESGGGLVQPGGSLRLSCAASGFSFSDFWMSWVRQAPGKGLEWVATISQAGSEKDYVDSVKGRFTISRDNAKKSLYLQMNSLRAEDTAVYYCASGVYSFDYRGQGTLVTVSSGTGGGGSGGGGSGGGGSEFDVVMTQTPLSLPVSLGDQASISCRSSQSLVHSNGNTYLHWYLQKPGQSPKLLIYKVSNRFSGVPDRFSGSGSGTDFTLKISRVEAEDLGVYFCSQNTPVPPKFGSGTKLEIKLEIQNPDPAVYQLRDSKSSDKSVCLFTDFDSQTNVSQSKDSDVYITDKCVLDMRSMDFKSNSAVAWSNKSDFACANAFNNSIIPEDTFFPSPESSCDVKLVEKSFETDTNLNFQILYEILLGKATLYAVLVSALVLMAMVKRKDSRGRAKRSGSGVKQTLNFDLLKLAGDVESNPGPTSMDWIWRILFLVGAATGAHSGPQLQLQESGPGLVKPSETLSLTCTVSGDSISSGDYYWGWIRQPPGKGLEWIGHIYYSGVTYYNPSLKSRVTISVDTSRNQFSLKLSSVTAADTAVYYCTREDSSNWRSRGQGTLVTVSSGSGGGGSGGGGSGGGGSFEQVQLQQSGAELVRPGASVKLSCKASGYTFNDYEMHWVKQTPVHGLKWIGALEPKTGDTAYSQKFKGKATLTADKSSSTAYMELRSLTSEDSAVYYCTSCYYYTYSGQGTLVTVSATREDLKNVFPPEVAVFEPSEAEISHTQKATLVCLATGFYPDHVELSWWVNGKEVHSGVCTDPQPLKEQPALNDSRYCLSSRLRVSATFWQNPRNHFRCQVQFYGLSENDEWTQDRAKPVTQIVSAEAWGRADCGFTSESYQQGVLSATNLSVIGFRILLLKVAGFNLLMTLRLWSS

SEQ ID NO: 14234 - protein, 895 aa, synthetic construct
MALPVTALLLPLALLLHAARPEVQLVESGGGLVQPGGSLRLSCAASGFSFSDFWMSWVRQAPGKGLEWVATISQAGSEKDYVDSVKGRFTISRDNAKKSLYLQMNSLRAEDTAVYYCASGVYSFDYRGQGTLVTVSSGTGGGGSGGGGSGGGGSEFDIQLTQSPSSLSASVGDRVTITCRASQGIRNDLGWYQQKPGKAPKRLIYAASSLQNGVPSRFSGSGSGTEFTLTISSLQPEDFATYYCLQHNTYPAFGQGTKVEIKRLEIQNPDPAVYQLRDSKSSDKSVCLFTDFDSQTNVSQSKDSDVYITDKCVLDMRSMDFKSNSAVAWSNKSDFACANAFNNSIIPEDTFFPSPESSCDVKLVEKSFETDTNLNFQILYEILLGKATLYAVLVSALVLMAMVKRKDSRGRAKRSGSGVKQTLNFDLLKLAGDVESNPGPTSMDWIWRILFLVGAATGAHSGPQLQLQESGPGLVKPSETLSLTCTVSGDSISSGDYYWGWIRQPPGKGLEWIGHIYYSGVTYYNPSLKSRVTISVDTSRNQFSLKLSSVTAADTAVYYCTREDSSNWRSRGQGTLVTVSSGSGGGGSGGGGSGGGGSFEQVQLQESGPGLVKPSQTLSLTCTVSGGSISSFNYYWSWIRHHPGKGLEWIGYIYYSGSTYSNPSLKSRVTISVDTSKNQFSLTLSSVTAADTAVYYCARGYNWNYFDYWGQGTLVTVSSTREDLKNVFPPEVAVFEPSEAEISHTQKATLVCLATGFYPDHVELSWWVNGKEVHSGVCTDPQPLKEQPALNDSRYCLSSRLRVSATFWQNPRNHFRCQVQFYGLSENDEWTQDRAKPVTQIVSAEAWGRADCGFTSESYQQGVLSATNLSVIGFRILLLKVAGFNLLMTLRLWSS

SEQ ID NO: 14235 - protein, 897 aa, synthetic construct
MALPVTALLLPLALLLHAARPEVQLVESGGGLVQPGGSLRLSCAASGFSFSDFWMSWVRQAPGKGLEWVATISQAGSEKDYVDSVKGRFTISRDNAKKSLYLQMNSLRAEDTAVYYCASGVYSFDYRGQGTLVTVSSGTGGGGSGGGGSGGGGSEFDDIVLTQSPASLAVSLGQSVTISCRASESVEYYGTSLMQWYQQKPGQPPKLLIYATSNVESGVPARFSGSGSGTDFSLNIHPVEEDDIAMYFCQQSRKLPSTFGGGTKLEIKLEIQNPDPAVYQLRDSKSSDKSVCLFTDFDSQTNVSQSKDSDVYITDKCVLDMRSMDFKSNSAVAWSNKSDFACANAFNNSIIPEDTFFPSPESSCDVKLVEKSFETDTNLNFQILYEILLGKATLYAVLVSALVLMAMVKRKDSRGRAKRSGSGVKQTLNFDLLKLAGDVESNPGPTSMDWIWRILFLVGAATGAHSGPQLQLQESGPGLVKPSETLSLTCTVSGDSISSGDYYWGWIRQPPGKGLEWIGHIYYSGVTYYNPSLKSRVTISVDTSRNQFSLKLSSVTAADTAVYYCTREDSSNWRSRGQGTLVTVSSGSGGGGSGGGGSGGGGSFEDVRLQESGPGQVKPSQTVSLTCSVTGYSITNGNHWWNWIRQVSGSKLEWIGYISSSGSTDSNPSLKSRISITRDTSKNQLFLQLNSVTTEDIATYYCARGYYFDYWGQGTTLTVSSTREDLKNVFPPEVAVFEPSEAEISHTQKATLVCLATGFYPDHVELSWWVNGKEVHSGVCTDPQPLKEQPALNDSRYCLSSRLRVSATFWQNPRNHFRCQVQFYGLSENDEWTQDRAKPVTQIVSAEAWGRADCGFTSESYQQGVLSATNLSVIGFRILLLKVAGFNLLMTLRLWSS

SEQ ID NO: 14236 - protein, 896 aa, synthetic construct
MALPVTALLLPLALLLHAARPEVQLVESGGGLVQPGGSLRLSCAASGFSFSDFWMSWVRQAPGKGLEWVATISQAGSEKDYVDSVKGRFTISRDNAKKSLYLQMNSLRAEDTAVYYCASGVYSFDYRGQGTLVTVSSGTGGGGSGGGGSGGGGSEFDIQMTQSPSSLSASVGDRVTITCRASQDVNTAVAWYQQKPGKAPKLLIYSASFLESGVPSRFSGSRSGTDFTLTISSLQPEDFATYYCQQHYTTPPTFGQTKVEIKRLEIQNPDPAVYQLRDSKSSDKSVCLFTDFDSQTNVSQSKDSDVYITDKCVLDMRSMDFKSNSAVAWSNKSDFACANAFNNSIIPEDTFFPSPESSCDVKLVEKSFETDTNLNFQILYEILLGKATLYAVLVSALVLMAMVKRKDSRGRAKRSGSGVKQTLNFDLLKLAGDVESNPGPTSMDWIWRILFLVGAATGAHSGPQLQLQESGPGLVKPSETLSLTCTVSGDSISSGDYYWGWIRQPPGKGLEWIGHIYYSGVTYYNPSLKSRVTISVDTSRNQFSLKLSSVTAADTAVYYCTREDSSNWRSRGQGTLVTVSSGSGGGGSGGGGSGGGGSFEEVQLVESGGGLVQPGGSLRLSCAASGFNIKDTYIHWVRQAPGKGLEWVARIYPTNGYTRYADSVKGRFTISADTSKNTAYLQMNSLRAEDTAVYYCSRWGGDGFYAMDVWGQGTLVTVSSTREDLKNVFPPEVAVFEPSEAEISHTQKATLVCLATGFYPDHVELSWWVNGKEVHSGVCTDPQPLKEQPALNDSRYCLSSRLRVSATFWQNPRNHFRCQVQFYGLSENDEWTQDRAKPVTQIVSAEAWGRADCGFTSESYQQGVLSATNLSVIGFRILLLKVAGFNLLMTLRLWSS

SEQ ID NO: 14237 - protein, 895 aa, synthetic construct
MALPVTALLLPLALLLHAARPEVQLVESGGGLVQPGGSLRLSCAASGFSFSDFWMSWVRQAPGKGLEWVATISQAGSEKDYVDSVKGRFTISRDNAKKSLYLQMNSLRAEDTAVYYCASGVYSFDYRGQGTLVTVSSGTGGGGSGGGGSGGGGSEFDQSVLTQPPSVSVAPGKTARIPCEGNYIGSSNVHWYQQKPGQAPVLVIHFDSDRPSGIPDRFSGSNSGNMATLTISRVEAGDEADYYCQVWENHGWVFGGGTKLTVLSLEIQNPDPAVYQLRDSKSSDKSVCLFTDFDSQTNVSQSKDSDVYITDKCVLDMRSMDFKSNSAVAWSNKSDFACANAFNNSIIPEDTFFPSPESSCDVKLVEKSFETDTNLNFQILYEILLGKATLYAVLVSALVLMAMVKRKDSRGRAKRSGSGVKQTLNFDLLKLAGDVESNPGPTSMDWIWRILFLVGAATGAHSGPQLQLQESGPGLVKPSETLSLTCTVSGDSISSGDYYWGWIRQPPGKGLEWIGHIYYSGVTYYNPSLKSRVTISVDTSRNQFSLKLSSVTAADTAVYYCTREDSSNWRSRGQGTLVTVSSGSGGGGSGGGGSGGGGSFEEVQLVETGGGLVQPGESLRLSCAASGFTFSDYEMNWVRQAPGKGLEWVSYISSSGSTIYYADSVKGRFTIYRDNAKNSLYLQMNSLRAEDTALYYCARAWGVGPPDYWGQGTLVTVSSTREDLKNVFPPEVAVFEPSEAEISHTQKATLVCLATGFYPDHVELSWWVNGKEVHSGVCTDPQPLKEQPALNDSRYCLSSRLRVSATFWQNPRNHFRCQVQFYGLSENDEWTQDRAKPVTQIVSAEAWGRADCGFTSESYQQGVLSATNLSVIGFRILLLKVAGFNLLMTLRLWSS

SEQ ID NO: 14238 - protein, 903 aa, synthetic construct
MALPVTALLLPLALLLHAARPEVQLVESGGGLVQPGGSLRLSCAASGFSFSDFWMSWVRQAPGKGLEWVATISQAGSEKDYVDSVKGRFTISRDNAKKSLYLQMNSLRAEDTAVYYCASGVYSFDYRGQGTLVTVSSGTGGGGSGGGGSGGGGSEFDIQMTQSPSSLSASVGDTVTITCQANGYLNWYQQRRGKAPKLLIYDGSKLERGVPSRFSGRRWGQEYNLTINNLQPEDIATYFCQVYEFVVPGTRLDLKRTVAAPLEIQNPDPAVYQLRDSKSSDKSVCLFTDFDSQTNVSQSKDSDVYITDKCVLDMRSMDFKSNSAVAWSNKSDFACANAFNNSIIPEDTFFPSPESSCDVKLVEKSFETDTNLNFQILYEILLGKATLYAVLVSALVLMAMVKRKDSRGRAKRSGSGVKQTLNFDLLKLAGDVESNPGPTSMDWIWRILFLVGAATGAHSGPQLQLQESGPGLVKPSETLSLTCTVSGDSISSGDYYWGWIRQPPGKGLEWIGHIYYSGVTYYNPSLKSRVTISVDTSRNQFSLKLSSVTAADTAVYYCTREDSSNWRSRGQGTLVTVSSGSGGGGSGGGGSGGGGSFEQVQLLQSGAAVTKPGASVRVSCEASGYNIRDYFIHWWRQAPGQGLQWVGWINPKTGQPNNPRQFQGRVSLTRHASWDFDTFSFYMDLKALRSDDTAVYFCARQRSDYWDFDVWGSGTQVTVSSASTKGPTREDLKNVFPPEVAVFEPSEAEISHTQKATLVCLATGFYPDHVELSWWVNGKEVHSGVCTDPQPLKEQPALNDSRYCLSSRLRVSATFWQNPRNHFRCQVQFYGLSENDEWTQDRAKPVTQIVSAEAWGRADCGFTSESYQQGVLSATNLSVIGFRILLLKVAGFNLLMTLRLWSS

SEQ ID NO: 14239 - protein, 909 aa, synthetic construct
MALPVTALLLPLALLLHAARPEVQLVESGGGLVQPGGSLRLSCAASGFSFSDFWMSWVRQAPGKGLEWVATISQAGSEKDYVDSVKGRFTISRDNAKKSLYLQMNSLRAEDTAVYYCASGVYSFDYRGQGTLVTVSSGTGGGGSGGGGSGGGGSEFQSALTQPPSASGSPGQSITISCTGTSNNFVSWYQQHAGKAPKLVIYDVNKRPSGVPDRFSGSKSGNTASLTVSGLQTDDEAVYYCGSLVGNWDVIFGGGTKLTVLLEIQNPDPAVYQLRDSKSSDKSVCLFTDFDSQTNVSQSKDSDVYITDKCVLDMRSMDFKSNSAVAWSNKSDFACANAFNNSIIPEDTFFPSPESSCDVKLVEKSFETDTNLNFQILYEILLGKATLYAVLVSALVLMAMVKRKDSRGRAKRSGSGVKQTLNFDLLKLAGDVESNPGPTSMDWIWRILFLVGAATGAHSGPQLQLQESGPGLVKPSETLSLTCTVSGDSISSGDYYWGWIRQPPGKGLEWIGHIYYSGVTYYNPSLKSRVTISVDTSRNQFSLKLSSVTAADTAVYYCTREDSSNWRSRGQGTLVTVSSGSGGGGSGGGGSGGGGSFEQPQLQESGPTLVEASETLSLTCAVSGDSTAACNSFWGWVRQPPGKGLEWVGSLSHCASYWNRGWTYHNPSLKSRLTLALDTPKNLVFLKLNSVTAADTATYYCARFGGEVLRYTDWPKPAWVDLWGRGTLVTVSSTREDLKNVFPPEVAVFEPSEAEISHTQKATLVCLATGFYPDHVELSWWVNGKEVHSGVCTDPQPLKEQPALNDSRYCLSSRLRVSATFWQNPRNHFRCQVQFYGLSENDEWTQDRAKPVTQIVSAEAWGRADCGFTSESYQQGVLSATNLSVIGFRILLLKVAGFNLLMTLRLWSS

SEQ ID NO: 14240 - protein, 894 aa, synthetic construct
MALPVTALLLPLALLLHAARPEVQLVESGGGLVQPGGSLRLSCAASGFSFSDFWMSWVRQAPGKGLEWVATISQAGSEKDYVDSVKGRFTISRDNAKKSLYLQMNSLRAEDTAVYYCASGVYSFDYRGQGTLVTVSSGTGGGGSGGGGSGGGGSEFEIVLTQSPGTLSLSPGETAIISCRTSQYGSLAWYQQRPGQAPRLVIYSGSTRAAGIPDRFSGSRWGPDYNLTISNLESGDFGVYYCQQYEFFGQGTKVQVDIKRLEIQNPDPAVYQLRDSKSSDKSVCLFTDFDSQTNVSQSKDSDVYITDKCVLDMRSMDFKSNSAVAWSNKSDFACANAFNNSIIPEDTFFPSPESSCDVKLVEKSFETDTNLNFQILYEILLGKATLYAVLVSALVLMAMVKRKDSRGRAKRSGSGVKQTLNFDLLKLAGDVESNPGPTSMDWIWRILFLVGAATGAHSGPQLQLQESGPGLVKPSETLSLTCTVSGDSISSGDYYWGWIRQPPGKGLEWIGHIYYSGVTYYNPSLKSRVTISVDTSRNQFSLKLSSVTAADTAVYYCTREDSSNWRSRGQGTLVTVSSGSGGGGSGGGGSGGGGSFEQVQLVQSGGQMKKPGESMRISCRASGYEFIDCTLNWIRLAPGKRPEWMGWLKPRGGAVNYARPLQGRVTMTRDVYSDTAFLELRSLTVDDTAVYFCTRGKNCDYNWDFEHWGRGTPVIVSSTREDLKNVFPPEVAVFEPSEAEISHTQKATLVCLATGFYPDHVELSWWVNGKEVHSGVCTDPQPLKEQPALNDSRYCLSSRLRVSATFWQNPRNHFRCQVQFYGLSENDEWTQDRAKPVTQIVSAEAWGRADCGFTSESYQQGVLSATNLSVIGFRILLLKVAGFNLLMTLRLWSS

SEQ ID NO: 14241 - protein, 904 aa, synthetic construct
MALPVTALLLPLALLLHAARPEVQLVESGGGLVQPGGSLRLSCAASGFSFSDFWMSWVRQAPGKGLEWVATISQAGSEKDYVDSVKGRFTISRDNAKKSLYLQMNSLRAEDTAVYYCASGVYSFDYRGQGTLVTVSSGTGGGGSGGGGSGGGGSEFELVLTQSPGTLSLSAGERATLSCRASQSVSSGSLAWYQQKPGQAPRLLIYGASTRATGIPDRFSGSGSGTDFTLTIGRLEPEDLAVYYCQQYGTSPYTFGQGTKLEILEIQNPDPAVYQLRDSKSSDKSVCLFTDFDSQTNVSQSKDSDVYITDKCVLDMRSMDFKSNSAVAWSNKSDFACANAFNNSIIPEDTFFPSPESSCDVKLVEKSFETDTNLNFQILYEILLGKATLYAVLVSALVLMAMVKRKDSRGRAKRSGSGVKQTLNFDLLKLAGDVESNPGPTSMDWIWRILFLVGAATGAHSGPQLQLQESGPGLVKPSETLSLTCTVSGDSISSGDYYWGWIRQPPGKGLEWIGHIYYSGVTYYNPSLKSRVTISVDTSRNQFSLKLSSVTAADTAVYYCTREDSSNWRSRGQGTLVTVSSGSGGGGSGGGGSGGGGSFELEQSGAEVKKPGSSVQVSCKASGGTFSMYGFNWVRQAPGHGLEWMGGIIPIFGTSNYAQKFRGRVTFTADQATSTAYMELTNLRSDDTAVYYCARDFGPDWEDGDSYDGSGRGFFDFWGQGTLVTVSSTREDLKNVFPPEVAVFEPSEAEISHTQKATLVCLATGFYPDHVELSWWVNGKEVHSGVCTDPQPLKEQPALNDSRYCLSSRLRVSATFWQNPRNHFRCQVQFYGLSENDEWTQDRAKPVTQIVSAEAWGRADCGFTSESYQQGVLSATNLSVIGFRILLLKVAGFNLLMTLRLWSS

SEQ ID NO: 14242 - protein, 884 aa, synthetic construct
MALPVTALLLPLALLLHAARPEVQLVESGGGLVQPGGSLRLSCAASGFSFSDFWMSWVRQAPGKGLEWVATISQAGSEKDYVDSVKGRFTISRDNAKKSLYLQMNSLRAEDTAVYYCASGVYSFDYRGQGTLVTVSSGTGGGGSGGGGSGGGGSEFDIQMTQSPSSLSASVGDRVTITCQASQDINNYLNWYQQKPGKAPKLLIYDASNLQTGVPSRFSGSGSGTDFTFTIEDIATYYCQQYTFGPGTKVDIKLEIQNPDPAVYQLRDSKSSDKSVCLFTDFDSQTNVSQSKDSDVYITDKCVLDMRSMDFKSNSAVAWSNKSDFACANAFNNSIIPEDTFFPSPESSCDVKLVEKSFETDTNLNFQILYEILLGKATLYAVLVSALVLMAMVKRKDSRGRAKRSGSGVKQTLNFDLLKLAGDVESNPGPTSMDWIWRILFLVGAATGAHSGPQLQLQESGPGLVKPSETLSLTCTVSGDSISSGDYYWGWIRQPPGKGLEWIGHIYYSGVTYYNPSLKSRVTISVDTSRNQFSLKLSSVTAADTAVYYCTREDSSNWRSRGQGTLVTVSSGSGGGGSGGGGSGGGGSFEEVQLLESGGGLVQPGGSLRLSCAASGFTFSWYSMTWVRQAPGKGLEWVSSIVPWGDFTQYADSVKGRFTISRDNSKNTLYLQMNSLRAEDTAVYYCAKGPGWGSFDLWGRGTLVTVSSTREDLKNVFPPEVAVFEPSEAEISHTQKATLVCLATGFYPDHVELSWWVNGKEVHSGVCTDPQPLKEQPALNDSRYCLSSRLRVSATFWQNPRNHFRCQVQFYGLSENDEWTQDRAKPVTQIVSAEAWGRADCGFTSESYQQGVLSATNLSVIGFRILLLKVAGFNLLMTLRLWSS

SEQ ID NO: 14243 - protein, 894 aa, synthetic construct
MALPVTALLLPLALLLHAARPEVQLVESGGGLVQPGGSLRLSCAASGFSFSDFWMSWVRQAPGKGLEWVATISQAGSEKDYVDSVKGRFTISRDNAKKSLYLQMNSLRAEDTAVYYCASGVYSFDYRGQGTLVTVSSGTGGGGSGGGGSGGGGSEFDIQMTQSPSSLSASVGDRVTITCTASLSVSSTYLHWYQQKPGSSPKLWIYSTSNLASGVPSRFSGSGSGTSYTLTISSLQPEDFATYYCHQYHRSPLTFGGGTKVEIKRLEIQNPDPAVYQLRDSKSSDKSVCLFTDFDSQTNVSQSKDSDVYITDKCVLDMRSMDFKSNSAVAWSNKSDFACANAFNNSIIPEDTFFPSPESSCDVKLVEKSFETDTNLNFQILYEILLGKATLYAVLVSALVLMAMVKRKDSRGRAKRSGSGVKQTLNFDLLKLAGDVESNPGPTSMDWIWRILFLVGAATGAHSGPQLQLQESGPGLVKPSETLSLTCTVSGDSISSGDYYWGWIRQPPGKGLEWIGHIYYSGVTYYNPSLKSRVTISVDTSRNQFSLKLSSVTAADTAVYYCTREDSSNWRSRGQGTLVTVSSGSGGGGSGGGGSGGGGSFEEVQLVESGGGLVQPGGSLRLSCAASGFSLTKYGVHWVRQAPGKGLEWVGVKWAGGSTDYNSALMSRFTISKDNAKNSLYLQMNSLRAEDTAVYYCARDHRDAMDYWGQGTLVTVSSTREDLKNVFPPEVAVFEPSEAEISHTQKATLVCLATGFYPDHVELSWWVNGKEVHSGVCTDPQPLKEQPALNDSRYCLSSRLRVSATFWQNPRNHFRCQVQFYGLSENDEWTQDRAKPVTQIVSAEAWGRADCGFTSESYQQGVLSATNLSVIGFRILLLKVAGFNLLMTLRLWSS

SEQ ID NO: 14244 - protein, 898 aa, synthetic construct
MALPVTALLLPLALLLHAARPEVQLVESGGGLVQPGGSLRLSCAASGFSFSDFWMSWVRQAPGKGLEWVATISQAGSEKDYVDSVKGRFTISRDNAKKSLYLQMNSLRAEDTAVYYCASGVYSFDYRGQGTLVTVSSGTGGGGSGGGGSGGGGSEFDIQMTQSPSSLSASVGDRVTITCKASQDVGTAVAWYQQKPGKAPKLLIYSASYRSTGVPSRFSGSGSGTDFTLTISSLQPEDFATYYCQHHYSAPWTFGGGTKVEIKLEIQNPDPAVYQLRDSKSSDKSVCLFTDFDSQTNVSQSKDSDVYITDKCVLDMRSMDFKSNSAVAWSNKSDFACANAFNNSIIPEDTFFPSPESSCDVKLVEKSFETDTNLNFQILYEILLGKATLYAVLVSALVLMAMVKRKDSRGRAKRSGSGVKQTLNFDLLKLAGDVESNPGPTSMDWIWRILFLVGAATGAHSGPQLQLQESGPGLVKPSETLSLTCTVSGDSISSGDYYWGWIRQPPGKGLEWIGHIYYSGVTYYNPSLKSRVTISVDTSRNQFSLKLSSVTAADTAVYYCTREDSSNWRSRGQGTLVTVSSGSGGGGSGGGGSGGGGSFEEVQLVESGGGLVQPGGSLRLSCAASGFTFSRNGMSWVRQAPGKGLEWVATVSSGGSYIYYADSVKGRFTISRDNAKNSLYLQMNSLRAEDTAVYYCARQGTTALATRFFDVWGQGTLVTVSSTREDLKNVFPPEVAVFEPSEAEISHTQKATLVCLATGFYPDHVELSWWVNGKEVHSGVCTDPQPLKEQPALNDSRYCLSSRLRVSATFWQNPRNHFRCQVQFYGLSENDEWTQDRAKPVTQIVSAEAWGRADCGFTSESYQQGVLSATNLSVIGFRILLLKVAGFNLLMTLRLWSS

SEQ ID NO: 14245 - protein, 894 aa, synthetic construct
MALPVTALLLPLALLLHAARPEVQLVESGGGLVQPGGSLRLSCAASGFSFSDFWMSWVRQAPGKGLEWVATISQAGSEKDYVDSVKGRFTISRDNAKKSLYLQMNSLRAEDTAVYYCASGVYSFDYRGQGTLVTVSSGTGGGGSGGGGSGGGGSEFDIQMTQSPPSLSASVGGKVTITCKASQDIDRYMAWYQDKPGKGPKLLIHDTSTLQPGIPSRFSGSGSGRDYSFSISNLEPEDIATYYCLQYDNLWTFGGGTKLEIKRLEIQNPDPAVYQLRDSKSSDKSVCLFTDFDSQTNVSQSKDSDVYITDKCVLDMRSMDFKSNSAVAWSNKSDFACANAFNNSIIPEDTFFPSPESSCDVKLVEKSFETDTNLNFQILYEILLGKATLYAVLVSALVLMAMVKRKDSRGRAKRSGSGVKQTLNFDLLKLAGDVESNPGPTSMDWIWRILFLVGAATGAHSGPQLQLQESGPGLVKPSETLSLTCTVSGDSISSGDYYWGWIRQPPGKGLEWIGHIYYSGVTYYNPSLKSRVTISVDTSRNQFSLKLSSVTAADTAVYYCTREDSSNWRSRGQGTLVTVSSGSGGGGSGGGGSGGGGSFEQVQLVQSGAELVKPGASVKMSCKASGYIFTNYNIHWVKKSPGQGLEWIGAIYPGNGDAPYSQKFQDRATLTADTSSSTTYMELSSLTSEDSAVYYCVRANWDVAFAYWGQGTLVSVSSTREDLKNVFPPEVAVFEPSEAEISHTQKATLVCLATGFYPDHVELSWWVNGKEVHSGVCTDPQPLKEQPALNDSRYCLSSRLRVSATFWQNPRNHFRCQVQFYGLSENDEWTQDRAKPVTQIVSAEAWGRADCGFTSESYQQGVLSATNLSVIGFRILLLKVAGFNLLMTLRLWSS

SEQ ID NO: 14246 - protein, 895 aa, synthetic construct
MALPVTALLLPLALLLHAARPEVQLVESGGGLVQPGGSLRLSCAASGFSFSDFWMSWVRQAPGKGLEWVATISQAGSEKDYVDSVKGRFTISRDNAKKSLYLQMNSLRAEDTAVYYCASGVYSFDYRGQGTLVTVSSGTGGGGSGGGGSGGGGSEFDIQMTQSPASLSASVGETVTITCRVSGNIHNYLAWYQQKQGKSPQLLVYNAKTLADGVPSRFSGSGSGTQYSLKINSLQPEDFGSYYCQHFWSNPYTFGGGTKLEIKLEIQNPDPAVYQLRDSKSSDKSVCLFTDFDSQTNVSQSKDSDVYITDKCVLDMRSMDFKSNSAVAWSNKSDFACANAFNNSIIPEDTFFPSPESSCDVKLVEKSFETDTNLNFQILYEILLGKATLYAVLVSALVLMAMVKRKDSRGRAKRSGSGVKQTLNFDLLKLAGDVESNPGPTSMDWIWRILFLVGAATGAHSGPQLQLQESGPGLVKPSETLSLTCTVSGDSISSGDYYWGWIRQPPGKGLEWIGHIYYSGVTYYNPSLKSRVTISVDTSRNQFSLKLSSVTAADTAVYYCTREDSSNWRSRGQGTLVTVSSGSGGGGSGGGGSGGGGSFEQVQLQQSGASVKVSCKASELVRPGTGYAFTNYLIEWVKQRPGQGLEWIGVINPGSGGTNYNEKFKGKATLTADKSSSTAYMQLSSLTSDDSAVYFCARYRSYDWYFDVWGAGTTVTVSSTREDLKNVFPPEVAVFEPSEAEISHTQKATLVCLATGFYPDHVELSWWVNGKEVHSGVCTDPQPLKEQPALNDSRYCLSSRLRVSATFWQNPRNHFRCQVQFYGLSENDEWTQDRAKPVTQIVSAEAWGRADCGFTSESYQQGVLSATNLSVIGFRILLLKVAGFNLLMTLRLWSS

SEQ ID NO: 14247 - protein, 894 aa, synthetic construct
MALPVTALLLPLALLLHAARPEVQLVESGGGLVQPGGSLRLSCAASGFSFSDFWMSWVRQAPGKGLEWVATISQAGSEKDYVDSVKGRFTISRDNAKKSLYLQMNSLRAEDTAVYYCASGVYSFDYRGQGTLVTVSSGTGGGGSGGGGSGGGGSEFDIQMTQSFSSLSASVGDRVTITCRASQDISNYLNWYQQKPGKAPKLLIYYTSRLHSGVPSRFSGSGSGTDYTLTISSLQPEDFATYFCQQGNTLPWTFGGGTKLEIKRLEIQNPDPAVYQLRDSKSSDKSVCLFTDFDSQTNVSQSKDSDVYITDKCVLDMRSMDFKSNSAVAWSNKSDFACANAFNNSIIPEDTFFPSPESSCDVKLVEKSFETDTNLNFQILYEILLGKATLYAVLVSALVLMAMVKRKDSRGRAKRSGSGVKQTLNFDLLKLAGDVESNPGPTSMDWIWRILFLVGAATGAHSGPQLQLQESGPGLVKPSETLSLTCTVSGDSISSGDYYWGWIRQPPGKGLEWIGHIYYSGVTYYNPSLKSRVTISVDTSRNQFSLKLSSVTAADTAVYYCTREDSSNWRSRGQGTLVTVSSGSGGGGSGGGGSGGGGSFEEVQLVQSGGGLVQSGGSLRLSCRASGYTFTRYWMLWVRQRPGKGLEWVAEINPRNDRTNYNEKFKTRFTISVDRSKNTLYLQMDSLRAEDTAVYFCALGGGYAMDYWGQGTLVTVSSTREDLKNVFPPEVAVFEPSEAEISHTQKATLVCLATGFYPDHVELSWWVNGKEVHSGVCTDPQPLKEQPALNDSRYCLSSRLRVSATFWQNPRNHFRCQVQFYGLSENDEWTQDRAKPVTQIVSAEAWGRADCGFTSESYQQGVLSATNLSVIGFRILLLKVAGFNLLMTLRLWSS

SEQ ID NO: 14248 - protein, 895 aa, synthetic construct
MALPVTALLLPLALLLHAARPEVQLVESGGGLVQPGGSLRLSCAASGFSFSDFWMSWVRQAPGKGLEWVATISQAGSEKDYVDSVKGRFTISRDNAKKSLYLQMNSLRAEDTAVYYCASGVYSFDYRGQGTLVTVSSGTGGGGSGGGGSGGGGSEFDIQMTQSPASLSASVGETVTIICRASVNIYSYLAWYQQKQGKSPQLLVYNAKILAEGVPSRFSGSGSGTQFSLKINSLQPEDFGSYYCQHHYGTFTFGSGTKLEIKRLEIQNPDPAVYQLRDSKSSDKSVCLFTDFDSQTNVSQSKDSDVYITDKCVLDMRSMDFKSNSAVAWSNKSDFACANAFNNSIIPEDTFFPSPESSCDVKLVEKSFETDTNLNFQILYEILLGKATLYAVLVSALVLMAMVKRKDSRGRAKRSGSGVKQTLNFDLLKLAGDVESNPGPTSMDWIWRILFLVGAATGAHSGPQLQLQESGPGLVKPSETLSLTCTVSGDSISSGDYYWGWIRQPPGKGLEWIGHIYYSGVTYYNPSLKSRVTISVDTSRNQFSLKLSSVTAADTAVYYCTREDSSNWRSRGQGTLVTVSSGSGGGGSGGGGSGGGGSFEQVQLKESGPGLVAPSQSLSITCTISGFSLTSYGVHWVRQPPGKGLEWLVVIWSDGSTTYNSALKSRLSISKDNSKSQVFLKMNSLQTDDTAIYYCASHYGSTLAFASWGHGTLVTVSAATREDLKNVFPPEVAVFEPSEAEISHTQKATLVCLATGFYPDHVELSWWVNGKEVHSGVCTDPQPLKEQPALNDSRYCLSSRLRVSATFWQNPRNHFRCQVQFYGLSENDEWTQDRAKPVTQIVSAEAWGRADCGFTSESYQQGVLSATNLSVIGFRILLLKVAGFNLLMTLRLWSS

SEQ ID NO: 14249 - protein, 903 aa, synthetic construct
MALPVTALLLPLALLLHAARPEVQLVESGGGLVQPGGSLRLSCAASGFSFSDFWMSWVRQAPGKGLEWVATISQAGSEKDYVDSVKGRFTISRDNAKKSLYLQMNSLRAEDTAVYYCASGVYSFDYRGQGTLVTVSSGTGGGGSGGGGSGGGGSEFDIVMTQSHKFMSTSVGDRVSVTCKASQNVGNNVAWYQQKPGQSPKVLIYSASYRYSGVPDRFTGSGSGTDFTLTISNVQSEDLAEYFCQQYNTYPFTFGSGTKLEIKLEIQNPDPAVYQLRDSKSSDKSVCLFTDFDSQTNVSQSKDSDVYITDKCVLDMRSMDFKSNSAVAWSNKSDFACANAFNNSIIPEDTFFPSPESSCDVKLVEKSFETDTNLNFQILYEILLGKATLYAVLVSALVLMAMVKRKDSRGRAKRSGSGVKQTLNFDLLKLAGDVESNPGPTSMDWIWRILFLVGAATGAHSGPQLQLQESGPGLVKPSETLSLTCTVSGDSISSGDYYWGWIRQPPGKGLEWIGHIYYSGVTYYNPSLKSRVTISVDTSRNQFSLKLSSVTAADTAVYYCTREDSSNWRSRGQGTLVTVSSGSGGGGSGGGGSGGGGSFEEVQLEESGGGLVQPGGSMKLSCVASGFTFSNYWMNWVRQSPEKGLEWVAEIRFKSHNYATHFAESVKGRFTISRDDSKSSVYLQMNNLRAEDTGIYYCTRRIGNSDYDWWYFDVWGAGTSVTVSSASTREDLKNVFPPEVAVFEPSEAEISHTQKATLVCLATGFYPDHVELSWWVNGKEVHSGVCTDPQPLKEQPALNDSRYCLSSRLRVSATFWQNPRNHFRCQVQFYGLSENDEWTQDRAKPVTQIVSAEAWGRADCGFTSESYQQGVLSATNLSVIGFRILLLKVAGFNLLMTLRLWSS

SEQ ID NO: 14250 - protein, 896 aa, synthetic construct
MALPVTALLLPLALLLHAARPEVQLVESGGGLVQPGGSLRLSCAASGFSFSDFWMSWVRQAPGKGLEWVATISQAGSEKDYVDSVKGRFTISRDNAKKSLYLQMNSLRAEDTAVYYCASGVYSFDYRGQGTLVTVSSGTGGGGSGGGGSGGGGSEFDQIVLTQSPAIMSASPGEKVTISCSASSSVSYMYWYQQKPGSSPKPWIYRTSNLASGVPARFSGSGSGTSYSLTISNMEAEDAAAYYCQQYHSYPTTFGGGTKLEVKLEIQNPDPAVYQLRDSKSSDKSVCLFTDFDSQTNVSQSKDSDVYITDKCVLDMRSMDFKSNSAVAWSNKSDFACANAFNNSIIPEDTFFPSPESSCDVKLVEKSFETDTNLNFQILYEILLGKATLYAVLVSALVLMAMVKRKDSRGRAKRSGSGVKQTLNFDLLKLAGDVESNPGPTSMDWIWRILFLVGAATGAHSGPQLQLQESGPGLVKPSETLSLTCTVSGDSISSGDYYWGWIRQPPGKGLEWIGHIYYSGVTYYNPSLKSRVTISVDTSRNQFSLKLSSVTAADTAVYYCTREDSSNWRSRGQGTLVTVSSGSGGGGSGGGGSGGGGSFEEVQLVESGGGLVQPKGSLKLSCAASGFSFNTYAMNWVRQAPGKGLEWIAHIRSKSNNFATYYADSVKDRFSISRDASENILFLQMNNLKTEDTAMYYCVRQGGDFPMDYWGQGTSVTVSSTREDLKNVFPPEVAVFEPSEAEISHTQKATLVCLATGFYPDHVELSWWVNGKEVHSGVCTDPQPLKEQPALNDSRYCLSSRLRVSATFWQNPRNHFRCQVQFYGLSENDEWTQDRAKPVTQIVSAEAWGRADCGFTSESYQQGVLSATNLSVIGFRILLLKVAGFNLLMTLRLWSS

SEQ ID NO: 14251 - protein, 895 aa, synthetic construct
MALPVTALLLPLALLLHAARPEVQLVESGGGLVQPGGSLRLSCAASGFSFSDFWMSWVRQAPGKGLEWVATISQAGSEKDYVDSVKGRFTISRDNAKKSLYLQMNSLRAEDTAVYYCASGVYSFDYRGQGTLVTVSSGTGGGGSGGGGSGGGGSEFDDIQMTQSSSSFSVSLGDRVTITCMASEDIYIRLAWYQQKPGNAPRLLISAATSLETGVPSRFSGSGSGKDYTLSITSLQTEDVGTYYCQQYWSSPWTFGGGTKLEINLEIQNPDPAVYQLRDSKSSDKSVCLFTDFDSQTNVSQSKDSDVYITDKCVLDMRSMDFKSNSAVAWSNKSDFACANAFNNSIIPEDTFFPSPESSCDVKLVEKSFETDTNLNFQILYEILLGKATLYAVLVSALVLMAMVKRKDSRGRAKRSGSGVKQTLNFDLLKLAGDVESNPGPTSMDWIWRILFLVGAATGAHSGPQLQLQESGPGLVKPSETLSLTCTVSGDSISSGDYYWGWIRQPPGKGLEWIGHIYYSGVTYYNPSLKSRVTISVDTSRNQFSLKLSSVTAADTAVYYCTREDSSNWRSRGQGTLVTVSSGSGGGGSGGGGSGGGGSFEDVQLQESGPGLVKPSQSLSLTCTVTGYSITSDYTWNWIRQFPGNKLEWMGYITYSGSTSYNPSLKSRNSITRDTSKNQFFLQLNSVTTEDTATYYCARLGRRYTMDYWGQGTSVTVSSTREDLKNVFPPEVAVFEPSEAEISHTQKATLVCLATGFYPDHVELSWWVNGKEVHSGVCTDPQPLKEQPALNDSRYCLSSRLRVSATFWQNPRNHFRCQVQFYGLSENDEWTQDRAKPVTQIVSAEAWGRADCGFTSESYQQGVLSATNLSVIGFRILLLKVAGFNLLMTLRLWSS

SEQ ID NO: 14252 - protein, 898 aa, synthetic construct
MALPVTALLLPLALLLHAARPEVQLVESGGGLVQPGGSLRLSCAASGFSFSDFWMSWVRQAPGKGLEWVATISQAGSEKDYVDSVKGRFTISRDNAKKSLYLQMNSLRAEDTAVYYCASGVYSFDYRGQGTLVTVSSGTGGGGSGGGGSGGGGSEFDDIQMTQSPSSLSASVGDRVTITCRASQSISSYLNWYQQKPGKAPKLLIYDASNLETGVPSRFSGSGSGTDFTFTISSLQPEDIATYYCQQYDNLPLTFGGGTKVDIKRLEIQNPDPAVYQLRDSKSSDKSVCLFTDFDSQTNVSQSKDSDVYITDKCVLDMRSMDFKSNSAVAWSNKSDFACANAFNNSIIPEDTFFPSPESSCDVKLVEKSFETDTNLNFQILYEILLGKATLYAVLVSALVLMAMVKRKDSRGRAKRSGSGVKQTLNFDLLKLAGDVESNPGPTSMDWIWRILFLVGAATGAHSGPQLQLQESGPGLVKPSETLSLTCTVSGDSISSGDYYWGWIRQPPGKGLEWIGHIYYSGVTYYNPSLKSRVTISVDTSRNQFSLKLSSVTAADTAVYYCTREDSSNWRSRGQGTLVTVSSGSGGGGSGGGGSGGGGSFEQVQLVESGGGVVQPGRSLRLSCAASGFTFSSYAMHWVRQAPGKGLEWVAVISYDGSNKYYADSVKGRFTISRDNSKNTLYLQMNSLRAEDTAVYYCARAHNSSSWSFDYWGQGTLVTVSSTREDLKNVFPPEVAVFEPSEAEISHTQKATLVCLATGFYPDHVELSWWVNGKEVHSGVCTDPQPLKEQPALNDSRYCLSSRLRVSATFWQNPRNHFRCQVQFYGLSENDEWTQDRAKPVTQIVSAEAWGRADCGFTSESYQQGVLSATNLSVIGFRILLLKVAGFNLLMTLRLWSS

SEQ ID NO: 14253 - protein, 907 aa, synthetic construct
MALPVTALLLPLALLLHAARPEVQLVESGGGLVQPGGSLRLSCAASGFSFSDFWMSWVRQAPGKGLEWVATISQAGSEKDYVDSVKGRFTISRDNAKKSLYLQMNSLRAEDTAVYYCASGVYSFDYRGQGTLVTVSSGTGGGGSGGGGSGGGGSEFDDVVMTQSPLSLPVSLGDQASISCRSSQRLVHSNGNTYLHWYLQKPGQSPKLLIYRVSNRFPGVPDRFSGSGSGTDFTLKISRVEAEDLGIYFCSQSTHVPYTFGGGTKLEIKRLEIQNPDPAVYQLRDSKSSDKSVCLFTDFDSQTNVSQSKDSDVYITDKCVLDMRSMDFKSNSAVAWSNKSDFACANAFNNSIIPEDTFFPSPESSCDVKLVEKSFETDTNLNFQILYEILLGKATLYAVLVSALVLMAMVKRKDSRGRAKRSGSGVKQTLNFDLLKLAGDVESNPGPTSMDWIWRILFLVGAATGAHSGPQLQLQESGPGLVKPSETLSLTCTVSGDSISSGDYYWGWIRQPPGKGLEWIGHIYYSGVTYYNPSLKSRVTISVDTSRNQFSLKLSSVTAADTAVYYCTREDSSNWRSRGQGTLVTVSSGSGGGGSGGGGSGGGGSFEEVRLQQSGPDLIKPGASVKMSCKASGYTFTGYVMHWVKQRPGQGLEWIGFINPYNDDIQSNERFRGKATLTSDKSSTTAYMELSSLTSEDSAVYYCARGAGYNFDGAYRFFDFWGQGTTLTVSSTREDLKNVFPPEVAVFEPSEAEISHTQKATLVCLATGFYPDHVELSWWVNGKEVHSGVCTDPQPLKEQPALNDSRYCLSSRLRVSATFWQNPRNHFRCQVQFYGLSENDEWTQDRAKPVTQIVSAEAWGRADCGFTSESYQQGVLSATNLSVIGFRILLLKVAGFNLLMTLRLWSS

SEQ ID NO: 14254 - protein, 898 aa, synthetic construct
MALPVTALLLPLALLLHAARPEVQLVESGGGLVQPGGSLRLSCAASGFSFSDFWMSWVRQAPGKGLEWVATISQAGSEKDYVDSVKGRFTISRDNAKKSLYLQMNSLRAEDTAVYYCASGVYSFDYRGQGTLVTVSSGTGGGGSGGGGSGGGGSEFDSYELTQPPSVSVSPGQTATISCSGDQLGGKYGHWYQKKPGQSPVLVLYQDRKRPAGIPERFSGSSSGNTITLTISGTQAVDEADYYCQAWDTNLGGVFGGGTKVTVLGQLEIQNPDPAVYQLRDSKSSDKSVCLFTDFDSQTNVSQSKDSDVYITDKCVLDMRSMDFKSNSAVAWSNKSDFACANAFNNSIIPEDTFFPSPESSCDVKLVEKSFETDTNLNFQILYEILLGKATLYAVLVSALVLMAMVKRKDSRGRAKRSGSGVKQTLNFDLLKLAGDVESNPGPTSMDWIWRILFLVGAATGAHSGPQLQLQESGPGLVKPSETLSLTCTVSGDSISSGDYYWGWIRQPPGKGLEWIGHIYYSGVTYYNPSLKSRVTISVDTSRNQFSLKLSSVTAADTAVYYCTREDSSNWRSRGQGTLVTVSSGSGGGGSGGGGSGGGGSFEQVQLVESGAEVKKPGASVKVSCKASGYTFTGYYMHWVRQAPGQGLEWMGRINPNSGGTNYAQKFQGRVTMTRDTSISTAYMELSRLRSDDTAVYYCASPRGRGSAFDIWGQGTLVTVSSTREDLKNVFPPEVAVFEPSEAEISHTQKATLVCLATGFYPDHVELSWWVNGKEVHSGVCTDPQPLKEQPALNDSRYCLSSRLRVSATFWQNPRNHFRCQVQFYGLSENDEWTQDRAKPVTQIVSAEAWGRADCGFTSESYQQGVLSATNLSVIGFRILLLKVAGFNLLMTLRLWSS

SEQ ID NO: 14255 - protein, 901 aa, synthetic construct
MALPVTALLLPLALLLHAARPEVQLVESGGGLVQPGGSLRLSCAASGFSFSDFWMSWVRQAPGKGLEWVATISQAGSEKDYVDSVKGRFTISRDNAKKSLYLQMNSLRAEDTAVYYCASGVYSFDYRGQGTLVTVSSGTGGGGSGGGGSGGGGSEFDNFMLTQPHSVSESPGKTVTISCTRSSGSIASKYVQWYQQRPGSSPTTVIYEDNQRPSGVPDRFSGSIDTSSNSASLTISGLRTEDEADYYCHSYDSNNHSVFGGGTKVTVLGQLEIQNPDPAVYQLRDSKSSDKSVCLFTDFDSQTNVSQSKDSDVYITDKCVLDMRSMDFKSNSAVAWSNKSDFACANAFNNSIIPEDTFFPSPESSCDVKLVEKSFETDTNLNFQILYEILLGKATLYAVLVSALVLMAMVKRKDSRGRAKRSGSGVKQTLNFDLLKLAGDVESNPGPTSMDWIWRILFLVGAATGAHSGPQLQLQESGPGLVKPSETLSLTCTVSGDSISSGDYYWGWIRQPPGKGLEWIGHIYYSGVTYYNPSLKSRVTISVDTSRNQFSLKLSSVTAADTAVYYCTREDSSNWRSRGQGTLVTVSSGSGGGGSGGGGSGGGGSFEEVQLVESGGGVVQPGGSLRLSCAASGFTFSSYAMSWVRQAPGKGLEWVSAISGSGGSTYYADSVKGRFSISRDNSKNTLYLQMNSLRAEDTAVYYCARTRSSGAFDIWGQGTLVTVSSTREDLKNVFPPEVAVFEPSEAEISHTQKATLVCLATGFYPDHVELSWWVNGKEVHSGVCTDPQPLKEQPALNDSRYCLSSRLRVSATFWQNPRNHFRCQVQFYGLSENDEWTQDRAKPVTQIVSAEAWGRADCGFTSESYQQGVLSATNLSVIGFRILLLKVAGFNLLMTLRLWSS

SEQ ID NO: 14256 - protein, 896 aa, synthetic construct
MALPVTALLLPLALLLHAARPEVQLVESGGGLVQPGGSLRLSCAASGFSFSDFWMSWVRQAPGKGLEWVATISQAGSEKDYVDSVKGRFTISRDNAKKSLYLQMNSLRAEDTAVYYCASGVYSFDYRGQGTLVTVSSGTGGGGSGGGGSGGGGSEFDIQMNQSPSSLSASLGDTITITCHASQNINVWLSWYQQKPGNIPKLLIYKASNLHTGVPSRFSGSGSGTGFTITISSLQPEDIATYYCQQGQSYPWTFGGGTKLEIKRLEIQNPDPAVYQLRDSKSSDKSVCLFTDFDSQTNVSQSKDSDVYITDKCVLDMRSMDFKSNSAVAWSNKSDFACANAFNNSIIPEDTFFPSPESSCDVKLVEKSFETDTNLNFQILYEILLGKATLYAVLVSALVLMAMVKRKDSRGRAKRSGSGVKQTLNFDLLKLAGDVESNPGPTSMDWIWRILFLVGAATGAHSGPQLQLQESGPGLVKPSETLSLTCTVSGDSISSGDYYWGWIRQPPGKGLEWIGHIYYSGVTYYNPSLKSRVTISVDTSRNQFSLKLSSVTAADTAVYYCTREDSSNWRSRGQGTLVTVSSGSGGGGSGGGGSGGGGSFEEVQLQQSGPELVKPGASVKISCKASGYSFTGYFMNWVKQSHGKSLEYIGRFNPYNGETLYNQKFKGKATLTVDKSSSTVHMELLSVTSEDSAVYYCGRSGNDDAMDYWGQGTSVTVSSATREDLKNVFPPEVAVFEPSEAEISHTQKATLVCLATGFYPDHVELSWWVNGKEVHSGVCTDPQPLKEQPALNDSRYCLSSRLRVSATFWQNPRNHFRCQVQFYGLSENDEWTQDRAKPVTQIVSAEAWGRADCGFTSESYQQGVLSATNLSVIGFRILLLKVAGFNLLMTLRLWSS

SEQ ID NO: 14257 - protein, 897 aa, synthetic construct
MALPVTALLLPLALLLHAARPEVQLVESGGGLVQPGGSLRLSCAASGFSFSDFWMSWVRQAPGKGLEWVATISQAGSEKDYVDSVKGRFTISRDNAKKSLYLQMNSLRAEDTAVYYCASGVYSFDYRGQGTLVTVSSGTGGGGSGGGGSGGGGSEFEIVLTQSPATLSLSPGERATLSCRASQSVRSYLAWYQQKPGQAPRLLIYDASNRATGIPARFSGSGSGTDFTLTISSLEPEDFAVYYCQQRSNWPPTFGQGTKVEIKLEIQNPDPAVYQLRDSKSSDKSVCLFTDFDSQTNVSQSKDSDVYITDKCVLDMRSMDFKSNSAVAWSNKSDFACANAFNNSIIPEDTFFPSPESSCDVKLVEKSFETDTNLNFQILYEILLGKATLYAVLVSALVLMAMVKRKDSRGRAKRSGSGVKQTLNFDLLKLAGDVESNPGPTSMDWIWRILFLVGAATGAHSGPQLQLQESGPGLVKPSETLSLTCTVSGDSISSGDYYWGWIRQPPGKGLEWIGHIYYSGVTYYNPSLKSRVTISVDTSRNQFSLKLSSVTAADTAVYYCTREDSSNWRSRGQGTLVTVSSGSGGGGSGGGGSGGGGSFEQLQVQESGPGLVKPSETLSLTCTVSGGSISNSYFSWGWIRQPPGKGLEWIGSFYYGEKTYYNPSLKSRATISIDTSKSQFSLKLSSVTAADTAVYYCPRGPTMIRGVIDSWGQGTLVTVSSTREDLKNVFPPEVAVFEPSEAEISHTQKATLVCLATGFYPDHVELSWWVNGKEVHSGVCTDPQPLKEQPALNDSRYCLSSRLRVSATFWQNPRNHFRCQVQFYGLSENDEWTQDRAKPVTQIVSAEAWGRADCGFTSESYQQGVLSATNLSVIGFRILLLKVAGFNLLMTLRLWSS

SEQ ID NO: 14258 - protein, 906 aa, synthetic construct
MALPVTALLLPLALLLHAARPEVQLVESGGGLVQPGGSLRLSCAASGFSFSDFWMSWVRQAPGKGLEWVATISQAGSEKDYVDSVKGRFTISRDNAKKSLYLQMNSLRAEDTAVYYCASGVYSFDYRGQGTLVTVSSGTGGGGSGGGGSGGGGSEFDIVMTQTPLSLPVTPGEPASISCRSSRSLLDSDDGNTYLDWYLQKPGQSPQLLIYTLSYRASGVPDRFSGSGSGTDFTLKISRVEAEDVGVYYCMQRVEFPITFGQGTRLEIKRLEIQNPDPAVYQLRDSKSSDKSVCLFTDFDSQTNVSQSKDSDVYITDKCVLDMRSMDFKSNSAVAWSNKSDFACANAFNNSIIPEDTFFPSPESSCDVKLVEKSFETDTNLNFQILYEILLGKATLYAVLVSALVLMAMVKRKDSRGRAKRSGSGVKQTLNFDLLKLAGDVESNPGPTSMDWIWRILFLVGAATGAHSGPQLQLQESGPGLVKPSETLSLTCTVSGDSISSGDYYWGWIRQPPGKGLEWIGHIYYSGVTYYNPSLKSRVTISVDTSRNQFSLKLSSVTAADTAVYYCTREDSSNWRSRGQGTLVTVSSGSGGGGSGGGGSGGGGSFEQVQLVESGGGVVQPGRSLRLSCAASGFIFSRYGMHWVRQAPGKGLKWVAVIWYDGSNKLYADSVKGRFTISRDNSKNTLYLQMNSLRAEDTAVYYCARDYYDNSRHHWGFDYWGQGTLVTVSSTREDLKNVFPPEVAVFEPSEAEISHTQKATLVCLATGFYPDHVELSWWVNGKEVHSGVCTDPQPLKEQPALNDSRYCLSSRLRVSATFWQNPRNHFRCQVQFYGLSENDEWTQDRAKPVTQIVSAEAWGRADCGFTSESYQQGVLSATNLSVIGFRILLLKVAGFNLLMTLRLWSS

SEQ ID NO: 14259 - protein, 896 aa, synthetic construct
MALPVTALLLPLALLLHAARPEVQLVESGGGLVQPGGSLRLSCAASGFSFSDFWMSWVRQAPGKGLEWVATISQAGSEKDYVDSVKGRFTISRDNAKKSLYLQMNSLRAEDTAVYYCASGVYSFDYRGQGTLVTVSSGTGGGGSGGGGSGGGGSEFEIQMTQSPSSMSASLGDTITITCQATQDIFKNLNWYQQKPGKPPSLLIYYATELAEGVPSRFSGSGSGSDYSLTISNLESEDFAAYYCLQFFEFPFTFGSGTKLEMKLEIQNPDPAVYQLRDSKSSDKSVCLFTDFDSQTNVSQSKDSDVYITDKCVLDMRSMDFKSNSAVAWSNKSDFACANAFNNSIIPEDTFFPSPESSCDVKLVEKSFETDTNLNFQILYEILLGKATLYAVLVSALVLMAMVKRKDSRGRAKRSGSGVKQTLNFDLLKLAGDVESNPGPTSMDWIWRILFLVGAATGAHSGPQLQLQESGPGLVKPSETLSLTCTVSGDSISSGDYYWGWIRQPPGKGLEWIGHIYYSGVTYYNPSLKSRVTISVDTSRNQFSLKLSSVTAADTAVYYCTREDSSNWRSRGQGTLVTVSSGSGGGGSGGGGSGGGGSFEQVQLQQSGAELVRPGTSVKVSCKASGYVFTNYWIEWIKQRPGQGLEWIGVMNPGSGETTYNEKFKGKATLTADKSSSTAYMQLSSLTSVDSAVYFCARDHDRDYYAMDYWGQGTSVTVSSTREDLKNVFPPEVAVFEPSEAEISHTQKATLVCLATGFYPDHVELSWWVNGKEVHSGVCTDPQPLKEQPALNDSRYCLSSRLRVSATFWQNPRNHFRCQVQFYGLSENDEWTQDRAKPVTQIVSAEAWGRADCGFTSESYQQGVLSATNLSVIGFRILLLKVAGFNLLMTLRLWSS

SEQ ID NO: 14260 - protein, 893 aa, synthetic construct
MALPVTALLLPLALLLHAARPEVQLVESGGGLVQPGGSLRLSCAASGFSFSDFWMSWVRQAPGKGLEWVATISQAGSEKDYVDSVKGRFTISRDNAKKSLYLQMNSLRAEDTAVYYCASGVYSFDYRGQGTLVTVSSGTGGGGSGGGGSGGGGSEFDILLTQSPAILSVSPGERVSFSCRASQNIGTSIHWYQQRTNGSPRLLIKYASESVSGIPSRFSGSGSGTDFTLSINSVESEDIADYYCQHTNSWPTTFGGGTKLEIKRLEIQNPDPAVYQLRDSKSSDKSVCLFTDFDSQTNVSQSKDSDVYITDKCVLDMRSMDFKSNSAVAWSNKSDFACANAFNNSIIPEDTFFPSPESSCDVKLVEKSFETDTNLNFQILYEILLGKATLYAVLVSALVLMAMVKRKDSRGRAKRSGSGVKQTLNFDLLKLAGDVESNPGPTSMDWIWRILFLVGAATGAHSGPQLQLQESGPGLVKPSETLSLTCTVSGDSISSGDYYWGWIRQPPGKGLEWIGHIYYSGVTYYNPSLKSRVTISVDTSRNQFSLKLSSVTAADTAVYYCTREDSSNWRSRGQGTLVTVSSGSGGGGSGGGGSGGGGSFEQVQLQQSDAELVKPGASVKISCKASGYTFTDHAIHWVKQKPEQGLEWIGYFSPGNGDIKYNEKFKGKATLTADKSSSTAYMQLNSLTSEDSAVYFCKRSYGNYDYWGQGTTLTVSSTREDLKNVFPPEVAVFEPSEAEISHTQKATLVCLATGFYPDHVELSWWVNGKEVHSGVCTDPQPLKEQPALNDSRYCLSSRLRVSATFWQNPRNHFRCQVQFYGLSENDEWTQDRAKPVTQIVSAEAWGRADCGFTSESYQQGVLSATNLSVIGFRILLLKVAGFNLLMTLRLWSS

SEQ ID NO: 14261 - protein, 898 aa, synthetic construct
MALPVTALLLPLALLLHAARPEVQLVESGGGLVQPGGSLRLSCAASGFSFSDFWMSWVRQAPGKGLEWVATISQAGSEKDYVDSVKGRFTISRDNAKKSLYLQMNSLRAEDTAVYYCASGVYSFDYRGQGTLVTVSSGTGGGGSGGGGSGGGGSEFDIVMTQSPDSLAVSLGERATINCKSSQSLLNSGDQKNYLTWYQQKPGQPPKLLIYWASTRESGVPDRFSGSGSGTDFTLTISSLQAEDVAVYYCQNDYSYPLTFGQGTKVEIKLEIQNPDPAVYQLRDSKSSDKSVCLFTDFDSQTNVSQSKDSDVYITDKCVLDMRSMDFKSNSAVAWSNKSDFACANAFNNSIIPEDTFFPSPESSCDVKLVEKSFETDTNLNFQILYEILLGKATLYAVLVSALVLMAMVKRKDSRGRAKRSGSGVKQTLNFDLLKLAGDVESNPGPTSMDWIWRILFLVGAATGAHSGPQLQLQESGPGLVKPSETLSLTCTVSGDSISSGDYYWGWIRQPPGKGLEWIGHIYYSGVTYYNPSLKSRVTISVDTSRNQFSLKLSSVTAADTAVYYCTREDSSNWRSRGQGTLVTVSSGSGGGGSGGGGSGGGGSFEQVQLVQSGAEVKKTGSSVKVSCKASGYTFTDHAIHVWRQAPGQALEWMGHFSPGNTDIKYNDKFKGRVTLTVDRSMSTAYMELSSLRSEDTAMYYCKTSTFFFDYWGQGTMVTVSSTREDLKNVFPPEVAVFEPSEAEISHTQKATLVCLATGFYPDHVELSWWVNGKEVHSGVCTDPQPLKEQPALNDSRYCLSSRLRVSATFWQNPRNHFRCQVQFYGLSENDEWTQDRAKPVTQIVSAEAWGRADCGFTSESYQQGVLSATNLSVIGFRILLLKVAGFNLLMTLRLWSS

SEQ ID NO: 14262 - protein, 897 aa, synthetic construct
MALPVTALLLPLALLLHAARPEVQLVESGGGLVQPGGSLRLSCAASGFSFSDFWMSWVRQAPGKGLEWVATISQAGSEKDYVDSVKGRFTISRDNAKKSLYLQMNSLRAEDTAVYYCASGVYSFDYRGQGTLVTVSSGTGGGGSGGGGSGGGGSEFDIQMTQSPSSLSASVGDRVTITCKASQDVSIAVAWYQQKPGKAPKVLIYSASYRYTGVPDRFSGSGSGTDFTFTISSLQPEDIAVYYCQQHYITPLTFGGGTKVEIKLEIQNPDPAVYQLRDSKSSDKSVCLFTDFDSQTNVSQSKDSDVYITDKCVLDMRSMDFKSNSAVAWSNKSDFACANAFNNSIIPEDTFFPSPESSCDVKLVEKSFETDTNLNFQILYEILLGKATLYAVLVSALVLMAMVKRKDSRGRAKRSGSGVKQTLNFDLLKLAGDVESNPGPTSMDWIWRILFLVGAATGAHSGPQLQLQESGPGLVKPSETLSLTCTVSGDSISSGDYYWGWIRQPPGKGLEWIGHIYYSGVTYYNPSLKSRVTISVDTSRNQFSLKLSSVTAADTAVYYCTREDSSNWRSRGQGTLVTVSSGSGGGGSGGGGSGGGGSFEQIQLVQSGHEVKKPGASVKVSCKASGYTFTNYGMNWVRQAPGQGLEWMGWINTKTGEPTYAEEFKGRFVFSLETSASTAYLQISSLKAEDTAMYFCGRGGYGSSYWYFDVWGQGTTVTVSSTREDLKNVFPPEVAVFEPSEAEISHTQKATLVCLATGFYPDHVELSWWVNGKEVHSGVCTDPQPLKEQPALNDSRYCLSSRLRVSATFWQNPRNHFRCQVQFYGLSENDEWTQDRAKPVTQIVSAEAWGRADCGFTSESYQQGVLSATNLSVIGFRILLLKVAGFNLLMTLRLWSS

SEQ ID NO: 14263 - protein, 899 aa, synthetic construct
MALPVTALLLPLALLLHAARPEVQLVESGGGLVQPGGSLRLSCAASGFSFSDFWMSWVRQAPGKGLEWVATISQAGSEKDYVDSVKGRFTISRDNAKKSLYLQMNSLRAEDTAVYYCASGVYSFDYRGQGTLVTVSSGTGGGGSGGGGSGGGGSEFDIVMTQSPDSLAVSLGERATINCRASKSVSTSGYSYMHWYQQKPGQPPKLLIYLASNLESGVPDRFSGSGSGTDFTLTISSLQAEDVAVYYCQHSRELPYTFGQGTKLEIKLEIQNPDPAVYQLRDSKSSDKSVCLFTDFDSQTNVSQSKDSDVYITDKCVLDMRSMDFKSNSAVAWSNKSDFACANAFNNSIIPEDTFFPSPESSCDVKLVEKSFETDTNLNFQILYEILLGKATLYAVLVSALVLMAMVKRKDSRGRAKRSGSGVKQTLNFDLLKLAGDVESNPGPTSMDWIWRILFLVGAATGAHSGPQLQLQESGPGLVKPSETLSLTCTVSGDSISSGDYYWGWIRQPPGKGLEWIGHIYYSGVTYYNPSLKSRVTISVDTSRNQFSLKLSSVTAADTAVYYCTREDSSNWRSRGQGTLVTVSSGSGGGGSGGGGSGGGGSFEQVQLQESGPGLVKPSETLSLTCTVSGGSISSYGVHWIRQPPGKGLEWIGVIWTSGVTDYNSALMGRVTISVDTSKNQFSLKLSSVTAADTAVYYCARDGDYDRYTMDYWGQGTLVTVSSTREDLKNVFPPEVAVFEPSEAEISHTQKATLVCLATGFYPDHVELSWWVNGKEVHSGVCTDPQPLKEQPALNDSRYCLSSRLRVSATFWQNPRNHFRCQVQFYGLSENDEWTQDRAKPVTQIVSAEAWGRADCGFTSESYQQGVLSATNLSVIGFRILLLKVAGFNLLMTLRLWSS

SEQ ID NO: 14264 - protein, 899 aa, synthetic construct
MALPVTALLLPLALLLHAARPEVQLVESGGGLVQPGGSLRLSCAASGFSFSDFWMSWVRQAPGKGLEWVATISQAGSEKDYVDSVKGRFTISRDNAKKSLYLQMNSLRAEDTAVYYCASGVYSFDYRGQGTLVTVSSGTGGGGSGGGGSGGGGSEFDIQMTQSPSSLSASVGDRVTITCRASQSIGTSLHWYQQKPGKAPKLLIKFASRLQSGVPSRFSGSGSGTDFTLTISSLQPEDFATYYCQQSPGFPPTFGQGTKLEIKRLEIQNPDPAVYQLRDSKSSDKSVCLFTDFDSQTNVSQSKDSDVYITDKCVLDMRSMDFKSNSAVAWSNKSDFACANAFNNSIIPEDTFFPSPESSCDVKLVEKSFETDTNLNFQILYEILLGKATLYAVLVSALVLMAMVKRKDSRGRAKRSGSGVKQTLNFDLLKLAGDVESNPGPTSMDWIWRILFLVGAATGAHSGPQLQLQESGPGLVKPSETLSLTCTVSGDSISSGDYYWGWIRQPPGKGLEWIGHIYYSGVTYYNPSLKSRVTISVDTSRNQFSLKLSSVTAADTAVYYCTREDSSNWRSRGQGTLVTVSSGSGGGGSGGGGSGGGGSFEQVQLVESGGGLVKPGGSLRLSCAASGFSITTSGYYWTWIRQFPGKGLEWMGYIGYNSKTYYNPALKSRITISRDNAKNSLYLQMNSLRAEDTAVYYCARSLYGGYKDAFDSWGQGTLVTVSSTREDLKNVFPPEVAVFEPSEAEISHTQKATLVCLATGFYPDHVELSWWVNGKEVHSGVCTDPQPLKEQPALNDSRYCLSSRLRVSATFWQNPRNHFRCQVQFYGLSENDEWTQDRAKPVTQIVSAEAWGRADCGFTSESYQQGVLSATNLSVIGFRILLLKVAGFNLLMTLRLWSS

SEQ ID NO: 14265 - protein, 904 aa, synthetic construct
MALPVTALLLPLALLLHAARPEVQLVESGGGLVQPGGSLRLSCAASGFSFSDFWMSWVRQAPGKGLEWVATISQAGSEKDYVDSVKGRFTISRDNAKKSLYLQMNSLRAEDTAVYYCASGVYSFDYRGQGTLVTVSSGTGGGGSGGGGSGGGGSEFDEIVLTQSPLSLPVTPGEPASISCRSSQSLLHSIGYNYLDWYLQKPGQSPQLLIYLGSNRASGVPDRFSGSGSGTDFTLKISRVEAEDVGVYYCMQALQTPLTFGGGTKVEIKRLEIQNPDPAVYQLRDSKSSDKSVCLFTDFDSQTNVSQSKDSDVYITDKCVLDMRSMDFKSNSAVAWSNKSDFACANAFNNSIIPEDTFFPSPESSCDVKLVEKSFETDTNLNFQILYEILLGKATLYAVLVSALVLMAMVKRKDSRGRAKRSGSGVKQTLNFDLLKLAGDVESNPGPTSMDWIWRILFLVGAATGAHSGPQLQLQESGPGLVKPSETLSLTCTVSGDSISSGDYYWGWIRQPPGKGLEWIGHIYYSGVTYYNPSLKSRVTISVDTSRNQFSLKLSSVTAADTAVYYCTREDSSNWRSRGQGTLVTVSSGSGGGGSGGGGSGGGGSFEEVQLVESGGGVVQPGRSLRLSCAASGFTFRSYGMHWVRQAPGKGLEWVAVISYDGSNKYYTDSVNGRFTISRDNSKNTLYLQMNSLRAEDTAVYYCARGGGYYETSGPDYWGQGTLVTVSSTREDLKNVFPPEVAVFEPSEAEISHTQKATLVCLATGFYPDHVELSWWVNGKEVHSGVCTDPQPLKEQPALNDSRYCLSSRLRVSATFWQNPRNHFRCQVQFYGLSENDEWTQDRAKPVTQIVSAEAWGRADCGFTSESYQQGVLSATNLSVIGFRILLLKVAGFNLLMTLRLWSS

SEQ ID NO: 14266 - protein, 902 aa, synthetic construct
MALPVTALLLPLALLLHAARPEVQLVESGGGLVQPGGSLRLSCAASGFSFSDFWMSWVRQAPGKGLEWVATISQAGSEKDYVDSVKGRFTISRDNAKKSLYLQMNSLRAEDTAVYYCASGVYSFDYRGQGTLVTVSSGTGGGGSGGGGSGGGGSEFDDVVMTQSPLSLPVTPGEPASISCRSSQSLLHSIGYNYLHWFLQKPGQSPQLLIYLGSNRASGVPDRFSGSGSGTDFTLKISRVEAEDVGVYYCMQALQTPPTFGQGTRLEIKRLEIQNPDPAVYQLRDSKSSDKSVCLFTDFDSQTNVSQSKDSDVYITDKCVLDMRSMDFKSNSAVAWSNKSDFACANAFNNSIIPEDTFFPSPESSCDVKLVEKSFETDTNLNFQILYEILLGKATLYAVLVSALVLMAMVKRKDSRGRAKRSGSGVKQTLNFDLLKLAGDVESNPGPTSMDWIWRILFLVGAATGAHSGPQLQLQESGPGLVKPSETLSLTCTVSGDSISSGDYYWGWIRQPPGKGLEWIGHIYYSGVTYYNPSLKSRVTISVDTSRNQFSLKLSSVTAADTAVYYCTREDSSNWRSRGQGTLVTVSSGSGGGGSGGGGSGGGGSFEQLQLQESGPGLVKPSGTLSLTCAVSGGSISSSNWWSWVRQPPGKGLEWIGEIYHSGSTNYNPSLKSRVTISVDKSKNQFSLKLSSVTAADTAVYYCVGSPYGDYVLDYWGQGTLVTVSSTREDLKNVFPPEVAVFEPSEAEISHTQKATLVCLATGFYPDHVELSWWVNGKEVHSGVCTDPQPLKEQPALNDSRYCLSSRLRVSATFWQNPRNHFRCQVQFYGLSENDEWTQDRAKPVTQIVSAEAWGRADCGFTSESYQQGVLSATNLSVIGFRILLLKVAGFNLLMTLRLWSS

SEQ ID NO: 14267 - protein, 900 aa, synthetic construct
MALPVTALLLPLALLLHAARPEVQLVESGGGLVQPGGSLRLSCAASGFSFSDFWMSWVRQAPGKGLEWVATISQAGSEKDYVDSVKGRFTISRDNAKKSLYLQMNSLRAEDTAVYYCASGVYSFDYRGQGTLVTVSSGTGGGGSGGGGSGGGGSEFDEIVLTQSPGTLSLSLGERATLSCRASQSISSSFLAWYQQKPGQAPKLLIYAASTRATGIPDRFSGSGSGTDFTLTISRLEPEDFAVYYCQQYGRSLSFGGGTKVEVKLEIQNPDPAVYQLRDSKSSDKSVCLFTDFDSQTNVSQSKDSDVYITDKCVLDMRSMDFKSNSAVAWSNKSDFACANAFNNSIIPEDTFFPSPESSCDVKLVEKSFETDTNLNFQILYEILLGKATLYAVLVSALVLMAMVKRKDSRGRAKRSGSGVKQTLNFDLLKLAGDVESNPGPTSMDWIWRILFLVGAATGAHSGPQLQLQESGPGLVKPSETLSLTCTVSGDSISSGDYYWGWIRQPPGKGLEWIGHIYYSGVTYYNPSLKSRVTISVDTSRNQFSLKLSSVTAADTAVYYCTREDSSNWRSRGQGTLVTVSSGSGGGGSGGGGSGGGGSFEQVQLQQSGPGLVKPSQTLSLTCAISGDSVSGNSATWNWIRQSPSRGLEWLGRTYYRSKWNHDYAESVKSRITINPDTSKNQFSLQLNSVTPEDTAVYYCARGDSSSWYAFDYWGQGTLVTVSSTREDLKNVFPPEVAVFEPSEAEISHTQKATLVCLATGFYPDHVELSWWVNGKEVHSGVCTDPQPLKEQPALNDSRYCLSSRLRVSATFWQNPRNHFRCQVQFYGLSENDEWTQDRAKPVTQIVSAEAWGRADCGFTSESYQQGVLSATNLSVIGFRILLLKVAGFNLLMTLRLWSS

SEQ ID NO: 14268 - protein, 899 aa, synthetic construct
MALPVTALLLPLALLLHAARPEVQLVESGGGLVQPGGSLRLSCAASGFSFSDFWMSWVRQAPGKGLEWVATISQAGSEKDYVDSVKGRFTISRDNAKKSLYLQMNSLRAEDTAVYYCASGVYSFDYRGQGTLVTVSSGTGGGGSGGGGSGGGGSEFDQSVVTQPPSVSVAPGKTARITCGRNNIGSKSVHWYQQKPGQAPVLVVYDDSDRPSGIPERFSGSNSGNTATLTISRVEAGDEADYYCQVWDSSSDHVVFGGGTKLTVLGLEIQNPDPAVYQLRDSKSSDKSVCLFTDFDSQTNVSQSKDSDVYITDKCVLDMRSMDFKSNSAVAWSNKSDFACANAFNNSIIPEDTFFPSPESSCDVKLVEKSFETDTNLNFQILYEILLGKATLYAVLVSALVLMAMVKRKDSRGRAKRSGSGVKQTLNFDLLKLAGDVESNPGPTSMDWIWRILFLVGAATGAHSGPQLQLQESGPGLVKPSETLSLTCTVSGDSISSGDYYWGWIRQPPGKGLEWIGHIYYSGVTYYNPSLKSRVTISVDTSRNQFSLKLSSVTAADTAVYYCTREDSSNWRSRGQGTLVTVSSGSGGGGSGGGGSGGGGSFEVQLVQSGGGVMRPGGSLRLSCAASGFTFDDYGMSWVRQAPGKGLEWVSGINWNGGSTGYADSVRGRFTISRDNAKNSLYLQMNSLRAEDTALYYCARERGYGYHDPHDYWGQGTLVTVSSTREDLKNVFPPEVAVFEPSEAEISHTQKATLVCLATGFYPDHVELSWWVNGKEVHSGVCTDPQPLKEQPALNDSRYCLSSRLRVSATFWQNPRNHFRCQVQFYGLSENDEWTQDRAKPVTQIVSAEAWGRADCGFTSESYQQGVLSATNLSVIGFRILLLKVAGFNLLMTLRLWSS

SEQ ID NO: 14269 - protein, 912 aa, synthetic construct
MALPVTALLLPLALLLHAARPEVQLVESGGGLVQPGGSLRLSCAASGFSFSDFWMSWVRQAPGKGLEWVATISQAGSEKDYVDSVKGRFTISRDNAKKSLYLQMNSLRAEDTAVYYCASGVYSFDYRGQGTLVTVSSGTGGGGSGGGGSGGGGSEFEQKLISEEDLEFQAVVTQPPSASGTPGQRVTISCSGSSSNIGSNTVNWYQQVPGTAPKLLIYSNNQRPSGVPDRFSGSKSGTSASLAISGLQSEDEADYYCAAWDDSLNGWVFGGGTKLTVLLEIQNPDPAVYQLRDSKSSDKSVCLFTDFDSQTNVSQSKDSDVYITDKCVLDMRSMDFKSNSAVAWSNKSDFACANAFNNSIIPEDTFFPSPESSCDVKLVEKSFETDTNLNFQILYEILLGKATLYAVLVSALVLMAMVKRKDSRGRAKRSGSGVKQTLNFDLLKLAGDVESNPGPTSMDWIWRILFLVGAATGAHSGPQLQLQESGPGLVKPSETLSLTCTVSGDSISSGDYYWGWIRQPPGKGLEWIGHIYYSGVTYYNPSLKSRVTISVDTSRNQFSLKLSSVTAADTAVYYCTREDSSNWRSRGQGTLVTVSSGSGGGGSGGGGSGGGGSFEQMQLVQSGAEVKEPGESLRISCKGSGYSFTNFWISWVRQMPGKGLEWMGRVDPGYSYSTYSPSFQGHVTISADKSTSTAYLQWNSLKASDTAMYYCARVQYSGYYDWFDPWGQGTLVTVSSTREDLKNVFPPEVAVFEPSEAEISHTQKATLVCLATGFYPDHVELSWWVNGKEVHSGVCTDPQPLKEQPALNDSRYCLSSRLRVSATFWQNPRNHFRCQVQFYGLSENDEWTQDRAKPVTQIVSAEAWGRADCGFTSESYQQGVLSATNLSVIGFRILLLKVAGFNLLMTLRLWSS

SEQ ID NO: 14270 - protein, 906 aa, synthetic construct
MALPVTALLLPLALLLHAARPEVQLVESGGGLVQPGGSLRLSCAASGFSFSDFWMSWVRQAPGKGLEWVATISQAGSEKDYVDSVKGRFTISRDNAKKSLYLQMNSLRAEDTAVYYCASGVYSFDYRGQGTLVTVSSGTGGGGSGGGGSGGGGSEFEQKLISEEDLEFDIQMTQSPSTLSASVGDRVTITCRASQNINKWLAWYQQRPGKAPQLLIYKASSLESGVPSRFSGSGSGTEYTLTISSLQPDDFATYYCQQYNSYATFGQGTKVEIKRLEIQNPDPAVYQLRDSKSSDKSVCLFTDFDSQTNVSQSKDSDVYITDKCVLDMRSMDFKSNSAVAWSNKSDFACANAFNNSIIPEDTFFPSPESSCDVKLVEKSFETDTNLNFQILYEILLGKATLYAVLVSALVLMAMVKRKDSRGRAKRSGSGVKQTLNFDLLKLAGDVESNPGPTSMDWIWRILFLVGAATGAHSGPQLQLQESGPGLVKPSETLSLTCTVSGDSISSGDYYWGWIRQPPGKGLEWIGHIYYSGVTYYNPSLKSRVTISVDTSRNQFSLKLSSVTAADTAVYYCTREDSSNWRSRGQGTLVTVSSGSGGGGSGGGGSGGGGSFEQVQLVQSGAEVKKPGESLKISCKGSGYNFSNKWIGWVRQLPGRGLEWIAIIYPGYSDITYSPSFQGRVTISADTSINTAYLHWHSLKASDTAMYYCVRHTALAGFDYWGLGTLVTVSSTREDLKNVFPPEVAVFEPSEAEISHTQKATLVCLATGFYPDHVELSWWVNGKEVHSGVCTDPQPLKEQPALNDSRYCLSSRLRVSATFWQNPRNHFRCQVQFYGLSENDEWTQDRAKPVTQIVSAEAWGRADCGFTSESYQQGVLSATNLSVIGFRILLLKVAGFNLLMTLRLWSS

SEQ ID NO: 14271 - protein, 898 aa, synthetic construct
MALPVTALLLPLALLLHAARPEVQLVESGGGLVQPGGSLRLSCAASGFSFSDFWMSWVRQAPGKGLEWVATISQAGSEKDYVDSVKGRFTISRDNAKKSLYLQMNSLRAEDTAVYYCASGVYSFDYRGQGTLVTVSSGTGGGGSGGGGSGGGGSEFDIVLTQSPASLAVSLGQRATISCRASESVDNYGNTFMHWYQQKPGQPPKLLIYRASNLESGIPARFSGSGSRTDFTLTINPVEADDVATYYCQQSNEDPPTFGAGTKLELKLEIQNPDPAVYQLRDSKSSDKSVCLFTDFDSQTNVSQSKDSDVYITDKCVLDMRSMDFKSNSAVAWSNKSDFACANAFNNSIIPEDTFFPSPESSCDVKLVEKSFETDTNLNFQILYEILLGKATLYAVLVSALVLMAMVKRKDSRGRAKRSGSGVKQTLNFDLLKLAGDVESNPGPTSMDWIWRILFLVGAATGAHSGPQLQLQESGPGLVKPSETLSLTCTVSGDSISSGDYYWGWIRQPPGKGLEWIGHIYYSGVTYYNPSLKSRVTISVDTSRNQFSLKLSSVTAADTAVYYCTREDSSNWRSRGQGTLVTVSSGSGGGGSGGGGSGGGGSFEQIQLVQSGPELKKPGETVKISCKASGYIFTNYGMNWVKQAPGKSFKWMGWINTYTGESTYSADFKGRFAFSLETSASTAYLHINDLKNEDTATYFCARSGGYDPMDYWGQGTSVTVSSTREDLKNVFPPEVAVFEPSEAEISHTQKATLVCLATGFYPDHVELSWWVNGKEVHSGVCTDPQPLKEQPALNDSRYCLSSRLRVSATFWQNPRNHFRCQVQFYGLSENDEWTQDRAKPVTQIVSAEAWGRADCGFTSESYQQGVLSATNLSVIGFRILLLKVAGFNLLMTLRLWSS

SEQ ID NO: 14272 - protein, 897 aa, synthetic construct
MALPVTALLLPLALLLHAARPEVQLVESGGGLVQPGGSLRLSCAASGFSFSDFWMSWVRQAPGKGLEWVATISQAGSEKDYVDSVKGRFTISRDNAKKSLYLQMNSLRAEDTAVYYCASGVYSFDYRGQGTLVTVSSGTGGGGSGGGGSGGGGSEFDEIVLTQSPGTLSLSPGERATLSCRASQSVSNTYLAWYHQRPGQAPRLLIYGASSRATGIPDRFSGSGSGTDFALTISSLEPEDFAVYYCQQYSNSWTFGQGTKVEIKRLEIQNPDPAVYQLRDSKSSDKSVCLFTDFDSQTNVSQSKDSDVYITDKCVLDMRSMDFKSNSAVAWSNKSDFACANAFNNSIIPEDTFFPSPESSCDVKLVEKSFETDTNLNFQILYEILLGKATLYAVLVSALVLMAMVKRKDSRGRAKRSGSGVKQTLNFDLLKLAGDVESNPGPTSMDWIWRILFLVGAATGAHSGPQLQLQESGPGLVKPSETLSLTCTVSGDSISSGDYYWGWIRQPPGKGLEWIGHIYYSGVTYYNPSLKSRVTISVDTSRNQFSLKLSSVTAADTAVYYCTREDSSNWRSRGQGTLVTVSSGSGGGGSGGGGSGGGGSFEQVQLVESGGGVVQPGRSLRLSCAASGFTFSSYDMHWVRQAPGKGLEWVAVISYDGTNEYYADSVKGRFTISRDTSKNTLYLQMNSLRAEDTAVYYCARERYFDWSFDYWGQGTLVSVSSTREDLKNVFPPEVAVFEPSEAEISHTQKATLVCLATGFYPDHVELSWWVNGKEVHSGVCTDPQPLKEQPALNDSRYCLSSRLRVSATFWQNPRNHFRCQVQFYGLSENDEWTQDRAKPVTQIVSAEAWGRADCGFTSESYQQGVLSATNLSVIGFRILLLKVAGFNLLMTLRLWSS

SEQ ID NO: 14273 - protein, 896 aa, synthetic construct
MALPVTALLLPLALLLHAARPEVQLVESGGGLVQPGGSLRLSCAASGFSFSDFWMSWVRQAPGKGLEWVATISQAGSEKDYVDSVKGRFTISRDNAKKSLYLQMNSLRAEDTAVYYCASGVYSFDYRGQGTLVTVSSGTGGGGSGGGGSGGGGSEFDELTQDPAVSVALGQTVRITCQGDSLRSNYANWYQQKPGQAPVLVIYGQNNRPSGIPDRFSGSSSGNTASLTITGAQAADEADYYCDSRVSTGNHVVFGGGTKLTVLGQLEIQNPDPAVYQLRDSKSSDKSVCLFTDFDSQTNVSQSKDSDVYITDKCVLDMRSMDFKSNSAVAWSNKSDFACANAFNNSIIPEDTFFPSPESSCDVKLVEKSFETDTNLNFQILYEILLGKATLYAVLVSALVLMAMVKRKDSRGRAKRSGSGVKQTLNFDLLKLAGDVESNPGPTSMDWIWRILFLVGAATGAHSGPQLQLQESGPGLVKPSETLSLTCTVSGDSISSGDYYWGWIRQPPGKGLEWIGHIYYSGVTYYNPSLKSRVTISVDTSRNQFSLKLSSVTAADTAVYYCTREDSSNWRSRGQGTLVTVSSGSGGGGSGGGGSGGGGSFEEVQLVQSGAEVKKPGASVKVSCKASGYTFTSYAMHWVRQAPGQRLEWMGWINAGNGNTKYSQKFQGRVTITRDTSASTAYMELSSLRSEDTAVYYCARDISYGSFDYWGQGTLVTVSSTREDLKNVFPPEVAVFEPSEAEISHTQKATLVCLATGFYPDHVELSWWVNGKEVHSGVCTDPQPLKEQPALNDSRYCLSSRLRVSATFWQNPRNHFRCQVQFYGLSENDEWTQDRAKPVTQIVSAEAWGRADCGFTSESYQQGVLSATNLSVIGFRILLLKVAGFNLLMTLRLWSS

SEQ ID NO: 14274 - protein, 898 aa, synthetic construct
MALPVTALLLPLALLLHAARPEVQLVESGGGLVQPGGSLRLSCAASGFSFSDFWMSWVRQAPGKGLEWVATISQAGSEKDYVDSVKGRFTISRDNAKKSLYLQMNSLRAEDTAVYYCASGVYSFDYRGQGTLVTVSSGTGGGGSGGGGSGGGGSEFDDIVLTQTPATLSVTPGDSVSLSCRASQSISNNLHWYQQKSHESPRLLIKNASQSISGIPSKFSGSGSGTDFTLRINSVETEDFGMYFCQQSNSWPYTFGSGTKLEIKLEIQNPDPAVYQLRDSKSSDKSVCLFTDFDSQTNVSQSKDSDVYITDKCVLDMRSMDFKSNSAVAWSNKSDFACANAFNNSIIPEDTFFPSPESSCDVKLVEKSFETDTNLNFQILYEILLGKATLYAVLVSALVLMAMVKRKDSRGRAKRSGSGVKQTLNFDLLKLAGDVESNPGPTSMDWIWRILFLVGAATGAHSGPQLQLQESGPGLVKPSETLSLTCTVSGDSISSGDYYWGWIRQPPGKGLEWIGHIYYSGVTYYNPSLKSRVTISVDTSRNQFSLKLSSVTAADTAVYYCTREDSSNWRSRGQGTLVTVSSGSGGGGSGGGGSGGGGSFEQVKLQQSGPELVKPGASVKISCKASGYSFTGYYMHWVKQSHGNILDWIGYIYPYNGVSSYNQKFKGKATLTVDKSSSTAYMELRSLTSEDSAVYYCARERGLYQLRAMDYWGQGTSVTVSSTREDLKNVFPPEVAVFEPSEAEISHTQKATLVCLATGFYPDHVELSWWVNGKEVHSGVCTDPQPLKEQPALNDSRYCLSSRLRVSATFWQNPRNHFRCQVQFYGLSENDEWTQDRAKPVTQIVSAEAWGRADCGFTSESYQQGVLSATNLSVIGFRILLLKVAGFNLLMTLRLWSS

SEQ ID NO: 14275 - protein, 889 aa, synthetic construct
MALPVTALLLPLALLLHAARPEVQLVESGGGLVQPGGSLRLSCAASGFSFSDFWMSWVRQAPGKGLEWVATISQAGSEKDYVDSVKGRFTISRDNAKKSLYLQMNSLRAEDTAVYYCASGVYSFDYRGQGTLVTVSSGTGGGGSGGGGSGGGGSEFDDIVMTQTPAIMSASPGQKVTITCSASSSVNYMHWYQQKLGSSPKLWIYDTSKLAPGVPARFSGSGSGTSYSLTISSMEAEDAASYFCHQWSSYPYTFGSGTKLEIKLEIQNPDPAVYQLRDSKSSDKSVCLFTDFDSQTNVSQSKDSDVYITDKCVLDMRSMDFKSNSAVAWSNKSDFACANAFNNSIIPEDTFFPSPESSCDVKLVEKSFETDTNLNFQILYEILLGKATLYAVLVSALVLMAMVKRKDSRGRAKRSGSGVKQTLNFDLLKLAGDVESNPGPTSMDWIWRILFLVGAATGAHSGPQLQLQESGPGLVKPSETLSLTCTVSGDSISSGDYYWGWIRQPPGKGLEWIGHIYYSGVTYYNPSLKSRVTISVDTSRNQFSLKLSSVTAADTAVYYCTREDSSNWRSRGQGTLVTVSSGSGGGGSGGGGSGGGGSFEEVQLQESGPDLVKPSQSLSLTCTVTGYSITSGYGWHWIRQFPGNKLEWMGYIHYSGSTTYNPSLKSRISISRDTSKNQFFLQLNSVTTEDTATYYCARSLRYWGQGTTLTVSSTREDLKNVFPPEVAVFEPSEAEISHTQKATLVCLATGFYPDHVELSWWVNGKEVHSGVCTDPQPLKEQPALNDSRYCLSSRLRVSATFWQNPRNHFRCQVQFYGLSENDEWTQDRAKPVTQIVSAEAWGRADCGFTSESYQQGVLSATNLSVIGFRILLLKVAGFNLLMTLRLWSS

SEQ ID NO: 14276 - protein, 892 aa, synthetic construct
MALPVTALLLPLALLLHAARPEVQLVESGGGLVQPGGSLRLSCAASGFSFSDFWMSWVRQAPGKGLEWVATISQAGSEKDYVDSVKGRFTISRDNAKKSLYLQMNSLRAEDTAVYYCASGVYSFDYRGQGTLVTVSSGTGGGGSGGGGSGGGGSEFDDIQMTQSPSSLSASVGDRVTITCSATSSISYMHWYQQKPGKAPKGWIYDTSKLAHGVPSRFSGSGSGTDFTLTISSLQPEDFATYYCHQRRSYPFTFGQGTKVEIKLEIQNPDPAVYQLRDSKSSDKSVCLFTDFDSQTNVSQSKDSDVYITDKCVLDMRSMDFKSNSAVAWSNKSDFACANAFNNSIIPEDTFFPSPESSCDVKLVEKSFETDTNLNFQILYEILLGKATLYAVLVSALVLMAMVKRKDSRGRAKRSGSGVKQTLNFDLLKLAGDVESNPGPTSMDWIWRILFLVGAATGAHSGPQLQLQESGPGLVKPSETLSLTCTVSGDSISSGDYYWGWIRQPPGKGLEWIGHIYYSGVTYYNPSLKSRVTISVDTSRNQFSLKLSSVTAADTAVYYCTREDSSNWRSRGQGTLVTVSSGSGGGGSGGGGSGGGGSFEEVQLVQSGAEVKKPGASVKVSCKASGYTFTNFWIHWVRQAPGQGLEWIGEIDPSDSYTNYNQKFKGRVTITRDTSTSTAYLELSSLRSEDTAVYYCAREITTVDYWGQGTLVTVSSTREDLKNVFPPEVAVFEPSEAEISHTQKATLVCLATGFYPDHVELSWWVNGKEVHSGVCTDPQPLKEQPALNDSRYCLSSRLRVSATFWQNPRNHFRCQVQFYGLSENDEWTQDRAKPVTQIVSAEAWGRADCGFTSESYQQGVLSATNLSVIGFRILLLKVAGFNLLMTLRLWSS

SEQ ID NO: 14277 - protein, 899 aa, synthetic construct
MALPVTALLLPLALLLHAARPEVQLVESGGGLVQPGGSLRLSCAASGFSFSDFWMSWVRQAPGKGLEWVATISQAGSEKDYVDSVKGRFTISRDNAKKSLYLQMNSLRAEDTAVYYCASGVYSFDYRGQGTLVTVSSGTGGGGSGGGGSGGGGSEFDDIQMTQSPSSLSASVGDRVTITCKASQGFNKYVAWYQQKPGKAPKLLIYYTSTLQPGVPSRFSGSGSGRDYTLTISSLQPEDFATYYCLQYGNLLYAFGQGTKVEIKRLEIQNPDPAVYQLRDSKSSDKSVCLFTDFDSQTNVSQSKDSDVYITDKCVLDMRSMDFKSNSAVAWSNKSDFACANAFNNSIIPEDTFFPSPESSCDVKLVEKSFETDTNLNFQILYEILLGKATLYAVLVSALVLMAMVKRKDSRGRAKRSGSGVKQTLNFDLLKLAGDVESNPGPTSMDWIWRILFLVGAATGAHSGPQLQLQESGPGLVKPSETLSLTCTVSGDSISSGDYYWGWIRQPPGKGLEWIGHIYYSGVTYYNPSLKSRVTISVDTSRNQFSLKLSSVTAADTAVYYCTREDSSNWRSRGQGTLVTVSSGSGGGGSGGGGSGGGGSFEEVQLVQSGAEVKKPGASVKVSCKASGYTFTSYWIGWVRQAPGQGLEWIGDIYPGGGYTNYNEKFKGRVTITRDTSTSTAYLELSSLRSEDTAVYYCARLDGSSYRGAMDSWGQGTLVTVSSTREDLKNVFPPEVAVFEPSEAEISHTQKATLVCLATGFYPDHVELSWWVNGKEVHSGVCTDPQPLKEQPALNDSRYCLSSRLRVSATFWQNPRNHFRCQVQFYGLSENDEWTQDRAKPVTQIVSAEAWGRADCGFTSESYQQGVLSATNLSVIGFRILLLKVAGFNLLMTLRLWSS

SEQ ID NO: 14278 - protein, 895 aa, synthetic construct
MALPVTALLLPLALLLHAARPEVQLVESGGGLVQPGGSLRLSCAASGFSFSDFWMSWVRQAPGKGLEWVATISQAGSEKDYVDSVKGRFTISRDNAKKSLYLQMNSLRAEDTAVYYCASGVYSFDYRGQGTLVTVSSGTGGGGSGGGGSGGGGSEFDDIQMTQSPSSLSASVGDRVTITCRASQDIRYYLNWYQQKPGKAPKLLIYVASSLQSGVPSRFSGSGSGTEFTLTVSSLQPEDFATYYCLQVYSTPRTFGQGTKVEIKLEIQNPDPAVYQLRDSKSSDKSVCLFTDFDSQTNVSQSKDSDVYITDKCVLDMRSMDFKSNSAVAWSNKSDFACANAFNNSIIPEDTFFPSPESSCDVKLVEKSFETDTNLNFQILYEILLGKATLYAVLVSALVLMAMVKRKDSRGRAKRSGSGVKQTLNFDLLKLAGDVESNPGPTSMDWIWRILFLVGAATGAHSGPQLQLQESGPGLVKPSETLSLTCTVSGDSISSGDYYWGWIRQPPGKGLEWIGHIYYSGVTYYNPSLKSRVTISVDTSRNQFSLKLSSVTAADTAVYYCTREDSSNWRSRGQGTLVTVSSGSGGGGSGGGGSGGGGSFEEVQLVESGGGLAKPGGSLRLSCAASGFRFTFNNYYMDWVRQAPGQGLEWVSRISSSGDPTWYADSVKGRFTISRENAKNTLFLQMNSLRAEDTAVYYCASLTTGSDSWGQGVLVTVSSTREDLKNVFPPEVAVFEPSEAEISHTQKATLVCLATGFYPDHVELSWWVNGKEVHSGVCTDPQPLKEQPALNDSRYCLSSRLRVSATFWQNPRNHFRCQVQFYGLSENDEWTQDRAKPVTQIVSAEAWGRADCGFTSESYQQGVLSATNLSVIGFRILLLKVAGFNLLMTLRLWSS

SEQ ID NO: 14279 - protein, 895 aa, synthetic construct
MALPVTALLLPLALLLHAARPEVQLVESGGGLVQPGGSLRLSCAASGFSFSDFWMSWVRQAPGKGLEWVATISQAGSEKDYVDSVKGRFTISRDNAKKSLYLQMNSLRAEDTAVYYCASGVYSFDYRGQGTLVTVSSGTGGGGSGGGGSGGGGSEFEIVMTQSPATLSVSPGERATLSCRASQSVSRNLAWYQQKPGQAPRLLIYGASTRATGIPARFSGSGSGTEFTLTIGSLQSEDFAVYYCQQYKTWPRTFGQGTNVEIKLEIQNPDPAVYQLRDSKSSDKSVCLFTDFDSQTNVSQSKDSDVYITDKCVLDMRSMDFKSNSAVAWSNKSDFACANAFNNSIIPEDTFFPSPESSCDVKLVEKSFETDTNLNFQILYEILLGKATLYAVLVSALVLMAMVKRKDSRGRAKRSGSGVKQTLNFDLLKLAGDVESNPGPTSMDWIWRILFLVGAATGAHSGPQLQLQESGPGLVKPSETLSLTCTVSGDSISSGDYYWGWIRQPPGKGLEWIGHIYYSGVTYYNPSLKSRVTISVDTSRNQFSLKLSSVTAADTAVYYCTREDSSNWRSRGQGTLVTVSSGSGGGGSGGGGSGGGGSFEQVQLQQWGAGLLKPSETLSLTCAVFGGSFSGYYWSWIRQPPGKGLEWIGEINHRGNTNDNPSLKSRVTISVDTSKNQFALKLSSVTAADTAVYYCARERGYTYGNFDHWGQGTLVTVSSTREDLKNVFPPEVAVFEPSEAEISHTQKATLVCLATGFYPDHVELSWWVNGKEVHSGVCTDPQPLKEQPALNDSRYCLSSRLRVSATFWQNPRNHFRCQVQFYGLSENDEWTQDRAKPVTQIVSAEAWGRADCGFTSESYQQGVLSATNLSVIGFRILLLKVAGFNLLMTLRLWSS

SEQ ID NO: 14280 - protein, 896 aa, synthetic construct
MALPVTALLLPLALLLHAARPEVQLVESGGGLVQPGGSLRLSCAASGFSFSDFWMSWVRQAPGKGLEWVATISQAGSEKDYVDSVKGRFTISRDNAKKSLYLQMNSLRAEDTAVYYCASGVYSFDYRGQGTLVTVSSGTGGGGSGGGGSGGGGSEFEIVMTPSSATLSVSPGERATLSCRASQSVSRNLAWYQQKPGQAPRLLIYGASTRATGIPARFSGSGSGTEFTLTISSLQSEDFAVYYCHQYSNWMCSFGQGTKLEIKLEIQNPDPAVYQLRDSKSSDKSVCLFTDFDSQTNVSQSKDSDVYITDKCVLDMRSMDFKSNSAVAWSNKSDFACANAFNNSIIPEDTFFPSPESSCDVKLVEKSFETDTNLNFQILYEILLGKATLYAVLVSALVLMAMVKRKDSRGRAKRSGSGVKQTLNFDLLKLAGDVESNPGPTSMDWIWRILFLVGAATGAHSGPQLQLQESGPGLVKPSETLSLTCTVSGDSISSGDYYWGWIRQPPGKGLEWIGHIYYSGVTYYNPSLKSRVTISVDTSRNQFSLKLSSVTAADTAVYYCTREDSSNWRSRGQGTLVTVSSGSGGGGSGGGGSGGGGSFEEVQLLESGGGLVQPGGSLRLSCAASGFTFSRYAMNWVRQAPGKGLEWVSGISGSGGRTYYADSVKGRFTISRDNSKNTLYLQMNSLRAEDTAVYYCAKDRDFWSGPFDYWGQGTLVTVSSTREDLKNVFPPEVAVFEPSEAEISHTQKATLVCLATGFYPDHVELSWWVNGKEVHSGVCTDPQPLKEQPALNDSRYCLSSRLRVSATFWQNPRNHFRCQVQFYGLSENDEWTQDRAKPVTQIVSAEAWGRADCGFTSESYQQGVLSATNLSVIGFRILLLKVAGFNLLMTLRLWSS

SEQ ID NO: 14281 - protein, 901 aa, synthetic construct
MALPVTALLLPLALLLHAARPEVQLVESGGGLVQPGGSLRLSCAASGFSFSDFWMSWVRQAPGKGLEWVATISQAGSEKDYVDSVKGRFTISRDNAKKSLYLQMNSLRAEDTAVYYCASGVYSFDYRGQGTLVTVSSGTGGGGSGGGGSGGGGSEFDIQMTQSPSSLSASVGDRVTITCKASKNIRSYLAWYQQKPGKAPKLLIYSGSTLHSGVPSRFSGSGSGTDFTLTISSLQPEDFATYYCQQHHEYPLTFGQGTKVEIKRLEIQNPDPAVYQLRDSKSSDKSVCLFTDFDSQTNVSQSKDSDVYITDKCVLDMRSMDFKSNSAVAWSNKSDFACANAFNNSIIPEDTFFPSPESSCDVKLVEKSFETDTNLNFQILYEILLGKATLYAVLVSALVLMAMVKRKDSRGRAKRSGSGVKQTLNFDLLKLAGDVESNPGPTSMDWIWRILFLVGAATGAHSGPQLQLQESGPGLVKPSETLSLTCTVSGDSISSGDYYWGWIRQPPGKGLEWIGHIYYSGVTYYNPSLKSRVTISVDTSRNQFSLKLSSVTAADTAVYYCTREDSSNWRSRGQGTLVTVSSGSGGGGSGGGGSGGGGSFEQVQLQESGPGLVKPSETLSLTCTVSGYTITSGYDWSWIRQPPGKGLEWIGYINYGGSTNYKPSLGSRVTISVDTSKNQFSLKLSSVTAADTAVYYCARYNEYKSYIYDWYFDFWGQGTLVTVSSTREDLKNVFPPEVAVFEPSEAEISHTQKATLVCLATGFYPDHVELSWWVNGKEVHSGVCTDPQPLKEQPALNDSRYCLSSRLRVSATFWQNPRNHFRCQVQFYGLSENDEWTQDRAKPVTQIVSAEAWGRADCGFTSESYQQGVLSATNLSVIGFRILLLKVAGFNLLMTLRLWSS

SEQ ID NO: 14282 - protein, 903 aa, synthetic construct
MALPVTALLLPLALLLHAARPEVQLVESGGGLVQPGGSLRLSCAASGFSFSDFWMSWVRQAPGKGLEWVATISQAGSEKDYVDSVKGRFTISRDNAKKSLYLQMNSLRAEDTAVYYCASGVYSFDYRGQGTLVTVSSGTGGGGSGGGGSGGGGSEFQSVVTQPPSVSAAPGQKVTISCSGSSSNIGNNYVSWYQQLPGTAPKLLIYDNNKRPSGIPDRFSGSKSGTSATLGITGLQTGDEADYYCGTWDGSLYTMLFGGGTKLTVLLEIQNPDPAVYQLRDSKSSDKSVCLFTDFDSQTNVSQSKDSDVYITDKCVLDMRSMDFKSNSAVAWSNKSDFACANAFNNSIIPEDTFFPSPESSCDVKLVEKSFETDTNLNFQILYEILLGKATLYAVLVSALVLMAMVKRKDSRGRAKRSGSGVKQTLNFDLLKLAGDVESNPGPTSMDWIWRILFLVGAATGAHSGPQLQLQESGPGLVKPSETLSLTCTVSGDSISSGDYYWGWIRQPPGKGLEWIGHIYYSGVTYYNPSLKSRVTISVDTSRNQFSLKLSSVTAADTAVYYCTREDSSNWRSRGQGTLVTVSSGSGGGGSGGGGSGGGGSFEEVQLVESGGGLVKPGGSLRLSCAASGFTFSNAWMSWVRQAPGKGLEWVGFIRSKAYGGTTEYAASVKGRFTISRDDSKSIAYLQMNNLKTEDTAVYYCARDGLYSSSWYDSDYWGQGTLVTVSSTREDLKNVFPPEVAVFEPSEAEISHTQKATLVCLATGFYPDHVELSWWVNGKEVHSGVCTDPQPLKEQPALNDSRYCLSSRLRVSATFWQNPRNHFRCQVQFYGLSENDEWTQDRAKPVTQIVSAEAWGRADCGFTSESYQQGVLSATNLSVIGFRILLLKVAGFNLLMTLRLWSS

SEQ ID NO: 14283 - protein, 908 aa, synthetic construct
MALPVTALLLPLALLLHAARPEVQLVESGGGLVQPGGSLRLSCAASGFSFSDFWMSWVRQAPGKGLEWVATISQAGSEKDYVDSVKGRFTISRDNAKKSLYLQMNSLRAEDTAVYYCASGVYSFDYRGQGTLVTVSSGTGGGGSGGGGSGGGGSEFQSVLTQPPSVSGAPGQRVTISCTGSSSNIGAGYDVHWYQQLPGTAPKLLIFGNSNRPSGVPDRFSGFKSGTSASLAITGLQAEDEADYFCQSYDSSLSGSGVFGTGTKVTVLGLEIQNPDPAVYQLRDSKSSDKSVCLFTDFDSQTNVSQSKDSDVYITDKCVLDMRSMDFKSNSAVAWSNKSDFACANAFNNSIIPEDTFFPSPESSCDVKLVEKSFETDTNLNFQILYEILLGKATLYAVLVSALVLMAMVKRKDSRGRAKRSGSGVKQTLNFDLLKLAGDVESNPGPTSMDWIWRILFLVGAATGAHSGPQLQLQESGPGLVKPSETLSLTCTVSGDSISSGDYYWGWIRQPPGKGLEWIGHIYYSGVTYYNPSLKSRVTISVDTSRNQFSLKLSSVTAADTAVYYCTREDSSNWRSRGQGTLVTVSSGSGGGGSGGGGSGGGGSFEQMQLVQSGGGLVQPGRSLRLSCAASGFTFDDYAMHWVRQAPGKGLEWVSGISWNSGSIGYADSVKGRFTISRDNAKNSLYLQMNSLRAEDTALYYCAKDIHSGSYYGLLYYAMDVWGQGTTVTVSSTREDLKNVFPPEVAVFEPSEAEISHTQKATLVCLATGFYPDHVELSWWVNGKEVHSGVCTDPQPLKEQPALNDSRYCLSSRLRVSATFWQNPRNHFRCQVQFYGLSENDEWTQDRAKPVTQIVSAEAWGRADCGFTSESYQQGVLSATNLSVIGFRILLLKVAGFNLLMTLRLWSS

SEQ ID NO: 14284 - protein, 908 aa, synthetic construct
MALPVTALLLPLALLLHAARPEVQLVESGGGLVQPGGSLRLSCAASGFSFSDFWMSWVRQAPGKGLEWVATISQAGSEKDYVDSVKGRFTISRDNAKKSLYLQMNSLRAEDTAVYYCASGVYSFDYRGQGTLVTVSSGTGGGGSGGGGSGGGGSEFLPVLTQPPSASGTPGQRVTISCSGRSSNIGSNSVNWYRQLPGAAPKLLIYSNNQRPPGVPVRFSGSKSGTSASLAISGLQSEDEATYYCATWDDNLNVHYVFGTGTKVTVLGSRLEIQNPDPAVYQLRDSKSSDKSVCLFTDFDSQTNVSQSKDSDVYITDKCVLDMRSMDFKSNSAVAWSNKSDFACANAFNNSIIPEDTFFPSPESSCDVKLVEKSFETDTNLNFQILYEILLGKATLYAVLVSALVLMAMVKRKDSRGRAKRSGSGVKQTLNFDLLKLAGDVESNPGPTSMDWIWRILFLVGAATGAHSGPQLQLQESGPGLVKPSETLSLTCTVSGDSISSGDYYWGWIRQPPGKGLEWIGHIYYSGVTYYNPSLKSRVTISVDTSRNQFSLKLSSVTAADTAVYYCTREDSSNWRSRGQGTLVTVSSGSGGGGSGGGGSGGGGSFELEMAQVQLVQSGAEVKKPGSSVKVSCKASGGTFSSYAISWVRQAPGQGLEWMGRIIPILGIANYAQKFQGRVTITADKSTSTAYMELSSLRSEDTAVYYCARGGYYSHDMWSEDWGQGTLVTVSSTREDLKNVFPPEVAVFEPSEAEISHTQKATLVCLATGFYPDHVELSWWVNGKEVHSGVCTDPQPLKEQPALNDSRYCLSSRLRVSATFWQNPRNHFRCQVQFYGLSENDEWTQDRAKPVTQIVSAEAWGRADCGFTSESYQQGVLSATNLSVIGFRILLLKVAGFNLLMTLRLWSS

SEQ ID NO: 14285 - protein, 902 aa, synthetic construct
MALPVTALLLPLALLLHAARPEVQLVESGGGLVQPGGSLRLSCAASGFSFSDFWMSWVRQAPGKGLEWVATISQAGSEKDYVDSVKGRFTISRDNAKKSLYLQMNSLRAEDTAVYYCASGVYSFDYRGQGTLVTVSSGTGGGGSGGGGSGGGGSEFDFVMTQSPDSLAVSLGERVTMSCKSSQSLLNSGNQKNYLTWYQQKPGQPPKLLIYWASTRESGVPDRFSGSGSGTDFTLTISSLQAEDVAVYYCQNDYSYPYTFGQGTKLEIKLEIQNPDPAVYQLRDSKSSDKSVCLFTDFDSQTNVSQSKDSDVYITDKCVLDMRSMDFKSNSAVAWSNKSDFACANAFNNSIIPEDTFFPSPESSCDVKLVEKSFETDTNLNFQILYEILLGKATLYAVLVSALVLMAMVKRKDSRGRAKRSGSGVKQTLNFDLLKLAGDVESNPGPTSMDWIWRILFLVGAATGAHSGPQLQLQESGPGLVKPSETLSLTCTVSGDSISSGDYYWGWIRQPPGKGLEWIGHIYYSGVTYYNPSLKSRVTISVDTSRNQFSLKLSSVTAADTAVYYCTREDSSNWRSRGQGTLVTVSSGSGGGGSGGGGSGGGGSFEEVQLVQSGAELKKPGASVKVSCKASGYTFTDYYMKWVRQAPGQGLEWIGDIIPSNGATFYNQKFKGRVTITVDKSTSTAYMELSSLRSEDTAVYYCARSHLLRASWFAYWGQGTLVTVSSTREDLKNVFPPEVAVFEPSEAEISHTQKATLVCLATGFYPDHVELSWWVNGKEVHSGVCTDPQPLKEQPALNDSRYCLSSRLRVSATFWQNPRNHFRCQVQFYGLSENDEWTQDRAKPVTQIVSAEAWGRADCGFTSESYQQGVLSATNLSVIGFRILLLKVAGFNLLMTLRLWSS

SEQ ID NO: 14286 - protein, 902 aa, synthetic construct
MALPVTALLLPLALLLHAARPEVQLVESGGGLVQPGGSLRLSCAASGFSFSDFWMSWVRQAPGKGLEWVATISQAGSEKDYVDSVKGRFTISRDNAKKSLYLQMNSLRAEDTAVYYCASGVYSFDYRGQGTLVTVSSGTGGGGSGGGGSGGGGSEFDFVMTQSPDSLAVSLGERVTMSCKSSQSLLNSGNQKNYLTWYQQKPGQPPKLLIYWASTRESGVPDRFSGSGSGTDFTLTISSLQAEDVAVYYCQNDYSYPYTFGQGTKLEIKLEIQNPDPAVYQLRDSKSSDKSVCLFTDFDSQTNVSQSKDSDVYITDKCVLDMRSMDFKSNSAVAWSNKSDFACANAFNNSIIPEDTFFPSPESSCDVKLVEKSFETDTNLNFQILYEILLGKATLYAVLVSALVLMAMVKRKDSRGRAKRSGSGVKQTLNFDLLKLAGDVESNPGPTSMDWIWRILFLVGAATGAHSGPQLQLQESGPGLVKPSETLSLTCTVSGDSISSGDYYWGWIRQPPGKGLEWIGHIYYSGVTYYNPSLKSRVTISVDTSRNQFSLKLSSVTAADTAVYYCTREDSSNWRSRGQGTLVTVSSGSGGGGSGGGGSGGGGSFEQVQLVQSGAELKKPGASVKVSCKASGYTFTDYYMKWVRQAPGQGLEWIGDIIPSNGATFYNQKFKGRVTITVDKSTSTAYMELSSLRSEDTAVYYCARSHLLRASWFAYWGQGTLVTVSSTREDLKNVFPPEVAVFEPSEAEISHTQKATLVCLATGFYPDHVELSWWVNGKEVHSGVCTDPQPLKEQPALNDSRYCLSSRLRVSATFWQNPRNHFRCQVQFYGLSENDEWTQDRAKPVTQIVSAEAWGRADCGFTSESYQQGVLSATNLSVIGFRILLLKVAGFNLLMTLRLWSS

SEQ ID NO: 14287 - protein, 892 aa, synthetic construct
MALPVTALLLPLALLLHAARPEVQLVESGGGLVQPGGSLRLSCAASGFSFSDFWMSWVRQAPGKGLEWVATISQAGSEKDYVDSVKGRFTISRDNAKKSLYLQMNSLRAEDTAVYYCASGVYSFDYRGQGTLVTVSSGTGGGGSGGGGSGGGGSEFDVQITQSPSYLAASPGETITINCRASKSISKDLAWYQEKPGKTNKLLIYSGSTLQSGIPSRFSGSGSGTDFTLTISSLEPEDFAMYYCQQHNKYPYTFGGGTKLEIKRLEIQNPDPAVYQLRDSKSSDKSVCLFTDFDSQTNVSQSKDSDVYITDKCVLDMRSMDFKSNSAVAWSNKSDFACANAFNNSIIPEDTFFPSPESSCDVKLVEKSFETDTNLNFQILYEILLGKATLYAVLVSALVLMAMVKRKDSRGRAKRSGSGVKQTLNFDLLKLAGDVESNPGPTSMDWIWRILFLVGAATGAHSGPQLQLQESGPGLVKPSETLSLTCTVSGDSISSGDYYWGWIRQPPGKGLEWIGHIYYSGVTYYNPSLKSRVTISVDTSRNQFSLKLSSVTAADTAVYYCTREDSSNWRSRGQGTLVTVSSGSGGGGSGGGGSGGGGSFEQVQLQQPGAELVRPGASVKLSCKASGYTFTSYWMNWVKQRPDQGLEWIGRIDPYDSETHYNQKFKDKAILTVDKSSSTAYMQLSSLTSEDSAVYYCARGNWDDYWGQGTTLTVSSTREDLKNVFPPEVAVFEPSEAEISHTQKATLVCLATGFYPDHVELSWWVNGKEVHSGVCTDPQPLKEQPALNDSRYCLSSRLRVSATFWQNPRNHFRCQVQFYGLSENDEWTQDRAKPVTQIVSAEAWGRADCGFTSESYQQGVLSATNLSVIGFRILLLKVAGFNLLMTLRLWSS

SEQ ID NO: 14288 - protein, 894 aa, synthetic construct
MALPVTALLLPLALLLHAARPEVQLVESGGGLVQPGGSLRLSCAASGFSFSDFWMSWVRQAPGKGLEWVATISQAGSEKDYVDSVKGRFTISRDNAKKSLYLQMNSLRAEDTAVYYCASGVYSFDYRGQGTLVTVSSGTGGGGSGGGGSGGGGSEFEIVLTQSPTSMTASPGEQVTITCRASSSINYMHWYQQKPGASPRPWIYETSKLASGVPDRFSGSASGTSYSLTINNMEAEDAATYYCQQWNYPSWTFGGGTKLELKLEIQNPDPAVYQLRDSKSSDKSVCLFTDFDSQTNVSQSKDSDVYITDKCVLDMRSMDFKSNSAVAWSNKSDFACANAFNNSIIPEDTFFPSPESSCDVKLVEKSFETDTNLNFQILYEILLGKATLYAVLVSALVLMAMVKRKDSRGRAKRSGSGVKQTLNFDLLKLAGDVESNPGPTSMDWIWRILFLVGAATGAHSGPQLQLQESGPGLVKPSETLSLTCTVSGDSISSGDYYWGWIRQPPGKGLEWIGHIYYSGVTYYNPSLKSRVTISVDTSRNQFSLKLSSVTAADTAVYYCTREDSSNWRSRGQGTLVTVSSGSGGGGSGGGGSGGGGSFEEVQLVESGGGLVQPGRSLKLSCAASGFTFSDYNMAWVRQAPKKGLEWVATILYDGGRTYYRGSVKGRFTISRDNAKSTLYLRMDSLRSEDTATYYCATHSRGTDYFDYWGQGVMVTVSSTREDLKNVFPPEVAVFEPSEAEISHTQKATLVCLATGFYPDHVELSWWVNGKEVHSGVCTDPQPLKEQPALNDSRYCLSSRLRVSATFWQNPRNHFRCQVQFYGLSENDEWTQDRAKPVTQIVSAEAWGRADCGFTSESYQQGVLSATNLSVIGFRILLLKVAGFNLLMTLRLWSS

SEQ ID NO: 14289 - protein, 903 aa, synthetic construct
MALPVTALLLPLALLLHAARPEVQLVESGGGLVQPGGSLRLSCAASGFSFSDFWMSWVRQAPGKGLEWVATISQAGSEKDYVDSVKGRFTISRDNAKKSLYLQMNSLRAEDTAVYYCASGVYSFDYRGQGTLVTVSSGTGGGGSGGGGSGGGGSEFDIVMTQSPSSLAVSEGETVTINCKSSQSFLSSGDGKNYVAWYQYKPGQSPKLLIYWASTRQSGVPDRFIGSGSGTDFTLTISTVQAEDLAIYYCQQYYDTPLTFGSGTKLEIKLEIQNPDPAVYQLRDSKSSDKSVCLFTDFDSQTNVSQSKDSDVYITDKCVLDMRSMDFKSNSAVAWSNKSDFACANAFNNSIIPEDTFFPSPESSCDVKLVEKSFETDTNLNFQILYEILLGKATLYAVLVSALVLMAMVKRKDSRGRAKRSGSGVKQTLNFDLLKLAGDVESNPGPTSMDWIWRILFLVGAATGAHSGPQLQLQESGPGLVKPSETLSLTCTVSGDSISSGDYYWGWIRQPPGKGLEWIGHIYYSGVTYYNPSLKSRVTISVDTSRNQFSLKLSSVTAADTAVYYCTREDSSNWRSRGQGTLVTVSSGSGGGGSGGGGSGGGGSFEEVKLQESGPSLVQSSQTLSLTCTVSGFSLTSYHIHWVRQTPGKGLEWMGVMWSDGDTSYNSALKSRLSISRDTSQSQVFLKMNSLQTEDTATYYCARGYYSSYLYLWFAYWGQGTLVTVSSTREDLKNVFPPEVAVFEPSEAEISHTQKATLVCLATGFYPDHVELSWWVNGKEVHSGVCTDPQPLKEQPALNDSRYCLSSRLRVSATFWQNPRNHFRCQVQFYGLSENDEWTQDRAKPVTQIVSAEAWGRADCGFTSESYQQGVLSATNLSVIGFRILLLKVAGFNLLMTLRLWSS

SEQ ID NO: 14290 - protein, 907 aa, synthetic construct
MALPVTALLLPLALLLHAARPEVQLVESGGGLVQPGGSLRLSCAASGFSFSDFWMSWVRQAPGKGLEWVATISQAGSEKDYVDSVKGRFTISRDNAKKSLYLQMNSLRAEDTAVYYCASGVYSFDYRGQGTLVTVSSGTGGGGSGGGGSGGGGSEFDVLMTQTPVSLPVSLGGQVSISCRSSQSLVHSDGDTYLHWYLQKPGQSPQLLIYRVSNRFSGVPDRFSGSGSGTDFTLKISRVEPEDLGLYYCLQTTHFPPWTFGGGTKLEMKLEIQNPDPAVYQLRDSKSSDKSVCLFTDFDSQTNVSQSKDSDVYITDKCVLDMRSMDFKSNSAVAWSNKSDFACANAFNNSIIPEDTFFPSPESSCDVKLVEKSFETDTNLNFQILYEILLGKATLYAVLVSALVLMAMVKRKDSRGRAKRSGSGVKQTLNFDLLKLAGDVESNPGPTSMDWIWRILFLVGAATGAHSGPQLQLQESGPGLVKPSETLSLTCTVSGDSISSGDYYWGWIRQPPGKGLEWIGHIYYSGVTYYNPSLKSRVTISVDTSRNQFSLKLSSVTAADTAVYYCTREDSSNWRSRGQGTLVTVSSGSGGGGSGGGGSGGGGSFEQVQLQQSGPELRRPGSSVRLSCKASGYRIKDFLIHWIKNRPEHGLEWIGWIDPEDGETKYAQKFQTKATLTADTSSNTAYMQLSSLTSEDTATYFCARWGDVYYGLMRGHVMDAWGQGTSVTVSSTREDLKNVFPPEVAVFEPSEAEISHTQKATLVCLATGFYPDHVELSWWVNGKEVHSGVCTDPQPLKEQPALNDSRYCLSSRLRVSATFWQNPRNHFRCQVQFYGLSENDEWTQDRAKPVTQIVSAEAWGRADCGFTSESYQQGVLSATNLSVIGFRILLLKVAGFNLLMTLRLWSS

SEQ ID NO: 14291 - protein, 902 aa, synthetic construct
MALPVTALLLPLALLLHAARPEVQLVESGGGLVQPGGSLRLSCAASGFSFSDFWMSWVRQAPGKGLEWVATISQAGSEKDYVDSVKGRFTISRDNAKKSLYLQMNSLRAEDTAVYYCASGVYSFDYRGQGTLVTVSSGTGGGGSGGGGSGGGGSEFDIVMTQSPATLSLSPGERATLSCRSSKSLQNVNGNTYLYWFQQKPGQSPQLLIYRMSNLNSGVPDRFSGSGSGTEFTLTISSLEPEDFAVYYCMQHLEYPITFGAGTKLEIKLEIQNPDPAVYQLRDSKSSDKSVCLFTDFDSQTNVSQSKDSDVYITDKCVLDMRSMDFKSNSAVAWSNKSDFACANAFNNSIIPEDTFFPSPESSCDVKLVEKSFETDTNLNFQILYEILLGKATLYAVLVSALVLMAMVKRKDSRGRAKRSGSGVKQTLNFDLLKLAGDVESNPGPTSMDWIWRILFLVGAATGAHSGPQLQLQESGPGLVKPSETLSLTCTVSGDSISSGDYYWGWIRQPPGKGLEWIGHIYYSGVTYYNPSLKSRVTISVDTSRNQFSLKLSSVTAADTAVYYCTREDSSNWRSRGQGTLVTVSSGSGGGGSGGGGSGGGGSFEEVQLVESGGGLVKPGGSLKLSCAASGYTFTSYVMHWVRQAPGKGLEWIGYINPYNDGTKYNEKFQGRVTISSDKSISTAYMELSSLRSEDTAMYYCARGTYYYGTRVFDYWGQGTLVTVSSTREDLKNVFPPEVAVFEPSEAEISHTQKATLVCLATGFYPDHVELSWWVNGKEVHSGVCTDPQPLKEQPALNDSRYCLSSRLRVSATFWQNPRNHFRCQVQFYGLSENDEWTQDRAKPVTQIVSAEAWGRADCGFTSESYQQGVLSATNLSVIGFRILLLKVAGFNLLMTLRLWSS

SEQ ID NO: 14292 - protein, 898 aa, synthetic construct
MALPVTALLLPLALLLHAARPEVQLVESGGGLVQPGGSLRLSCAASGFSFSDFWMSWVRQAPGKGLEWVATISQAGSEKDYVDSVKGRFTISRDNAKKSLYLQMNSLRAEDTAVYYCASGVYSFDYRGQGTLVTVSSGTGGGGSGGGGSGGGGSEFDIQMTQSPSSLSASVGDRVTITCKASDHINNWLAWYQQKPGQAPKLLIYGATTLETGVPSRFSGSGSGTDYTLTISSLQPEDFATYYCQQSWNTPWTFGQGTKLEIKRLEIQNPDPAVYQLRDSKSSDKSVCLFTDFDSQTNVSQSKDSDVYITDKCVLDMRSMDFKSNSAVAWSNKSDFACANAFNNSIIPEDTFFPSPESSCDVKLVEKSFETDTNLNFQILYEILLGKATLYAVLVSALVLMAMVKRKDSRGRAKRSGSGVKQTLNFDLLKLAGDVESNPGPTSMDWIWRILFLVGAATGAHSGPQLQLQESGPGLVKPSETLSLTCTVSGDSISSGDYYWGWIRQPPGKGLEWIGHIYYSGVTYYNPSLKSRVTISVDTSRNQFSLKLSSVTAADTAVYYCTREDSSNWRSRGQGTLVTVSSGSGGGGSGGGGSGGGGSFEQVQLQQPGAELVKPGASVKMSCKASGYAFSSYWINWMKQKPGQGLEWIGQIYPGDGDTNYNGKFKGRATLTADTSSSTAYMQLSSLTSEDSAVYFCARSITTVVGCAMDYWGQGTSVTVSSTREDLKNVFPPEVAVFEPSEAEISHTQKATLVCLATGFYPDHVELSWWVNGKEVHSGVCTDPQPLKEQPALNDSRYCLSSRLRVSATFWQNPRNHFRCQVQFYGLSENDEWTQDRAKPVTQIVSAEAWGRADCGFTSESYQQGVLSATNLSVIGFRILLLKVAGFNLLMTLRLWSS

SEQ ID NO: 14293 - protein, 900 aa, synthetic construct
MALPVTALLLPLALLLHAARPEVQLVESGGGLVQPGGSLRLSCAASGFSFSDFWMSWVRQAPGKGLEWVATISQAGSEKDYVDSVKGRFTISRDNAKKSLYLQMNSLRAEDTAVYYCASGVYSFDYRGQGTLVTVSSGTGGGGSGGGGSGGGGSEFQIVLSQSPAILSASPGEKVTMTCRASSSVSYMHWYQQKPGSSPKPWIYATSNLASGVPARFSGSGSGTSYSFTISRVEAEDAATYYCQQWTFNPPTFGGGTRLEIKRTVAALEIQNPDPAVYQLRDSKSSDKSVCLFTDFDSQTNVSQSKDSDVYITDKCVLDMRSMDFKSNSAVAWSNKSDFACANAFNNSIIPEDTFFPSPESSCDVKLVEKSFETDTNLNFQILYEILLGKATLYAVLVSALVLMAMVKRKDSRGRAKRSGSGVKQTLNFDLLKLAGDVESNPGPTSMDWIWRILFLVGAATGAHSGPQLQLQESGPGLVKPSETLSLTCTVSGDSISSGDYYWGWIRQPPGKGLEWIGHIYYSGVTYYNPSLKSRVTISVDTSRNQFSLKLSSVTAADTAVYYCTREDSSNWRSRGQGTLVTVSSGSGGGGSGGGGSGGGGSFEQAYLQQSGAELVRPGASVKMSCKASGYTFTSYNMHWVKQTPRQGLEWIGGIYPGNGDTSYNQKFKGKATLTVGKSSSTAYMQLSSLTSEDSAVYFCARYDYNYAMDYWGQGTSVTVSSASTREDLKNVFPPEVAVFEPSEAEISHTQKATLVCLATGFYPDHVELSWWVNGKEVHSGVCTDPQPLKEQPALNDSRYCLSSRLRVSATFWQNPRNHFRCQVQFYGLSENDEWTQDRAKPVTQIVSAEAWGRADCGFTSESYQQGVLSATNLSVIGFRILLLKVAGFNLLMTLRLWSS

SEQ ID NO: 14294 - protein, 898 aa, synthetic construct
MALPVTALLLPLALLLHAARPEVQLVESGGGLVQPGGSLRLSCAASGFSFSDFWMSWVRQAPGKGLEWVATISQAGSEKDYVDSVKGRFTISRDNAKKSLYLQMNSLRAEDTAVYYCASGVYSFDYRGQGTLVTVSSGTGGGGSGGGGSGGGGSEFEIVLTQSPATLSLSPGERATLSCRASQSVSSYLAWYQQKPGQAPRLLIYDASNRATGIPARFSGSGSGTDFTLTISSLEPEDFAVYYCQQRSNWPITFGQGTRLEIKLEIQNPDPAVYQLRDSKSSDKSVCLFTDFDSQTNVSQSKDSDVYITDKCVLDMRSMDFKSNSAVAWSNKSDFACANAFNNSIIPEDTFFPSPESSCDVKLVEKSFETDTNLNFQILYEILLGKATLYAVLVSALVLMAMVKRKDSRGRAKRSGSGVKQTLNFDLLKLAGDVESNPGPTSMDWIWRILFLVGAATGAHSGPQLQLQESGPGLVKPSETLSLTCTVSGDSISSGDYYWGWIRQPPGKGLEWIGHIYYSGVTYYNPSLKSRVTISVDTSRNQFSLKLSSVTAADTAVYYCTREDSSNWRSRGQGTLVTVSSGSGGGGSGGGGSGGGGSFEEVQLVESGGGLVQPDRSLRLSCAASGFTFHDYAMHWVRQAPGKGLEWVSTISWNSGTIGYADSVKGRFTISRDNAKNSLYLQMNSLRAEDTALYYCAKDIQYGNYYYGMDVWGQGTTVTVSSTREDLKNVFPPEVAVFEPSEAEISHTQKATLVCLATGFYPDHVELSWWVNGKEVHSGVCTDPQPLKEQPALNDSRYCLSSRLRVSATFWQNPRNHFRCQVQFYGLSENDEWTQDRAKPVTQIVSAEAWGRADCGFTSESYQQGVLSATNLSVIGFRILLLKVAGFNLLMTLRLWSS

SEQ ID NO: 14295 - protein, 893 aa, synthetic construct
MALPVTALLLPLALLLHAARPEVQLVESGGGLVQPGGSLRLSCAASGFSFSDFWMSWVRQAPGKGLEWVATISQAGSEKDYVDSVKGRFTISRDNAKKSLYLQMNSLRAEDTAVYYCASGVYSFDYRGQGTLVTVSSGTGGGGSGGGGSGGGGSEFDIQMTQSPSSLSASVGDRVTINCKASQDINSYLSWFQQKPGKAPKTLIYRANRLVDGVPSRFSGSGSGQDYTLTISSLQPEDFATYYCLQYDEFPLTFGGGTKVEIKLEIQNPDPAVYQLRDSKSSDKSVCLFTDFDSQTNVSQSKDSDVYITDKCVLDMRSMDFKSNSAVAWSNKSDFACANAFNNSIIPEDTFFPSPESSCDVKLVEKSFETDTNLNFQILYEILLGKATLYAVLVSALVLMAMVKRKDSRGRAKRSGSGVKQTLNFDLLKLAGDVESNPGPTSMDWIWRILFLVGAATGAHSGPQLQLQESGPGLVKPSETLSLTCTVSGDSISSGDYYWGWIRQPPGKGLEWIGHIYYSGVTYYNPSLKSRVTISVDTSRNQFSLKLSSVTAADTAVYYCTREDSSNWRSRGQGTLVTVSSGSGGGGSGGGGSGGGGSFEQVQLVQSGAEVKKPGASVKVSCKASGYTFTNYDINWVRQAPGQGLEWIGWIYPGDGSTKYNEKFKAKATLTADTSTSTAYMELRSLRSDDTAVYYCASGYEDAMDYWGQGTTVTVSSTREDLKNVFPPEVAVFEPSEAEISHTQKATLVCLATGFYPDHVELSWWVNGKEVHSGVCTDPQPLKEQPALNDSRYCLSSRLRVSATFWQNPRNHFRCQVQFYGLSENDEWTQDRAKPVTQIVSAEAWGRADCGFTSESYQQGVLSATNLSVIGFRILLLKVAGFNLLMTLRLWSS

SEQ ID NO: 14296 - protein, 895 aa, synthetic construct
MALPVTALLLPLALLLHAARPEVQLVESGGGLVQPGGSLRLSCAASGFSFSDFWMSWVRQAPGKGLEWVATISQAGSEKDYVDSVKGRFTISRDNAKKSLYLQMNSLRAEDTAVYYCASGVYSFDYRGQGTLVTVSSGTGGGGSGGGGSGGGGSEFDIVMTQTPLSLSVTPGQPASISCKSSQSLLDGDGKTYLNWLLQKPGQSPQRLIYLVSKLDSGVPDRFSGSGSGTDFTLKISRVEAEDVGVYYCWQGTHFPRTFGQGTKLEIKLEIQNPDPAVYQLRDSKSSDKSVCLFTDFDSQTNVSQSKDSDVYITDKCVLDMRSMDFKSNSAVAWSNKSDFACANAFNNSIIPEDTFFPSPESSCDVKLVEKSFETDTNLNFQILYEILLGKATLYAVLVSALVLMAMVKRKDSRGRAKRSGSGVKQTLNFDLLKLAGDVESNPGPTSMDWIWRILFLVGAATGAHSGPQLQLQESGPGLVKPSETLSLTCTVSGDSISSGDYYWGWIRQPPGKGLEWIGHIYYSGVTYYNPSLKSRVTISVDTSRNQFSLKLSSVTAADTAVYYCTREDSSNWRSRGQGTLVTVSSGSGGGGSGGGGSGGGGSFEQVQLVQSGAEVKKPGASVKVSCKASGYTFKDTYIHWVRQAPGQGLEWMGRIDPANGNTKYDPKFQGRVTMTRDTSISTAYMELSRLRSDDTAVYYCARRGGVDWGQGTLVTVSSTREDLKNVFPPEVAVFEPSEAEISHTQKATLVCLATGFYPDHVELSWWVNGKEVHSGVCTDPQPLKEQPALNDSRYCLSSRLRVSATFWQNPRNHFRCQVQFYGLSENDEWTQDRAKPVTQIVSAEAWGRADCGFTSESYQQGVLSATNLSVIGFRILLLKVAGFNLLMTLRLWSS

SEQ ID NO: 14297 - protein, 896 aa, synthetic construct
MALPVTALLLPLALLLHAARPEVQLVESGGGLVQPGGSLRLSCAASGFSFSDFWMSWVRQAPGKGLEWVATISQAGSEKDYVDSVKGRFTISRDNAKKSLYLQMNSLRAEDTAVYYCASGVYSFDYRGQGTLVTVSSGTGGGGSGGGGSGGGGSEFDIQMTQSPSSLSASVGDRVTITCKASQDVSTAVAWFQQKPGKAPKLLIYSPSYRYTGVPSRFSGSGSGTDFTLTISSLQPEDFTYYCQQLYSTPYTFGQGTKVEIKLEIQNPDPAVYQLRDSKSSDKSVCLFTDFDSQTNVSQSKDSDVYITDKCVLDMRSMDFKSNSAVAWSNKSDFACANAFNNSIIPEDTFFPSPESSCDVKLVEKSFETDTNLNFQILYEILLGKATLYAVLVSALVLMAMVKRKDSRGRAKRSGSGVKQTLNFDLLKLAGDVESNPGPTSMDWIWRILFLVGAATGAHSGPQLQLQESGPGLVKPSETLSLTCTVSGDSISSGDYYWGWIRQPPGKGLEWIGHIYYSGVTYYNPSLKSRVTISVDTSRNQFSLKLSSVTAADTAVYYCTREDSSNWRSRGQGTLVTVSSGSGGGGSGGGGSGGGGSFEEVQLVQSGAEVKKPGASVKVSCKASGYTFTDYYLDVVVRQAPGQGLEWIGRVNPYNGGTIYNQKFKGRVTLTRDTSTSTAYLELSSLRSEDTAVYYCARDHYRYDPLLDYWGQGTLVTVSSTREDLKNVFPPEVAVFEPSEAEISHTQKATLVCLATGFYPDHVELSWWVNGKEVHSGVCTDPQPLKEQPALNDSRYCLSSRLRVSATFWQNPRNHFRCQVQFYGLSENDEWTQDRAKPVTQIVSAEAWGRADCGFTSESYQQGVLSATNLSVIGFRILLLKVAGFNLLMTLRLWSS

SEQ ID NO: 14298 - protein, 902 aa, synthetic construct
MALPVTALLLPLALLLHAARPEVQLVESGGGLVQPGGSLRLSCAASGFSFSDFWMSWVRQAPGKGLEWVATISQAGSEKDYVDSVKGRFTISRDNAKKSLYLQMNSLRAEDTAVYYCASGVYSFDYRGQGTLVTVSSGTGGGGSGGGGSGGGGSEFDIQMTQSPSSLSASVGDRVTITCRASQSVSTSSYNYMHWYQQKPGKPPKLLIKYASNLESGVPSRFSGSGSGTDFTLTISSLQPEDFATYYCQHSWEIPLTFGQGTKVEIKLEIQNPDPAVYQLRDSKSSDKSVCLFTDFDSQTNVSQSKDSDVYITDKCVLDMRSMDFKSNSAVAWSNKSDFACANAFNNSIIPEDTFFPSPESSCDVKLVEKSFETDTNLNFQILYEILLGKATLYAVLVSALVLMAMVKRKDSRGRAKRSGSGVKQTLNFDLLKLAGDVESNPGPTSMDWIWRILFLVGAATGAHSGPQLQLQESGPGLVKPSETLSLTCTVSGDSISSGDYYWGWIRQPPGKGLEWIGHIYYSGVTYYNPSLKSRVTISVDTSRNQFSLKLSSVTAADTAVYYCTREDSSNWRSRGQGTLVTVSSGSGGGGSGGGGSGGGGSFEEVQLVQSGAEVKKPGASVKVSCKASGYSFTDYYMHWVRQAPGQGLEWIGRINPYNGAAFYSQNFKDRVTLTVDTSTSTAYLELSSLRSEDTAVYYCAIERGADLEGYAMDYWGQGTLVTVSSTREDLKNVFPPEVAVFEPSEAEISHTQKATLVCLATGFYPDHVELSWWVNGKEVHSGVCTDPQPLKEQPALNDSRYCLSSRLRVSATFWQNPRNHFRCQVQFYGLSENDEWTQDRAKPVTQIVSAEAWGRADCGFTSESYQQGVLSATNLSVIGFRILLLKVAGFNLLMTLRLWSS

SEQ ID NO: 14299 - protein, 900 aa, synthetic construct
MALPVTALLLPLALLLHAARPEVQLVESGGGLVQPGGSLRLSCAASGFSFSDFWMSWVRQAPGKGLEWVATISQAGSEKDYVDSVKGRFTISRDNAKKSLYLQMNSLRAEDTAVYYCASGVYSFDYRGQGTLVTVSSGTGGGGSGGGGSGGGGSEFEIVLTQSPATLSASPGERVTLTCRASSNVISSYVHWYQQKPGSSPRLFLYSTSNLASGVPSRFSGSGSGTDFTFTISSLEAEDAATYYCQQYSGYPLTFGQGTRLEIKLEIQNPDPAVYQLRDSKSSDKSVCLFTDFDSQTNVSQSKDSDVYITDKCVLDMRSMDFKSNSAVAWSNKSDFACANAFNNSIIPEDTFFPSPESSCDVKLVEKSFETDTNLNFQILYEILLGKATLYAVLVSALVLMAMVKRKDSRGRAKRSGSGVKQTLNFDLLKLAGDVESNPGPTSMDWIWRILFLVGAATGAHSGPQLQLQESGPGLVKPSETLSLTCTVSGDSISSGDYYWGWIRQPPGKGLEWIGHIYYSGVTYYNPSLKSRVTISVDTSRNQFSLKLSSVTAADTAVYYCTREDSSNWRSRGQGTLVTVSSGSGGGGSGGGGSGGGGSFEQVQLQESGPGLVKPSETLSLTCAVSGYSITSAYYWNWIRQPPGKGLEWIGYISYDGRNNYNPSLKNRITINPDTSKNQFSLQLNSVTPEDTAVYYCAREGDYDVGNYYAMDYWGQGTLVTVSSTREDLKNVFPPEVAVFEPSEAEISHTQKATLVCLATGFYPDHVELSWWVNGKEVHSGVCTDPQPLKEQPALNDSRYCLSSRLRVSATFWQNPRNHFRCQVQFYGLSENDEWTQDRAKPVTQIVSAEAWGRADCGFTSESYQQGVLSATNLSVIGFRILLLKVAGFNLLMTLRLWSS

SEQ ID NO: 14300 - protein, 900 aa, synthetic construct
MALPVTALLLPLALLLHAARPEVQLVESGGGLVQPGGSLRLSCAASGFSFSDFWMSWVRQAPGKGLEWVATISQAGSEKDYVDSVKGRFTISRDNAKKSLYLQMNSLRAEDTAVYYCASGVYSFDYRGQGTLVTVSSGTGGGGSGGGGSGGGGSEFEIVLTQSPATLSLSPGERATLSCRASSNVISSYVHWYQQKPGQAPRLLIYSTSNLASGIPARFSGSGSGTDFTLTISSLEPEDFAVYYCQQYSGYPLTFGQGTRLEIKLEIQNPDPAVYQLRDSKSSDKSVCLFTDFDSQTNVSQSKDSDVYITDKCVLDMRSMDFKSNSAVAWSNKSDFACANAFNNSIIPEDTFFPSPESSCDVKLVEKSFETDTNLNFQILYEILLGKATLYAVLVSALVLMAMVKRKDSRGRAKRSGSGVKQTLNFDLLKLAGDVESNPGPTSMDWIWRILFLVGAATGAHSGPQLQLQESGPGLVKPSETLSLTCTVSGDSISSGDYYWGWIRQPPGKGLEWIGHIYYSGVTYYNPSLKSRVTISVDTSRNQFSLKLSSVTAADTAVYYCTREDSSNWRSRGQGTLVTVSSGSGGGGSGGGGSGGGGSFEEVQLVESGGGLVQPGRSLRLSCAASGYSITSAYYWNWVRQAPGKGLEWVSYISYDGRNNYNPSLKNRFTISRDNAKKSLYLQMNSLRAEDTALYYCAKEGDYDVGNYYAMDYWGQGTTVTVSSTREDLKNVFPPEVAVFEPSEAEISHTQKATLVCLATGFYPDHVELSWWVNGKEVHSGVCTDPQPLKEQPALNDSRYCLSSRLRVSATFWQNPRNHFRCQVQFYGLSENDEWTQDRAKPVTQIVSAEAWGRADCGFTSESYQQGVLSATNLSVIGFRILLLKVAGFNLLMTLRLWSS

SEQ ID NO: 14301 - protein, 899 aa, synthetic construct
MALPVTALLLPLALLLHAARPEVQLVESGGGLVQPGGSLRLSCAASGFSFSDFWMSWVRQAPGKGLEWVATISQAGSEKDYVDSVKGRFTISRDNAKKSLYLQMNSLRAEDTAVYYCASGVYSFDYRGQGTLVTVSSGTGGGGSGGGGSGGGGSEFDVVMTQTPLSLPVSLGDQASISCRSSQSLVHSNGNTYLRWYLQKPGQSPKVLIYKVSNRVSGVPDRFSGSGSGTDFTLKINRVEAEDLGVYFCSQSTHVPWTFGGGTKLEIKLEIQNPDPAVYQLRDSKSSDKSVCLFTDFDSQTNVSQSKDSDVYITDKCVLDMRSMDFKSNSAVAWSNKSDFACANAFNNSIIPEDTFFPSPESSCDVKLVEKSFETDTNLNFQILYEILLGKATLYAVLVSALVLMAMVKRKDSRGRAKRSGSGVKQTLNFDLLKLAGDVESNPGPTSMDWIWRILFLVGAATGAHSGPQLQLQESGPGLVKPSETLSLTCTVSGDSISSGDYYWGWIRQPPGKGLEWIGHIYYSGVTYYNPSLKSRVTISVDTSRNQFSLKLSSVTAADTAVYYCTREDSSNWRSRGQGTLVTVSSGSGGGGSGGGGSGGGGSFEGVKLDETGGGLVQPGGAMKLSCVTSGFTFGHYWMNWVRQSPEKGLEWVAQFRNKPYNYETYYSDSVKGRFTISRDDSKSSVYLQMNNLRVEDTGIYYCTGASYGMEYLGQGTSVTVSTTREDLKNVFPPEVAVFEPSEAEISHTQKATLVCLATGFYPDHVELSWWVNGKEVHSGVCTDPQPLKEQPALNDSRYCLSSRLRVSATFWQNPRNHFRCQVQFYGLSENDEWTQDRAKPVTQIVSAEAWGRADCGFTSESYQQGVLSATNLSVIGFRILLLKVAGFNLLMTLRLWSS

SEQ ID NO: 14302 - protein, 905 aa, synthetic construct
MALPVTALLLPLALLLHAARPEVQLVESGGGLVQPGGSLRLSCAASGFSFSDFWMSWVRQAPGKGLEWVATISQAGSEKDYVDSVKGRFTISRDNAKKSLYLQMNSLRAEDTAVYYCASGVYSFDYRGQGTLVTVSSGTGGGGSGGGGSGGGGSEFQVQLVESGGNLVQPGGSLRLSCAASGFTFGSFSMSWVRQAPGGGLEWVAGLSARSSLTHYADSVKGRFTISRDNAKNSVYLQMNSLRVEDTAVYYCARRSYDSSGYWGHFYSYMDVWGQGTLVTVSLEIQNPDPAVYQLRDSKSSDKSVCLFTDFDSQTNVSQSKDSDVYITDKCVLDMRSMDFKSNSAVAWSNKSDFACANAFNNSIIPEDTFFPSPESSCDVKLVEKSFETDTNLNFQILYEILLGKATLYAVLVSALVLMAMVKRKDSRGRAKRSGSGVKQTLNFDLLKLAGDVESNPGPTSMDWIWRILFLVGAATGAHSGPQLQLQESGPGLVKPSETLSLTCTVSGDSISSGDYYWGWIRQPPGKGLEWIGHIYYSGVTYYNPSLKSRVTISVDTSRNQFSLKLSSVTAADTAVYYCTREDSSNWRSRGQGTLVTVSSGSGGGGSGGGGSGGGGSFESVLTQPSSVSAAPGQKVTISCSGSTSNIGNNYVSWYQQHPGKAPKLMIYDVSKRPSGVPDRFSGSKSGNSASLDISGLQSEDEADYYCAAWDDSLSEFLFGTGTKLTVLGTREDLKNVFPPEVAVFEPSEAEISHTQKATLVCLATGFYPDHVELSWWVNGKEVHSGVCTDPQPLKEQPALNDSRYCLSSRLRVSATFWQNPRNHFRCQVQFYGLSENDEWTQDRAKPVTQIVSAEAWGRADCGFTSESYQQGVLSATNLSVIGFRILLLKVAGFNLLMTLRLWSS

SEQ ID NO: 14303 - protein, 900 aa, synthetic construct
MALPVTALLLPLALLLHAARPEVQLVESGGGLVQPGGSLRLSCAASGFSFSDFWMSWVRQAPGKGLEWVATISQAGSEKDYVDSVKGRFTISRDNAKKSLYLQMNSLRAEDTAVYYCASGVYSFDYRGQGTLVTVSSGTGGGGSGGGGSGGGGSEFDVVMTQSPSSLSASVGDRVTITCQSSLDISHYLNWYQQKPGKAPKLLIYDASNLETGVPSRFSGSGSGTHFTFTISSLQPEDFATYYCQQYDNLPLTFGGGTKLEIKRLEIQNPDPAVYQLRDSKSSDKSVCLFTDFDSQTNVSQSKDSDVYITDKCVLDMRSMDFKSNSAVAWSNKSDFACANAFNNSIIPEDTFFPSPESSCDVKLVEKSFETDTNLNFQILYEILLGKATLYAVLVSALVLMAMVKRKDSRGRAKRSGSGVKQTLNFDLLKLAGDVESNPGPTSMDWIWRILFLVGAATGAHSGPQLQLQESGPGLVKPSETLSLTCTVSGDSISSGDYYWGWIRQPPGKGLEWIGHIYYSGVTYYNPSLKSRVTISVDTSRNQFSLKLSSVTAADTAVYYCTREDSSNWRSRGQGTLVTVSSGSGGGGSGGGGSGGGGSFEQVQLVQSGGGVVQPGGSLRVSCAASGVTLSDYGMHWVRQAPGKGLEWVAFIRNDGSDKYYADSVKGRFTISRDNSEKTVSLQMSSLRAEDTAVYYCAKNGESGPLDYWYLDLWGRGTLVTVSSTREDLKNVFPPEVAVFEPSEAEISHTQKATLVCLATGFYPDHVELSWWVNGKEVHSGVCTDPQPLKEQPALNDSRYCLSSRLRVSATFWQNPRNHFRCQVQFYGLSENDEWTQDRAKPVTQIVSAEAWGRADCGFTSESYQQGVLSATNLSVIGFRILLLKVAGFNLLMTLRLWSS

SEQ ID NO: 14304 - protein, 904 aa, synthetic construct
MALPVTALLLPLALLLHAARPEVQLVESGGGLVQPGGSLRLSCAASGFSFSDFWMSWVRQAPGKGLEWVATISQAGSEKDYVDSVKGRFTISRDNAKKSLYLQMNSLRAEDTAVYYCASGVYSFDYRGQGTLVTVSSGTGGGGSGGGGSGGGGSEFSYELTQPPSVSGTPGQRVAISCSGSSSNIGTRMVTWYQHVPGTAPKLLIFNNNQRPSGVPDRFSASKSGTSASLAIIGLQSDDEADYYCATWDDNVKSYVFGTGTKVTVLGSRLEIQNPDPAVYQLRDSKSSDKSVCLFTDFDSQTNVSQSKDSDVYITDKCVLDMRSMDFKSNSAVAWSNKSDFACANAFNNSIIPEDTFFPSPESSCDVKLVEKSFETDTNLNFQILYEILLGKATLYAVLVSALVLMAMVKRKDSRGRAKRSGSGVKQTLNFDLLKLAGDVESNPGPTSMDWIWRILFLVGAATGAHSGPQLQLQESGPGLVKPSETLSLTCTVSGDSISSGDYYWGWIRQPPGKGLEWIGHIYYSGVTYYNPSLKSRVTISVDTSRNQFSLKLSSVTAADTAVYYCTREDSSNWRSRGQGTLVTVSSGSGGGGSGGGGSGGGGSFELEMAQVQLQQWGAGLLKPSETLSLTCAVYGGSFSGYYWSWIRQPPGKGLEWIGEINHSGSTNYNPSLKSRVTISVDTSKNQFSLKLSSVTAADTAVYYCARAPQSWYVGDVWGQGTLVTVSSTREDLKNVFPPEVAVFEPSEAEISHTQKATLVCLATGFYPDHVELSWWVNGKEVHSGVCTDPQPLKEQPALNDSRYCLSSRLRVSATFWQNPRNHFRCQVQFYGLSENDEWTQDRAKPVTQIVSAEAWGRADCGFTSESYQQGVLSATNLSVIGFRILLLKVAGFNLLMTLRLWSS

SEQ ID NO: 14305 - protein, 901 aa, synthetic construct
MALPVTALLLPLALLLHAARPEVQLVESGGGLVQPGGSLRLSCAASGFSFSDFWMSWVRQAPGKGLEWVATISQAGSEKDYVDSVKGRFTISRDNAKKSLYLQMNSLRAEDTAVYYCASGVYSFDYRGQGTLVTVSSGTGGGGSGGGGSGGGGSEFQSVLTQPPSLSVAPGKTASITCGGNNIGMKSVHWYQQRPGQAPVLVIYYDSDRPSGIPGRFSGSNSGNTATLTISRVEAGDEADYYCQVWDTTGDHPGYVFGTGTKVTVLLEIQNPDPAVYQLRDSKSSDKSVCLFTDFDSQTNVSQSKDSDVYITDKCVLDMRSMDFKSNSAVAWSNKSDFACANAFNNSIIPEDTFFPSPESSCDVKLVEKSFETDTNLNFQILYEILLGKATLYAVLVSALVLMAMVKRKDSRGRAKRSGSGVKQTLNFDLLKLAGDVESNPGPTSMDWIWRILFLVGAATGAHSGPQLQLQESGPGLVKPSETLSLTCTVSGDSISSGDYYWGWIRQPPGKGLEWIGHIYYSGVTYYNPSLKSRVTISVDTSRNQFSLKLSSVTAADTAVYYCTREDSSNWRSRGQGTLVTVSSGSGGGGSGGGGSGGGGSFEQVQLVQSGAEVKKPGSSVKVSCKASGGTFSSYAISWVRQAPGQGLEWMGGIIPIFGTANYAQKFQGRVTITADESTSTAYMELSSLRSEDTAVYYCARGVYGYSGSAPYDEWGQGTLVTVSSTREDLKNVFPPEVAVFEPSEAEISHTQKATLVCLATGFYPDHVELSWWVNGKEVHSGVCTDPQPLKEQPALNDSRYCLSSRLRVSATFWQNPRNHFRCQVQFYGLSENDEWTQDRAKPVTQIVSAEAWGRADCGFTSESYQQGVLSATNLSVIGFRILLLKVAGFNLLMTLRLWSS

SEQ ID NO: 14306 - protein, 899 aa, synthetic construct
MALPVTALLLPLALLLHAARPEVQLVESGGGLVQPGGSLRLSCAASGFSFSDFWMSWVRQAPGKGLEWVATISQAGSEKDYVDSVKGRFTISRDNAKKSLYLQMNSLRAEDTAVYYCASGVYSFDYRGQGTLVTVSSGTGGGGSGGGGSGGGGSEFEVQLVESGGGLVQPGRSLRLSCAASGFTFDDYAMHWVRQAPGKGLEWVSGISWNSGSIGYADSVKGRFTISRDNAKNSLYLQMNSLRAEDTALYYCAKDKGGGYYDFWSGSDYWGQGTLVTVSSLEIQNPDPAVYQLRDSKSSDKSVCLFTDFDSQTNVSQSKDSDVYITDKCVLDMRSMDFKSNSAVAWSNKSDFACANAFNNSIIPEDTFFPSPESSCDVKLVEKSFETDTNLNFQILYEILLGKATLYAVLVSALVLMAMVKRKDSRGRAKRSGSGVKQTLNFDLLKLAGDVESNPGPTSMDWIWRILFLVGAATGAHSGPQLQLQESGPGLVKPSETLSLTCTVSGDSISSGDYYWGWIRQPPGKGLEWIGHIYYSGVTYYNPSLKSRVTISVDTSRNQFSLKLSSVTAADTAVYYCTREDSSNWRSRGQGTLVTVSSGSGGGGSGGGGSGGGGSFESSELTQDPAVSVALGQTVRITCQGDSLRSYYASWYQQKPGQAPVLVIYGKNNRPSGIPDRFSGSSSGNTASLTITGAQAEDEADYYCNSRDSSGWVFGGGTKLTVLTREDLKNVFPPEVAVFEPSEAEISHTQKATLVCLATGFYPDHVELSWWVNGKEVHSGVCTDPQPLKEQPALNDSRYCLSSRLRVSATFWQNPRNHFRCQVQFYGLSENDEWTQDRAKPVTQIVSAEAWGRADCGFTSESYQQGVLSATNLSVIGFRILLLKVAGFNLLMTLRLWSS

SEQ ID NO: 14307 - protein, 908 aa, synthetic construct
MALPVTALLLPLALLLHAARPEVQLVESGGGLVQPGGSLRLSCAASGFSFSDFWMSWVRQAPGKGLEWVATISQAGSEKDYVDSVKGRFTISRDNAKKSLYLQMNSLRAEDTAVYYCASGVYSFDYRGQGTLVTVSSGTGGGGSGGGGSGGGGSEFEVQLQQSGPGLVKPSQTLSLTCAISGDSVLSNSDTWNWIRQSPSRGLEWLGRTYHRSTWYDDYASSVRGRVSINVDTSKNQYSLQLNAVTPEDTGVYYCARDRLQDGNSWSDAFDVWGQGTMVTVSSLEIQNPDPAVYQLRDSKSSDKSVCLFTDFDSQTNVSQSKDSDVYITDKCVLDMRSMDFKSNSAVAWSNKSDFACANAFNNSIIPEDTFFPSPESSCDVKLVEKSFETDTNLNFQILYEILLGKATLYAVLVSALVLMAMVKRKDSRGRAKRSGSGVKQTLNFDLLKLAGDVESNPGPTSMDWIWRILFLVGAATGAHSGPQLQLQESGPGLVKPSETLSLTCTVSGDSISSGDYYWGWIRQPPGKGLEWIGHIYYSGVTYYNPSLKSRVTISVDTSRNQFSLKLSSVTAADTAVYYCTREDSSNWRSRGQGTLVTVSSGSGGGGSGGGGSGGGGSFEQSALTQPASVSGSPGQSITISCTGTSSDVGGYNYVSWYQQHPGKAPKLMIYDVSNRPSGVSNRFSGSKSGNTASLTISGLQAEDEADYYCSSYTSSSTLVYVFGTGTKVTVLTREDLKNVFPPEVAVFEPSEAEISHTQKATLVCLATGFYPDHVELSWWVNGKEVHSGVCTDPQPLKEQPALNDSRYCLSSRLRVSATFWQNPRNHFRCQVQFYGLSENDEWTQDRAKPVTQIVSAEAWGRADCGFTSESYQQGVLSATNLSVIGFRILLLKVAGFNLLMTLRLWSS

SEQ ID NO: 14308 - protein, 886 aa, synthetic construct
MALPVTALLLPLALLLHAARPEVQLVESGGGLVQPGGSLRLSCAASGFSFSDFWMSWVRQAPGKGLEWVATISQAGSEKDYVDSVKGRFTISRDNAKKSLYLQMNSLRAEDTAVYYCASGVYSFDYRGQGTLVTVSSGTGGGGSGGGGSGGGGSEFQVQLVQSGAEVKKPGASVKVSCKASGYTFTSYDINWVRQATGQGLEWMGWMNPNSGNTGYAQKFQGRVTMTRNTSISTAYMELSSLRSEDTAVYYCARGDSTKVEIKLEIQNPDPAVYQLRDSKSSDKSVCLFTDFDSQTNVSQSKDSDVYITDKCVLDMRSMDFKSNSAVAWSNKSDFACANAFNNSIIPEDTFFPSPESSCDVKLVEKSFETDTNLNFQILYEILLGKATLYAVLVSALVLMAMVKRKDSRGRAKRSGSGVKQTLNFDLLKLAGDVESNPGPTSMDWIWRILFLVGAATGAHSGPQLQLQESGPGLVKPSETLSLTCTVSGDSISSGDYYWGWIRQPPGKGLEWIGHIYYSGVTYYNPSLKSRVTISVDTSRNQFSLKLSSVTAADTAVYYCTREDSSNWRSRGQGTLVTVSSGSGGGGSGGGGSGGGGSFEQSVLTQPRSVSGSPGQSVTISCTGTSSDVGGYNYVSWYQQHPGEAPKLIIYDADKRPSGISNRFSSGKSGNTASLTISGLQVEDEADYYCCSYAGGSTWVFGGGTKVTVLTREDLKNVFPPEVAVFEPSEAEISHTQKATLVCLATGFYPDHVELSWWVNGKEVHSGVCTDPQPLKEQPALNDSRYCLSSRLRVSATFWQNPRNHFRCQVQFYGLSENDEWTQDRAKPVTQIVSAEAWGRADCGFTSESYQQGVLSATNLSVIGFRILLLKVAGFNLLMTLRLWSS

SEQ ID NO: 14309 - protein, 908 aa, synthetic construct
MALPVTALLLPLALLLHAARPEVQLVESGGGLVQPGGSLRLSCAASGFSFSDFWMSWVRQAPGKGLEWVATISQAGSEKDYVDSVKGRFTISRDNAKKSLYLQMNSLRAEDTAVYYCASGVYSFDYRGQGTLVTVSSGTGGGGSGGGGSGGGGSEFEVQLQQSGPGLVKPSQTLSLTCAISGDSVSSNSAAWNWIRQSPSRGLEWLGRTYYRSKWYSDYAVSVKSRITINPDTSKNQFSLQLNSVTPEDTAVYYCARDPYDFWSGYPDAFDIWGQGTMVTVSSLEIQNPDPAVYQLRDSKSSDKSVCLFTDFDSQTNVSQSKDSDVYITDKCVLDMRSMDFKSNSAVAWSNKSDFACANAFNNSIIPEDTFFPSPESSCDVKLVEKSFETDTNLNFQILYEILLGKATLYAVLVSALVLMAMVKRKDSRGRAKRSGSGVKQTLNFDLLKLAGDVESNPGPTSMDWIWRILFLVGAATGAHSGPQLQLQESGPGLVKPSETLSLTCTVSGDSISSGDYYWGWIRQPPGKGLEWIGHIYYSGVTYYNPSLKSRVTISVDTSRNQFSLKLSSVTAADTAVYYCTREDSSNWRSRGQGTLVTVSSGSGGGGSGGGGSGGGGSFEQSALTQPASVSGSPGQSITISCTGTSSDVGGYNYVSWYQQHPGKAPKVIISEVNNRPSGVSHRFSGSKSGNTASLTISGLQAEDEADYFCSSYTSGRTLYVFGTGSKVTVLGTREDLKNVFPPEVAVFEPSEAEISHTQKATLVCLATGFYPDHVELSWWVNGKEVHSGVCTDPQPLKEQPALNDSRYCLSSRLRVSATFWQNPRNHFRCQVQFYGLSENDEWTQDRAKPVTQIVSAEAWGRADCGFTSESYQQGVLSATNLSVIGFRILLLKVAGFNLLMTLRLWSS

SEQ ID NO: 14310 - protein, 907 aa, synthetic construct
MALPVTALLLPLALLLHAARPEVQLVESGGGLVQPGGSLRLSCAASGFSFSDFWMSWVRQAPGKGLEWVATISQAGSEKDYVDSVKGRFTISRDNAKKSLYLQMNSLRAEDTAVYYCASGVYSFDYRGQGTLVTVSSGTGGGGSGGGGSGGGGSEFQSALTQPASASGSPGQSVTISCTGTSSDVGGYNYVSWYQQHPGKAPKLMIYDVSNRPSGVSNRFSGSKSGNTASLTISGLQAEDEADYYCSSYTSSSTLYVFGTGTQLTVLLEIQNPDPAVYQLRDSKSSDKSVCLFTDFDSQTNVSQSKDSDVYITDKCVLDMRSMDFKSNSAVAWSNKSDFACANAFNNSIIPEDTFFPSPESSCDVKLVEKSFETDTNLNFQILYEILLGKATLYAVLVSALVLMAMVKRKDSRGRAKRSGSGVKQTLNFDLLKLAGDVESNPGPTSMDWIWRILFLVGAATGAHSGPQLQLQESGPGLVKPSETLSLTCTVSGDSISSGDYYWGWIRQPPGKGLEWIGHIYYSGVTYYNPSLKSRVTISVDTSRNQFSLKLSSVTAADTAVYYCTREDSSNWRSRGQGTLVTVSSGSGGGGSGGGGSGGGGSFEEVQLQQSGPGLVKPSQTLSLTCAISGDSMLSNSDTWNWIRQSPSRGLEWLGRTYHRSTWYDDYASSVRGRVSINVDTSKNQYSLQLNAVTPEDTGVYYCARVRLQDGNSWSDAFDVWGQGTMVTVSSTREDLKNVFPPEVAVFEPSEAEISHTQKATLVCLATGFYPDHVELSWWVNGKEVHSGVCTDPQPLKEQPALNDSRYCLSSRLRVSATFWQNPRNHFRCQVQFYGLSENDEWTQDRAKPVTQIVSAEAWGRADCGFTSESYQQGVLSATNLSVIGFRILLLKVAGFNLLMTLRLWSS

SEQ ID NO: 14311 - protein, 907 aa, synthetic construct
MALPVTALLLPLALLLHAARPEVQLVESGGGLVQPGGSLRLSCAASGFSFSDFWMSWVRQAPGKGLEWVATISQAGSEKDYVDSVKGRFTISRDNAKKSLYLQMNSLRAEDTAVYYCASGVYSFDYRGQGTLVTVSSGTGGGGSGGGGSGGGGSEFDVMLTQTPLSLPVSLGDQASISCRSSQSILHSTGDTYLEWYLQKPGQSPKLLINKVSNRLSGVPDRFSGSGSGTDFTLKISRVEAEDLGVYYCFQGSHVPWTFGGGTKLEIKRADAAPTVSIFPLEIQNPDPAVYQLRDSKSSDKSVCLFTDFDSQTNVSQSKDSDVYITDKCVLDMRSMDFKSNSAVAWSNKSDFACANAFNNSIIPEDTFFPSPESSCDVKLVEKSFETDTNLNFQILYEILLGKATLYAVLVSALVLMAMVKRKDSRGRAKRSGSGVKQTLNFDLLKLAGDVESNPGPTSMDWIWRILFLVGAATGAHSGPQLQLQESGPGLVKPSETLSLTCTVSGDSISSGDYYWGWIRQPPGKGLEWIGHIYYSGVTYYNPSLKSRVTISVDTSRNQFSLKLSSVTAADTAVYYCTREDSSNWRSRGQGTLVTVSSGSGGGGSGGGGSGGGGSFEQVKLQQSGPSLVKPGASVKMSCKASGYTFTDFYMKWVKQSHGKSLEWIGDINPNIGDTFYNQKFKGKATLTVDKSSSTAYMQLNSLTSEDSAVYFCSVGYFDVWGAGTTVTVSSTREDLKNVFPPEVAVFEPSEAEISHTQKATLVCLATGFYPDHVELSWWVNGKEVHSGVCTDPQPLKEQPALNDSRYCLSSRLRVSATFWQNPRNHFRCQVQFYGLSENDEWTQDRAKPVTQIVSAEAWGRADCGFTSESYQQGVLSATNLSVIGFRILLLKVAGFNLLMTLRLWSS

SEQ ID NO: 14312 - protein, 903 aa, synthetic construct
MALPVTALLLPLALLLHAARPEVQLVESGGGLVQPGGSLRLSCAASGFSFSDFWMSWVRQAPGKGLEWVATISQAGSEKDYVDSVKGRFTISRDNAKKSLYLQMNSLRAEDTAVYYCASGVYSFDYRGQGTLVTVSSGTGGGGSGGGGSGGGGSEFEIVLTQSPATLSLSPGERATLSCRASQSVSIYLAWYQQKPGQAPRLLIYDASNRATGIPARFSGSGSGTDFTLTISSLEPEDFAVYYCQQRSNWPPFTFGPGTKVDIKLEIQNPDPAVYQLRDSKSSDKSVCLFTDFDSQTNVSQSKDSDVYITDKCVLDMRSMDFKSNSAVAWSNKSDFACANAFNNSIIPEDTFFPSPESSCDVKLVEKSFETDTNLNFQILYEILLGKATLYAVLVSALVLMAMVKRKDSRGRAKRSGSGVKQTLNFDLLKLAGDVESNPGPTSMDWIWRILFLVGAATGAHSGPQLQLQESGPGLVKPSETLSLTCTVSGDSISSGDYYWGWIRQPPGKGLEWIGHIYYSGVTYYNPSLKSRVTISVDTSRNQFSLKLSSVTAADTAVYYCTREDSSNWRSRGQGTLVTVSSGSGGGGSGGGGSGGGGSFEQVQLVESGGGVVQPGRSLRLSCAASGFTFSSYGMHWVRQAPGKGLEWVAVIWDDGSNKYYVDSVKGRFTISRDNSKNTLYLQMNSLRAEDTAVYYCARDDYYGSGSFNSYYGTDVWGQGTTVTVSSTREDLKNVFPPEVAVFEPSEAEISHTQKATLVCLATGFYPDHVELSWWVNGKEVHSGVCTDPQPLKEQPALNDSRYCLSSRLRVSATFWQNPRNHFRCQVQFYGLSENDEWTQDRAKPVTQIVSAEAWGRADCGFTSESYQQGVLSATNLSVIGFRILLLKVAGFNLLMTLRLWSS

SEQ ID NO: 14313 - protein, 888 aa, synthetic construct
MALPVTALLLPLALLLHAARPEVQLVESGGGLVQPGGSLRLSCAASGFSFSDFWMSWVRQAPGKGLEWVATISQAGSEKDYVDSVKGRFTISRDNAKKSLYLQMNSLRAEDTAVYYCASGVYSFDYRGQGTLVTVSSGTGGGGSGGGGSGGGGSEFDIQMTQSPSSLSASVGDRVTITCRASQGISSWLAWYQQKPEKAPKSLIYAASSLQSGVPSRFSGSGSGTDFTLTISSLQPEDFATYYCQQYNSYPYTFGQGTKLEIKLEIQNPDPAVYQLRDSKSSDKSVCLFTDFDSQTNVSQSKDSDVYITDKCVLDMRSMDFKSNSAVAWSNKSDFACANAFNNSIIPEDTFFPSPESSCDVKLVEKSFETDTNLNFQILYEILLGKATLYAVLVSALVLMAMVKRKDSRGRAKRSGSGVKQTLNFDLLKLAGDVESNPGPTSMDWIWRILFLVGAATGAHSGPQLQLQESGPGLVKPSETLSLTCTVSGDSISSGDYYWGWIRQPPGKGLEWIGHIYYSGVTYYNPSLKSRVTISVDTSRNQFSLKLSSVTAADTAVYYCTREDSSNWRSRGQGTLVTVSSGSGGGGSGGGGSGGGGSFEEVQLVQSGGGLVHPGGSLRLSCAGSGFTFSTYLMYWVRQAPGKTLEWVSAIGSGGDTYYADSVKGRFTISRDNAKNSLYLQMNSLRAEDMAVYYCARGLGYWGQGTLVTVSSTREDLKNVFPPEVAVFEPSEAEISHTQKATLVCLATGFYPDHVELSWWVNGKEVHSGVCTDPQPLKEQPALNDSRYCLSSRLRVSATFWQNPRNHFRCQVQFYGLSENDEWTQDRAKPVTQIVSAEAWGRADCGFTSESYQQGVLSATNLSVIGFRILLLKVAGFNLLMTLRLWSS

SEQ ID NO: 14314 - protein, 907 aa, synthetic construct
MALPVTALLLPLALLLHAARPEVQLVESGGGLVQPGGSLRLSCAASGFSFSDFWMSWVRQAPGKGLEWVATISQAGSEKDYVDSVKGRFTISRDNAKKSLYLQMNSLRAEDTAVYYCASGVYSFDYRGQGTLVTVSSGTGGGGSGGGGSGGGGSEFLPVLTQPPSVSVAPGKTARITCGGNNIGSKSVHWYQQKPGQAPVLVVYDDSDRPSGIPERFSGSNSGNTATLTISRVEAGDEADYYCQVWDSSSDYVVFGGGTKLTVLLEIQNPDPAVYQLRDSKSSDKSVCLFTDFDSQTNVSQSKDSDVYITDKCVLDMRSMDFKSNSAVAWSNKSDFACANAFNNSIIPEDTFFPSPESSCDVKLVEKSFETDTNLNFQILYEILLGKATLYAVLVSALVLMAMVKRKDSRGRAKRSGSGVKQTLNFDLLKLAGDVESNPGPTSMDWIWRILFLVGAATGAHSGPQLQLQESGPGLVKPSETLSLTCTVSGDSISSGDYYWGWIRQPPGKGLEWIGHIYYSGVTYYNPSLKSRVTISVDTSRNQFSLKLSSVTAADTAVYYCTREDSSNWRSRGQGTLVTVSSGSGGGGSGGGGSGGGGSFEEVQLVQSGAEVKKPGESLKISCKGSGYSFTSYWIGWVRQMPGKGLEWMGIIYPGDSDTRYSPSFQGQVTISADKSISTAYLQWSSLKASDTAMYYCARQVWGWQGGMYPRSNWWYNLDSWGQGTLVTVSSTREDLKNVFPPEVAVFEPSEAEISHTQKATLVCLATGFYPDHVELSWWVNGKEVHSGVCTDPQPLKEQPALNDSRYCLSSRLRVSATFWQNPRNHFRCQVQFYGLSENDEWTQDRAKPVTQIVSAEAWGRADCGFTSESYQQGVLSATNLSVIGFRILLLKVAGFNLLMTLRLWSS

SEQ ID NO: 14315 - protein, 900 aa, synthetic construct
MALPVTALLLPLALLLHAARPEVQLVESGGGLVQPGGSLRLSCAASGFSFSDFWMSWVRQAPGKGLEWVATISQAGSEKDYVDSVKGRFTISRDNAKKSLYLQMNSLRAEDTAVYYCASGVYSFDYRGQGTLVTVSSGTGGGGSGGGGSGGGGSEFELVMTQSPASLAVSLGQRATISCRASESVDSYGKSFMHWYQLKPGQPPKLLIYRASNLESGVPARFSGSGSRTDFTLTIDPVEADDAATYYCQQNNEDPWTFGGGTKLEIKLEIQNPDPAVYQLRDSKSSDKSVCLFTDFDSQTNVSQSKDSDVYITDKCVLDMRSMDFKSNSAVAWSNKSDFACANAFNNSIIPEDTFFPSPESSCDVKLVEKSFETDTNLNFQILYEILLGKATLYAVLVSALVLMAMVKRKDSRGRAKRSGSGVKQTLNFDLLKLAGDVESNPGPTSMDWIWRILFLVGAATGAHSGPQLQLQESGPGLVKPSETLSLTCTVSGDSISSGDYYWGWIRQPPGKGLEWIGHIYYSGVTYYNPSLKSRVTISVDTSRNQFSLKLSSVTAADTAVYYCTREDSSNWRSRGQGTLVTVSSGSGGGGSGGGGSGGGGSFEEVQLEQSGPELVKPGASVKMSCKASGYTFTNYYMKWVKQSHGKSLEWIGDLNPNNGDTFYNQKFKGKATLTVDKSSNTAYMQLNSLTSEDSAVYYCARTGRYEENAMDYWGQGTSVTVSSTREDLKNVFPPEVAVFEPSEAEISHTQKATLVCLATGFYPDHVELSWWVNGKEVHSGVCTDPQPLKEQPALNDSRYCLSSRLRVSATFWQNPRNHFRCQVQFYGLSENDEWTQDRAKPVTQIVSAEAWGRADCGFTSESYQQGVLSATNLSVIGFRILLLKVAGFNLLMTLRLWSS

SEQ ID NO: 14316 - protein, 894 aa, synthetic construct
MALPVTALLLPLALLLHAARPEVQLVESGGGLVQPGGSLRLSCAASGFSFSDFWMSWVRQAPGKGLEWVATISQAGSEKDYVDSVKGRFTISRDNAKKSLYLQMNSLRAEDTAVYYCASGVYSFDYRGQGTLVTVSSGTGGGGSGGGGSGGGGSEFDVVMTQSPSSLSASVGDRVTITCMASEDIYIRLAWYQQKPGNAPKLLIYAATSLETGVPSRFSGSGSGTDFTLTISSLQPEDFATYYCQQYWSSPWTFGGGTKVEIKLEIQNPDPAVYQLRDSKSSDKSVCLFTDFDSQTNVSQSKDSDVYITDKCVLDMRSMDFKSNSAVAWSNKSDFACANAFNNSIIPEDTFFPSPESSCDVKLVEKSFETDTNLNFQILYEILLGKATLYAVLVSALVLMAMVKRKDSRGRAKRSGSGVKQTLNFDLLKLAGDVESNPGPTSMDWIWRILFLVGAATGAHSGPQLQLQESGPGLVKPSETLSLTCTVSGDSISSGDYYWGWIRQPPGKGLEWIGHIYYSGVTYYNPSLKSRVTISVDTSRNQFSLKLSSVTAADTAVYYCTREDSSNWRSRGQGTLVTVSSGSGGGGSGGGGSGGGGSFEQVQLQESGPGLVKPSQTLSLTCTVSGYSITSDYTWNWIRQPPGNGLEWIGYITYSGSTSYNPSLKSRVLISVDTSKNQVSLKLSSVTAADTAVYYCARLGRRYTMDYWGQGTTVTVSSTREDLKNVFPPEVAVFEPSEAEISHTQKATLVCLATGFYPDHVELSWWVNGKEVHSGVCTDPQPLKEQPALNDSRYCLSSRLRVSATFWQNPRNHFRCQVQFYGLSENDEWTQDRAKPVTQIVSAEAWGRADCGFTSESYQQGVLSATNLSVIGFRILLLKVAGFNLLMTLRLWSS

SEQ ID NO: 14317 - protein, 898 aa, synthetic construct; identical to SEQ ID NO: 14180

SEQ ID NO: 14318 - protein, 898 aa, synthetic construct
MALPVTALLLPLALLLHAARPEVQLVESGGGLVQPGGSLRLSCAASGFSFSDFWMSWVRQAPGKGLEWVATISQAGSEKDYVDSVKGRFTISRDNAKKSLYLQMNSLRAEDTAVYYCASGVYSFDYRGQGTLVTVSSGTGGGGSGGGGSGGGGSEFDIVLTQSPATLSLSPGDRATLSCRASESVTILGSHLIYWYQQKPGQAPRLLIQLASNVQTGIPARFSGSGSRTDFTLTISSLEPEDFAVYYCLQSRTIPRTFGQGTKLEIKRLEIQNPDPAVYQLRDSKSSDKSVCLFTDFDSQTNVSQSKDSDVYITDKCVLDMRSMDFKSNSAVAWSNKSDFACANAFNNSIIPEDTFFPSPESSCDVKLVEKSFETDTNLNFQILYEILLGKATLYAVLVSALVLMAMVKRKDSRGRAKRSGSGVKQTLNFDLLKLAGDVESNPGPTSMDWIWRILFLVGAATGAHSGPQLQLQESGPGLVKPSETLSLTCTVSGDSISSGDYYWGWIRQPPGKGLEWIGHIYYSGVTYYNPSLKSRVTISVDTSRNQFSLKLSSVTAADTAVYYCTREDSSNWRSRGQGTLVTVSSGSGGGGSGGGGSGGGGSFEQVQLVQSGSELKKPGESVKISCKASGYTFTHYSMNWVRQAPGQGLEWMGRINTETGEPLYADDFKGRFVFSLDTSASTAYLQISSLKAEDTAVYYCSNDYLYSLDYWGQGTLVTVSSTREDLKNVFPPEVAVFEPSEAEISHTQKATLVCLATGFYPDHVELSWWVNGKEVHSGVCTDPQPLKEQPALNDSRYCLSSRLRVSATFWQNPRNHFRCQVQFYGLSENDEWTQDRAKPVTQIVSAEAWGRADCGFTSESYQQGVLSATNLSVIGFRILLLKVAGFNLLMTLRLWSS

SEQ ID NO: 14319 - protein, 899 aa, synthetic construct
MALPVTALLLPLALLLHAARPEVQLVESGGGLVQPGGSLRLSCAASGFSFSDFWMSWVRQAPGKGLEWVATISQAGSEKDYVDSVKGRFTISRDNAKKSLYLQMNSLRAEDTAVYYCASGVYSFDYRGQGTLVTVSSGTGGGGSGGGGSGGGGSEFDIQLTQSPSFLSASVGDRVTITCRASQGISTDLNWYQQKPGKAPKLLIYAASNLESGVPSRFSGSGSGTEFTLTISSLQPEDFATYYCQQSYNWPYTFGGGTKVEIKRLEIQNPDPAVYQLRDSKSSDKSVCLFTDFDSQTNVSQSKDSDVYITDKCVLDMRSMDFKSNSAVAWSNKSDFACANAFNNSIIPEDTFFPSPESSCDVKLVEKSFETDTNLNFQILYEILLGKATLYAVLVSALVLMAMVKRKDSRGRAKRSGSGVKQTLNFDLLKLAGDVESNPGPTSMDWIWRILFLVGAATGAHSGPQLQLQESGPGLVKPSETLSLTCTVSGDSISSGDYYWGWIRQPPGKGLEWIGHIYYSGVTYYNPSLKSRVTISVDTSRNQFSLKLSSVTAADTAVYYCTREDSSNWRSRGQGTLVTVSSGSGGGGSGGGGSGGGGSFEEVQLVESGGGLVKPGGSLRLSCAASGFTFSNFEMNWVRQAPGKGLEWVSGISSNGRYINYADSVKGRFTISRDNAKNSLYLQMNSLRAEDTAVYYCARVVDFDQDYNGFDYWGQGTLVTVSSTREDLKNVFPPEVAVFEPSEAEISHTQKATLVCLATGFYPDHVELSWWVNGKEVHSGVCTDPQPLKEQPALNDSRYCLSSRLRVSATFWQNPRNHFRCQVQFYGLSENDEWTQDRAKPVTQIVSAEAWGRADCGFTSESYQQGVLSATNLSVIGFRILLLKVAGFNLLMTLRLWSS

SEQ ID NO: 14320 - protein, 897 aa, synthetic construct
MALPVTALLLPLALLLHAARPEVQLVESGGGLVQPGGSLRLSCAASGFSFSDFWMSWVRQAPGKGLEWVATISQAGSEKDYVDSVKGRFTISRDNAKKSLYLQMNSLRAEDTAVYYCASGVYSFDYRGQGTLVTVSSGTGGGGSGGGGSGGGGSEFDIQLTQSPSFLSASVGDRVTITCSLSLGISTWRDWFPPRLGRGLEPLTYAASTLQSGVPSRFSGSGSGTEFTLTISSLQPEDFATYYCQQLNSYPLTFGGGTKVEIKRLEIQNPDPAVYQLRDSKSSDKSVCLFTDFDSQTNVSQSKDSDVYITDKCVLDMRSMDFKSNSAVAWSNKSDFACANAFNNSIIPEDTFFPSPESSCDVKLVEKSFETDTNLNFQILYEILLGKATLYAVLVSALVLMAMVKRKDSRGRAKRSGSGVKQTLNFDLLKLAGDVESNPGPTSMDWIWRILFLVGAATGAHSGPQLQLQESGPGLVKPSETLSLTCTVSGDSISSGDYYWGWIRQPPGKGLEWIGHIYYSGVTYYNPSLKSRVTISVDTSRNQFSLKLSSVTAADTAVYYCTREDSSNWRSRGQGTLVTVSSGSGGGGSGGGGSGGGGSFEEVQLVESGGGLVKPGGSLRLSCAASGFTFSTYGMSWVRQAPGKGLEWVAYINNGSGYIYYADSVKGRFTISRDNAKNSLYLQMNSLRAEDTAVYYCARGQWWSGGDFDYWGQGTLVTVSSTREDLKNVFPPEVAVFEPSEAEISHTQKATLVCLATGFYPDHVELSWWVNGKEVHSGVCTDPQPLKEQPALNDSRYCLSSRLRVSATFWQNPRNHFRCQVQFYGLSENDEWTQDRAKPVTQIVSAEAWGRADCGFTSESYQQGVLSATNLSVIGFRILLLKVAGFNLLMTLRLWSS

SEQ ID NO: 14321 - protein, 898 aa, synthetic construct
MALPVTALLLPLALLLHAARPEVQLVESGGGLVQPGGSLRLSCAASGFSFSDFWMSWVRQAPGKGLEWVATISQAGSEKDYVDSVKGRFTISRDNAKKSLYLQMNSLRAEDTAVYYCASGVYSFDYRGQGTLVTVSSGTGGGGSGGGGSGGGGSEFEIVLTQSPATLSLSPGERATLSCSASSSVSYMYWYQQKPGQAPRLLIYRTSNLASGIPARFSGSGSGTDFTLTISSLEPEDFAVYYCQQYHSYPTTFGQGTKVEIKRTVLEIQNPDPAVYQLRDSKSSDKSVCLFTDFDSQTNVSQSKDSDVYITDKCVLDMRSMDFKSNSAVAWSNKSDFACANAFNNSIIPEDTFFPSPESSCDVKLVEKSFETDTNLNFQILYEILLGKATLYAVLVSALVLMAMVKRKDSRGRAKRSGSGVKQTLNFDLLKLAGDVESNPGPTSMDWIWRILFLVGAATGAHSGPQLQLQESGPGLVKPSETLSLTCTVSGDSISSGDYYWGWIRQPPGKGLEWIGHIYYSGVTYYNPSLKSRVTISVDTSRNQFSLKLSSVTAADTAVYYCTREDSSNWRSRGQGTLVTVSSGSGGGGSGGGGSGGGGSFEEVQLVESGGGLVQPGGSLRLSCAASGFSFNTYAMNWVRQAPGKGLEWVSHIRSKSNNFATYYADSVKDRFTISRDNAKNSLYLQMNSLRAEDTAVYYCARQGGDFPMDYWGQGTLVTVSSTREDLKNVFPPEVAVFEPSEAEISHTQKATLVCLATGFYPDHVELSWWVNGKEVHSGVCTDPQPLKEQPALNDSRYCLSSRLRVSATFWQNPRNHFRCQVQFYGLSENDEWTQDRAKPVTQIVSAEAWGRADCGFTSESYQQGVLSATNLSVIGFRILLLKVAGFNLLMTLRLWSS

SEQ ID NO: 14322 - protein, 894 aa, synthetic construct
MALPVTALLLPLALLLHAARPEVQLVESGGGLVQPGGSLRLSCAASGFSFSDFWMSWVRQAPGKGLEWVATISQAGSEKDYVDSVKGRFTISRDNAKKSLYLQMNSLRAEDTAVYYCASGVYSFDYRGQGTLVTVSSGTGGGGSGGGGSGGGGSEFDVVMTQSPSSLSASVGDRVTITCKASEDIYIRLAWYQQKPGKAPKLLIYAATSLETGVPSRFSGSGSGTDFTLTISSLQPEDFATYYCQQYWTTPWTFGGGTKVEIKLEIQNPDPAVYQLRDSKSSDKSVCLFTDFDSQTNVSQSKDSDVYITDKCVLDMRSMDFKSNSAVAWSNKSDFACANAFNNSIIPEDTFFPSPESSCDVKLVEKSFETDTNLNFQILYEILLGKATLYAVLVSALVLMAMVKRKDSRGRAKRSGSGVKQTLNFDLLKLAGDVESNPGPTSMDWIWRILFLVGAATGAHSGPQLQLQESGPGLVKPSETLSLTCTVSGDSISSGDYYWGWIRQPPGKGLEWIGHIYYSGVTYYNPSLKSRVTISVDTSRNQFSLKLSSVTAADTAVYYCTREDSSNWRSRGQGTLVTVSSGSGGGGSGGGGSGGGGSFEQVQLQESGPGLVKPSQTLSLTCTVSGYSITIDYTWNWIRQPPGKGLEWIGYITYSGSTDYNPSLKSRVLISVDTSKNQVSLKLSSVTAADTAVYYCARLGRRYALDYWGQGTTVTVSSTREDLKNVFPPEVAVFEPSEAEISHTQKATLVCLATGFYPDHVELSWWVNGKEVHSGVCTDPQPLKEQPALNDSRYCLSSRLRVSATFWQNPRNHFRCQVQFYGLSENDEWTQDRAKPVTQIVSAEAWGRADCGFTSESYQQGVLSATNLSVIGFRILLLKVAGFNLLMTLRLWSS

SEQ ID NO: 14323 - protein, 898 aa, synthetic construct
MALPVTALLLPLALLLHAARPEVQLVESGGGLVQPGGSLRLSCAASGFSFSDFWMSWVRQAPGKGLEWVATISQAGSEKDYVDSVKGRFTISRDNAKKSLYLQMNSLRAEDTAVYYCASGVYSFDYRGQGTLVTVSSGTGGGGSGGGGSGGGGSEFDIQMTQTTSSLSASLGDRVTISCRASQDISNYLNWYQQKPDGTVKLLIYYTSILHSGVPSRFSGSGSGTDYSLTISNLEQEDFATYFCQQGNTLPWTFGGGTKLEIKALEIQNPDPAVYQLRDSKSSDKSVCLFTDFDSQTNVSQSKDSDVYITDKCVLDMRSMDFKSNSAVAWSNKSDFACANAFNNSIIPEDTFFPSPESSCDVKLVEKSFETDTNLNFQILYEILLGKATLYAVLVSALVLMAMVKRKDSRGRAKRSGSGVKQTLNFDLLKLAGDVESNPGPTSMDWIWRILFLVGAATGAHSGPQLQLQESGPGLVKPSETLSLTCTVSGDSISSGDYYWGWIRQPPGKGLEWIGHIYYSGVTYYNPSLKSRVTISVDTSRNQFSLKLSSVTAADTAVYYCTREDSSNWRSRGQGTLVTVSSGSGGGGSGGGGSGGGGSFEVQLVESGGGLVKPGGSLKLSCAASGFAFSIYDMSWVRQTPEKRLEWVAYISSGGGTYYPDTVKGRFTISRDNAKNTLYLQMSSLKSEDTAMYYCARHSGYGTHWGVLFAYWGQGTLVTVSATREDLKNVFPPEVAVFEPSEAEISHTQKATLVCLATGFYPDHVELSWWVNGKEVHSGVCTDPQPLKEQPALNDSRYCLSSRLRVSATFWQNPRNHFRCQVQFYGLSENDEWTQDRAKPVTQIVSAEAWGRADCGFTSESYQQGVLSATNLSVIGFRILLLKVAGFNLLMTLRLWSS

SEQ ID NO: 14324 - protein, 909 aa, synthetic construct
MALPVTALLLPLALLLHAARPEVQLVESGGGLVQPGGSLRLSCAASGFSFSDFWMSWVRQAPGKGLEWVATISQAGSEKDYVDSVKGRFTISRDNAKKSLYLQMNSLRAEDTAVYYCASGVYSFDYRGQGTLVTVSSGTGGGGSGGGGSGGGGSEFDIVMTQSPDSLAVSLGERATINCKSSQSLLYRSNQKNYLAWYQQKPGQPPKLLIYWASTRESGVPDRFSGSGSGTDFTLTISSLQAEDVAVYYCQQYYNYPRTFGQGTKVEIKRTVLEIQNPDPAVYQLRDSKSSDKSVCLFTDFDSQTNVSQSKDSDVYITDKCVLDMRSMDFKSNSAVAWSNKSDFACANAFNNSIIPEDTFFPSPESSCDVKLVEKSFETDTNLNFQILYEILLGKATLYAVLVSALVLMAMVKRKDSRGRAKRSGSGVKQTLNFDLLKLAGDVESNPGPTSMDWIWRILFLVGAATGAHSGPQLQLQESGPGLVKPSETLSLTCTVSGDSISSGDYYWGWIRQPPGKGLEWIGHIYYSGVTYYNPSLKSRVTISVDTSRNQFSLKLSSVTAADTAVYYCTREDSSNWRSRGQGTLVTVSSGSGGGGSGGGGSGGGGSFEEVQLLESGGGLVQPGGSLRLSCAASGYSITSDYAWNWVRQAPGKGLEWVSYISNSGSTSYNPSLKSRFTISRDNSKNTLYLQMNSLRAEDTAVYYCAKERNYDYDDYYYAMDYWGQGTLVTVSSTREDLKNVFPPEVAVFEPSEAEISHTQKATLVCLATGFYPDHVELSWWVNGKEVHSGVCTDPQPLKEQPALNDSRYCLSSRLRVSATFWQNPRNHFRCQVQFYGLSENDEWTQDRAKPVTQIVSAEAWGRADCGFTSESYQQGVLSATNLSVIGFRILLLKVAGFNLLMTLRLWSS

SEQ ID NO: 14325 - protein, 902 aa, synthetic construct
MALPVTALLLPLALLLHAARPEVQLVESGGGLVQPGGSLRLSCAASGFSFSDFWMSWVRQAPGKGLEWVATISQAGSEKDYVDSVKGRFTISRDNAKKSLYLQMNSLRAEDTAVYYCASGVYSFDYRGQGTLVTVSSGTGGGGSGGGGSGGGGSEFDVVMTQSPLSLPVTLGQPASISCRSSQSLLHSSGNTYLEWYQQRPGQSPRPLIYKISTRFSGVPDRFSGSGSGTDFTLKISRVEAEDVGVYYCFQGSHVPYTFGGGTKVEIKRLEIQNPDPAVYQLRDSKSSDKSVCLFTDFDSQTNVSQSKDSDVYITDKCVLDMRSMDFKSNSAVAWSNKSDFACANAFNNSIIPEDTFFPSPESSCDVKLVEKSFETDTNLNFQILYEILLGKATLYAVLVSALVLMAMVKRKDSRGRAKRSGSGVKQTLNFDLLKLAGDVESNPGPTSMDWIWRILFLVGAATGAHSGPQLQLQESGPGLVKPSETLSLTCTVSGDSISSGDYYWGWIRQPPGKGLEWIGHIYYSGVTYYNPSLKSRVTISVDTSRNQFSLKLSSVTAADTAVYYCTREDSSNWRSRGQGTLVTVSSGSGGGGSGGGGSGGGGSFEQVQLVQSGAEVKKPGASVKVSCKASGLTIEDYYMHWVRQAPGQGLEWMGWIDPENGDTEYGPKFQGRVTMTRDTSINTAYMELSRLRSDDTAVYYCAVHNAHYGTWFAYWGQGTLVTVSSTREDLKNVFPPEVAVFEPSEAEISHTQKATLVCLATGFYPDHVELSWWVNGKEVHSGVCTDPQPLKEQPALNDSRYCLSSRLRVSATFWQNPRNHFRCQVQFYGLSENDEWTQDRAKPVTQIVSAEAWGRADCGFTSESYQQGVLSATNLSVIGFRILLLKVAGFNLLMTLRLWSS

SEQ ID NO: 14326 - protein, 894 aa, synthetic construct
MALPVTALLLPLALLLHAARPEVQLVESGGGLVQPGGSLRLSCAASGFSFSDFWMSWVRQAPGKGLEWVATISQAGSEKDYVDSVKGRFTISRDNAKKSLYLQMNSLRAEDTAVYYCASGVYSFDYRGQGTLVTVSSGTGGGGSGGGGSGGGGSEFDIQMTQSPSSLSASVGDRVTITCRASENIYSNLAWYQQKPGKAPKLLIYAATNLADGVPSRFSGSGSGTDFTLTISSLQPEDFATYYCQHFWGTPTFGQGTKVEIKRTVLEIQNPDPAVYQLRDSKSSDKSVCLFTDFDSQTNVSQSKDSDVYITDKCVLDMRSMDFKSNSAVAWSNKSDFACANAFNNSIIPEDTFFPSPESSCDVKLVEKSFETDTNLNFQILYEILLGKATLYAVLVSALVLMAMVKRKDSRGRAKRSGSGVKQTLNFDLLKLAGDVESNPGPTSMDWIWRILFLVGAATGAHSGPQLQLQESGPGLVKPSETLSLTCTVSGDSISSGDYYWGWIRQPPGKGLEWIGHIYYSGVTYYNPSLKSRVTISVDTSRNQFSLKLSSVTAADTAVYYCTREDSSNWRSRGQGTLVTVSSGSGGGGSGGGGSGGGGSFEEVQLVESGGGLVQPGGSLRLSCAASGFSLTNYGVHWVRQAPGKGLEWVSVIWSGGSTDYNAAFISRFTISADTSKNTAYLQMNSLRAEDTAVYYCARELIHAMDNWGQGTLVTVSSTREDLKNVFPPEVAVFEPSEAEISHTQKATLVCLATGFYPDHVELSWWVNGKEVHSGVCTDPQPLKEQPALNDSRYCLSSRLRVSATFWQNPRNHFRCQVQFYGLSENDEWTQDRAKPVTQIVSAEAWGRADCGFTSESYQQGVLSATNLSVIGFRILLLKVAGFNLLMTLRLWSS

SEQ ID NO: 14327 - protein, 901 aa, synthetic construct
MALPVTALLLPLALLLHAARPEVQLVESGGGLVQPGGSLRLSCAASGFSFSDFWMSWVRQAPGKGLEWVATISQAGSEKDYVDSVKGRFTISRDNAKKSLYLQMNSLRAEDTAVYYCASGVYSFDYRGQGTLVTVSSGTGGGGSGGGGSGGGGSEFDFVMTQSPLSLPVTPGEPASISCRSSQSIVHSNGNTYLEWYLQKPGQSPQLLIYKVSNRFSGVPDRFSGSGSGTDFTLKISRVEAEDVGVYYCFQGSHVPLTFGQGTKLEIKRLEIQNPDPAVYQLRDSKSSDKSVCLFTDFDSQTNVSQSKDSDVYITDKCVLDMRSMDFKSNSAVAWSNKSDFACANAFNNSIIPEDTFFPSPESSCDVKLVEKSFETDTNLNFQILYEILLGKATLYAVLVSALVLMAMVKRKDSRGRAKRSGSGVKQTLNFDLLKLAGDVESNPGPTSMDWIWRILFLVGAATGAHSGPQLQLQESGPGLVKPSETLSLTCTVSGDSISSGDYYWGWIRQPPGKGLEWIGHIYYSGVTYYNPSLKSRVTISVDTSRNQFSLKLSSVTAADTAVYYCTREDSSNWRSRGQGTLVTVSSGSGGGGSGGGGSGGGGSFEEVQLVESGAEVKKPGASVKVSCKASGYTFTSYWIHWVRQAPGQGLEWMGENDPSNGRTNYNEKFKNRVTLTVDTSISTAYMELSRLRSDDTAVYYCARGPNYFYSMDYWGQGTMVTVSSTREDLKNVFPPEVAVFEPSEAEISHTQKATLVCLATGFYPDHVELSWWVNGKEVHSGVCTDPQPLKEQPALNDSRYCLSSRLRVSATFWQNPRNHFRCQVQFYGLSENDEWTQDRAKPVTQIVSAEAWGRADCGFTSESYQQGVLSATNLSVIGFRILLLKVAGFNLLMTLRLWSS

SEQ ID NO: 14328 - protein, 894 aa, synthetic construct
MALPVTALLLPLALLLHAARPEVQLVESGGGLVQPGGSLRLSCAASGFSFSDFWMSWVRQAPGKGLEWVATISQAGSEKDYVDSVKGRFTISRDNAKKSLYLQMNSLRAEDTAVYYCASGVYSFDYRGQGTLVTVSSGTGGGGSGGGGSGGGGSEFDIQLTQSPSFLSASVGDRVTITCSARSSISFMYWYQQKPGKAPKLLIYDTSNLASGVPSRFSGSGSGTEFTLTISSLEAEDAATYYCQQWSSYPLTFGQGTKLEIKLEIQNPDPAVYQLRDSKSSDKSVCLFTDFDSQTNVSQSKDSDVYITDKCVLDMRSMDFKSNSAVAWSNKSDFACANAFNNSIIPEDTFFPSPESSCDVKLVEKSFETDTNLNFQILYEILLGKATLYAVLVSALVLMAMVKRKDSRGRAKRSGSGVKQTLNFDLLKLAGDVESNPGPTSMDWIWRILFLVGAATGAHSGPQLQLQESGPGLVKPSETLSLTCTVSGDSISSGDYYWGWIRQPPGKGLEWIGHIYYSGVTYYNPSLKSRVTISVDTSRNQFSLKLSSVTAADTAVYYCTREDSSNWRSRGQGTLVTVSSGSGGGGSGGGGSGGGGSFEQVQLVQSGAEVKKPGASVKVSCKASGYTFTGSWMNWVRQAPGQGLEWIGRIYPGDGETNYNGKFKDRVTITADKSTSTAYMELSSLRSEDTAVYYCARIYGNNVYFDVWGQGTTVTVSSTREDLKNVFPPEVAVFEPSEAEISHTQKATLVCLATGFYPDHVELSWWVNGKEVHSGVCTDPQPLKEQPALNDSRYCLSSRLRVSATFWQNPRNHFRCQVQFYGLSENDEWTQDRAKPVTQIVSAEAWGRADCGFTSESYQQGVLSATNLSVIGFRILLLKVAGFNLLMTLRLWSS

SEQ ID NO: 14329 - protein, 902 aa, synthetic construct
MALPVTALLLPLALLLHAARPEVQLVESGGGLVQPGGSLRLSCAASGFSFSDFWMSWVRQAPGKGLEWVATISQAGSEKDYVDSVKGRFTISRDNAKKSLYLQMNSLRAEDTAVYYCASGVYSFDYRGQGTLVTVSSGTGGGGSGGGGSGGGGSEFQLVLTQSPSASASLGSSVKLTCTLSSGHKTDTIDWYQQQPGKAPRYLMKLEGSGSYNKGSGVPDRFSGSSSGADWYLTISSLQSEDEADYYCGTDYPGNYLFGGGTQLTVLGLEIQNPDPAVYQLRDSKSSDKSVCLFTDFDSQTNVSQSKDSDVYITDKCVLDMRSMDFKSNSAVAWSNKSDFACANAFNNSIIPEDTFFPSPESSCDVKLVEKSFETDTNLNFQILYEILLGKATLYAVLVSALVLMAMVKRKDSRGRAKRSGSGVKQTLNFDLLKLAGDVESNPGPTSMDWIWRILFLVGAATGAHSGPQLQLQESGPGLVKPSETLSLTCTVSGDSISSGDYYWGWIRQPPGKGLEWIGHIYYSGVTYYNPSLKSRVTISVDTSRNQFSLKLSSVTAADTAVYYCTREDSSNWRSRGQGTLVTVSSGSGGGGSGGGGSGGGGSFEQEQLVESGGGLVQPGGSLRLSCAASGFTFSDYYMSWIRQAPGKGLEWVATIYPSSGKTYYADSAKGRLTISSDNAKDSLYLQMNSLRAEDTAVYYCTRDSYADDAALFDIWGQGTTVTVSSTREDLKNVFPPEVAVFEPSEAEISHTQKATLVCLATGFYPDHVELSWWVNGKEVHSGVCTDPQPLKEQPALNDSRYCLSSRLRVSATFWQNPRNHFRCQVQFYGLSENDEWTQDRAKPVTQIVSAEAWGRADCGFTSESYQQGVLSATNLSVIGFRILLLKVAGFNLLMTLRLWSS

SEQ ID NO: 14330 - protein, 894 aa, synthetic construct; identical to SEQ ID NO: 14326

SEQ ID NO: 14331 - protein, 901 aa, synthetic construct; identical to SEQ ID NO: 14327

SEQ ID NO: 14332 - protein, 894 aa, synthetic construct; identical to SEQ ID NO: 14328

SEQ ID NO: 14333 - protein, 902 aa, synthetic construct; identical to SEQ ID NO: 14329

SEQ ID NO: 14334 - protein, 901 aa, synthetic construct
MALPVTALLLPLALLLHAARPEVQLVESGGGLVQPGGSLRLSCAASGFSFSDFWMSWVRQAPGKGLEWVATISQAGSEKDYVDSVKGRFTISRDNAKKSLYLQMNSLRAEDTAVYYCASGVYSFDYRGQGTLVTVSSGTGGGGSGGGGSGGGGSEFDIQLTQSPSSLSASVGDRVSFTCQASQDINNFLNWYQQKPGKAPKLLIYDASNLETGVPSRFSGSGSGTDFTFTISSLQPEDIATYYCQQYGNLPFTFGGGTKVEIKRLEIQNPDPAVYQLRDSKSSDKSVCLFTDFDSQTNVSQSKDSDVYITDKCVLDMRSMDFKSNSAVAWSNKSDFACANAFNNSIIPEDTFFPSPESSCDVKLVEKSFETDTNLNFQILYEILLGKATLYAVLVSALVLMAMVKRKDSRGRAKRSGSGVKQTLNFDLLKLAGDVESNPGPTSMDWIWRILFLVGAATGAHSGPQLQLQESGPGLVKPSETLSLTCTVSGDSISSGDYYWGWIRQPPGKGLEWIGHIYYSGVTYYNPSLKSRVTISVDTSRNQFSLKLSSVTAADTAVYYCTREDSSNWRSRGQGTLVTVSSGSGGGGSGGGGSGGGGSFEQVQLQESGPGLVKPSQTLSLTCTVSGGSISSGGFYWSWIRQHPGKGLEWIGYIHHSGSTHYNPSLKSRVTISIDTSKNLFSLRLSSVTAADTAVYYCASLVYCGGDCYSGFDYWGQGTLVTVSSTREDLKNVFPPEVAVFEPSEAEISHTQKATLVCLATGFYPDHVELSWWVNGKEVHSGVCTDPQPLKEQPALNDSRYCLSSRLRVSATFWQNPRNHFRCQVQFYGLSENDEWTQDRAKPVTQIVSAEAWGRADCGFTSESYQQGVLSATNLSVIGFRILLLKVAGFNLLMTLRLWSS

SEQ ID NO: 14335 - protein, 897 aa, synthetic construct
MALPVTALLLPLALLLHAARPEVQLVESGGGLVQPGGSLRLSCAASGFSFSDFWMSWVRQAPGKGLEWVATISQAGSEKDYVDSVKGRFTISRDNAKKSLYLQMNSLRAEDTAVYYCASGVYSFDYRGQGTLVTVSSGTGGGGSGGGGSGGGGSEFDIQMTQSPSSLSASVGDRVTITCKSSQSVLYSSNQKNYLAWFQQKPGKAPKLLIYWASTRESGVPSRFSGSGSGTDFTLTISSLQPEDFATYFCHQYLSSYTFGQGTKVEIKRLEIQNPDPAVYQLRDSKSSDKSVCLFTDFDSQTNVSQSKDSDVYITDKCVLDMRSMDFKSNSAVAWSNKSDFACANAFNNSIIPEDTFFPSPESSCDVKLVEKSFETDTNLNFQILYEILLGKATLYAVLVSALVLMAMVKRKDSRGRAKRSGSGVKQTLNFDLLKLAGDVESNPGPTSMDWIWRILFLVGAATGAHSGPQLQLQESGPGLVKPSETLSLTCTVSGDSISSGDYYWGWIRQPPGKGLEWIGHIYYSGVTYYNPSLKSRVTISVDTSRNQFSLKLSSVTAADTAVYYCTREDSSNWRSRGQGTLVTVSSGSGGGGSGGGGSGGGGSFEEVQLVESGGGLVQPGGSLRLSCAASGYTFTTYWMHWVRQAPGKGLEWVGYIRPSTGYTEYNQKFKDRFTISADTSKNTAYLQMNSLRAEDTAVYYCARSRWLLDYWGQGTLVTVSTREDLKNVFPPEVAVFEPSEAEISHTQKATLVCLATGFYPDHVELSWWVNGKEVHSGVCTDPQPLKEQPALNDSRYCLSSRLRVSATFWQNPRNHFRCQVQFYGLSENDEWTQDRAKPVTQIVSAEAWGRADCGFTSESYQQGVLSATNLSVIGFRILLLKVAGFNLLMTLRLWSS

SEQ ID NO: 14336 - protein, 894 aa, synthetic construct
MALPVTALLLPLALLLHAARPEVQLVESGGGLVQPGGSLRLSCAASGFSFSDFWMSWVRQAPGKGLEWVATISQAGSEKDYVDSVKGRFTISRDNAKKSLYLQMNSLRAEDTAVYYCASGVYSFDYRGQGTLVTVSSGTGGGGSGGGGSGGGGSEFDIQMTQSPSSLSASVGDRVTITCRASQDISNYLNWYQQKPGKAPKLLIYYTSRLHSGVPSRFSGSGSGTDFTLTISSLQPEDFATYYCQQGNTLPYTFGQGTKVEIKRLEIQNPDPAVYQLRDSKSSDKSVCLFTDFDSQTNVSQSKDSDVYITDKCVLDMRSMDFKSNSAVAWSNKSDFACANAFNNSIIPEDTFFPSPESSCDVKLVEKSFETDTNLNFQILYEILLGKATLYAVLVSALVLMAMVKRKDSRGRAKRSGSGVKQTLNFDLLKLAGDVESNPGPTSMDWIWRILFLVGAATGAHSGPQLQLQESGPGLVKPSETLSLTCTVSGDSISSGDYYWGWIRQPPGKGLEWIGHIYYSGVTYYNPSLKSRVTISVDTSRNQFSLKLSSVTAADTAVYYCTREDSSNWRSRGQGTLVTVSSGSGGGGSGGGGSGGGGSFEEVQLVESGGGLVQPGGSLRLSCAASGFTFSDYFMSWVRQAPGKGLEWVATISNGGTYTYYPDSVKGRFTISRDNSKNTLYLQMNSLRAEDTAVYYCARFDGYIFDYWGQGTLVTVSSTREDLKNVFPPEVAVFEPSEAEISHTQKATLVCLATGFYPDHVELSWWVNGKEVHSGVCTDPQPLKEQPALNDSRYCLSSRLRVSATFWQNPRNHFRCQVQFYGLSENDEWTQDRAKPVTQIVSAEAWGRADCGFTSESYQQGVLSATNLSVIGFRILLLKVAGFNLLMTLRLWSS

SEQ ID NO: 14337 - protein, 692 aa, synthetic construct
MALPVTALLLPLALLLHAARPDIQMTQSPSSLSASVGDRVTITCKASDHINNWLAWYQQKPGQAPKLLIYGATTLETGVPSRFSGSGSGTDYTLTISSLQPEDFATYYCQQSWNTPWTFGQGTKLEIKRLEDLKNVFPPEVAVFEPSEAEISHTQKATLVCLATGFYPDHVELSWWVNGKEVHSGVCTDPQPLKEQPALNDSRYCLSSRLRVSATFWQNPRNHFRCQVQFYGLSENDEWTQDRAKPVTQIVSAEAWGRADCGFTSESYQQGVLSATNLSVIGFRILLLKVAGFNLLMTLRLWSSRAKRSGSGATNFSLLKQAGDVEENPGPTSMDWIWRILFLVGAATGAHSGPMDPDLEIRAAFLRQRNTALRTEVAELEQEVQRLENEVSQYETRYGPLGGGKGSGGGGSGGGGSGGGGSFEQVQLQQPGAELVKPGASVKMSCKASGYAFSSYWINWMKQKPGQGLEWIGQIYPGDGDTNYNGKFKGRATLTADTSSSTAYMQLSSLTSEDSAVYFCARSITTVVGCAMDYWGQGTSVTVSSTRIQNPDPAVYQLRDSKSSDKSVCLFTDFDSQTNVSQSKDSDVYITDKCVLDMRSMDFKSNSAVAWSNKSDFACANAFNNSIIPEDTFFPSPESSCDVKLVEKSFETDTNLNFQILYEILLGKATLYAVLVSALVLMAMVKRKDSRG

SEQ ID NO: 14338 - protein, 696 aa, synthetic construct
MALPVTALLLPLALLLHAARPDIQMTQSPSSLSASVGDRVTITCKASDHINNWLAWYQQKPGQAPKLLIYGATTLETGVPSRFSGSGSGTDYTLTISSLQPEDFATYYCQQSWNTPWTFGQGTKLEIKRLEIQNPDPAVYQLRDSKSSDKSVCLFTDFDSQTNVSQSKDSDVYITDKCVLDMRSMDFKSNSAVAWSNKSDFACANAFNNSIIPEDTFFPSPESSCDVKLVEKSFETDTNLNFQILYEILLGKATLYAVLVSALVLMAMVKRKDSRGRAKRSGSGVKQTLNFDLLKLAGDVESNPGPTSMDWIWRILFLVGAATGAHSGPMDPDLEIRAAFLRQRNTALRTEVAELEQEVQRLENEVSQYETRYGPLGGGKGSGGGGSGGGGSGGGGSFEQVQLQQPGAELVKPGASVKMSCKASGYAFSSYWINWMKQKPGQGLEWIGQIYPGDGDTNYNGKFKGRATLTADTSSSTAYMQLSSLTSEDSAVYFCARSITTVVGCAMDYWGQGTSVTVSSTREDLKNVFPPEVAVFEPSEAEISHTQKATLVCLATGFYPDHVELSWWVNGKEVHSGVCTDPQPLKEQPALNDSRYCLSSRLRVSATFWQNPRNHFRCQVQFYGLSENDEWTQDRAKPVTQIVSAEAWGRADCGFTSESYQQGVLSATNLSVIGFRILLLKVAGFNLLMTLRLWSS

SEQ ID NO: 14339 - protein, 669 aa, synthetic construct
MALPVTALLLPLALLLHAARPDIQMTQSPSSLSASVGDRVTITCKASDHINNWLAWYQQKPGQAPKLLIYGATTLETGVPSRFSGSGSGTDYTLTISSLQPEDFATYYCQQSWNTPWTFGQGTKLEIKRLEDLKNVFPPEVAVFEPSEAEISHTQKATLVCLATGFYPDHVELSWWVNGKEVHSGVCTDPQPLKEQPALNDSRYCLSSRLRVSATFWQNPRNHFRCQVQFYGLSENDEWTQDRAKPVTQIVSAEAWGRADCGFTSESYQQGVLSATNLSVIGFRILLLKVAGFNLLMTLRLWSSRAKRSGSGATNFSLLKQAGDVEENPGPTSMDWIWRILFLVGAATGAHSGPEVAALEKEVAALEKEVAALEKEVAALEKGSGGGGSGGGGSGGGGSFEQVQLQQPGAELVKPGASVKMSCKASGYAFSSYWINWMKQKPGQGLEWIGQIYPGDGDTNYNGKFKGRATLTADTSSSTAYMQLSSLTSEDSAVYFCARSITTVVGCAMDYWGQGTSVTVSSTRIQNPDPAVYQLRDSKSSDKSVCLFTDFDSQTNVSQSKDSDVYITDKCVLDMRSMDFKSNSAVAWSNKSDFACANAFNNSIIPEDTFFPSPESSCDVKLVEKSFETDTNLNFQILYEILLGKATLYAVLVSALVLMAMVKRKDSRG

SEQ ID NO: 14340 - protein, 673 aa, synthetic construct
MALPVTALLLPLALLLHAARPDIQMTQSPSSLSASVGDRVTITCKASDHINNWLAWYQQKPGQAPKLLIYGATTLETGVPSRFSGSGSGTDYTLTISSLQPEDFATYYCQQSWNTPWTFGQGTKLEIKRLEIQNPDPAVYQLRDSKSSDKSVCLFTDFDSQTNVSQSKDSDVYITDKCVLDMRSMDFKSNSAVAWSNKSDFACANAFNNSIIPEDTFFPSPESSCDVKLVEKSFETDTNLNFQILYEILLGKATLYAVLVSALVLMAMVKRKDSRGRAKRSGSGVKQTLNFDLLKLAGDVESNPGPTSMDWIWRILFLVGAATGAHSGPEVAALEKEVAALEKEVAALEKEVAALEKGSGGGGSGGGGSGGGGSFEQVQLQQPGAELVKPGASVKMSCKASGYAFSSYWINWMKQKPGQGLEWIGQIYPGDGDTNYNGKFKGRATLTADTSSSTAYMQLSSLTSEDSAVYFCARSITTVVGCAMDYWGQGTSVTVSSTREDLKNVFPPEVAVFEPSEAEISHTQKATLVCLATGFYPDHVELSWWVNGKEVHSGVCTDPQPLKEQPALNDSRYCLSSRLRVSATFWQNPRNHFRCQVQFYGLSENDEWTQDRAKPVTQIVSAEAWGRADCGFTSESYQQGVLSATNLSVIGFRILLLKVAGFNLLMTLRLWSS

SEQ ID NO: 14341 - protein, 669 aa, synthetic construct; identical to SEQ ID NO: 14339

SEQ ID NO: 14342 - protein, 673 aa, synthetic construct; identical to SEQ ID NO: 14340

SEQ ID NO: 14343 - protein, 759 aa, synthetic construct
MALPVTALLLPLALLLHAARPDIQMTQSPSSLSASVGDRVTITCKASDHINNWLAWYQQKPGQAPKLLIYGATTLETGVPSRFSGSGSGTDYTLTISSLQPEDFATYYCQQSWNTPWTFGQGTKLEIKRLEDLKNVFPPEVAVFEPSEAEISHTQKATLVCLATGFYPDHVELSWWVNGKEVHSGVCTDPQPLKEQPALNDSRYCLSSRLRVSATFWQNPRNHFRCQVQFYGLSENDEWTQDRAKPVTQIVSAEAWGRADCGFTSESYQQGVLSATNLSVIGFRILLLKVAGFNLLMTLRLWSSRAKRSGSGATNFSLLKQAGDVEENPGPTSMDWIWRILFLVGAATGAHSGPQVQLQESGGGLAQAGGSLRLSCAASGRTFSMGWFRQAPGKEREFVAAITYSGGSPYYASSVRGRFTISRDNAKNTVYLQMNSLKPEDTAVYYCAANPTYGSDWNAENWGQGTQVTVSSGSGGGGSGGGGSGGGGSFEQVQLQQPGAELVKPGASVKMSCKASGYAFSSYWINWMKQKPGQGLEWIGQIYPGDGDTNYNGKFKGRATLTADTSSSTAYMQLSSLTSEDSAVYFCARSITTVVGCAMDYWGQGTSVTVSSTRIQNPDPAVYQLRDSKSSDKSVCLFTDFDSQTNVSQSKDSDVYITDKCVLDMRSMDFKSNSAVAWSNKSDFACANAFNNSIIPEDTFFPSPESSCDVKLVEKSFETDTNLNFQILYEILLGKATLYAVLVSALVLMAMVKRKDSRG

SEQ ID NO: 14344 - protein, 763 aa, synthetic construct
MALPVTALLLPLALLLHAARPDIQMTQSPSSLSASVGDRVTITCKASDHINNWLAWYQQKPGQAPKLLIYGATTLETGVPSRFSGSGSGTDYTLTISSLQPEDFATYYCQQSWNTPWTFGQGTKLEIKRLEIQNPDPAVYQLRDSKSSDKSVCLFTDFDSQTNVSQSKDSDVYITDKCVLDMRSMDFKSNSAVAWSNKSDFACANAFNNSIIPEDTFFPSPESSCDVKLVEKSFETDTNLNFQILYEILLGKATLYAVLVSALVLMAMVKRKDSRGRAKRSGSGVKQTLNFDLLKLAGDVESNPGPTSMDWIWRILFLVGAATGAHSGPQVQLQESGGGLAQAGGSLRLSCAASGRTFSMGWFRQAPGKEREFVAAITYSGGSPYYASSVRGRFTISRDNAKNTVYLQMNSLKPEDTAVYYCAANPTYGSDWNAENWGQGTQVTVSSGSGGGGSGGGGSGGGGSFEQVQLQQPGAELVKPGASVKMSCKASGYAFSSYWINWMKQKPGQGLEWIGQIYPGDGDTNYNGKFKGRATLTADTSSSTAYMQLSSLTSEDSAVYFCARSITTVVGCAMDYWGQGTSVTVSSTREDLKNVFPPEVAVFEPSEAEISHTQKATLVCLATGFYPDHVELSWWVNGKEVHSGVCTDPQPLKEQPALNDSRYCLSSRLRVSATFWQNPRNHFRCQVQFYGLSENDEWTQDRAKPVTQIVSAEAWGRADCGFTSESYQQGVLSATNLSVIGFRILLLKVAGFNLLMTLRLWSS

SEQ ID NO: 14345 - protein, 765 aa, synthetic construct
MALPVTALLLPLALLLHAARPEVQLVESGGSLVQPGGSLRLSCAASGFTFDDYAMSWVRQVPGKGLEWVSSINWSGTHTDYADSVKGRFTISRNNANNTLYLQMNSLKSEDTAVYYCAKNWRDAGTTWFEKSGSAGQGTQVTVSSGTGGGGSGGGGSGGGGSEFDIQMTQSPSSLSASVGDRVTITCKASDHINNWLAWYQQKPGQAPKLLIYGATTLETGVPSRFSGSGSGTDYTLTISSLQPEDFATYYCQQSWNTPWTFGQGTKLEIKRLEDLKNVFPPEVAVFEPSEAEISHTQKATLVCLATGFYPDHVELSWWVNGKEVHSGVCTDPQPLKEQPALNDSRYCLSSRLRVSATFWQNPRNHFRCQVQFYGLSENDEWTQDRAKPVTQIVSAEAWGRADCGFTSESYQQGVLSATNLSVIGFRILLLKVAGFNLLMTLRLWSSRAKRSGSGATNFSLLKQAGDVEENPGPTSMDWIWRILFLVGAATGAHSFEQVQLQQPGAELVKPGASVKMSCKASGYAFSSYWINWMKQKPGQGLEWIGQIYPGDGDTNYNGKFKGRATLTADTSSSTAYMQLSSLTSEDSAVYFCARSITTVVGCAMDYWGQGTSVTVSSTRIQNPDPAVYQLRDSKSSDKSVCLFTDFDSQTNVSQSKDSDVYITDKCVLDMRSMDFKSNSAVAWSNKSDFACANAFNNSIIPEDTFFPSPESSCDVKLVEKSFETDTNLNFQILYEILLGKATLYAVLVSALVLMAMVKRKDSRG

SEQ ID NO: 14346 - protein, 769 aa, synthetic construct
MALPVTALLLPLALLLHAARPEVQLVESGGSLVQPGGSLRLSCAASGFTFDDYAMSWVRQVPGKGLEWVSSINWSGTHTDYADSVKGRFTISRNNANNTLYLQMNSLKSEDTAVYYCAKNWRDAGTTWFEKSGSAGQGTQVTVSSGTGGGGSGGGGSGGGGSEFDIQMTQSPSSLSASVGDRVTITCKASDHINNWLAWYQQKPGQAPKLLIYGATTLETGVPSRFSGSGSGTDYTLTISSLQPEDFATYYCQQSWNTPWTFGQGTKLEIKRLEIQNPDPAVYQLRDSKSSDKSVCLFTDFDSQTNVSQSKDSDVYITDKCVLDMRSMDFKSNSAVAWSNKSDFACANAFNNSIIPEDTFFPSPESSCDVKLVEKSFETDTNLNFQILYEILLGKATLYAVLVSALVLMAMVKRKDSRGRAKRSGSGVKQTLNFDLLKLAGDVESNPGPTSMDWIWRILFLVGAATGAHSFEQVQLQQPGAELVKPGASVKMSCKASGYAFSSYWINWMKQKPGQGLEWIGQIYPGDGDTNYNGKFKGRATLTADTSSSTAYMQLSSLTSEDSAVYFCARSITTVVGCAMDYWGQGTSVTVSSTREDLKNVFPPEVAVFEPSEAEISHTQKATLVCLATGFYPDHVELSWWVNGKEVHSGVCTDPQPLKEQPALNDSRYCLSSRLRVSATFWQNPRNHFRCQVQFYGLSENDEWTQDRAKPVTQIVSAEAWGRADCGFTSESYQQGVLSATNLSVIGFRILLLKVAGFNLLMTLRLWSS

SEQ ID NO: 14347 - protein, 763 aa, synthetic construct
MALPVTALLLPLALLLHAARPEVQLLESGGGLVQPGGSLRLSCAASGFIFSSYAMSWVRQAPGKGQEWVSGVSGTGVNTYYADSVKGRFTISRDNSKNTLYLQMNSLRAEDTAVYYCASGKGWDSGSWYEDYRGQGTLVTVSSGTGGGGSGGGGSGGGGSEFDIQMTQSPSSLSASVGDRVTITCKASDHINNWLAWYQQKPGQAPKLLIYGATTLETGVPSRFSGSGSGTDYTLTISSLQPEDFATYYCQQSWNTPWTFGQGTKLEIKRLEDLKNVFPPEVAVFEPSEAEISHTQKATLVCLATGFYPDHVELSWWVNGKEVHSGVCTDPQPLKEQPALNDSRYCLSSRLRVSATFWQNPRNHFRCQVQFYGLSENDEWTQDRAKPVTQIVSAEAWGRADCGFTSESYQQGVLSATNLSVIGFRILLLKVAGFNLLMTLRLWSSRAKRSGSGATNFSLLKQAGDVEENPGPTSMDWIWRILFLVGAATGAHSFEQVQLQQPGAELVKPGASVKMSCKASGYAFSSYWINWMKQKPGQGLEWIGQIYPGDGDTNYNGKFKGRATLTADTSSSTAYMQLSSLTSEDSAVYFCARSITTVVGCAMDYWGQGTSVTVSSTRIQNPDPAVYQLRDSKSSDKSVCLFTDFDSQTNVSQSKDSDVYITDKCVLDMRSMDFKSNSAVAWSNKSDFACANAFNNSIIPEDTFFPSPESSCDVKLVEKSFETDTNLNFQILYEILLGKATLYAVLVSALVLMAMVKRKDSRG

SEQ ID NO: 14348 - protein, 767 aa, synthetic construct
MALPVTALLLPLALLLHAARPEVQLLESGGGLVQPGGSLRLSCAASGFIFSSYAMSWVRQAPGKGQEWVSGVSGTGVNTYYADSVKGRFTISRDNSKNTLYLQMNSLRAEDTAVYYCASGKGWDSGSWYEDYRGQGTLVTVSSGTGGGGSGGGGSGGGGSEFDIQMTQSPSSLSASVGDRVTITCKASDHINNWLAWYQQKPGQAPKLLIYGATTLETGVPSRFSGSGSGTDYTLTISSLQPEDFATYYCQQSWNTPWTFGQGTKLEIKRLEIQNPDPAVYQLRDSKSSDKSVCLFTDFDSQTNVSQSKDSDVYITDKCVLDMRSMDFKSNSAVAWSNKSDFACANAFNNSIIPEDTFFPSPESSCDVKLVEKSFETDTNLNFQILYEILLGKATLYAVLVSALVLMAMVKRKDSRGRAKRSGSGVKQTLNFDLLKLAGDVESNPGPTSMDWIWRILFLVGAATGAHSFEQVQLQQPGAELVKPGASVKMSCKASGYAFSSYWINWMKQKPGQGLEWIGQIYPGDGDTNYNGKFKGRATLTADTSSSTAYMQLSSLTSEDSAVYFCARSITTVVGCAMDYWGQGTSVTVSSTREDLKNVFPPEVAVFEPSEAEISHTQKATLVCLATGFYPDHVELSWWVNGKEVHSGVCTDPQPLKEQPALNDSRYCLSSRLRVSATFWQNPRNHFRCQVQFYGLSENDEWTQDRAKPVTQIVSAEAWGRADCGFTSESYQQGVLSATNLSVIGFRILLLKVAGFNLLMTLRLWSS

SEQ ID NO: 14349 - protein, 731 aa, synthetic construct
MALPVTALLLPLALLLHAARPMLPAPKNLVVSRITEDSARLSWTAPDAAFDSFPIRYIETLIWGEAIWLDVPGSERSYDLTGLKPGTEYAVVITGVKGGRFSSPLVASFTTGTGGGGSGGGGSGGGGSEFDIQMTQSPSSLSASVGDRVTITCKASDHINNWLAWYQQKPGQAPKLLIYGATTLETGVPSRFSGSGSGTDYTLTISSLQPEDFATYYCQQSWNTPWTFGQGTKLEIKRLEDLKNVFPPEVAVFEPSEAEISHTQKATLVCLATGFYPDHVELSWWVNGKEVHSGVCTDPQPLKEQPALNDSRYCLSSRLRVSATFWQNPRNHFRCQVQFYGLSENDEWTQDRAKPVTQIVSAEAWGRADCGFTSESYQQGVLSATNLSVIGFRILLLKVAGFNLLMTLRLWSSRAKRSGSGATNFSLLKQAGDVEENPGPTSMDWIWRILFLVGAATGAHSFEQVQLQQPGAELVKPGASVKMSCKASGYAFSSYWINWMKQKPGQGLEWIGQIYPGDGDTNYNGKFKGRATLTADTSSSTAYMQLSSLTSEDSAVYFCARSITTVVGCAMDYWGQGTSVTVSSTRIQNPDPAVYQLRDSKSSDKSVCLFTDFDSQTNVSQSKDSDVYITDKCVLDMRSMDFKSNSAVAWSNKSDFACANAFNNSIIPEDTFFPSPESSCDVKLVEKSFETDTNLNFQILYEILLGKATLYAVLVSALVLMAMVKRKDSRG

SEQ ID NO: 14350 - protein, 735 aa, synthetic construct
MALPVTALLLPLALLLHAARPMLPAPKNLVVSRITEDSARLSWTAPDAAFDSFPIRYIETLIWGEAIWLDVPGSERSYDLTGLKPGTEYAVVITGVKGGRFSSPLVASFTTGTGGGGSGGGGSGGGGSEFDIQMTQSPSSLSASVGDRVTITCKASDHINNWLAWYQQKPGQAPKLLIYGATTLETGVPSRFSGSGSGTDYTLTISSLQPEDFATYYCQQSWNTPWTFGQGTKLEIKRLEIQNPDPAVYQLRDSKSSDKSVCLFTDFDSQTNVSQSKDSDVYITDKCVLDMRSMDFKSNSAVAWSNKSDFACANAFNNSIIPEDTFFPSPESSCDVKLVEKSFETDTNLNFQILYEILLGKATLYAVLVSALVLMAMVKRKDSRGRAKRSGSGVKQTLNFDLLKLAGDVESNPGPTSMDWIWRILFLVGAATGAHSFEQVQLQQPGAELVKPGASVKMSCKASGYAFSSYWINWMKQKPGQGLEWIGQIYPGDGDTNYNGKFKGRATLTADTSSSTAYMQLSSLTSEDSAVYFCARSITTVVGCAMDYWGQGTSVTVSSTREDLKNVFPPEVAVFEPSEAEISHTQKATLVCLATGFYPDHVELSWWVNGKEVHSGVCTDPQPLKEQPALNDSRYCLSSRLRVSATFWQNPRNHFRCQVQFYGLSENDEWTQDRAKPVTQIVSAEAWGRADCGFTSESYQQGVLSATNLSVIGFRILLLKVAGFNLLMTLRLWSS

SEQ ID NO: 14351 - protein, 760 aa, synthetic construct
MALPVTALLLPLALLLHAARPEVQLVESGGGLVQPGGSLRLSCAASGFNIKDTCIGWVRRAPGKEEELVAKICKYSGHTRYADSVKGRFTISADTSKNTAYLQMNSLRAEDTAVYYCAAVSVRDGHYNYWGQGTTVTVSSGTGGGGSGGGGSGGGGSEFDIQMTQSPSSLSASVGDRVTITCKASDHINNWLAWYQQKPGQAPKLLIYGATTLETGVPSRFSGSGSGTDYTLTISSLQPEDFATYYCQQSWNTPWTFGQGTKLEIKRLEDLKNVFPPEVAVFEPSEAEISHTQKATLVCLATGFYPDHVELSWWVNGKEVHSGVCTDPQPLKEQPALNDSRYCLSSRLRVSATFWQNPRNHFRCQVQFYGLSENDEWTQDRAKPVTQIVSAEAWGRADCGFTSESYQQGVLSATNLSVIGFRILLLKVAGFNLLMTLRLWSSRAKRSGSGATNFSLLKQAGDVEENPGPTSMDWIWRILFLVGAATGAHSFEQVQLQQPGAELVKPGASVKMSCKASGYAFSSYWINWMKQKPGQGLEWIGQIYPGDGDTNYNGKFKGRATLTADTSSSTAYMQLSSLTSEDSAVYFCARSITTVVGCAMDYWGQGTSVTVSSTRIQNPDPAVYQLRDSKSSDKSVCLFTDFDSQTNVSQSKDSDVYITDKCVLDMRSMDFKSNSAVAWSNKSDFACANAFNNSIIPEDTFFPSPESSCDVKLVEKSFETDTNLNFQILYEILLGKATLYAVLVSALVLMAMVKRKDSRG

SEQ ID NO: 14352 - protein, 764 aa, synthetic construct
MALPVTALLLPLALLLHAARPEVQLVESGGGLVQPGGSLRLSCAASGFNIKDTCIGWVRRAPGKEEELVAKICKYSGHTRYADSVKGRFTISADTSKNTAYLQMNSLRAEDTAVYYCAAVSVRDGHYNYWGQGTTVTVSSGTGGGGSGGGGSGGGGSEFDIQMTQSPSSLSASVGDRVTITCKASDHINNWLAWYQQKPGQAPKLLIYGATTLETGVPSRFSGSGSGTDYTLTISSLQPEDFATYYCQQSWNTPWTFGQGTKLEIKRLEIQNPDPAVYQLRDSKSSDKSVCLFTDFDSQTNVSQSKDSDVYITDKCVLDMRSMDFKSNSAVAWSNKSDFACANAFNNSIIPEDTFFPSPESSCDVKLVEKSFETDTNLNFQILYEILLGKATLYAVLVSALVLMAMVKRKDSRGRAKRSGSGVKQTLNFDLLKLAGDVESNPGPTSMDWIWRILFLVGAATGAHSFEQVQLQQPGAELVKPGASVKMSCKASGYAFSSYWINWMKQKPGQGLEWIGQIYPGDGDTNYNGKFKGRATLTADTSSSTAYMQLSSLTSEDSAVYFCARSITTVVGCAMDYWGQGTSVTVSSTREDLKNVFPPEVAVFEPSEAEISHTQKATLVCLATGFYPDHVELSWWVNGKEVHSGVCTDPQPLKEQPALNDSRYCLSSRLRVSATFWQNPRNHFRCQVQFYGLSENDEWTQDRAKPVTQIVSAEAWGRADCGFTSESYQQGVLSATNLSVIGFRILLLKVAGFNLLMTLRLWSS

SEQ ID NO: 14353 - protein, 637 aa, synthetic construct
MALPVTALLLPLALLLHAARPQLQLQESGPGLVKPSETLSLTCTVSGDSISSGDYYWGWIRQPPGKGLEWIGHIYYSGVTYYNPSLKSRVTISVDTSRNQFSLKLSSVTAADTAVYYCTREDSSNWRSRGQGTLVTVSSLEDLKNVFPPEVAVFEPSEAEISHTQKATLVCLATGFYPDHVELSWWVNGKEVHSGVCTDPQPLKEQPALNDSRYCLSSRLRVSATFWQNPRNHFRCQVQFYGLSENDEWTQDRAKPVTQIVSAEAWGRADCGFTSESYQQGVLSATNLSVIGFRILLLKVAGFNLLMTLRLWSSRAKRSGSGATNFSLLKQAGDVEENPGPTSMDWIWRILFLVGAATGAHSFEVQLVESGGGVVQPGRSLRLSCAASGFSFSGYGMHWVRQAPGKGLEWVAYISYDGSNKYYADSVKGRFTISRDNSKNTLYLQMNSLRAEDTAVYYCAKDPAWGLRLGESSSYDFDIWGQGTMVTVSSTRIQNPDPAVYQLRDSKSSDKSVCLFTDFDSQTNVSQSKDSDVYITDKCVLDMRSMDFKSNSAVAWSNKSDFACANAFNNSIIPEDTFFPSPESSCDVKLVEKSFETDTNLNFQILYEILLGKATLYAVLVSALVLMAMVKRKDSRG

SEQ ID NO: 14354 - protein, 641 aa, synthetic construct
MALPVTALLLPLALLLHAARPQLQLQESGPGLVKPSETLSLTCTVSGDSISSGDYYWGWIRQPPGKGLEWIGHIYYSGVTYYNPSLKSRVTISVDTSRNQFSLKLSSVTAADTAVYYCTREDSSNWRSRGQGTLVTVSSLEIQNPDPAVYQLRDSKSSDKSVCLFTDFDSQTNVSQSKDSDVYITDKCVLDMRSMDFKSNSAVAWSNKSDFACANAFNNSIIPEDTFFPSPESSCDVKLVEKSFETDTNLNFQILYEILLGKATLYAVLVSALVLMAMVKRKDSRGRAKRSGSGVKQTLNFDLLKLAGDVESNPGPTSMDWIWRILFLVGAATGAHSFEVQLVESGGGVVQPGRSLRLSCAASGFSFSGYGMHWVRQAPGKGLEWVAYISYDGSNKYYADSVKGRFTISRDNSKNTLYLQMNSLRAEDTAVYYCAKDPAWGLRLGESSSYDFDIWGQGTMVTVSSTREDLKNVFPPEVAVFEPSEAEISHTQKATLVCLATGFYPDHVELSWWVNGKEVHSGVCTDPQPLKEQPALNDSRYCLSSRLRVSATFWQNPRNHFRCQVQFYGLSENDEWTQDRAKPVTQIVSAEAWGRADCGFTSESYQQGVLSATNLSVIGFRILLLKVAGFNLLMTLRLWSS

SEQ ID NO: 14355 - protein, 626 aa, synthetic construct
MALPVTALLLPLALLLHAARPQLQLQESGPGLVKPSETLSLTCTVSGDSISSGDYYWGWIRQPPGKGLEWIGHIYYSGVTYYNPSLKSRVTISVDTSRNQFSLKLSSVTAADTAVYYCTREDSSNWRSRGQGTLVTVSSLEDLKNVFPPEVAVFEPSEAEISHTQKATLVCLATGFYPDHVELSWWVNGKEVHSGVCTDPQPLKEQPALNDSRYCLSSRLRVSATFWQNPRNHFRCQVQFYGLSENDEWTQDRAKPVTQIVSAEAWGRADCGFTSESYQQGVLSATNLSVIGFRILLLKVAGFNLLMTLRLWSSRAKRSGSGATNFSLLKQAGDVEENPGPTSMDWIWRILFLVGAATGAHSFEVQLVESGGGLVQPGGSLRLSCAASGFSFSDFWMSWVRQAPGKGLEWVATISQAGSEKDYVDSVKGRFTISRDNAKKSLYLQMNSLRAEDTAVYYCASGVYSFDYRGQGTLVTVSSTRIQNPDPAVYQLRDSKSSDKSVCLFTDFDSQTNVSQSKDSDVYITDKCVLDMRSMDFKSNSAVAWSNKSDFACANAFNNSIIPEDTFFPSPESSCDVKLVEKSFETDTNLNFQILYEILLGKATLYAVLVSALVLMAMVKRKDSRG

SEQ ID NO: 14356 - protein, 630 aa, synthetic construct
MALPVTALLLPLALLLHAARPQLQLQESGPGLVKPSETLSLTCTVSGDSISSGDYYWGWIRQPPGKGLEWIGHIYYSGVTYYNPSLKSRVTISVDTSRNQFSLKLSSVTAADTAVYYCTREDSSNWRSRGQGTLVTVSSLEIQNPDPAVYQLRDSKSSDKSVCLFTDFDSQTNVSQSKDSDVYITDKCVLDMRSMDFKSNSAVAWSNKSDFACANAFNNSIIPEDTFFPSPESSCDVKLVEKSFETDTNLNFQILYEILLGKATLYAVLVSALVLMAMVKRKDSRGRAKRSGSGVKQTLNFDLLKLAGDVESNPGPTSMDWIWRILFLVGAATGAHSFEVQLVESGGGLVQPGGSLRLSCAASGFSFSDFWMSWVRQAPGKGLEWVATISQAGSEKDYVDSVKGRFTISRDNAKKSLYLQMNSLRAEDTAVYYCASGVYSFDYRGQGTLVTVSSTREDLKNVFPPEVAVFEPSEAEISHTQKATLVCLATGFYPDHVELSWWVNGKEVHSGVCTDPQPLKEQPALNDSRYCLSSRLRVSATFWQNPRNHFRCQVQFYGLSENDEWTQDRAKPVTQIVSAEAWGRADCGFTSESYQQGVLSATNLSVIGFRILLLKVAGFNLLMTLRLWSS

SEQ ID NO: 14357 - protein, 628 aa, synthetic construct
MALPVTALLLPLALLLHAARPQLQLQESGPGLVKPSETLSLTCTVSGDSISSGDYYWGWIRQPPGKGLEWIGHIYYSGVTYYNPSLKSRVTISVDTSRNQFSLKLSSVTAADTAVYYCTREDSSNWRSRGQGTLVTVSSLEDLKNVFPPEVAVFEPSEAEISHTQKATLVCLATGFYPDHVELSWWVNGKEVHSGVCTDPQPLKEQPALNDSRYCLSSRLRVSATFWQNPRNHFRCQVQFYGLSENDEWTQDRAKPVTQIVSAEAWGRADCGFTSESYQQGVLSATNLSVIGFRILLLKVAGFNLLMTLRLWSSRAKRSGSGATNFSLLKQAGDVEENPGPTSMDWIWRILFLVGAATGAHSFQVQLVESGGGLVQPGGSLRLSCAASGFTFTNHAMSWVRQAPGKGLELVSSISGNGRTTYYADSVKGRFTISRDISKNTLDLQMNSLRAEDTAVYYCAKDGGETLVDSRGQGTLVTVSSTRIQNPDPAVYQLRDSKSSDKSVCLFTDFDSQTNVSQSKDSDVYITDKCVLDMRSMDFKSNSAVAWSNKSDFACANAFNNSIIPEDTFFPSPESSCDVKLVEKSFETDTNLNFQILYEILLGKATLYAVLVSALVLMAMVKRKDSRG

SEQ ID NO: 14358 - protein, 632 aa, synthetic construct
MALPVTALLLPLALLLHAARPQLQLQESGPGLVKPSETLSLTCTVSGDSISSGDYYWGWIRQPPGKGLEWIGHIYYSGVTYYNPSLKSRVTISVDTSRNQFSLKLSSVTAADTAVYYCTREDSSNWRSRGQGTLVTVSSLEIQNPDPAVYQLRDSKSSDKSVCLFTDFDSQTNVSQSKDSDVYITDKCVLDMRSMDFKSNSAVAWSNKSDFACANAFNNSIIPEDTFFPSPESSCDVKLVEKSFETDTNLNFQILYEILLGKATLYAVLVSALVLMAMVKRKDSRGRAKRSGSGVKQTLNFDLLKLAGDVESNPGPTSMDWIWRILFLVGAATGAHSFQVQLVESGGGLVQPGGSLRLSCAASGFTFTNHAMSWVRQAPGKGLELVSSISGNGRTTYYADSVKGRFTISRDISKNTLDLQMNSLRAEDTAVYYCAKDGGETLVDSRGQGTLVTVSSTREDLKNVFPPEVAVFEPSEAEISHTQKATLVCLATGFYPDHVELSWWVNGKEVHSGVCTDPQPLKEQPALNDSRYCLSSRLRVSATFWQNPRNHFRCQVQFYGLSENDEWTQDRAKPVTQIVSAEAWGRADCGFTSESYQQGVLSATNLSVIGFRILLLKVAGFNLLMTLRLWSS

SEQ ID NO: 14359 - protein, 627 aa, synthetic construct
MALPVTALLLPLALLLHAARPEVQLLESGGGLIQPGGSLRLSCAASGFTFSSHAMTWVRQAPGKGLEWVSAISGSGDYTHYADSVKGRFTISRDNSKNTVYLQMNSLRAEDSAVYYCAKDEDGGSLLGHRGQGTLVTVSSLEDLKNVFPPEVAVFEPSEAEISHTQKATLVCLATGFYPDHVELSWWVNGKEVHSGVCTDPQPLKEQPALNDSRYCLSSRLRVSATFWQNPRNHFRCQVQFYGLSENDEWTQDRAKPVTQIVSAEAWGRADCGFTSESYQQGVLSATNLSVIGFRILLLKVAGFNLLMTLRLWSSRAKRSGSGATNFSLLKQAGDVEENPGPTSMDWIWRILFLVGAATGAHSFEVQLVESGGGLVQPGGSLRLSCAASGFSFSDFWMSWVRQAPGKGLEWVATISQAGSEKDYVDSVKGRFTISRDNAKKSLYLQMNSLRAEDTAVYYCASGVYSFDYRGQGTLVTVSSTRIQNPDPAVYQLRDSKSSDKSVCLFTDFDSQTNVSQSKDSDVYITDKCVLDMRSMDFKSNSAVAWSNKSDFACANAFNNSIIPEDTFFPSPESSCDVKLVEKSFETDTNLNFQILYEILLGKATLYAVLVSALVLMAMVKRKDSRG

SEQ ID NO: 14360 - protein, 631 aa, synthetic construct
MALPVTALLLPLALLLHAARPEVQLLESGGGLIQPGGSLRLSCAASGFTFSSHAMTWVRQAPGKGLEWVSAISGSGDYTHYADSVKGRFTISRDNSKNTVYLQMNSLRAEDSAVYYCAKDEDGGSLLGHRGQGTLVTVSSLEIQNPDPAVYQLRDSKSSDKSVCLFTDFDSQTNVSQSKDSDVYITDKCVLDMRSMDFKSNSAVAWSNKSDFACANAFNNSIIPEDTFFPSPESSCDVKLVEKSFETDTNLNFQILYEILLGKATLYAVLVSALVLMAMVKRKDSRGRAKRSGSGVKQTLNFDLLKLAGDVESNPGPTSMDWIWRILFLVGAATGAHSFEVQLVESGGGLVQPGGSLRLSCAASGFSFSDFWMSWVRQAPGKGLEWVATISQAGSEKDYVDSVKGRFTISRDNAKKSLYLQMNSLRAEDTAVYYCASGVYSFDYRGQGTLVTVSSTREDLKNVFPPEVAVFEPSEAEISHTQKATLVCLATGFYPDHVELSWWVNGKEVHSGVCTDPQPLKEQPALNDSRYCLSSRLRVSATFWQNPRNHFRCQVQFYGLSENDEWTQDRAKPVTQIVSAEAWGRADCGFTSESYQQGVLSATNLSVIGFRILLLKVAGFNLLMTLRLWSS

SEQ ID NO: 14361 - protein, 633 aa, synthetic construct
MALPVTALLLPLALLLHAARPQVQLVESGGGLVQPGGSLRLSCAASGFTFTNHAMSWVRQAPGKGLELVSSISGNGRTTYYADSVKGRFTISRDISKNTLDLQMNSLRAEDTAVYYCAKDGGETLVDSRGQGTLVTVSSLEDLKNVFPPEVAVFEPSEAEISHTQKATLVCLATGFYPDHVELSWWVNGKEVHSGVCTDPQPLKEQPALNDSRYCLSSRLRVSATFWQNPRNHFRCQVQFYGLSENDEWTQDRAKPVTQIVSAEAWGRADCGFTSESYQQGVLSATNLSVIGFRILLLKVAGFNLLMTLRLWSSRAKRSGSGATNFSLLKQAGDVEENPGPTSMDWIWRILFLVGAATGAHSFEEVQLLESGGGLVQPGGSLRLSCAASGFIFSSYAMSWVRQAPGKGQEWVSGVSGTGVNTYYADSVKGRFTISRDNSKNTLYLQMNSLRAEDTAVYYCASGKGWDSGSWYEDYRGQGTLVTVSSTRIQNPDPAVYQLRDSKSSDKSVCLFTDFDSQTNVSQSKDSDVYITDKCVLDMRSMDFKSNSAVAWSNKSDFACANAFNNSIIPEDTFFPSPESSCDVKLVEKSFETDTNLNFQILYEILLGKATLYAVLVSALVLMAMVKRKDSRG

SEQ ID NO: 14362 - protein, 637 aa, synthetic construct
MALPVTALLLPLALLLHAARPQVQLVESGGGLVQPGGSLRLSCAASGFTFTNHAMSWVRQAPGKGLELVSSISGNGRTTYYADSVKGRFTISRDISKNTLDLQMNSLRAEDTAVYYCAKDGGETLVDSRGQGTLVTVSSLEIQNPDPAVYQLRDSKSSDKSVCLFTDFDSQTNVSQSKDSDVYITDKCVLDMRSMDFKSNSAVAWSNKSDFACANAFNNSIIPEDTFFPSPESSCDVKLVEKSFETDTNLNFQILYEILLGKATLYAVLVSALVLMAMVKRKDSRGRAKRSGSGVKQTLNFDLLKLAGDVESNPGPTSMDWIWRILFLVGAATGAHSFEEVQLLESGGGLVQPGGSLRLSCAASGFIFSSYAMSWVRQAPGKGQEWVSGVSGTGVNTYYADSVKGRFTISRDNSKNTLYLQMNSLRAEDTAVYYCASGKGWDSGSWYEDYRGQGTLVTVSSTREDLKNVFPPEVAVFEPSEAEISHTQKATLVCLATGFYPDHVELSWWVNGKEVHSGVCTDPQPLKEQPALNDSRYCLSSRLRVSATFWQNPRNHFRCQVQFYGLSENDEWTQDRAKPVTQIVSAEAWGRADCGFTSESYQQGVLSATNLSVIGFRILLLKVAGFNLLMTLRLWSS

SEQ ID NO: 14363 - protein, 629 aa, synthetic construct
MALPVTALLLPLALLLHAARPEVQLVESGGGLVQAGGSLRLSCAASGRTFSMGWFRQAPGKEREFVAAITYSGGSPYYADSVKGRFTISRDNAKNTVYLQMNSLKPEDTAVYYCAANPTYGSDWNAENWGQGTQVTVSSLEDLKNVFPPEVAVFEPSEAEISHTQKATLVCLATGFYPDHVELSWWVNGKEVHSGVCTDPQPLKEQPALNDSRYCLSSRLRVSATFWQNPRNHFRCQVQFYGLSENDEWTQDRAKPVTQIVSAEAWGRADCGFTSESYQQGVLSATNLSVIGFRILLLKVAGFNLLMTLRLWSSRAKRSGSGATNFSLLKQAGDVEENPGPTSMDWIWRILFLVGAATGAHSFEQLQLQESGPGLVKPSETLSLTCTVSGGSISSGDYYWGWIRQPPGKGLEWIGSISYSGSTYYNPSLKSRVTISVDTSRNQFSLKLSSVTAADTAVYYCTREDSSNWRSRGQGTLVTVSSTRIQNPDPAVYQLRDSKSSDKSVCLFTDFDSQTNVSQSKDSDVYITDKCVLDMRSMDFKSNSAVAWSNKSDFACANAFNNSIIPEDTFFPSPESSCDVKLVEKSFETDTNLNFQILYEILLGKATLYAVLVSALVLMAMVKRKDSRG

SEQ ID NO: 14364 - protein, 633 aa, synthetic construct
MALPVTALLLPLALLLHAARPEVQLVESGGGLVQAGGSLRLSCAASGRTFSMGWFRQAPGKEREFVAAITYSGGSPYYADSVKGRFTISRDNAKNTVYLQMNSLKPEDTAVYYCAANPTYGSDWNAENWGQGTQVTVSSLEIQNPDPAVYQLRDSKSSDKSVCLFTDFDSQTNVSQSKDSDVYITDKCVLDMRSMDFKSNSAVAWSNKSDFACANAFNNSIIPEDTFFPSPESSCDVKLVEKSFETDTNLNFQILYEILLGKATLYAVLVSALVLMAMVKRKDSRGRAKRSGSGVKQTLNFDLLKLAGDVESNPGPTSMDWIWRILFLVGAATGAHSFEQLQLQESGPGLVKPSETLSLTCTVSGGSISSGDYYWGWIRQPPGKGLEWIGSISYSGSTYYNPSLKSRVTISVDTSRNQFSLKLSSVTAADTAVYYCTREDSSNWRSRGQGTLVTVSSTREDLKNVFPPEVAVFEPSEAEISHTQKATLVCLATGFYPDHVELSWWVNGKEVHSGVCTDPQPLKEQPALNDSRYCLSSRLRVSATFWQNPRNHFRCQVQFYGLSENDEWTQDRAKPVTQIVSAEAWGRADCGFTSESYQQGVLSATNLSVIGFRILLLKVAGFNLLMTLRLWSS

SEQ ID NO: 14365 - protein, 1131 aa, synthetic construct
MALPVTALLLPLALLLHAARPEVQLVESGGGLVQAGGSLRLSCAASGRTFSMGWFRQAPGKEREFVAAITYSGGSPYYADSVKGRFTISRDNAKNTVYLQMNSLKPEDTAVYYCAANPTYGSDWNAENWGQGTQVTVSSGTGGGGSGGGGSGGGGSEFDIQMTQSPSSLSASVGDRVTITCKASDHINNWLAWYQQKPGQAPKLLIYGATTLETGVPSRFSGSGSGTDYTLTISSLQPEDFATYYCQQSWNTPWTFGQGTKLEIKRLEDLKNVFPPEVAVFEPSEAEISHTQKATLVCLATGFYPDHVELSWWVNGKEVHSGVCTDPQPLKEQPALNDSRYCLSSRLRVSATFWQNPRNHFRCQVQFYGLSENDEWTQDRAKPVTQIVSAEAWGRADCGFTSESYQQGVLSATNLSVIGFRILLLKVAGFNLLMTLRLWSSRAKRSGSGATNFSLLKQAGDVEENPGPTSATMDWIWRILFLVGAATGAHSGPEVQLVESGGGLVQAGGSLRLSCAASGRTFTMGWFRQAPGKEREFVAAISLSPTLAYYADSVKGRFTISRDNAKNTVVLQMNSLKPEDTALYYCAADRKSVMSIRPDYWGQGTQVTVSSGSGGGGSGGGGSGGGGSFEQVQLQQPGAELVKPGASVKMSCKASGYAFSSYWINWMKQKPGQGLEWIGQIYPGDGDTNYNGKFKGRATLTADTSSSTAYMQLSSLTSEDSAVYFCARSITTVVGCAMDYWGQGTSVTVSSTRIQNPDPAVYQLRDSKSSDKSVCLFTDFDSQTNVSQSKDSDVYITDKCVLDMRSMDFKSNSAVAWSNKSDFACANAFNNSIIPEDTFFPSPESSCDVKLVEKSFETDTNLNFQILYEILLGKATLYAVLVSALVLMAMVKRKDSRGRAKRSGSGVKQTLNFDLLKLAGDVESNPGPSRGHMTEYKPTVRLATRDDVPRAVRTLAAAFADYPATRHTVDPDRHIERVTELQELFLTRVGLDIGKVWVADDGAAVAVWTTPESVEAGAVFAEIGPRMAELSGSRLAAQQQMEGLLAPHRPKEPAWFLATVGVSPDHQGKGLGSAVVLPGVEAAERAGVPAFLETSAPRNLPFYERLGFTVTADVEVPEGPRTWCMTRKPGA

SEQ ID NO: 14366 - protein, 769 aa, synthetic construct
MALPVTALLLPLALLLHAARPEVQLVESGGGLVQPGGSLRLSCAASGFASDYYIIGWFRQAPGKEREGVSCISSRYANTNYADSVKGRFTISRDNAKNTVYLQMNSLKPEDTAVYYCAADTRRYTCPDIATMHRNFDSWGQGTLVTVSSGTGGGGSGGGGSGGGGSEFDIQMTQSPSSLSASVGDRVTITCKASDHINNWLAWYQQKPGQAPKLLIYGATTLETGVPSRFSGSGSGTDYTLTISSLQPEDFATYYCQQSWNTPWTFGQGTKLEIKRLEDLKNVFPPEVAVFEPSEAEISHTQKATLVCLATGFYPDHVELSWWVNGKEVHSGVCTDPQPLKEQPALNDSRYCLSSRLRVSATFWQNPRNHFRCQVQFYGLSENDEWTQDRAKPVTQIVSAEAWGRADCGFTSESYQQGVLSATNLSVIGFRILLLKVAGFNLLMTLRLWSSRAKRSGSGATNFSLLKQAGDVEENPGPTSMDWIWRILFLVGAATGAHSFEQVQLQQPGAELVKPGASVKMSCKASGYAFSSYWINWMKQKPGQGLEWIGQIYPGDGDTNYNGKFKGRATLTADTSSSTAYMQLSSLTSEDSAVYFCARSITTVVGCAMDYWGQGTSVTVSSTRIQNPDPAVYQLRDSKSSDKSVCLFTDFDSQTNVSQSKDSDVYITDKCVLDMRSMDFKSNSAVAWSNKSDFACANAFNNSIIPEDTFFPSPESSCDVKLVEKSFETDTNLNFQILYEILLGKATLYAVLVSALVLMAMVKRKDSRG

SEQ ID NO: 14367 - protein, 769 aa, synthetic construct
MALPVTALLLPLALLLHAARPEVQLVESGGGLVQPGGSLRLSCEASGFASDDYIIGWFRQAPGKEREGVSCISSKYANTVYTDSVKGRFRLSRGTAKNTVYLQMSALKPEDTAVYYCAMDSRRVTCPEISTMHRNFDSWGQGTLVTVSSGTGGGGSGGGGSGGGGSEFDIQMTQSPSSLSASVGDRVTITCKASDHINNWLAWYQQKPGQAPKLLIYGATTLETGVPSRFSGSGSGTDYTLTISSLQPEDFATYYCQQSWNTPWTFGQGTKLEIKRLEDLKNVFPPEVAVFEPSEAEISHTQKATLVCLATGFYPDHVELSWWVNGKEVHSGVCTDPQPLKEQPALNDSRYCLSSRLRVSATFWQNPRNHFRCQVQFYGLSENDEWTQDRAKPVTQIVSAEAWGRADCGFTSESYQQGVLSATNLSVIGFRILLLKVAGFNLLMTLRLWSSRAKRSGSGATNFSLLKQAGDVEENPGPTSMDWIWRILFLVGAATGAHSFEQVQLQQPGAELVKPGASVKMSCKASGYAFSSYWINWMKQKPGQGLEWIGQIYPGDGDTNYNGKFKGRATLTADTSSSTAYMQLSSLTSEDSAVYFCARSITTVVGCAMDYWGQGTSVTVSSTRIQNPDPAVYQLRDSKSSDKSVCLFTDFDSQTNVSQSKDSDVYITDKCVLDMRSMDFKSNSAVAWSNKSDFACANAFNNSIIPEDTFFPSPESSCDVKLVEKSFETDTNLNFQILYEILLGKATLYAVLVSALVLMAMVKRKDSRG

SEQ ID NO: 14368 - protein, 773 aa, synthetic construct
MALPVTALLLPLALLLHAARPEVQLVESGGGLVQPGGSLRLSCAASGFASDYYIIGWFRQAPGKEREGVSCISSRYANTNYADSVKGRFTISRDNAKNTVYLQMNSLKPEDTAVYYCAADTRRYTCPDIATMHRNFDSWGQGTLVTVSSGTGGGGSGGGGSGGGGSEFDIQMTQSPSSLSASVGDRVTITCKASDHINNWLAWYQQKPGQAPKLLIYGATTLETGVPSRFSGSGSGTDYTLTISSLQPEDFATYYCQQSWNTPWTFGQGTKLEIKRLEIQNPDPAVYQLRDSKSSDKSVCLFTDFDSQTNVSQSKDSDVYITDKCVLDMRSMDFKSNSAVAWSNKSDFACANAFNNSIIPEDTFFPSPESSCDVKLVEKSFETDTNLNFQILYEILLGKATLYAVLVSALVLMAMVKRKDSRGRAKRSGSGVKQTLNFDLLKLAGDVESNPGPTSMDWIWRILFLVGAATGAHSFEQVQLQQPGAELVKPGASVKMSCKASGYAFSSYWINWMKQKPGQGLEWIGQIYPGDGDTNYNGKFKGRATLTADTSSSTAYMQLSSLTSEDSAVYFCARSITTVVGCAMDYWGQGTSVTVSSTREDLKNVFPPEVAVFEPSEAEISHTQKATLVCLATGFYPDHVELSWWVNGKEVHSGVCTDPQPLKEQPALNDSRYCLSSRLRVSATFWQNPRNHFRCQVQFYGLSENDEWTQDRAKPVTQIVSAEAWGRADCGFTSESYQQGVLSATNLSVIGFRILLLKVAGFNLLMTLRLWSS

SEQ ID NO: 14369 - protein, 773 aa, synthetic construct
MALPVTALLLPLALLLHAARPEVQLVESGGGLVQPGGSLRLSCEASGFASDDYIIGWFRQAPGKEREGVSCISSKYANTVYTDSVKGRFRLSRGTAKNTVYLQMSALKPEDTAVYYCAMDSRRVTCPEISTMHRNFDSWGQGTLVTVSSGTGGGGSGGGGSGGGGSEFDIQMTQSPSSLSASVGDRVTITCKASDHINNWLAWYQQKPGQAPKLLIYGATTLETGVPSRFSGSGSGTDYTLTISSLQPEDFATYYCQQSWNTPWTFGQGTKLEIKRLEIQNPDPAVYQLRDSKSSDKSVCLFTDFDSQTNVSQSKDSDVYITDKCVLDMRSMDFKSNSAVAWSNKSDFACANAFNNSIIPEDTFFPSPESSCDVKLVEKSFETDTNLNFQILYEILLGKATLYAVLVSALVLMAMVKRKDSRGRAKRSGSGVKQTLNFDLLKLAGDVESNPGPTSMDWIWRILFLVGAATGAHSFEQVQLQQPGAELVKPGASVKMSCKASGYAFSSYWINWMKQKPGQGLEWIGQIYPGDGDTNYNGKFKGRATLTADTSSSTAYMQLSSLTSEDSAVYFCARSITTVVGCAMDYWGQGTSVTVSSTREDLKNVFPPEVAVFEPSEAEISHTQKATLVCLATGFYPDHVELSWWVNGKEVHSGVCTDPQPLKEQPALNDSRYCLSSRLRVSATFWQNPRNHFRCQVQFYGLSENDEWTQDRAKPVTQIVSAEAWGRADCGFTSESYQQGVLSATNLSVIGFRILLLKVAGFNLLMTLRLWSS

SEQ ID NO: 14370 - protein, 760 aa, synthetic construct; identical to SEQ ID NO: 13334

SEQ ID NO: 14371 - protein, 761 aa, synthetic construct
MALPVTALLLPLALLLHAARPDIQMTQSPSSLSASVGDRVTITCKASDHINNWLAWYQQKPGQAPKLLIYGATTLETGVPSRFSGSGSGTDYTLTISSLQPEDFATYYCQQSWNTPWTFGQGTKLEIKRLEDLKNVFPPEVAVFEPSEAEISHTQKATLVCLATGFYPDHVELSWWVNGKEVHSGVCTDPQPLKEQPALNDSRYCLSSRLRVSATFWQNPRNHFRCQVQFYGLSENDEWTQDRAKPVTQIVSAEAWGRADCGFTSESYQQGVLSATNLSVIGFRILLLKVAGFNLLMTLRLWSSRAKRSGSGATNFSLLKQAGDVEENPGPTSATMDWIWRILFLVGAATGAHSGPEVQLVESGGGLVQAGGSLRLSCAASGRTFSMGWFRQAPGKEREFVAAITYSGGSPYYADSVKGRFTISRDNAKNTVYLQMNSLKPEDTAVYYCAANPTYGSDWNAENWGQGTQVTVSSGSGGGGSGGGGSGGGGSFEQVQLQQPGAELVKPGASVKMSCKASGYAFSSYWINWMKQKPGQGLEWIGQIYPGDGDTNYNGKFKGRATLTADTSSSTAYMQLSSLTSEDSAVYFCARSITTVVGCAMDYWGQGTSVTVSSTRIQNPDPAVYQLRDSKSSDKSVCLFTDFDSQTNVSQSKDSDVYITDKCVLDMRSMDFKSNSAVAWSNKSDFACANAFNNSIIPEDTFFPSPESSCDVKLVEKSFETDTNLNFQILYEILLGKATLYAVLVSALVLMAMVKRKDSRG

SEQ ID NO: 14372 - protein, 762 aa, synthetic construct
MALPVTALLLPLALLLHAARPDIQMTQSPSSLSASVGDRVTITCKASDHINNWLAWYQQKPGQAPKLLIYGATTLETGVPSRFSGSGSGTDYTLTISSLQPEDFATYYCQQSWNTPWTFGQGTKLEIKRLEDLKNVFPPEVAVFEPSEAEISHTQKATLVCLATGFYPDHVELSWWVNGKEVHSGVCTDPQPLKEQPALNDSRYCLSSRLRVSATFWQNPRNHFRCQVQFYGLSENDEWTQDRAKPVTQIVSAEAWGRADCGFTSESYQQGVLSATNLSVIGFRILLLKVAGFNLLMTLRLWSSRAKRSGSGATNFSLLKQAGDVEENPGPTSATMDWIWRILFLVGAATGAHSGPEVQLVESGGGLVQPGGSLRLSCAASGSIFGFNDMAWYRQAPGKQRELVALISRVGVTSSADSVKGRFTISRVNAKDTVYLQMNSLKPEDTAVYYCYMDQRLDGSTLAYWGQGTQVTVSSGSGGGGSGGGGSGGGGSFEQVQLQQPGAELVKPGASVKMSCKASGYAFSSYWINWMKQKPGQGLEWIGQIYPGDGDTNYNGKFKGRATLTADTSSSTAYMQLSSLTSEDSAVYFCARSITTVVGCAMDYWGQGTSVTVSSTRIQNPDPAVYQLRDSKSSDKSVCLFTDFDSQTNVSQSKDSDVYITDKCVLDMRSMDFKSNSAVAWSNKSDFACANAFNNSIIPEDTFFPSPESSCDVKLVEKSFETDTNLNFQILYEILLGKATLYAVLVSALVLMAMVKRKDSRG

SEQ ID NO: 14373 - protein, 758 aa, synthetic construct
MALPVTALLLPLALLLHAARPDIQMTQSPSSLSASVGDRVTITCKASDHINNWLAWYQQKPGQAPKLLIYGATTLETGVPSRFSGSGSGTDYTLTISSLQPEDFATYYCQQSWNTPWTFGQGTKLEIKRLEDLKNVFPPEVAVFEPSEAEISHTQKATLVCLATGFYPDHVELSWWVNGKEVHSGVCTDPQPLKEQPALNDSRYCLSSRLRVSATFWQNPRNHFRCQVQFYGLSENDEWTQDRAKPVTQIVSAEAWGRADCGFTSESYQQGVLSATNLSVIGFRILLLKVAGFNLLMTLRLWSSRAKRSGSGATNFSLLKQAGDVEENPGPTSATMDWIWRILFLVGAATGAHSGPEVQLVESGGGLVQAGGSLRLSCAASGSVFSGNVMGWYRQAPGKEREWVAAIASGGSIYYRDSVKGRFTISRDNAKNTVYLQMNSLKPEDTAVYYCNSHPPTLPYWGLGTQVTVSSGSGGGGSGGGGSGGGGSFEQVQLQQPGAELVKPGASVKMSCKASGYAFSSYWINWMKQKPGQGLEWIGQIYPGDGDTNYNGKFKGRATLTADTSSSTAYMQLSSLTSEDSAVYFCARSITTVVGCAMDYWGQGTSVTVSSTRIQNPDPAVYQLRDSKSSDKSVCLFTDFDSQTNVSQSKDSDVYITDKCVLDMRSMDFKSNSAVAWSNKSDFACANAFNNSIIPEDTFFPSPESSCDVKLVEKSFETDTNLNFQILYEILLGKATLYAVLVSALVLMAMVKRKDSRG

SEQ ID NO: 14374 - protein, 756 aa, synthetic construct
MALPVTALLLPLALLLHAARPDIQMTQSPSSLSASVGDRVTITCKASDHINNWLAWYQQKPGQAPKLLIYGATTLETGVPSRFSGSGSGTDYTLTISSLQPEDFATYYCQQSWNTPWTFGQGTKLEIKRLEDLKNVFPPEVAVFEPSEAEISHTQKATLVCLATGFYPDHVELSWWVNGKEVHSGVCTDPQPLKEQPALNDSRYCLSSRLRVSATFWQNPRNHFRCQVQFYGLSENDEWTQDRAKPVTQIVSAEAWGRADCGFTSESYQQGVLSATNLSVIGFRILLLKVAGFNLLMTLRLWSSRAKRSGSGATNFSLLKQAGDVEENPGPTSATMDWIWRILFLVGAATGAHSGPEVQLLESGGGLVQPGGSLRLSCAASGFSFSSYALSWVRQAPGKGLEWVSSIGENDGTTDYADAVKGRFTISRDNSKNTLYLQMNSLRVEDTAVYYCVKDGIHWGQGTLVTVSSGSGGGGSGGGGSGGGGSFEQVQLQQPGAELVKPGASVKMSCKASGYAFSSYWINWMKQKPGQGLEWIGQIYPGDGDTNYNGKFKGRATLTADTSSSTAYMQLSSLTSEDSAVYFCARSITTVVGCAMDYWGQGTSVTVSSTRIQNPDPAVYQLRDSKSSDKSVCLFTDFDSQTNVSQSKDSDVYITDKCVLDMRSMDFKSNSAVAWSNKSDFACANAFNNSIIPEDTFFPSPESSCDVKLVEKSFETDTNLNFQILYEILLGKATLYAVLVSALVLMAMVKRKDSRG

SEQ ID NO: 14375 - protein, 1125 aa, synthetic construct
MGPRLLFWALLCLLGTGPVEAGVTQSPTHLIKTRGQQATLRCSPISGHTSVYWYQQALGLGLQFLLWYDEGEERNRGNFPPRFSGRQFPNYSSELNVNALELEDSALYLCASSLGGPRGLAGLRGDEQFFGPGTRLTVLEGTGGGGSGGGEFDIQMTQSPSSLSASVGDRVTITCKASDHINNWLAWYQQKPGQAPKLLIYGATTLETGVPSRFSGSGSGTDYTLTISSLQPEDFATYYCQQSWNTPWTFGQGTKLEIKRLEDLKNVFPPEVAVFEPSEAEISHTQKATLVCLATGFYPDHVELSWWVNGKEVHSGVCTDPQPLKEQPALNDSRYCLSSRLRVSATFWQNPRNHFRCQVQFYGLSENDEWTQDRAKPVTQIVSAEAWGRADCGFTSESYQQGVLSATNLSVIGFRILLLKVAGFNLLMTLRLWSSRAKRSGSGATNFSLLKQAGDVEENPGPTSATMDWIWRILFLVGAATGAHSGPEVQLVESGGGLVQAGGSLRLSCAASGRTFSMGWFRQAPGKEREFVAAITYSGGSPYYADSVKGRFTISRDNAKNTVYLQMNSLKPEDTAVYYCAANPTYGSDWNAENWGQGTQVTVSSGSGGGGSGGGGSGGGGSFEQVQLQQPGAELVKPGASVKMSCKASGYAFSSYWINWMKQKPGQGLEWIGQIYPGDGDTNYNGKFKGRATLTADTSSSTAYMQLSSLTSEDSAVYFCARSITTVVGCAMDYWGQGTSVTVSSTRIQNPDPAVYQLRDSKSSDKSVCLFTDFDSQTNVSQSKDSDVYITDKCVLDMRSMDFKSNSAVAWSNKSDFACANAFNNSIIPEDTFFPSPESSCDVKLVEKSFETDTNLNFQILYEILLGKATLYAVLVSALVLMAMVKRKDSRGRAKRSGSGVKQTLNFDLLKLAGDVESNPGPSRGHMTEYKPTVRLATRDDVPRAVRTLAAAFADYPATRHTVDPDRHIERVTELQELFLTRVGLDIGKVWVADDGAAVAVWTTPESVEAGAVFAEIGPRMAELSGSRLAAQQQMEGLLAPHRPKEPAWFLATVGVSPDHQGKGLGSAVVLPGVEAAERAGVPAFLETSAPRNLPFYERLGFTVTADVEVPEGPRTWCMTRKPGA

SEQ ID NO: 14376 - protein, 1124 aa, synthetic construct
MGPRLLFWALLCLLGTGPVEAGVTQSPTHLIKTRGQQATLRCSPISGHTSVYWYQQALGLGLQFLLWYDEGEERNRGNFPPRFSGRQFPNYSSELNVNALELEDSALYLCASSLGGDELGADGNEQFFGPGTRLTVLEGTGGGGSGGGSEFDIQMTQSPSSLSASVGDRVTITCKASDHINNWLAWYQQKPGQAPKLLIYGATTLETGVPSRFSGSGSGTDYTLTISSLQPEDFATYYCQQSWNTPWTFGQGTKLEIKRLEDLKNVFPPEVAVFEPSEAEISHTQKATLVCLATGFYPDHVELSWWVNGKEVHSGVCTDPQPLKEQPALNDSRYCLSSRLRVSATFWQNPRNHFRCQVQFYGLSENDEWTQDRAKPVTQIVSAEAWGRADCGFTSESYQQGVLSATNLSVIGFRILLLKVAGFNLLMTLRLWSSRAKRSGSGATNFSLLKQAGDVEENPGPTSATMDWIWRILFLVGAATGAHSGPEVQLVESGGGLVQAGGSLRLSCAASGRTFSMGWFRQAPGKEREFVAAITYSGGSPYYADSVKGRFTISRDNAKNTVYLQMNSLKPEDTAVYYCAANPTYGSDWNAENWGQGTQVTVSSGSGGGGSGGGGSGGGGSFEQVQLQQPGAELVKPGASVKMSCKASGYAFSSYWINWMKQKPGQGLEWIGQIYPGDGDTNYNGKFKGRATLTADTSSSTAYMQLSSLTSEDSAVYFCARSITTVVGCAMDYWGQGTSVTVSSTRIQNPDPAVYQLRDSKSSDKSVCLFTDFDSQTNVSQSKDSDVYITDKCVLDMRSMDFKSNSAVAWSNKSDFACANAFNNSIIPEDTFFPSPESSCDVKLVEKSFETDTNLNFQILYEILLGKATLYAVLVSALVLMAMVKRKDSRGRAKRSGSGVKQTLNFDLLKLAGDVESNPGPSRGHMTEYKPTVRLATRDDVPRAVRTLAAAFADYPATRHTVDPDRHIERVTELQELFLTRVGLDIGKVWVADDGAAVAVWTTPESVEAGAVFAEIGPRMAELSGSRLAAQQQMEGLLAPHRPKEPAWFLATVGVSPDHQGKGLGSAVVLPGVEAAERAGVPAFLETSAPRNLPFYERLGFTVTADVEVPEGPRTWCMTRKPGA

SEQ ID NO: 14377 - protein, 899 aa, synthetic construct
MALPVTALLLPLALLLHAARPACLFNQEVQIPLTESYCGPCPKNWICYKNNCYQFFDESKNWYESQASCMSQNASLLKVYSKEDQDLLKLVKSAHWMGLVHIPTNGSWQWEDGSILSPNLLTIIEMQKGDCALYASSFKGYIENCSTPNTYICMQRTVLEDLKNVFPPEVAVFEPSEAEISHTQKATLVCLATGFYPDHVELSWWVNGKEVHSGVCTDPQPLKEQPALNDSRYCLSSRLRVSATFWQNPRNHFRCQVQFYGLSENDEWTQDRAKPVTQIVSAEAWGRADCGFTSESYQQGVLSATNLSVIGFRILLLKVAGFNLLMTLRLWSSRAKRSGSGATNFSLLKQAGDVEENPGPTSMDWIWRILFLVGAATGAHSFEDLFNQEVQIPLTESYCGPCPKNWICYKNNCYQFFDESKNWYESQASCMSQNASLLKVYSKEDQDLLKLVKSAHWMGLVHIPTNGSWQWEDGSILSPNLLTIIEMQKGDCALYASSFKGFIENCSTPNTYICMQRTVTRIQNPDPAVYQLRDSKSSDKSVCLFTDFDSQTNVSQSKDSDVYITDKCVLDMRSMDFKSNSAVAWSNKSDFACANAFNNSIIPEDTFFPSPESSCDVKLVEKSFETDTNLNFQILYEILLGKATLYAVLVSALVLMAMVKRKDSRGRAKRSGSGVKQTLNFDLLKLAGDVESNPGPSRGHMTEYKPTVRLATRDDVPRAVRTLAAAFADYPATRHTVDPDRHIERVTELQELFLTRVGLDIGKVWVADDGAAVAVWTTPESVEAGAVFAEIGPRMAELSGSRLAAQQQMEGLLAPHRPKEPAWFLATVGVSPDHQGKGLGSAVVLPGVEAAERAGVPAFLETSAPRNLPFYERLGFTVTADVEVPEGPRTWCMTRKPGA

SEQ ID NO: 14378 - protein, 949 aa, synthetic construct
MALPVTALLLPLALLLHAARPDIQMTQSPSSLSASVGDRVTITCKASDHINNWLAWYQQKPGQAPKLLIYGATTLETGVPSRFSGSGSGTDYTLTISSLQPEDFATYYCQQSWNTPWTFGQGTKLEIKRLEDLKNVFPPEVAVFEPSEAEISHTQKATLVCLATGFYPDHVELSWWVNGKEVHSGVCTDPQPLKEQPALNDSRYCLSSRLRVSATFWQNPRNHFRCQVQFYGLSENDEWTQDRAKPVTQIVSAEAWGRADCGFTSESYQQGVLSATNLSVIGFRILLLKVAGFNLLMTLRLWSSRAKRSGSGATNFSLLKQAGDVEENPGPTSATMDWIWRILFLVGAATGAHSGPMGSWLEFYHRLNAIDSRLWALGGSEAELAAFEKEIAAFESELQAYKGKGNPEVESLRDHAAHIREWLQAYRHNGSGGGGSGGGGSGGGGSFEQVQLQQPGAELVKPGASVKMSCKASGYAFSSYWINWMKQKPGQGLEWIGQIYPGDGDTNYNGKFKGRATLTADTSSSTAYMQLSSLTSEDSAVYFCARSITTVVGCAMDYWGQGTSVTVSSTRIQNPDPAVYQLRDSKSSDKSVCLFTDFDSQTNVSQSKDSDVYITDKCVLDMRSMDFKSNSAVAWSNKSDFACANAFNNSIIPEDTFFPSPESSCDVKLVEKSFETDTNLNFQILYEILLGKATLYAVLVSALVLMAMVKRKDSRGRAKRSGSGVKQTLNFDLLKLAGDVESNPGPSRGHMTEYKPTVRLATRDDVPRAVRTLAAAFADYPATRHTVDPDRHIERVTELQELFLTRVGLDIGKVWVADDGAAVAVWTTPESVEAGAVFAEIGPRMAELSGSRLAAQQQMEGLLAPHRPKEPAWFLATVGVSPDHQGKGLGSAVVLPGVEAAERAGVPAFLETSAPRNLPFYERLGFTVTADVEVPEGPRTWCMTRKPGA

SEQ ID NO: 14379 - protein, 949 aa, synthetic construct
MALPVTALLLPLALLLHAARPACMGSWFEFYDRLNAIDARLWALGGSEAELAAFEKEIAAFESELQAYKGKGNPEVENLRVHAAAIREWLQAYRHNGTGGGGSGGGGSGGGGSEFDIQMTQSPSSLSASVGDRVTITCKASDHINNWLAWYQQKPGQAPKLLIYGATTLETGVPSRFSGSGSGTDYTLTISSLQPEDFATYYCQQSWNTPWTFGQGTKLEIKRLEDLKNVFPPEVAVFEPSEAEISHTQKATLVCLATGFYPDHVELSWWVNGKEVHSGVCTDPQPLKEQPALNDSRYCLSSRLRVSATFWQNPRNHFRCQVQFYGLSENDEWTQDRAKPVTQIVSAEAWGRADCGFTSESYQQGVLSATNLSVIGFRILLLKVAGFNLLMTLRLWSSRAKRSGSGATNFSLLKQAGDVEENPGPTSMDWIWRILFLVGAATGAHSFEQVQLQQPGAELVKPGASVKMSCKASGYAFSSYWINWMKQKPGQGLEWIGQIYPGDGDTNYNGKFKGRATLTADTSSSTAYMQLSSLTSEDSAVYFCARSITTVVGCAMDYWGQGTSVTVSSTRIQNPDPAVYQLRDSKSSDKSVCLFTDFDSQTNVSQSKDSDVYITDKCVLDMRSMDFKSNSAVAWSNKSDFACANAFNNSIIPEDTFFPSPESSCDVKLVEKSFETDTNLNFQILYEILLGKATLYAVLVSALVLMAMVKRKDSRGRAKRSGSGVKQTLNFDLLKLAGDVESNPGPSRGHMTEYKPTVRLATRDDVPRAVRTLAAAFADYPATRHTVDPDRHIERVTELQELFLTRVGLDIGKVWVADDGAAVAVWTTPESVEAGAVFAEIGPRMAELSGSRLAAQQQMEGLLAPHRPKEPAWFLATVGVSPDHQGKGLGSAVVLPGVEAAERAGVPAFLETSAPRNLPFYERLGFTVTADVEVPEGPRTWCMTRKPGA

SEQ ID NO: 14380 - protein, 1066 aa, synthetic construct
MALPVTALLLPLALLLHAARPACMDPDLEIRAAFLRQRNTALRTEVAELEQEVQRLENEVSQYETRYGPLGGGKGTGGGGSGGGGSGGGGSEFDIQMTQSPSSLSASVGDRVTITCKASDHINNWLAWYQQKPGQAPKLLIYGATTLETGVPSRFSGSGSGTDYTLTISSLQPEDFATYYCQQSWNTPWTFGQGTKLEIKRLEDLKNVFPPEVAVFEPSEAEISHTQKATLVCLATGFYPDHVELSWWVNGKEVHSGVCTDPQPLKEQPALNDSRYCLSSRLRVSATFWQNPRNHFRCQVQFYGLSENDEWTQDRAKPVTQIVSAEAWGRADCGFTSESYQQGVLSATNLSVIGFRILLLKVAGFNLLMTLRLWSSRAKRSGSGATNFSLLKQAGDVEENPGPTSATMDWIWRILFLVGAATGAHSGPEVQLVESGGGLVQAGGSLRLSCAASGRTFSMGWFRQAPGKEREFVAAITYSGGSPYYADSVKGRFTISRDNAKNTVYLQMNSLKPEDTAVYYCAANPTYGSDWNAENWGQGTQVTVSSGSGGGGSGGGGSGGGGSFEQVQLQQPGAELVKPGASVKMSCKASGYAFSSYWINWMKQKPGQGLEWIGQIYPGDGDTNYNGKFKGRATLTADTSSSTAYMQLSSLTSEDSAVYFCARSITTVVGCAMDYWGQGTSVTVSSTRIQNPDPAVYQLRDSKSSDKSVCLFTDFDSQTNVSQSKDSDVYITDKCVLDMRSMDFKSNSAVAWSNKSDFACANAFNNSIIPEDTFFPSPESSCDVKLVEKSFETDTNLNFQILYEILLGKATLYAVLVSALVLMAMVKRKDSRGRAKRSGSGVKQTLNFDLLKLAGDVESNPGPSRGHMTEYKPTVRLATRDDVPRAVRTLAAAFADYPATRHTVDPDRHIERVTELQELFLTRVGLDIGKVWVADDGAAVAVWTTPESVEAGAVFAEIGPRMAELSGSRLAAQQQMEGLLAPHRPKEPAWFLATVGVSPDHQGKGLGSAVVLPGVEAAERAGVPAFLETSAPRNLPFYERLGFTVTADVEVPEGPRTWCMTRKPGA

SEQ ID NO: 14381 - protein, 949 aa, synthetic construct
MALPVTALLLPLALLLHAARPDIQMTQSPSSLSASVGDRVTITCKASDHINNWLAWYQQKPGQAPKLLIYGATTLETGVPSRFSGSGSGTDYTLTISSLQPEDFATYYCQQSWNTPWTFGQGTKLEIKRLEDLKNVFPPEVAVFEPSEAEISHTQKATLVCLATGFYPDHVELSWWVNGKEVHSGVCTDPQPLKEQPALNDSRYCLSSRLRVSATFWQNPRNHFRCQVQFYGLSENDEWTQDRAKPVTQIVSAEAWGRADCGFTSESYQQGVLSATNLSVIGFRILLLKVAGFNLLMTLRLWSSRAKRSGSGATNFSLLKQAGDVEENPGPTSATMDWIWRILFLVGAATGAHSGPMGSWSEFYDRLHAIHHRLYALGGSEAELAAFEKEIAAFESELQAYKGKGNPEVEALRDTAAFIRTRLQAYRHNGSGGGGSGGGGSGGGGSFEQVQLQQPGAELVKPGASVKMSCKASGYAFSSYWINWMKQKPGQGLEWIGQIYPGDGDTNYNGKFKGRATLTADTSSSTAYMQLSSLTSEDSAVYFCARSITTVVGCAMDYWGQGTSVTVSSTRIQNPDPAVYQLRDSKSSDKSVCLFTDFDSQTNVSQSKDSDVYITDKCVLDMRSMDFKSNSAVAWSNKSDFACANAFNNSIIPEDTFFPSPESSCDVKLVEKSFETDTNLNFQILYEILLGKATLYAVLVSALVLMAMVKRKDSRGRAKRSGSGVKQTLNFDLLKLAGDVESNPGPSRGHMTEYKPTVRLATRDDVPRAVRTLAAAFADYPATRHTVDPDRHIERVTELQELFLTRVGLDIGKVWVADDGAAVAVWTTPESVEAGAVFAEIGPRMAELSGSRLAAQQQMEGLLAPHRPKEPAWFLATVGVSPDHQGKGLGSAVVLPGVEAAERAGVPAFLETSAPRNLPFYERLGFTVTADVEVPEGPRTWCMTRKPGA

SEQ ID NO: 14382 - protein, 1159 aa, synthetic construct
MALPVTALLLPLALLLHAARPDIQMTQSPSSLSASVGDRVTITCKASDHINNWLAWYQQKPGQAPKLLIYGATTLETGVPSRFSGSGSGTDYTLTISSLQPEDFATYYCQQSWNTPWTFGQGTKLEIKRLEDLKNVFPPEVAVFEPSEAEISHTQKATLVCLATGFYPDHVELSWWVNGKEVHSGVCTDPQPLKEQPALNDSRYCLSSRLRVSATFWQNPRNHFRCQVQFYGLSENDEWTQDRAKPVTQIVSAEAWGRADCGFTSESYQQGVLSATNLSVIGFRILLLKVAGFNLLMTLRLWSSRAKRSGSGATNFSLLKQAGDVEENPGPTSTMDWIWRILFLVGAATGAHSLFNQEVQIPLTESYCGPCPKNWICYKNNCYQFFDESKNWYESQASCMSQNASLLKVYSKEDQDLLKLVKSAHWMGLVHIPTNGSWQWEDGSILSPNLLTIIEMQKGDCALYASSFKGYIENCSTPNTYICMQRTVSGGGGSGGGGSGGGGDLFNQEVQIPLTESYCGPCPKNWICYKNNCYQFFDESKNWYESQASCMSQNASLLKVYSKEDQDLLKLVKSAHWMGLVHIPTNGSWQWEDGSILSPNLLTIIEMQKGDCALYASSFKGYIENCSTPNTYICMQRTVGSGGGGSGGGGSGGGGSFEQVQLQQPGAELVKPGASVKMSCKASGYAFSSYWINWMKQKPGQGLEWIGQIYPGDGDTNYNGKFKGRATLTADTSSSTAYMQLSSLTSEDSAVYFCARSITTVVGCAMDYWGQGTSVTVSSTRIQNPDPAVYQLRDSKSSDKSVCLFTDFDSQTNVSQSKDSDVYITDKCVLDMRSMDFKSNSAVAWSNKSDFACANAFNNSIIPEDTFFPSPESSCDVKLVEKSFETDTNLNFQILYEILLGKATLYAVLVSALVLMAMVKRKDSRGRAKRSGSGVKQTLNFDLLKLAGDVESNPGPSRGHMTEYKPTVRLATRDDVPRAVRTLAAAFADYPATRHTVDPDRHIERVTELQELFLTRVGLDIGKVWVADDGAAVAVWTTPESVEAGAVFAEIGPRMAELSGSRLAAQQQMEGLLAPHRPKEPAWFLATVGVSPDHQGKGLGSAVVLPGVEAAERAGVPAFLETSAPRNLPFYERLGFTVTADVEVPEGPRTWCMTRKPGA

SEQ ID NO: 14383 - protein, 723 aa, synthetic construct
MALPVTALLLPLALLLHAARPDIQMTQTTSSLSASLGDRVTISCRASQDISKYLNWYQQKPDGTVKLLIYHTSRLHSGVPSRFSGSGSGTDYSLTISNLEQEDIATYFCQQGNTLPYTFGGGTKLEITLEDLKNVFPPEVAVFEPSEAEISHTQKATLVCLATGFYPDHVELSWWVNGKEVHSGVCTDPQPLKEQPALNDSRYCLSSRLRVSATFWQNPRNHFRCQVQFYGLSENDEWTQDRAKPVTQIVSAEAWGRADDVIKIHWQEKKSNTILGSQEGNTMKTNDTYMKFSWLTVPEKSLDKEHRCIVRHENNKNGVDQEIIFPPIKTDVITMDPKDNCSKDANDTLLLQLTNTSAYYMYLLLLLKSVVYFAIITCCLLMAMVKRKDSRGRAKRSGSGATNFSLLKQAGDVEENPGPTSMDWIWRILFLVGAATGAHSFEVKLQESGPGLVAPSQSLSVTCTVSGVSLPDYGVSWIRQPPRKGLEWLGVIWGSETTYYNSALKSRLTIIKDNSKSQVFLKMNSLQTDDTAIYYCAKHYYYGGSYAMDYWGQGTSVTVSSTRIQNPDPAVYQLRDSKSSDKSVCLFTDFDSQTNVSQSKDSDVYITDKCVLDMRSMDFKSNSAVAWSNKSDFACANAFNNSIIPEDTFFPSPESSDSTDHVKPKETENTKQPSKSCHKPKAIVHTEKVNMMSLTVLGLRMLFAKTVAVNFLLTAKLFFLLTA

SEQ ID NO: 14384 - protein, 724 aa, synthetic construct
MALPVTALLLPLALLLHAARPEIVMTQSPATLSLSPGERATLSCRASQDISKYLNWYQQKPGQAPRLLIYHTSRLHSGIPARFSGSGSGTDYTLTISSLQPEDFAVYFCQQGNTLPYTFGQGTKLEIKLEDLKNVFPPEVAVFEPSEAEISHTQKATLVCLATGFYPDHVELSWWVNGKEVHSGVCTDPQPLKEQPALNDSRYCLSSRLRVSATFWQNPRNHFRCQVQFYGLSENDEWTQDRAKPVTQIVSAEAWGRADDVIKIHWQEKKSNTILGSQEGNTMKTNDTYMKFSWLTVPEKSLDKEHRCIVRHENNKNGVDQEIIFPPIKTDVITMDPKDNCSKDANDTLLLQLTNTSAYYMYLLLLLKSVVYFAIITCCLLMAMVKRKDSRGRAKRSGSGATNFSLLKQAGDVEENPGPTSMDWIWRILFLVGAATGAHSFEQVQLQESGPGLVKPSETLSLTCTVSGVSLPDYGVSWIRQPPGKGLEWIGVIWGSETTYYNSSLKSRVTISKDNSKNQVSLKLSSVTAADTAVYYCAKHYYYGGSYAMDYWGQGTLVTVSSTRIQNPDPAVYQLRDSKSSDKSVCLFTDFDSQTNVSQSKDSDVYITDKCVLDMRSMDFKSNSAVAWSNKSDFACANAFNNSIIPEDTFFPSPESSDSTDHVKPKETENTKQPSKSCHKPKAIVHTEKVNMMSLTVLGLRMLFAKTVAVNFLLTAKLFFLLTA

SEQ ID NO: 14385 - protein, 725 aa, synthetic construct
MALPVTALLLPLALLLHAARPDEIVLTQSPATLSLSPGERATLSCSASSSVSYMHWYQQKPGQAPRLLIYDTSKLASGIPARFSGSGSGTDFTLTISSLEPEDVAVYYCFQGSVYPFTFGQGTKLEIKRLEDLKNVFPPEVAVFEPSEAEISHTQKATLVCLATGFYPDHVELSWWVNGKEVHSGVCTDPQPLKEQPALNDSRYCLSSRLRVSATFWQNPRNHFRCQVQFYGLSENDEWTQDRAKPVTQIVSAEAWGRADDVIKIHWQEKKSNTILGSQEGNTMKTNDTYMKFSWLTVPEKSLDKEHRCIVRHENNKNGVDQEIIFPPIKTDVITMDPKDNCSKDANDTLLLQLTNTSAYYMYLLLLLKSVVYFAIITCCLLMAMVKRKDSRGRAKRSGSGATNFSLLKQAGDVEENPGPTSMDWIWRILFLVGAATGAHSFEQVQLQESGPGLVKPSQTLSLTCTVSGGSISTSGMGVGWIRQHPGKGLEWIGHIWWDDDKRYNPALKSRVTISVDTSKNQFSLKLSSVTAADTAVYYCARMELWSYYFDYWGQGTLVTVSSTRIQNPDPAVYQLRDSKSSDKSVCLFTDFDSQTNVSQSKDSDVYITDKCVLDMRSMDFKSNSAVAWSNKSDFACANAFNNSIIPEDTFFPSPESSDSTDHVKPKETENTKQPSKSCHKPKAIVHTEKVNMMSLTVLGLRMLFAKTVAVNFLLTAKLFFLLTA

SEQ ID NO: 14386 - protein, 723 aa, synthetic construct
MALPVTALLLPLALLLHAARPDYIHVTQSPSSLSVSIGDRVTINCQTSQGVGSDLHWYQHKPGRAPKLLIHHASSVEDGVPSRFSGTGFHTSFNLTINDLQADDIGTYYCQVLQSFGRGSRLDTKLEDLKNVFPPEVAVFEPSEAEISHTQKATLVCLATGFYPDHVELSWWVNGKEVHSGVCTDPQPLKEQPALNDSRYCLSSRLRVSATFWQNPRNHFRCQVQFYGLSENDEWTQDRAKPVTQIVSAEAWGRADDVIKIHWQEKKSNTILGSQEGNTMKTNDTYMKFSWLTVPEKSLDKEHRCIVRHENNKNGVDQEIIFPPIKTDVITMDPKDNCSKDANDTLLLQLTNTSAYYMYLLLLLKSVVYFAIITCCLLMAMVKRKDSRGRAKRSGSGATNFSLLKQAGDVEENPGPTSMDWIWRILFLVGAATGAHSFERAHLVQSGTAMKKPGASVRVSCQTSGYTFTAHILFWFRQAPGRGLEWVGWIKPQYGAVNFGGGFRDRVTLTRDVYREIAYMDIRGLKPDDTAVYYCARDRSYGDSSWALDAWGQGTTVVVSATRIQNPDPAVYQLRDSKSSDKSVCLFTDFDSQTNVSQSKDSDVYITDKCVLDMRSMDFKSNSAVAWSNKSDFACANAFNNSIIPEDTFFPSPESSDSTDHVKPKETENTKQPSKSCHKPKAIVHTEKVNMMSLTVLGLRMLFAKTVAVNFLLTAKLFFLLTA

SEQ ID NO: 14387 - protein, 733 aa, synthetic construct
MALPVTALLLPLALLLHAARPDVQMIQTPDSLAVSLGQRATISCRASESVDNYGISFMHWYQQKPGQSPKLLIYRASNLESGIPARFSGSGSRTDFTLTINPVETDDVATYYCQQNNKDPPTFGGGTKLEIKLEDLKNVFPPEVAVFEPSEAEISHTQKATLVCLATGFYPDHVELSWWVNGKEVHSGVCTDPQPLKEQPALNDSRYCLSSRLRVSATFWQNPRNHFRCQVQFYGLSENDEWTQDRAKPVTQIVSAEAWGRADDVIKIHWQEKKSNTILGSQEGNTMKTNDTYMKFSWLTVPEKSLDKEHRCIVRHENNKNGVDQEIIFPPIKTDVITMDPKDNCSKDANDTLLLQLTNTSAYYMYLLLLLKSVVYFAIITCCLLMAMVKRKDSRGRAKRSGSGATNFSLLKQAGDVEENPGPTSMDWIWRILFLVGAATGAHSFEGGGGSQVQLQQSGAELVKPGASVKISCKASGYAFSSYWMNWVKQRPGKGLEWIGQIYPGDGDTTYNGKFKGKATLTADKSSSTVYMQLNSLTSEDSAVYFCVRYYYGSSGYFDYWGQGTTLTVSSTRIQNPDPAVYQLRDSKSSDKSVCLFTDFDSQTNVSQSKDSDVYITDKCVLDMRSMDFKSNSAVAWSNKSDFACANAFNNSIIPEDTFFPSPESSDSTDHVKPKETENTKQPSKSCHKPKAIVHTEKVNMMSLTVLGLRMLFAKTVAVNFLLTAKLFFLLTA

SEQ ID NO: 14388 - protein, 724 aa, synthetic construct
MALPVTALLLPLALLLHAARPDVQMIQTPSSLSASLGDRVTISCRASQDIGNYLNWYQQKPDGTVKLLIYYTSRLHSGVPSRFSGSGSGTEYSLTISNLEQEDIATYFCQQGSALPPTFGGGTKLEINLEDLKNVFPPEVAVFEPSEAEISHTQKATLVCLATGFYPDHVELSWWVNGKEVHSGVCTDPQPLKEQPALNDSRYCLSSRLRVSATFWQNPRNHFRCQVQFYGLSENDEWTQDRAKPVTQIVSAEAWGRADDVIKIHWQEKKSNTILGSQEGNTMKTNDTYMKFSWLTVPEKSLDKEHRCIVRHENNKNGVDQEIIFPPIKTDVITMDPKDNCSKDANDTLLLQLTNTSAYYMYLLLLLKSVVYFAIITCCLLMAMVKRKDSRGRAKRSGSGATNFSLLKQAGDVEENPGPTSMDWIWRILFLVGAATGAHSFEALQLQQSGAELVRPGASVTLSCKASGYTFTDYEMHWVKQTPVHGLEWIGAIDPETGGTAYNQKFEGKAILTADKSSSTAYMELRSLTSEDSPVYYCARRRYYGSSSFDYWGQGTTLTVSSTRIQNPDPAVYQLRDSKSSDKSVCLFTDFDSQTNVSQSKDSDVYITDKCVLDMRSMDFKSNSAVAWSNKSDFACANAFNNSIIPEDTFFPSPESSDSTDHVKPKETENTKQPSKSCHKPKAIVHTEKVNMMSLTVLGLRMLFAKTVAVNFLLTAKLFFLLTA

SEQ ID NO: 14389 - protein, 728 aa, synthetic construct
MALPVTALLLPLALLLHAARPDIVLTQSPASLAVSLGQRATISCRASKSVSTSGYSYLHWYQQKPGQPPKLLIYLASNLESGVPARFSGSGSGTDFTLNIHPVEEEDAATYYCQHSRELPFTFGSGTKLEIKLEDLKNVFPPEVAVFEPSEAEISHTQKATLVCLATGFYPDHVELSWWVNGKEVHSGVCTDPQPLKEQPALNDSRYCLSSRLRVSATFWQNPRNHFRCQVQFYGLSENDEWTQDRAKPVTQIVSAEAWGRADDVIKIHWQEKKSNTILGSQEGNTMKTNDTYMKFSWLTVPEKSLDKEHRCIVRHENNKNGVDQEIIFPPIKTDVITMDPKDNCSKDANDTLLLQLTNTSAYYMYLLLLLKSVVYFAIITCCLLMAMVKRKDSRGRAKRSGSGATNFSLLKQAGDVEENPGPTSMDWIWRILFLVGAATGAHSFEQVQLVESGGGLVQPGGSLKLSCAASGFDFSRYWMSWVRQAPGKGLEWIGEINPTSSTINFTPSLKDKVFISRDNAKNTLYLQMSKVRSEDTALYYCARGNYYRYGDAMDYWGQGTSVTVSTRIQNPDPAVYQLRDSKSSDKSVCLFTDFDSQTNVSQSKDSDVYITDKCVLDMRSMDFKSNSAVAWSNKSDFACANAFNNSIIPEDTFFPSPESSDSTDHVKPKETENTKQPSKSCHKPKAIVHTEKVNMMSLTVLGLRMLFAKTVAVNFLLTAKLFFLLTA

SEQ ID NO: 14390 - protein, 726 aa, synthetic construct
MALPVTALLLPLALLLHAARPDIQMTQSPSSLSASVGDRVTITCSASQDISNYLNWYQQKPGKAPKLLIYYTSNLHSGVPSRFSGSGSGTDFTLTISSLQPEDFATYYCQQYRKLPWTFGQGTKLEIKRLEDLKNVFPPEVAVFEPSEAEISHTQKATLVCLATGFYPDHVELSWWVNGKEVHSGVCTDPQPLKEQPALNDSRYCLSSRLRVSATFWQNPRNHFRCQVQFYGLSENDEWTQDRAKPVTQIVSAEAWGRADDVIKIHWQEKKSNTILGSQEGNTMKTNDTYMKFSWLTVPEKSLDKEHRCIVRHENNKNGVDQEIIFPPIKTDVITMDPKDNCSKDANDTLLLQLTNTSAYYMYLLLLLKSVVYFAIITCCLLMAMVKRKDSRGRAKRSGSGATNFSLLKQAGDVEENPGPTSMDWIWRILFLVGAATGAHSFEQVQLVQSGAEVKKPGSSVKVSCKASGGTFSNYWMHWVRQAPGQGLEWMGATYRGHSDTYYNQKFKGRVTITADKSTSTAYMELSSLRSEDTAVYYCARGAIYDGYDVLDNWGQGTLVTVSSTRIQNPDPAVYQLRDSKSSDKSVCLFTDFDSQTNVSQSKDSDVYITDKCVLDMRSMDFKSNSAVAWSNKSDFACANAFNNSIIPEDTFFPSPESSDSTDHVKPKETENTKQPSKSCHKPKAIVHTEKVNMMSLTVLGLRMLFAKTVAVNFLLTAKLFFLLTA

SEQ ID NO: 14391 - protein, 726 aa, synthetic construct
MALPVTALLLPLALLLHAARPDIVLTQSPATLSLSPGDRATISCRASESVTILGSHLIYWYQQKPGQPPRLLIQLASNVQTGVPARFSGSGSRTDFTLTISSVEPEDFAVYYCLQSRTIPRTFGQGTKLEIKRLEDLKNVFPPEVAVFEPSEAEISHTQKATLVCLATGFYPDHVELSWWVNGKEVHSGVCTDPQPLKEQPALNDSRYCLSSRLRVSATFWQNPRNHFRCQVQFYGLSENDEWTQDRAKPVTQIVSAEAWGRADDVIKIHWQEKKSNTILGSQEGNTMKTNDTYMKFSWLTVPEKSLDKEHRCIVRHENNKNGVDQEIIFPPIKTDVITMDPKDNCSKDANDTLLLQLTNTSAYYMYLLLLLKSVVYFAIITCCLLMAMVKRKDSRGRAKRSGSGATNFSLLKQAGDVEENPGPTSMDWIWRILFLVGAATGAHSFEQVQLVQSGPEVKKPGESVKISCKASGYTFRHYSMNWVKQAPGQGLKWMGRINTESGVPIYADDFKGRFSFTVDTSASTAYLEISSLTSEDTAVYFCSNDYLYSLDFWGQGTTLTVSSTRIQNPDPAVYQLRDSKSSDKSVCLFTDFDSQTNVSQSKDSDVYITDKCVLDMRSMDFKSNSAVAWSNKSDFACANAFNNSIIPEDTFFPSPESSDSTDHVKPKETENTKQPSKSCHKPKAIVHTEKVNMMSLTVLGLRMLFAKTVAVNFLLTAKLFFLLTA

SEQ ID NO: 14392 - protein, 727 aa, synthetic construct
MALPVTALLLPLALLLHAARPQSVLTQPPSVSGAPGQRVTISCTGSSSNIGAGFDVHWYQQLPGTAPKLLIYGNSNRPSGVPDRFSGSKSGTSASLAITGLQAEDEADYYCQSYDSSLSGYVFGTGTKVTVLGLEDLKNVFPPEVAVFEPSEAEISHTQKATLVCLATGFYPDHVELSWWVNGKEVHSGVCTDPQPLKEQPALNDSRYCLSSRLRVSATFWQNPRNHFRCQVQFYGLSENDEWTQDRAKPVTQIVSAEAWGRADDVIKIHWQEKKSNTILGSQEGNTMKTNDTYMKFSWLTVPEKSLDKEHRCIVRHENNKNGVDQEIIFPPIKTDVITMDPKDNCSKDANDTLLLQLTNTSAYYMYLLLLLKSVVYFAIITCCLLMAMVKRKDSRGRAKRSGSGATNFSLLKQAGDVEENPGPTSMDWIWRILFLVGAATGAHSFEQVQLVQSGAEVKKPGASVKVSCKASGYTFTDYYMHWVRQAPGQRLEWMGWINPNSGGTNYAQKFQDRITVTRDTSSNTGYMELTRLRSDDTAVYYCARSPYSGVLDKWGQGTLVTVSSTRIQNPDPAVYQLRDSKSSDKSVCLFTDFDSQTNVSQSKDSDVYITDKCVLDMRSMDFKSNSAVAWSNKSDFACANAFNNSIIPEDTFFPSPESSDSTDHVKPKETENTKQPSKSCHKPKAIVHTEKVNMMSLTVLGLRMLFAKTVAVNFLLTAKLFFLLTA

SEQ ID NO: 14393 - protein, 724 aa, synthetic construct
MALPVTALLLPLALLLHAARPQAVLTQPPSASGTPGQRVTISCSGSSSNIGSYTVSWYQQLPGTAPKFLIYSNNQRPSGVPDRFSGSKSGTSASLAISGLQSEDEADYYCAAWDDSLNGYVFGTGTKVTVLGLEDLKNVFPPEVAVFEPSEAEISHTQKATLVCLATGFYPDHVELSWWVNGKEVHSGVCTDPQPLKEQPALNDSRYCLSSRLRVSATFWQNPRNHFRCQVQFYGLSENDEWTQDRAKPVTQIVSAEAWGRADDVIKIHWQEKKSNTILGSQEGNTMKTNDTYMKFSWLTVPEKSLDKEHRCIVRHENNKNGVDQEIIFPPIKTDVITMDPKDNCSKDANDTLLLQLTNTSAYYMYLLLLLKSVVYFAIITCCLLMAMVKRKDSRGRAKRSGSGATNFSLLKQAGDVEENPGPTSMDWIWRILFLVGAATGAHSFEVQLVQSGAEVKKPGESLKISCKGSGYDFTTYWIGWVRQMPGKGLEWMGIIYPGDSDTRYSPSVRGRVTISADKSINTAYLQWSSLEASDTAMYYCARMWTFSQDGWGQGTLVTVSSTRIQNPDPAVYQLRDSKSSDKSVCLFTDFDSQTNVSQSKDSDVYITDKCVLDMRSMDFKSNSAVAWSNKSDFACANAFNNSIIPEDTFFPSPESSDSTDHVKPKETENTKQPSKSCHKPKAIVHTEKVNMMSLTVLGLRMLFAKTVAVNFLLTAKLFFLLTA

SEQ ID NO: 14394 - protein, 727 aa, synthetic construct
MALPVTALLLPLALLLHAARPDIVMTQSPDSLAVSLGERATINCKSSQSILYSSNQKNYLAWYQQKPGQSPKLLIYWASTRESGVPDRFSGSGSGTDFTLTISSLQAEDVAVYYCHQYISSYTFGQGTKLEIKLEDLKNVFPPEVAVFEPSEAEISHTQKATLVCLATGFYPDHVELSWWVNGKEVHSGVCTDPQPLKEQPALNDSRYCLSSRLRVSATFWQNPRNHFRCQVQFYGLSENDEWTQDRAKPVTQIVSAEAWGRADDVIKIHWQEKKSNTILGSQEGNTMKTNDTYMKFSWLTVPEKSLDKEHRCIVRHENNKNGVDQEIIFPPIKTDVITMDPKDNCSKDANDTLLLQLTNTSAYYMYLLLLLKSVVYFAIITCCLLMAMVKRKDSRGRAKRSGSGATNFSLLKQAGDVEENPGPTSMDWIWRILFLVGAATGAHSFEQVQLVQSGAEVKKPGASVKVSCKASGYTFASQWMHWMRQAPGQGLEWIGWINPGNVNTKYNEKFKGRATLTVDTSTNTAYMELSSLRSEDTAVYYCARSTWYRPLDYWGQGTLVTVSSTRIQNPDPAVYQLRDSKSSDKSVCLFTDFDSQTNVSQSKDSDVYITDKCVLDMRSMDFKSNSAVAWSNKSDFACANAFNNSIIPEDTFFPSPESSDSTDHVKPKETENTKQPSKSCHKPKAIVHTEKVNMMSLTVLGLRMLFAKTVAVNFLLTAKLFFLLTA

SEQ ID NO: 14395 - protein, 727 aa, synthetic construct
MALPVTALLLPLALLLHAARPDHIVLTQSPSSLSASLGDRVTISCRASQDISTYLNWYQQKPDGTVKLLIFYTSRLHAGVPSRFSGSGSGTHHSLTISNLEQEDIATYFCQQGNSLPFTFGSGTKLEIKRLEDLKNVFPPEVAVFEPSEAEISHTQKATLVCLATGFYPDHVELSWWVNGKEVHSGVCTDPQPLKEQPALNDSRYCLSSRLRVSATFWQNPRNHFRCQVQFYGLSENDEWTQDRAKPVTQIVSAEAWGRADDVIKIHWQEKKSNTILGSQEGNTMKTNDTYMKFSWLTVPEKSLDKEHRCIVRHENNKNGVDQEIIFPPIKTDVITMDPKDNCSKDANDTLLLQLTNTSAYYMYLLLLLKSVVYFAIITCCLLMAMVKRKDSRGRAKRSGSGATNFSLLKQAGDVEENPGPTSMDWIWRILFLVGAATGAHSFEQVQLKESGPELEKPGASVKISCKASGYSFTAYSMNWVKQNNGMSLEWIGSIDPYYGDTKYAQKFKGKATLTVDKASSTAYLQLKSLTSEDSAVYYCARRMITTGDWYFDVWGAGTTVTVSSTRIQNPDPAVYQLRDSKSSDKSVCLFTDFDSQTNVSQSKDSDVYITDKCVLDMRSMDFKSNSAVAWSNKSDFACANAFNNSIIPEDTFFPSPESSDSTDHVKPKETENTKQPSKSCHKPKAIVHTEKVNMMSLTVLGLRMLFAKTVAVNFLLTAKLFFLLTA

SEQ ID NO: 14396 - protein, 727 aa, synthetic construct; identical to SEQ ID NO: 14395

SEQ ID NO: 14397 - protein, 727 aa, synthetic construct
MALPVTALLLPLALLLHAARPDEIVLTQSPATLSLSPGERATLSCRASQSVSSYLAWYQQKPGQAPRLLIYDASNRATGIPARFSGSGSGTDFTLTISSLEPEDFAVYYCQQRSNWPITFGQGTRLEIKLEDLKNVFPPEVAVFEPSEAEISHTQKATLVCLATGFYPDHVELSWWVNGKEVHSGVCTDPQPLKEQPALNDSRYCLSSRLRVSATFWQNPRNHFRCQVQFYGLSENDEWTQDRAKPVTQIVSAEAWGRADDVIKIHWQEKKSNTILGSQEGNTMKTNDTYMKFSWLTVPEKSLDKEHRCIVRHENNKNGVDQEIIFPPIKTDVITMDPKDNCSKDANDTLLLQLTNTSAYYMYLLLLLKSVVYFAIITCCLLMAMVKRKDSRGRAKRSGSGATNFSLLKQAGDVEENPGPTSMDWIWRILFLVGAATGAHSFEEVQLVESGGGLVQPGRSLRLSCAASGFTFNDYAMHWVRQAPGKGLEWVSTISWNSGSIGYADSVKGRFTISRDNAKKSLYLQMNSLRAEDTALYYCAKDIQYGNYYYGMDVWGQGTTVTVSSTRIQNPDPAVYQLRDSKSSDKSVCLFTDFDSQTNVSQSKDSDVYITDKCVLDMRSMDFKSNSAVAWSNKSDFACANAFNNSIIPEDTFFPSPESSDSTDHVKPKETENTKQPSKSCHKPKAIVHTEKVNMMSLTVLGLRMLFAKTVAVNFLLTAKLFFLLTA

SEQ ID NO: 14398 - protein, 729 aa, synthetic construct
MALPVTALLLPLALLLHAARPDIVMTQTPLSLPVTPGEPASISCRSSKSLLHSNGITYLYWYLQKPGQSPQLLIYQMSNLVSGVPDRFSGSGSGTDFTLKISRVEAEDVGVYYCAQNLELPYTFGGGTKVEIKRLEDLKNVFPPEVAVFEPSEAEISHTQKATLVCLATGFYPDHVELSWWVNGKEVHSGVCTDPQPLKEQPALNDSRYCLSSRLRVSATFWQNPRNHFRCQVQFYGLSENDEWTQDRAKPVTQIVSAEAWGRADDVIKIHWQEKKSNTILGSQEGNTMKTNDTYMKFSWLTVPEKSLDKEHRCIVRHENNKNGVDQEIIFPPIKTDVITMDPKDNCSKDANDTLLLQLTNTSAYYMYLLLLLKSVVYFAIITCCLLMAMVKRKDSRGRAKRSGSGATNFSLLKQAGDVEENPGPTSMDWIWRILFLVGAATGAHSFEQVQLVQSGAEVKKPGSSVKVSCKASGYAFSYSWINWVRQAPGQGLEWMGRIFPGDGDTDYNGKFKGRVTITADKSTSTAYMELSSLRSEDTAVYYCARNVFDGYWLVYWGQGTLVTVSSTRIQNPDPAVYQLRDSKSSDKSVCLFTDFDSQTNVSQSKDSDVYITDKCVLDMRSMDFKSNSAVAWSNKSDFACANAFNNSIIPEDTFFPSPESSDSTDHVKPKETENTKQPSKSCHKPKAIVHTEKVNMMSLTVLGLRMLFAKTVAVNFLLTAKLFFLLTA

SEQ ID NO: 14399 - protein, 730 aa, synthetic construct
MALPVTALLLPLALLLHAARPDIQMTQSPSSLSASVGDRVTITCRSSQSIVHSVGNTFLEWYQQKPGKAPKLLIYKVSNRFSGVPSRFSGSGSGTDFTLTISSLQPEDFATYYCFQGSQFPYTFGQGTKVEIKRLEDLKNVFPPEVAVFEPSEAEISHTQKATLVCLATGFYPDHVELSWWVNGKEVHSGVCTDPQPLKEQPALNDSRYCLSSRLRVSATFWQNPRNHFRCQVQFYGLSENDEWTQDRAKPVTQIVSAEAWGRADDVIKIHWQEKKSNTILGSQEGNTMKTNDTYMKFSWLTVPEKSLDKEHRCIVRHENNKNGVDQEIIFPPIKTDVITMDPKDNCSKDANDTLLLQLTNTSAYYMYLLLLLKSVVYFAIITCCLLMAMVKRKDSRGRAKRSGSGATNFSLLKQAGDVEENPGPTSMDWIWRILFLVGAATGAHSFEEVQLVESGGGLVQPGGSLRLSCAASGYEFSRSWMNWVRQAPGKGLEWVGRIYPGDGDTNYSGKFKGRFTISADTSKNTAYLQMNSLRAEDTAVYYCARDGSSWDWYFDVWGQGTLVTVSSTRIQNPDPAVYQLRDSKSSDKSVCLFTDFDSQTNVSQSKDSDVYITDKCVLDMRSMDFKSNSAVAWSNKSDFACANAFNNSIIPEDTFFPSPESSDSTDHVKPKETENTKQPSKSCHKPKAIVHTEKVNMMSLTVLGLRMLFAKTVAVNFLLTAKLFFLLTA

SEQ ID NO: 14400 - protein, 728 aa, synthetic construct
MALPVTALLLPLALLLHAARPDIQMTQSPSSLSASVGDRVTITCRASQTIWSYLNWYQQRPGKAPNLLIYAASSLQSGVPSRFSGRGSGTDFTLTISSLQAEDFATYYCQQSYSIPQIFGQGTKLEIKLEDLKNVFPPEVAVFEPSEAEISHTQKATLVCLATGFYPDHVELSWWVNGKEVHSGVCTDPQPLKEQPALNDSRYCLSSRLRVSATFWQNPRNHFRCQVQFYGLSENDEWTQDRAKPVTQIVSAEAWGRADDVIKIHWQEKKSNTILGSQEGNTMKTNDTYMKFSWLTVPEKSLDKEHRCIVRHENNKNGVDQEIIFPPIKTDVITMDPKDNCSKDANDTLLLQLTNTSAYYMYLLLLLKSVVYFAIITCCLLMAMVKRKDSRGRAKRSGSGATNFSLLKQAGDVEENPGPTSMDWIWRILFLVGAATGAHSFEQVQLQQSGPGLVKPSQTLSLTCAISGDSVSSNSAAWNWIRQSPSRGLEWLGRTYYRSKWYNDYAVSVKSRITINPDTSKNQFSLQLNSVTPEDTAVYYCAREVTGDLEDAFDIWGQGTMVTVSSTRIQNPDPAVYQLRDSKSSDKSVCLFTDFDSQTNVSQSKDSDVYITDKCVLDMRSMDFKSNSAVAWSNKSDFACANAFNNSIIPEDTFFPSPESSDSTDHVKPKETENTKQPSKSCHKPKAIVHTEKVNMMSLTVLGLRMLFAKTVAVNFLLTAKLFFLLTA

SEQ ID NO: 14401 - protein, 721 aa, synthetic construct
MALPVTALLLPLALLLHAARPDIQMTQSPATIENTSLSASVGDRVTITCRASQGISSWLTWYQQKPEKAPKSLIYAASSLQSGVPSRFSGSGSGTDFTLTISSLQPEDFATYYCQQYDSYPITFGQGTRLEIKLEDLKNVFPPEVAVFEPSEAEISHTQKATLVCLATGFYPDHVELSWWVNGKEVHSGVCTDPQPLKEQPALNDSRYCLSSRLRVSATFWQNPRNHFRCQVQFYGLSENDEWTQDRAKPVTQIVSAEAWGRADDVIKIHWQEKKSNTILGSQEGNTMKTNDTYMKFSWLTVPEKSLDKEHRCIVRHENNKNGVDQEIIFPPIKTDVITMDPKDNCSKDANDTLLLQLTNTSAYYMYLLLLLKSVVYFAIITCCLLMAMVKRKDSRGRAKRSGSGATNFSLLKQAGDVEENPGPTSMDWIWRILFLVGAATGAHSFEQVQLQQWGAGLLKPSETLSLTCAVYGGSFSAYYWSWIRQPPGKGLEWIGDINHGGGTNYNPSLKSRVTISVDTSKNQFSLKLNSVTAADTAVYYCASLTAYWGQGSLVTVSSTRIQNPDPAVYQLRDSKSSDKSVCLFTDFDSQTNVSQSKDSDVYITDKCVLDMRSMDFKSNSAVAWSNKSDFACANAFNNSIIPEDTFFPSPESSDSTDHVKPKETENTKQPSKSCHKPKAIVHTEKVNMMSLTVLGLRMLFAKTVAVNFLLTAKLFFLLTA

SEQ ID NO: 14402 - protein, 726 aa, synthetic construct
MALPVTALLLPLALLLHAARPDEIVLTQSPDSLAVSLGERATINCKASQSVDFDGDSYLNWYQQKPGQPPKVLIYAASTLQSGVPSRFSGSGSGTDFTLTINSLEAEDAATYYCQQSNEDPWTFGGGTKVEIKLEDLKNVFPPEVAVFEPSEAEISHTQKATLVCLATGFYPDHVELSWWVNGKEVHSGVCTDPQPLKEQPALNDSRYCLSSRLRVSATFWQNPRNHFRCQVQFYGLSENDEWTQDRAKPVTQIVSAEAWGRADDVIKIHWQEKKSNTILGSQEGNTMKTNDTYMKFSWLTVPEKSLDKEHRCIVRHENNKNGVDQEIIFPPIKTDVITMDPKDNCSKDANDTLLLQLTNTSAYYMYLLLLLKSVVYFAIITCCLLMAMVKRKDSRGRAKRSGSGATNFSLLKQAGDVEENPGPTSMDWIWRILFLVGAATGAHSFEQVQLVQSGAEVKKPGASVKVSCKVSGYTFTDYYITWVRQAPGQALEWMGWIYPGSGNTKYSQKFQGRFVFSVDTSASTAYLQLSSLKAEDTAVYYCANYGNYWFAYWGQGTLVTVSSTRIQNPDPAVYQLRDSKSSDKSVCLFTDFDSQTNVSQSKDSDVYITDKCVLDMRSMDFKSNSAVAWSNKSDFACANAFNNSIIPEDTFFPSPESSDSTDHVKPKETENTKQPSKSCHKPKAIVHTEKVNMMSLTVLGLRMLFAKTVAVNFLLTAKLFFLLTA

SEQ ID NO: 14403 - protein, 723 aa, synthetic construct
MALPVTALLLPLALLLHAARPDIQMTQSPSSLSASVGDRVTITCRASQGISSWLAWYQQKPEKAPKSLIYAASSLQSGVPSRFSGSGSGTDFTLTISSLQPEDFATYYCQQYNSYPPTFGGGTKVEIKLEDLKNVFPPEVAVFEPSEAEISHTQKATLVCLATGFYPDHVELSWWVNGKEVHSGVCTDPQPLKEQPALNDSRYCLSSRLRVSATFWQNPRNHFRCQVQFYGLSENDEWTQDRAKPVTQIVSAEAWGRADDVIKIHWQEKKSNTILGSQEGNTMKTNDTYMKFSWLTVPEKSLDKEHRCIVRHENNKNGVDQEIIFPPIKTDVITMDPKDNCSKDANDTLLLQLTNTSAYYMYLLLLLKSVVYFAIITCCLLMAMVKRKDSRGRAKRSGSGATNFSLLKQAGDVEENPGPTSMDWIWRILFLVGAATGAHSFEEVQLVQSGGGLVHPGGSLRLSCAGSGFAFSSSTMHWIRQAPGKGLEWISLIGSGGGIYYGDSVKGRFTISRDNAKNSLYLQMNSLRAEDMAVYYCVRGYFDWVDYFDYWGQGTLVTVSSTRIQNPDPAVYQLRDSKSSDKSVCLFTDFDSQTNVSQSKDSDVYITDKCVLDMRSMDFKSNSAVAWSNKSDFACANAFNNSIIPEDTFFPSPESSDSTDHVKPKETENTKQPSKSCHKPKAIVHTEKVNMMSLTVLGLRMLFAKTVAVNFLLTAKLFFLLTA

SEQ ID NO: 14404 - protein, 733 aa, synthetic construct
MALPVTALLLPLALLLHAARPDDIVMTQSPDSLTVSLGERTTINCKSSQSVLDSSKNKNSLAWYQQKPGQPPKLLLSWASTRESGIPDRFSGSGSGTDFTLTIDSLQPEDSATYYCQQSAHFPITFGQGTRLEIKLEDLKNVFPPEVAVFEPSEAEISHTQKATLVCLATGFYPDHVELSWWVNGKEVHSGVCTDPQPLKEQPALNDSRYCLSSRLRVSATFWQNPRNHFRCQVQFYGLSENDEWTQDRAKPVTQIVSAEAWGRADDVIKIHWQEKKSNTILGSQEGNTMKTNDTYMKFSWLTVPEKSLDKEHRCIVRHENNKNGVDQEIIFPPIKTDVITMDPKDNCSKDANDTLLLQLTNTSAYYMYLLLLLKSVVYFAIITCCLLMAMVKRKDSRGRAKRSGSGATNFSLLKQAGDVEENPGPTSMDWIWRILFLVGAATGAHSFEQVQLVQSGAEVKKPGASVKVSCKASGYTFTNYGMNWVKQAPGQGLKWMGWINTYTGEPTYADDFKGRVTMTSDTSTSTAYLELHNLRSDDTAVYYCARWSWSDGYYVYFDYWGQGTTVTVSSTRIQNPDPAVYQLRDSKSSDKSVCLFTDFDSQTNVSQSKDSDVYITDKCVLDMRSMDFKSNSAVAWSNKSDFACANAFNNSIIPEDTFFPSPESSDSTDHVKPKETENTKQPSKSCHKPKAIVHTEKVNMMSLTVLGLRMLFAKTVAVNFLLTAKLFFLLTA

SEQ ID NO: 14405 - protein, 729 aa, synthetic construct
MALPVTALLLPLALLLHAARPDEIVLTQSPGSLAVSPGERVTMSCKSSQSVFFSSSQKNYLAWYQQIPGQSPRLLIYWASTRESGVPDRFTGSGSGTDFTLTISSVQPEDLAIYYCHQYLSSRTFGQGTKLEIKRLEDLKNVFPPEVAVFEPSEAEISHTQKATLVCLATGFYPDHVELSWWVNGKEVHSGVCTDPQPLKEQPALNDSRYCLSSRLRVSATFWQNPRNHFRCQVQFYGLSENDEWTQDRAKPVTQIVSAEAWGRADDVIKIHWQEKKSNTILGSQEGNTMKTNDTYMKFSWLTVPEKSLDKEHRCIVRHENNKNGVDQEIIFPPIKTDVITMDPKDNCSKDANDTLLLQLTNTSAYYMYLLLLLKSVVYFAIITCCLLMAMVKRKDSRGRAKRSGSGATNFSLLKQAGDVEENPGPTSMDWIWRILFLVGAATGAHSFEQVQLQQPGAEVVKPGASVKMSCKASGYTFTSYYIHWIKQTPGQGLEWVGVIYPGNDDISYNQKFQGKATLTADKSSTTAYMQLSSLTSEDSAVYYCAREVRLRYFDVWGQGTTVTVSSTRIQNPDPAVYQLRDSKSSDKSVCLFTDFDSQTNVSQSKDSDVYITDKCVLDMRSMDFKSNSAVAWSNKSDFACANAFNNSIIPEDTFFPSPESSDSTDHVKPKETENTKQPSKSCHKPKAIVHTEKVNMMSLTVLGLRMLFAKTVAVNFLLTAKLFFLLTA

SEQ ID NO: 14406 - protein, 733 aa, synthetic construct
MALPVTALLLPLALLLHAARPDVLLTQSPLSLPVTLGQPASISCRSSQTIVHSNGNTYLEWFQQRPGQSPRLLIYQVSNRFSGVPDRFSGSGSGTDFTLKISRVEAEDVGVYYCFQGSHVPRTFGGGTKVEIKRALEDLKNVFPPEVAVFEPSEAEISHTQKATLVCLATGFYPDHVELSWWVNGKEVHSGVCTDPQPLKEQPALNDSRYCLSSRLRVSATFWQNPRNHFRCQVQFYGLSENDEWTQDRAKPVTQIVSAEAWGRADDVIKIHWQEKKSNTILGSQEGNTMKTNDTYMKFSWLTVPEKSLDKEHRCIVRHENNKNGVDQEIIFPPIKTDVITMDPKDNCSKDANDTLLLQLTNTSAYYMYLLLLLKSVVYFAIITCCLLMAMVKRKDSRGRAKRSGSGATNFSLLKQAGDVEENPGPTSMDWIWRILFLVGAATGAHSFEQIQLVQSGSELKKPGASVKVSCKASGYTFTNYGMNWVRQAPGQGLKWMGWINTNTGEPKYAEEFKGRFALSLDTSVSTAYLQINSLKAEDTAVYFCARGYGNYARGAWLAYWGQGTLVTVSSTRIQNPDPAVYQLRDSKSSDKSVCLFTDFDSQTNVSQSKDSDVYITDKCVLDMRSMDFKSNSAVAWSNKSDFACANAFNNSIIPEDTFFPSPESSDSTDHVKPKETENTKQPSKSCHKPKAIVHTEKVNMMSLTVLGLRMLFAKTVAVNFLLTAKLFFLLTA

SEQ ID NO: 14407 - protein, 718 aa, synthetic construct
MALPVTALLLPLALLLHAARPDEIVLTQSPATLSLSPGERATLSCSASSSINYIYWLQQKPGQAPRILIYLTSNLASGVPARFSGSGSGTDFTLTISSLEPEDFAVYYCLQWSSNPLTFGGGTKVEIKLEDLKNVFPPEVAVFEPSEAEISHTQKATLVCLATGFYPDHVELSWWVNGKEVHSGVCTDPQPLKEQPALNDSRYCLSSRLRVSATFWQNPRNHFRCQVQFYGLSENDEWTQDRAKPVTQIVSAEAWGRADDVIKIHWQEKKSNTILGSQEGNTMKTNDTYMKFSWLTVPEKSLDKEHRCIVRHENNKNGVDQEIIFPPIKTDVITMDPKDNCSKDANDTLLLQLTNTSAYYMYLLLLLKSVVYFAIITCCLLMAMVKRKDSRGRAKRSGSGATNFSLLKQAGDVEENPGPTSMDWIWRILFLVGAATGAHSFEEVQLVESGGGLVKPGGSLRLSCAASGFTFSSYDMSWVRQAPGKGLEWVSTISSGGSYTYYLDSIKGRFTISRDNAKNSLYLQMNSLRAEDTAVYYCARQGLDYWGRGTLVTVSSTRIQNPDPAVYQLRDSKSSDKSVCLFTDFDSQTNVSQSKDSDVYITDKCVLDMRSMDFKSNSAVAWSNKSDFACANAFNNSIIPEDTFFPSPESSDSTDHVKPKETENTKQPSKSCHKPKAIVHTEKVNMMSLTVLGLRMLFAKTVAVNFLLTAKLFFLLTA

SEQ ID NO: 14408 - protein, 727 aa, synthetic construct
MALPVTALLLPLALLLHAARPDIVMTQSPDSLAVSLGERATINCRASKSVSTSGYSFMHWYQQKPGQPPKLLIYLASNLESGVPDRFSGSGSGTDFTLTISSLQAEDVAVYYCQHSREVPWTFGQGTKVEIKRLEDLKNVFPPEVAVFEPSEAEISHTQKATLVCLATGFYPDHVELSWWVNGKEVHSGVCTDPQPLKEQPALNDSRYCLSSRLRVSATFWQNPRNHFRCQVQFYGLSENDEWTQDRAKPVTQIVSAEAWGRADDVIKIHWQEKKSNTILGSQEGNTMKTNDTYMKFSWLTVPEKSLDKEHRCIVRHENNKNGVDQEIIFPPIKTDVITMDPKDNCSKDANDTLLLQLTNTSAYYMYLLLLLKSVVYFAIITCCLLMAMVKRKDSRGRAKRSGSGATNFSLLKQAGDVEENPGPTSMDWIWRILFLVGAATGAHSFEQVQLVQSGAEVKKPGASVKVSCKASGYTFTNYGMNWVRQAPGQGLEWMGWINTYTGEPTYADAFKGRFAFSLDTSTSTAYLQINSLRSDDTAVYYCARDYGDYGMDYWGQGTTVTVSSTRIQNPDPAVYQLRDSKSSDKSVCLFTDFDSQTNVSQSKDSDVYITDKCVLDMRSMDFKSNSAVAWSNKSDFACANAFNNSIIPEDTFFPSPESSDSTDHVKPKETENTKQPSKSCHKPKAIVHTEKVNMMSLTVLGLRMLFAKTVAVNFLLTAKLFFLLTA

SEQ ID NO: 14409 - protein, 723 aa, synthetic construct
MALPVTALLLPLALLLHAARPDIVMTQTPLTLSVTIGQPASISCKSSQSLLDSDGKTYLNWLLQRPGQSPERLIYLVSKLDSGVPDRFTGSGSGTDFTLKISRVEAEDLGVYCCWQGTHFPYTFGGGTKVEIKGLEDLKNVFPPEVAVFEPSEAEISHTQKATLVCLATGFYPDHVELSWWVNGKEVHSGVCTDPQPLKEQPALNDSRYCLSSRLRVSATFWQNPRNHFRCQVQFYGLSENDEWTQDRAKPVTQIVSAEAWGRADDVIKIHWQEKKSNTILGSQEGNTMKTNDTYMKFSWLTVPEKSLDKEHRCIVRHENNKNGVDQEIIFPPIKTDVITMDPKDNCSKDANDTLLLQLTNTSAYYMYLLLLLKSVVYFAIITCCLLMAMVKRKDSRGRAKRSGSGATNFSLLKQAGDVEENPGPTSMDWIWRILFLVGAATGAHSFEQVQLQQPGAELVRPGASVKLSCKASGYTFTSYWMNWVKQRPGQGLEWIGMIDPSDSETHYNHIFKDKATLTVDKSSSTAYLQLSSLTSEDSAVYYCARNLYLWGQGTSVTVSSTRIQNPDPAVYQLRDSKSSDKSVCLFTDFDSQTNVSQSKDSDVYITDKCVLDMRSMDFKSNSAVAWSNKSDFACANAFNNSIIPEDTFFPSPESSDSTDHVKPKETENTKQPSKSCHKPKAIVHTEKVNMMSLTVLGLRMLFAKTVAVNFLLTAKLFFLLTA

SEQ ID NO: 14410 - protein, 731 aa, synthetic construct
MALPVTALLLPLALLLHAARPDIVMTQSPDSLAVSLGERATINCESSQSLLNSGNQKNYLTWYQQKPGQPPKPLIYWASTRESGVPDRFSGSGSGTDFTLTISSLQAEDVAVYYCQNDYSYPYTFGQGTKLEIKRLEDLKNVFPPEVAVFEPSEAEISHTQKATLVCLATGFYPDHVELSWWVNGKEVHSGVCTDPQPLKEQPALNDSRYCLSSRLRVSATFWQNPRNHFRCQVQFYGLSENDEWTQDRAKPVTQIVSAEAWGRADDVIKIHWQEKKSNTILGSQEGNTMKTNDTYMKFSWLTVPEKSLDKEHRCIVRHENNKNGVDQEIIFPPIKTDVITMDPKDNCSKDANDTLLLQLTNTSAYYMYLLLLLKSVVYFAIITCCLLMAMVKRKDSRGRAKRSGSGATNFSLLKQAGDVEENPGPTSMDWIWRILFLVGAATGAHSFEEVQLVQSGAEVKKPGESLKISCKGSGYSFTDYYMKWARQMPGKGLEWMGDIIPSNGATFYNQKFKGQVTISADKSISTTYLQWSSLKASDTAMYYCARSHLLRASWFAYWGQGTMVTVSSTRIQNPDPAVYQLRDSKSSDKSVCLFTDFDSQTNVSQSKDSDVYITDKCVLDMRSMDFKSNSAVAWSNKSDFACANAFNNSIIPEDTFFPSPESSDSTDHVKPKETENTKQPSKSCHKPKAIVHTEKVNMMSLTVLGLRMLFAKTVAVNFLLTAKLFFLLTA

SEQ ID NO: 14411 - protein, 726 aa, synthetic construct
MALPVTALLLPLALLLHAARPDIQMTQSTSSLSASLGDRVTISCSASQGINNYLNWYQQKPDGTVELLIYYTSTLQSGVPSRFSGSGSGTDYSLTISNLEPEDIGTYYCQQYSKLPRTFGGGTKLEIKLEDLKNVFPPEVAVFEPSEAEISHTQKATLVCLATGFYPDHVELSWWVNGKEVHSGVCTDPQPLKEQPALNDSRYCLSSRLRVSATFWQNPRNHFRCQVQFYGLSENDEWTQDRAKPVTQIVSAEAWGRADDVIKIHWQEKKSNTILGSQEGNTMKTNDTYMKFSWLTVPEKSLDKEHRCIVRHENNKNGVDQEIIFPPIKTDVITMDPKDNCSKDANDTLLLQLTNTSAYYMYLLLLLKSVVYFAIITCCLLMAMVKRKDSRGRAKRSGSGATNFSLLKQAGDVEENPGPTSMDWIWRILFLVGAATGAHSFEQVQLQQSGSELMMPGASVKISCKATGYTFSNYWIEWVKQRPGHGLEWIGEILPGTGRTIYNEKFKGKATFTADISSNTVQMQLSSLTSEDSAVYYCARRDYYGNFYYAMDYWGQGTSVTVSSTRIQNPDPAVYQLRDSKSSDKSVCLFTDFDSQTNVSQSKDSDVYITDKCVLDMRSMDFKSNSAVAWSNKSDFACANAFNNSIIPEDTFFPSPESSDSTDHVKPKETENTKQPSKSCHKPKAIVHTEKVNMMSLTVLGLRMLFAKTVAVNFLLTAKLFFLLTA

SEQ ID NO: 14412 - protein, 721 aa, synthetic construct
MALPVTALLLPLALLLHAARPDIQMTQSPASLSVSVGETVTITCRASENIYSNLAWYQQKQGKSPQLLVYAATNLADGVPSRFSGSGSGTQYSLKINSLQSEDFGSYYCQHFWGTWTFGGGTTLEIKLEDLKNVFPPEVAVFEPSEAEISHTQKATLVCLATGFYPDHVELSWWVNGKEVHSGVCTDPQPLKEQPALNDSRYCLSSRLRVSATFWQNPRNHFRCQVQFYGLSENDEWTQDRAKPVTQIVSAEAWGRADDVIKIHWQEKKSNTILGSQEGNTMKTNDTYMKFSWLTVPEKSLDKEHRCIVRHENNKNGVDQEIIFPPIKTDVITMDPKDNCSKDANDTLLLQLTNTSAYYMYLLLLLKSVVYFAIITCCLLMAMVKRKDSRGRAKRSGSGATNFSLLKQAGDVEENPGPTSMDWIWRILFLVGAATGAHSFEEVQLQQSGPELVKPGASVKMSCKASGYTFTDYYMKWMKQSHGKSLEWIGDINPNNGGTTYNQKFKGKATLTVDKSSSTAYMQLNSLTSEDSAVYYCARDYGYGYFDYWGQGTTLTVSSTRIQNPDPAVYQLRDSKSSDKSVCLFTDFDSQTNVSQSKDSDVYITDKCVLDMRSMDFKSNSAVAWSNKSDFACANAFNNSIIPEDTFFPSPESSDSTDHVKPKETENTKQPSKSCHKPKAIVHTEKVNMMSLTVLGLRMLFAKTVAVNFLLTAKLFFLLTA

SEQ ID NO: 14413 - protein, 724 aa, synthetic construct
MALPVTALLLPLALLLHAARPEIVLTQSPGTLSLSPGERATLSCRASQSVGGYLAWYQQKPGQAPRLLIYDASNRATGIPARFSGSGSGTDFTLTISSLEPEDFAVYYCQQRNNWPPMYTFGQGTKLEIKRLEDLKNVFPPEVAVFEPSEAEISHTQKATLVCLATGFYPDHVELSWWVNGKEVHSGVCTDPQPLKEQPALNDSRYCLSSRLRVSATFWQNPRNHFRCQVQFYGLSENDEWTQDRAKPVTQIVSAEAWGRADDVIKIHWQEKKSNTILGSQEGNTMKTNDTYMKFSWLTVPEKSLDKEHRCIVRHENNKNGVDQEIIFPPIKTDVITMDPKDNCSKDANDTLLLQLTNTSAYYMYLLLLLKSVVYFAIITCCLLMAMVKRKDSRGRAKRSGSGATNFSLLKQAGDVEENPGPTSMDWIWRILFLVGAATGAHSFEQVQLVQSGAEVKKPGSSVKVSCKASGGTFSSYAISWVRQAPGQGLEWMGGIIPILGTANYAQKFQGRVTITADESTSTAYMELSSLRSEDTAVYYCARWGGGAFDIWGQGTMVTVSSTRIQNPDPAVYQLRDSKSSDKSVCLFTDFDSQTNVSQSKDSDVYITDKCVLDMRSMDFKSNSAVAWSNKSDFACANAFNNSIIPEDTFFPSPESSDSTDHVKPKETENTKQPSKSCHKPKAIVHTEKVNMMSLTVLGLRMLFAKTVAVNFLLTAKLFFLLTA

SEQ ID NO: 14414 - protein, 719 aa, synthetic construct
MALPVTALLLPLALLLHAARPQIVLTQSPALMSASPGEKVTMTCSASSSVRYMYWYQQKPRSSPKPWIHLTSNLASGVPARFSGSGSGTSYSLTISSMEAEDAATYYCQQWSSHPFTFGSGTKLEIKLEDLKNVFPPEVAVFEPSEAEISHTQKATLVCLATGFYPDHVELSWWVNGKEVHSGVCTDPQPLKEQPALNDSRYCLSSRLRVSATFWQNPRNHFRCQVQFYGLSENDEWTQDRAKPVTQIVSAEAWGRADDVIKIHWQEKKSNTILGSQEGNTMKTNDTYMKFSWLTVPEKSLDKEHRCIVRHENNKNGVDQEIIFPPIKTDVITMDPKDNCSKDANDTLLLQLTNTSAYYMYLLLLLKSVVYFAIITCCLLMAMVKRKDSRGRAKRSGSGATNFSLLKQAGDVEENPGPTSMDWIWRILFLVGAATGAHSFEDVQLQESGPGLVKPSQSLSLTCTVTGFSITSDYSWNWIRQFPGNKLEWMGYISYSGHTSYNPSLESRISITRDTSKNQFFLQLNSVTTEDTATYYCTRGNWDVVYWGQGTLVTVSATRIQNPDPAVYQLRDSKSSDKSVCLFTDFDSQTNVSQSKDSDVYITDKCVLDMRSMDFKSNSAVAWSNKSDFACANAFNNSIIPEDTFFPSPESSDSTDHVKPKETENTKQPSKSCHKPKAIVHTEKVNMMSLTVLGLRMLFAKTVAVNFLLTAKLFFLLTA

SEQ ID NO: 14415 - protein, 729 aa, synthetic construct
MALPVTALLLPLALLLHAARPDVVMTQSPLSLPVTLGQPASISCRSSQSIVHSDGNTYLEWYQQRPGQSPRRLIYKVSNRFSGVPDRFSGSGSGTDFTLKISRVEAEDVGVYYCFQGSHAPWTFGGGTKVEIKLEDLKNVFPPEVAVFEPSEAEISHTQKATLVCLATGFYPDHVELSWWVNGKEVHSGVCTDPQPLKEQPALNDSRYCLSSRLRVSATFWQNPRNHFRCQVQFYGLSENDEWTQDRAKPVTQIVSAEAWGRADDVIKIHWQEKKSNTILGSQEGNTMKTNDTYMKFSWLTVPEKSLDKEHRCIVRHENNKNGVDQEIIFPPIKTDVITMDPKDNCSKDANDTLLLQLTNTSAYYMYLLLLLKSVVYFAIITCCLLMAMVKRKDSRGRAKRSGSGATNFSLLKQAGDVEENPGPTSMDWIWRILFLVGAATGAHSFEEVQLVESGGGLVQPGGSLRLSCAASGFTFSSYGMHWVRQAPGKGLEWVAYITTRSSTIYYADSVKGRFTISRDNAKNSLYLQMNSLRAEDTAVYYCTREPLTGYYAMDYWGQGTSVTVSSTRIQNPDPAVYQLRDSKSSDKSVCLFTDFDSQTNVSQSKDSDVYITDKCVLDMRSMDFKSNSAVAWSNKSDFACANAFNNSIIPEDTFFPSPESSDSTDHVKPKETENTKQPSKSCHKPKAIVHTEKVNMMSLTVLGLRMLFAKTVAVNFLLTAKLFFLLTA

SEQ ID NO: 14416 - protein, 721 aa, synthetic construct
MALPVTALLLPLALLLHAARPDIQMTQSPSSLSASVGDRVTITCRASQSISLWLNWYQQKPGKAPKLLIYAASTLQSGVPSRFSGSGSGTDFTLTISSLQPEDFATYYCQQYYTSPYTFGQGTKVEIKRLEDLKNVFPPEVAVFEPSEAEISHTQKATLVCLATGFYPDHVELSWWVNGKEVHSGVCTDPQPLKEQPALNDSRYCLSSRLRVSATFWQNPRNHFRCQVQFYGLSENDEWTQDRAKPVTQIVSAEAWGRADDVIKIHWQEKKSNTILGSQEGNTMKTNDTYMKFSWLTVPEKSLDKEHRCIVRHENNKNGVDQEIIFPPIKTDVITMDPKDNCSKDANDTLLLQLTNTSAYYMYLLLLLKSVVYFAIITCCLLMAMVKRKDSRGRAKRSGSGATNFSLLKQAGDVEENPGPTSMDWIWRILFLVGAATGAHSFEQVQLLESGGGLVQPGGSLRLSCAASGFTFSSYAMSWVRQAPGKGLEWVSVIRSSGSSTYYADSVKGRFTISRDNSKNTLYLQMNSLRAEDTAVYYCARGGGYFDYWGQGTLVTVSSTRIQNPDPAVYQLRDSKSSDKSVCLFTDFDSQTNVSQSKDSDVYITDKCVLDMRSMDFKSNSAVAWSNKSDFACANAFNNSIIPEDTFFPSPESSDSTDHVKPKETENTKQPSKSCHKPKAIVHTEKVNMMSLTVLGLRMLFAKTVAVNFLLTAKLFFLLTA

SEQ ID NO: 14417 - protein, 724 aa, synthetic construct
MALPVTALLLPLALLLHAARPDIQMTQSPSSLSASVGDRVTITCRASQSISSYLNWYQQKPGKAPKLLIYAVSTLQSGVPSRFSGSGSGTDFTLTISSLQPEDFATYYCQQSGTFPPTTFGQGTKVEIKRLEDLKNVFPPEVAVFEPSEAEISHTQKATLVCLATGFYPDHVELSWWVNGKEVHSGVCTDPQPLKEQPALNDSRYCLSSRLRVSATFWQNPRNHFRCQVQFYGLSENDEWTQDRAKPVTQIVSAEAWGRADDVIKIHWQEKKSNTILGSQEGNTMKTNDTYMKFSWLTVPEKSLDKEHRCIVRHENNKNGVDQEIIFPPIKTDVITMDPKDNCSKDANDTLLLQLTNTSAYYMYLLLLLKSVVYFAIITCCLLMAMVKRKDSRGRAKRSGSGATNFSLLKQAGDVEENPGPTSMDWIWRILFLVGAATGAHSFEQVQLLESGGGLVQPGGSLRLSCAASGFTFSSHGMHWVRQAPGKGLEWVSVISGSGSNTGYADSVKGRFTISRDNSKNTLYLQMNSLRAEDTAVYYCARQWGSYAFDSWGQGTLVTVSSTRIQNPDPAVYQLRDSKSSDKSVCLFTDFDSQTNVSQSKDSDVYITDKCVLDMRSMDFKSNSAVAWSNKSDFACANAFNNSIIPEDTFFPSPESSDSTDHVKPKETENTKQPSKSCHKPKAIVHTEKVNMMSLTVLGLRMLFAKTVAVNFLLTAKLFFLLTA

SEQ ID NO: 14418 - protein, 734 aa, synthetic construct
MALPVTALLLPLALLLHAARPDIVMSQSPSSLAVSVGEKVTMSCKSSQSLLHSSNQKNYLAWYQQKPGQSPKVLIYWASTRESGVPDRFTGSGSGTDFTLTITSVKSEDLAVYYCQQYYSYPWTFGGGTRLEIKRLEDLKNVFPPEVAVFEPSEAEISHTQKATLVCLATGFYPDHVELSWWVNGKEVHSGVCTDPQPLKEQPALNDSRYCLSSRLRVSATFWQNPRNHFRCQVQFYGLSENDEWTQDRAKPVTQIVSAEAWGRADDVIKIHWQEKKSNTILGSQEGNTMKTNDTYMKFSWLTVPEKSLDKEHRCIVRHENNKNGVDQEIIFPPIKTDVITMDPKDNCSKDANDTLLLQLTNTSAYYMYLLLLLKSVVYFAIITCCLLMAMVKRKDSRGRAKRSGSGATNFSLLKQAGDVEENPGPTSMDWIWRILFLVGAATGAHSFEEVQLQQSVAELVKPGASVKMSCKVSGYTLTDHTIHWMKQRPEQGLEWIGYIYPRDGITGYNEKFKGKATLTADTSSSTAYMQLNSLTSEDSAVYFCARWGYSYRNYAYYYDYWGQGTTLTVSSTRIQNPDPAVYQLRDSKSSDKSVCLFTDFDSQTNVSQSKDSDVYITDKCVLDMRSMDFKSNSAVAWSNKSDFACANAFNNSIIPEDTFFPSPESSDSTDHVKPKETENTKQPSKSCHKPKAIVHTEKVNMMSLTVLGLRMLFAKTVAVNFLLTAKLFFLLTA

SEQ ID NO: 14419 - protein, 731 aa, synthetic construct
MALPVTALLLPLALLLHAARPEIVLTQSPGTLSLSPGERATLSCRASQSVSSSYLAWYQQKPGQAPRLLIYGTSSRATGIPDRFSGSGSGTDFTLTISRLEPEDFAVYYCQQYGSSPFTFGGGTKVEIKRLEDLKNVFPPEVAVFEPSEAEISHTQKATLVCLATGFYPDHVELSWWVNGKEVHSGVCTDPQPLKEQPALNDSRYCLSSRLRVSATFWQNPRNHFRCQVQFYGLSENDEWTQDRAKPVTQIVSAEAWGRADDVIKIHWQEKKSNTILGSQEGNTMKTNDTYMKFSWLTVPEKSLDKEHRCIVRHENNKNGVDQEIIFPPIKTDVITMDPKDNCSKDANDTLLLQLTNTSAYYMYLLLLLKSVVYFAIITCCLLMAMVKRKDSRGRAKRSGSGATNFSLLKQAGDVEENPGPTSMDWIWRILFLVGAATGAHSFEQVQLQESGPGLAKPSETLSLTCTVSGDSITSYYWSWIRQPPGKGLEWIGYIYYSGSTNYNPSLKSRVTISVDTSKNQFSLKLSSVTAADTAVYYCARDQRRIAAAGTHFYGMDVWGQGTTVTVSSTRIQNPDPAVYQLRDSKSSDKSVCLFTDFDSQTNVSQSKDSDVYITDKCVLDMRSMDFKSNSAVAWSNKSDFACANAFNNSIIPEDTFFPSPESSDSTDHVKPKETENTKQPSKSCHKPKAIVHTEKVNMMSLTVLGLRMLFAKTVAVNFLLTAKLFFLLTA

SEQ ID NO: 14420 - protein, 723 aa, synthetic construct
MALPVTALLLPLALLLHAARPDILLTQSPVILSVSPGERVSFSCRASQSIGTNIHWYQQRTNGSPRLLIKYASESISGIPSRFSGSGSGTDFTLSINSVESEDIADYYCQQNNNWPTTFGAGTKLELKLEDLKNVFPPEVAVFEPSEAEISHTQKATLVCLATGFYPDHVELSWWVNGKEVHSGVCTDPQPLKEQPALNDSRYCLSSRLRVSATFWQNPRNHFRCQVQFYGLSENDEWTQDRAKPVTQIVSAEAWGRADDVIKIHWQEKKSNTILGSQEGNTMKTNDTYMKFSWLTVPEKSLDKEHRCIVRHENNKNGVDQEIIFPPIKTDVITMDPKDNCSKDANDTLLLQLTNTSAYYMYLLLLLKSVVYFAIITCCLLMAMVKRKDSRGRAKRSGSGATNFSLLKQAGDVEENPGPTSMDWIWRILFLVGAATGAHSFEQVQLKQSGPGLVQPSQSLSITCTVSGFSLTNYGVHWVRQSPGKGLEWLGVIWSGGNTDYNTPFTSRLSINKDNSKSQVFFKMNSLQSNDTAIYYCARALTYYDYEFAYWGQGTLVTVSATRIQNPDPAVYQLRDSKSSDKSVCLFTDFDSQTNVSQSKDSDVYITDKCVLDMRSMDFKSNSAVAWSNKSDFACANAFNNSIIPEDTFFPSPESSDSTDHVKPKETENTKQPSKSCHKPKAIVHTEKVNMMSLTVLGLRMLFAKTVAVNFLLTAKLFFLLTA

SEQ ID NO: 14421 - protein, 716 aa, synthetic construct
MALPVTALLLPLALLLHAARPMTQSPKFLLVSAGDRVTLTCKASQSVNNDVYWYQQEPGQSPKLLIYWASTRESGVPDRFTGSGSGTDFTLTISSVQAEDLAVYYCKQSYNLYTFGGGTKLEIKRLEDLKNVFPPEVAVFEPSEAEISHTQKATLVCLATGFYPDHVELSWWVNGKEVHSGVCTDPQPLKEQPALNDSRYCLSSRLRVSATFWQNPRNHFRCQVQFYGLSENDEWTQDRAKPVTQIVSAEAWGRADDVIKIHWQEKKSNTILGSQEGNTMKTNDTYMKFSWLTVPEKSLDKEHRCIVRHENNKNGVDQEIIFPPIKTDVITMDPKDNCSKDANDTLLLQLTNTSAYYMYLLLLLKSVVYFAIITCCLLMAMVKRKDSRGRAKRSGSGATNFSLLKQAGDVEENPGPTSMDWIWRILFLVGAATGAHSFEESGRGLVQPGGSRKLSCAASGFTFSTSGMHWVRQAPEKGLEWVAYISSGSTTIYHADTVKGRFTISRDNPKNTLFLQMTSLRSEDTAMYYCCARSGQFGNYFDYWGQGTTLTVSSTRIQNPDPAVYQLRDSKSSDKSVCLFTDFDSQTNVSQSKDSDVYITDKCVLDMRSMDFKSNSAVAWSNKSDFACANAFNNSIIPEDTFFPSPESSDSTDHVKPKETENTKQPSKSCHKPKAIVHTEKVNMMSLTVLGLRMLFAKTVAVNFLLTAKLFFLLTA

SEQ ID NO: 14422 - protein, 721 aa, synthetic construct
MALPVTALLLPLALLLHAARPQSPSSLAVSAGEKVTMSCKSSQSLLNSRTRKNYLAWYQQKPGQSPKLLIYWASTRESGVPDRFTGSGSGTDFTLTISSVQAEDLAVYYCKQSNLYTFGGGTKLEIKLEDLKNVFPPEVAVFEPSEAEISHTQKATLVCLATGFYPDHVELSWWVNGKEVHSGVCTDPQPLKEQPALNDSRYCLSSRLRVSATFWQNPRNHFRCQVQFYGLSENDEWTQDRAKPVTQIVSAEAWGRADDVIKIHWQEKKSNTILGSQEGNTMKTNDTYMKFSWLTVPEKSLDKEHRCIVRHENNKNGVDQEIIFPPIKTDVITMDPKDNCSKDANDTLLLQLTNTSAYYMYLLLLLKSVVYFAIITCCLLMAMVKRKDSRGRAKRSGSGATNFSLLKQAGDVEENPGPTSMDWIWRILFLVGAATGAHSFEQVQLEESGPELVKPGASVKLSCKASGYTFTEYIIHWVKQRSGQGLEWIGWFYPGSGSIKYNEKFKDKATLTADKSSSTVYMELSGLTSEDSAVYFCARHDGYSYFDYWGQGTTLTVSSTRIQNPDPAVYQLRDSKSSDKSVCLFTDFDSQTNVSQSKDSDVYITDKCVLDMRSMDFKSNSAVAWSNKSDFACANAFNNSIIPEDTFFPSPESSDSTDHVKPKETENTKQPSKSCHKPKAIVHTEKVNMMSLTVLGLRMLFAKTVAVNFLLTAKLFFLLTA

SEQ ID NO: 14423 - protein, 724 aa, synthetic construct
MALPVTALLLPLALLLHAARPDIQMTQSPSSLSASLGERVSLTCRATQELSGYLSWLQQKPDGTIKRLIYAASTLDSGVPKRFSGNRSGSDYSLTISSLESEDFADYYCLQYAIYPYTFGGGTKLEIKLEDLKNVFPPEVAVFEPSEAEISHTQKATLVCLATGFYPDHVELSWWVNGKEVHSGVCTDPQPLKEQPALNDSRYCLSSRLRVSATFWQNPRNHFRCQVQFYGLSENDEWTQDRAKPVTQIVSAEAWGRADDVIKIHWQEKKSNTILGSQEGNTMKTNDTYMKFSWLTVPEKSLDKEHRCIVRHENNKNGVDQEIIFPPIKTDVITMDPKDNCSKDANDTLLLQLTNTSAYYMYLLLLLKSVVYFAIITCCLLMAMVKRKDSRGRAKRSGSGATNFSLLKQAGDVEENPGPTSMDWIWRILFLVGAATGAHSFEEVQLQQSGPELVKPGASVKMSCKASGYTFTSYFIHWVKQKPGQGLEWIGFINPYNDGSKYNEKFKGKATLTSDKSSSTAYMELSSLTSEDSAVYYCTRDDGYYGYAMDYWGQGTSVTVSSTRIQNPDPAVYQLRDSKSSDKSVCLFTDFDSQTNVSQSKDSDVYITDKCVLDMRSMDFKSNSAVAWSNKSDFACANAFNNSIIPEDTFFPSPESSDSTDHVKPKETENTKQPSKSCHKPKAIVHTEKVNMMSLTVLGLRMLFAKTVAVNFLLTAKLFFLLTA

SEQ ID NO: 14424 - protein, 729 aa, synthetic construct
MALPVTALLLPLALLLHAARPDTIVLTQSPASLAVSLGQRATISCRASESVDSYGNSFMHWYQQKPGQPPKLLIYLASNLESGVPARFSGSGSRTDFTLTIDPVEADDAATYYCQQNNYDPWTFGGGTKLEIKLEDLKNVFPPEVAVFEPSEAEISHTQKATLVCLATGFYPDHVELSWWVNGKEVHSGVCTDPQPLKEQPALNDSRYCLSSRLRVSATFWQNPRNHFRCQVQFYGLSENDEWTQDRAKPVTQIVSAEAWGRADDVIKIHWQEKKSNTILGSQEGNTMKTNDTYMKFSWLTVPEKSLDKEHRCIVRHENNKNGVDQEIIFPPIKTDVITMDPKDNCSKDANDTLLLQLTNTSAYYMYLLLLLKSVVYFAIITCCLLMAMVKRKDSRGRAKRSGSGATNFSLLKQAGDVEENPGPTSMDWIWRILFLVGAATGAHSFEEVQLQQSGPELVKPGASVKMSCKASGYTFTSYVMHWVKQKPGQGLEWIGYINPYNDGTKYNEKFKGKATLTSDTSSSTAYMELNSLTSEDSAVYFCARPIYFDNDYFDYWGQGTTLKVSSTRIQNPDPAVYQLRDSKSSDKSVCLFTDFDSQTNVSQSKDSDVYITDKCVLDMRSMDFKSNSAVAWSNKSDFACANAFNNSIIPEDTFFPSPESSDSTDHVKPKETENTKQPSKSCHKPKAIVHTEKVNMMSLTVLGLRMLFAKTVAVNFLLTAKLFFLLTA

SEQ ID NO: 14425 - protein, 724 aa, synthetic construct
MALPVTALLLPLALLLHAARPDIQMTQSPSSLSASVGDRVTITCKASQDVGIAVAWYQQKPGKVPKLLIYWASTRHTGVPDRFSGSGSGTDFTLTISSLQPEDVATYYCQQYSSYPYTFGQGTKVEIKRLEDLKNVFPPEVAVFEPSEAEISHTQKATLVCLATGFYPDHVELSWWVNGKEVHSGVCTDPQPLKEQPALNDSRYCLSSRLRVSATFWQNPRNHFRCQVQFYGLSENDEWTQDRAKPVTQIVSAEAWGRADDVIKIHWQEKKSNTILGSQEGNTMKTNDTYMKFSWLTVPEKSLDKEHRCIVRHENNKNGVDQEIIFPPIKTDVITMDPKDNCSKDANDTLLLQLTNTSAYYMYLLLLLKSVVYFAIITCCLLMAMVKRKDSRGRAKRSGSGATNFSLLKQAGDVEENPGPTSMDWIWRILFLVGAATGAHSFEEVQLVESGGGLVQPGGSLRLSCAASGFDFSRYWMSWVRQAPGKGLEWIGEINPDSSTINYAPSLKDKFIISRDNAKNSLYLQMNSLRAEDTAVYYCARPDGNYWYFDVWGQGTLVTVSSTRIQNPDPAVYQLRDSKSSDKSVCLFTDFDSQTNVSQSKDSDVYITDKCVLDMRSMDFKSNSAVAWSNKSDFACANAFNNSIIPEDTFFPSPESSDSTDHVKPKETENTKQPSKSCHKPKAIVHTEKVNMMSLTVLGLRMLFAKTVAVNFLLTAKLFFLLTA

SEQ ID NO: 14426 - protein, 724 aa, synthetic construct
MALPVTALLLPLALLLHAARPDIVMTQSQKSMSTSVGDRVSITCKASQDVITGVAWYQQKPGQSPKLLIYSASYRYTGVPDRFTGSGSGTDFTFTISNVQAEDLAVYYCQQHYSTPLTFGAGTKLELKLEDLKNVFPPEVAVFEPSEAEISHTQKATLVCLATGFYPDHVELSWWVNGKEVHSGVCTDPQPLKEQPALNDSRYCLSSRLRVSATFWQNPRNHFRCQVQFYGLSENDEWTQDRAKPVTQIVSAEAWGRADDVIKIHWQEKKSNTILGSQEGNTMKTNDTYMKFSWLTVPEKSLDKEHRCIVRHENNKNGVDQEIIFPPIKTDVITMDPKDNCSKDANDTLLLQLTNTSAYYMYLLLLLKSVVYFAIITCCLLMAMVKRKDSRGRAKRSGSGATNFSLLKQAGDVEENPGPTSMDWIWRILFLVGAATGAHSFEQVQLQQPGAELVRPGASVKLSCKASGYSFTTYWMNWVKQRPGQGLEWIGMIHPSDSETRLNQKFKDKATLTVDKSSSTAYMQLSSPTSEDSAVYYCARSTMIATRAMDYWGQGTSVTVSSTRIQNPDPAVYQLRDSKSSDKSVCLFTDFDSQTNVSQSKDSDVYITDKCVLDMRSMDFKSNSAVAWSNKSDFACANAFNNSIIPEDTFFPSPESSDSTDHVKPKETENTKQPSKSCHKPKAIVHTEKVNMMSLTVLGLRMLFAKTVAVNFLLTAKLFFLLTA

SEQ ID NO: 14427 - protein, 730 aa, synthetic construct
MALPVTALLLPLALLLHAARPQSVLTQPPSVSGAPGQRVTISCTGSGSNIGAPYDVSWYQQLPGTAPKLLIYHNNKRPSGVPDRFSGSKSGTSASLAITGLQAEDEADYYCATVEAGLSGSVFGGGTKLTVLGALEDLKNVFPPEVAVFEPSEAEISHTQKATLVCLATGFYPDHVELSWWVNGKEVHSGVCTDPQPLKEQPALNDSRYCLSSRLRVSATFWQNPRNHFRCQVQFYGLSENDEWTQDRAKPVTQIVSAEAWGRADDVIKIHWQEKKSNTILGSQEGNTMKTNDTYMKFSWLTVPEKSLDKEHRCIVRHENNKNGVDQEIIFPPIKTDVITMDPKDNCSKDANDTLLLQLTNTSAYYMYLLLLLKSVVYFAIITCCLLMAMVKRKDSRGRAKRSGSGATNFSLLKQAGDVEENPGPTSMDWIWRILFLVGAATGAHSFEQVQLVQSGAEVKKPGASVKVSCKVSGYTLTELSIHWVRQAPGKGLEWMGGFDPEENEIVYAQRFQGRVTMTEDTSTDTAYMELSSLRSEDTAVYYCAIVGSFSPLTLGLWGQGTMVTVSSTRIQNPDPAVYQLRDSKSSDKSVCLFTDFDSQTNVSQSKDSDVYITDKCVLDMRSMDFKSNSAVAWSNKSDFACANAFNNSIIPEDTFFPSPESSDSTDHVKPKETENTKQPSKSCHKPKAIVHTEKVNMMSLTVLGLRMLFAKTVAVNFLLTAKLFFLLTA

SEQ ID NO: 14428 - protein, 730 aa, synthetic construct
MALPVTALLLPLALLLHAARPQSVLTQPPSVSGAPGQRVTISCTGSGSNIGAPYDVSWYQQLPGTAPKLLIYHNNKRPSGVPDRFSGSKSGTSASLAITGLQAEDEADYYCQSYDSSSISTIFGGGTKLTVLGALEDLKNVFPPEVAVFEPSEAEISHTQKATLVCLATGFYPDHVELSWWVNGKEVHSGVCTDPQPLKEQPALNDSRYCLSSRLRVSATFWQNPRNHFRCQVQFYGLSENDEWTQDRAKPVTQIVSAEAWGRADDVIKIHWQEKKSNTILGSQEGNTMKTNDTYMKFSWLTVPEKSLDKEHRCIVRHENNKNGVDQEIIFPPIKTDVITMDPKDNCSKDANDTLLLQLTNTSAYYMYLLLLLKSVVYFAIITCCLLMAMVKRKDSRGRAKRSGSGATNFSLLKQAGDVEENPGPTSMDWIWRILFLVGAATGAHSFEQVQLVQSGAEVKKPGASVKVSCKVSGYTLTELSIHWVRQAPGKGLEWMGGFDPEENEIVYAQRFQGRVTMTEDTSTDTAYMELSSLRSEDTAVYYCAIVGSFSGIAYRPWGQGTMVTVSSTRIQNPDPAVYQLRDSKSSDKSVCLFTDFDSQTNVSQSKDSDVYITDKCVLDMRSMDFKSNSAVAWSNKSDFACANAFNNSIIPEDTFFPSPESSDSTDHVKPKETENTKQPSKSCHKPKAIVHTEKVNMMSLTVLGLRMLFAKTVAVNFLLTAKLFFLLTA

SEQ ID NO: 14429 - protein, 718 aa, synthetic construct
MALPVTALLLPLALLLHAARPDIQMTQSPSSLSASVGDRVTITCRASQGIRNNLAWYQQKPGKAPKRLIYAASNLQSGVPSRFTGSGSGTEFTLIVSSLQPEDFATYYCLQHHSYPLTSGGGTKVELEDLKNVFPPEVAVFEPSEAEISHTQKATLVCLATGFYPDHVELSWWVNGKEVHSGVCTDPQPLKEQPALNDSRYCLSSRLRVSATFWQNPRNHFRCQVQFYGLSENDEWTQDRAKPVTQIVSAEAWGRADDVIKIHWQEKKSNTILGSQEGNTMKTNDTYMKFSWLTVPEKSLDKEHRCIVRHENNKNGVDQEIIFPPIKTDVITMDPKDNCSKDANDTLLLQLTNTSAYYMYLLLLLKSVVYFAIITCCLLMAMVKRKDSRGRAKRSGSGATNFSLLKQAGDVEENPGPTSMDWIWRILFLVGAATGAHSFEEVQVLESGGGLVQPGGSLRLSCAASGFTFSSYAMSWVRQAPGKGLEWVSAISGSGGSTNYADSVKGRFTISRDNSKNTLYLQMNSLRAEDTAVYYCAGSSGWSEYWGQGTLVTVSSTRIQNPDPAVYQLRDSKSSDKSVCLFTDFDSQTNVSQSKDSDVYITDKCVLDMRSMDFKSNSAVAWSNKSDFACANAFNNSIIPEDTFFPSPESSDSTDHVKPKETENTKQPSKSCHKPKAIVHTEKVNMMSLTVLGLRMLFAKTVAVNFLLTAKLFFLLTA

SEQ ID NO: 14430 - protein, 724 aa, synthetic construct
MALPVTALLLPLALLLHAARPDEIQLVQSGAEVKKPGESLRISCKGSGFNIEDYYIHWVRQMPGKGLEWMGRIDPENDETKYGPIFQGHVTISADTSINTVYLQWSSLKASDTAMYYCAFRGGVYWGQGTTVTVSSLEDLKNVFPPEVAVFEPSEAEISHTQKATLVCLATGFYPDHVELSWWVNGKEVHSGVCTDPQPLKEQPALNDSRYCLSSRLRVSATFWQNPRNHFRCQVQFYGLSENDEWTQDRAKPVTQIVSAEAWGRADDVIKIHWQEKKSNTILGSQEGNTMKTNDTYMKFSWLTVPEKSLDKEHRCIVRHENNKNGVDQEIIFPPIKTDVITMDPKDNCSKDANDTLLLQLTNTSAYYMYLLLLLKSVVYFAIITCCLLMAMVKRKDSRGRAKRSGSGATNFSLLKQAGDVEENPGPTSMDWIWRILFLVGAATGAHSFEDVVMTQSPDSLAVSLGERATINCKSSQSLLDSDGKTYLNWLQQKPGQPPKRLISLVSKLDSGVPDRFSGSGSGTDFTLTISSLQAEDVAVYYCWQGTHFPGTFGGGTKVEIKTRIQNPDPAVYQLRDSKSSDKSVCLFTDFDSQTNVSQSKDSDVYITDKCVLDMRSMDFKSNSAVAWSNKSDFACANAFNNSIIPEDTFFPSPESSDSTDHVKPKETENTKQPSKSCHKPKAIVHTEKVNMMSLTVLGLRMLFAKTVAVNFLLTAKLFFLLTA

SEQ ID NO: 14431 - protein, 731 aa, synthetic construct
MALPVTALLLPLALLLHAARPDELVMTQSPSSLTVTAGEKVTMSCKSSQSLLNSGNQKNYLTWYQQKPGQPPKLLIYWASTRESGVPDRFTGSGSGTDFTLTISSVQAEDLAVYYCQNDYSYPLTFGAGTKLEIKLEDLKNVFPPEVAVFEPSEAEISHTQKATLVCLATGFYPDHVELSWWVNGKEVHSGVCTDPQPLKEQPALNDSRYCLSSRLRVSATFWQNPRNHFRCQVQFYGLSENDEWTQDRAKPVTQIVSAEAWGRADDVIKIHWQEKKSNTILGSQEGNTMKTNDTYMKFSWLTVPEKSLDKEHRCIVRHENNKNGVDQEIIFPPIKTDVITMDPKDNCSKDANDTLLLQLTNTSAYYMYLLLLLKSVVYFAIITCCLLMAMVKRKDSRGRAKRSGSGATNFSLLKQAGDVEENPGPTSMDWIWRILFLVGAATGAHSFEEVQLLEQSGAELVRPGTSVKISCKASGYAFTNYWLGWVKQRPGHGLEWIGDIFPGSGNIHYNEKFKGKATLTADKSSSTAYMQLSSLTFEDSAVYFCARLRNWDEPMDYWGQGTTVTVSSTRIQNPDPAVYQLRDSKSSDKSVCLFTDFDSQTNVSQSKDSDVYITDKCVLDMRSMDFKSNSAVAWSNKSDFACANAFNNSIIPEDTFFPSPESSDSTDHVKPKETENTKQPSKSCHKPKAIVHTEKVNMMSLTVLGLRMLFAKTVAVNFLLTAKLFFLLTA

SEQ ID NO: 14432 - protein, 732 aa, synthetic construct
MALPVTALLLPLALLLHAARPDELQMTQSPSSLSASVGDRVTITCRASQSISSYLNWYQQKPGQPPKLLIYWASTRESGVPDRFSGSESGTNYTLTISSLQPEDFATYFCQQSDSLPITFGQGTRLDIQLEDLKNVFPPEVAVFEPSEAEISHTQKATLVCLATGFYPDHVELSWWVNGKEVHSGVCTDPQPLKEQPALNDSRYCLSSRLRVSATFWQNPRNHFRCQVQFYGLSENDEWTQDRAKPVTQIVSAEAWGRADDVIKIHWQEKKSNTILGSQEGNTMKTNDTYMKFSWLTVPEKSLDKEHRCIVRHENNKNGVDQEIIFPPIKTDVITMDPKDNCSKDANDTLLLQLTNTSAYYMYLLLLLKSVVYFAIITCCLLMAMVKRKDSRGRAKRSGSGATNFSLLKQAGDVEENPGPTSMDWIWRILFLVGAATGAHSFEEVQLLESGGGVVQPGRSLRLSCAASGFTFSSYGMHWVRQAPGKGLEWVAVISYDGSNKYYADSVKGRFTISRDNSKNTLYLQMNSLRAEDTAVYYCAKDMGWGSGWRPYYYYGMDVWGQGTTVTVSSTRIQNPDPAVYQLRDSKSSDKSVCLFTDFDSQTNVSQSKDSDVYITDKCVLDMRSMDFKSNSAVAWSNKSDFACANAFNNSIIPEDTFFPSPESSDSTDHVKPKETENTKQPSKSCHKPKAIVHTEKVNMMSLTVLGLRMLFAKTVAVNFLLTAKLFFLLTA

SEQ ID NO: 14433 - protein, 729 aa, synthetic construct
MALPVTALLLPLALLLHAARPDDIQMTQSPSSLSASVGDRVTITCRASQSISSYLNWYQQKPGKAPKLLIYAASSLQSGVPSRFSGSGSGTDFTLTISSLQPEDLATYYCQQSYSTPFTFGPGTKVDIKLEDLKNVFPPEVAVFEPSEAEISHTQKATLVCLATGFYPDHVELSWWVNGKEVHSGVCTDPQPLKEQPALNDSRYCLSSRLRVSATFWQNPRNHFRCQVQFYGLSENDEWTQDRAKPVTQIVSAEAWGRADDVIKIHWQEKKSNTILGSQEGNTMKTNDTYMKFSWLTVPEKSLDKEHRCIVRHENNKNGVDQEIIFPPIKTDVITMDPKDNCSKDANDTLLLQLTNTSAYYMYLLLLLKSVVYFAIITCCLLMAMVKRKDSRGRAKRSGSGATNFSLLKQAGDVEENPGPTSMDWIWRILFLVGAATGAHSFEVHEVQLVQSGAEVKKPGSSVKVSCKASGGTFSSYAISWVRQAPGQGLEWMGGIIPIFGTANYAQKFQGRVTITADKSTSTAYMELSSLRSEDTAVYYCATFALFGFREQAFDIWGQGTTVTVSSTRIQNPDPAVYQLRDSKSSDKSVCLFTDFDSQTNVSQSKDSDVYITDKCVLDMRSMDFKSNSAVAWSNKSDFACANAFNNSIIPEDTFFPSPESSDSTDHVKPKETENTKQPSKSCHKPKAIVHTEKVNMMSLTVLGLRMLFAKTVAVNFLLTAKLFFLLTA

SEQ ID NO: 14434 - protein, 727 aa, synthetic construct
MALPVTALLLPLALLLHAARPDIVLTQSPLSLAVSLGQPAIISCKASQSVSFAGTSLMHWYHQKPGQQPRLLIYRASNLEAGVPDRFSGSGSKTDFTLTISPVEAEDAATYYCQQSREYPYTFGGGTKLEIKRLEDLKNVFPPEVAVFEPSEAEISHTQKATLVCLATGFYPDHVELSWWVNGKEVHSGVCTDPQPLKEQPALNDSRYCLSSRLRVSATFWQNPRNHFRCQVQFYGLSENDEWTQDRAKPVTQIVSAEAWGRADDVIKIHWQEKKSNTILGSQEGNTMKTNDTYMKFSWLTVPEKSLDKEHRCIVRHENNKNGVDQEIIFPPIKTDVITMDPKDNCSKDANDTLLLQLTNTSAYYMYLLLLLKSVVYFAIITCCLLMAMVKRKDSRGRAKRSGSGATNFSLLKQAGDVEENPGPTSMDWIWRILFLVGAATGAHSFEQVQLVQSGAEVVKPGASVKISCKASGYTFTGYFMNWVKQSPGQSLEWIGRIHPYDGDTFYNQKFQGKATLTVDKSSNTAHMELLSLTSEDFAVYYCTRYDGSRAMDYWGQGTTVTVSSTRIQNPDPAVYQLRDSKSSDKSVCLFTDFDSQTNVSQSKDSDVYITDKCVLDMRSMDFKSNSAVAWSNKSDFACANAFNNSIIPEDTFFPSPESSDSTDHVKPKETENTKQPSKSCHKPKAIVHTEKVNMMSLTVLGLRMLFAKTVAVNFLLTAKLFFLLTA

SEQ ID NO: 14435 - protein, 724 aa, synthetic construct
MALPVTALLLPLALLLHAARPDDVVMTQTPLSLPVTPGEPASISCRSSQSLVHRNGNTYLHWYLQKPGQSPKLLIHKVSNRFSGVPDRFSGSGSGTDFTLKISRVEAEDLGVYFCSQSTHVPPLTFGAGTKLELKLEDLKNVFPPEVAVFEPSEAEISHTQKATLVCLATGFYPDHVELSWWVNGKEVHSGVCTDPQPLKEQPALNDSRYCLSSRLRVSATFWQNPRNHFRCQVQFYGLSENDEWTQDRAKPVTQIVSAEAWGRADDVIKIHWQEKKSNTILGSQEGNTMKTNDTYMKFSWLTVPEKSLDKEHRCIVRHENNKNGVDQEIIFPPIKTDVITMDPKDNCSKDANDTLLLQLTNTSAYYMYLLLLLKSVVYFAIITCCLLMAMVKRKDSRGRAKRSGSGATNFSLLKQAGDVEENPGPTSMDWIWRILFLVGAATGAHSFEEVQLVQSGAEVEKPGASVKISCKASGSSFTGYNMNWVRQNIGKSLEWIGAIDPYYGGTSYNQKFKGRATLTVDKSTSTAYMHLKSLRSEDTAVYYCVSGMEYWGQGTSVTVSSTRIQNPDPAVYQLRDSKSSDKSVCLFTDFDSQTNVSQSKDSDVYITDKCVLDMRSMDFKSNSAVAWSNKSDFACANAFNNSIIPEDTFFPSPESSDSTDHVKPKETENTKQPSKSCHKPKAIVHTEKVNMMSLTVLGLRMLFAKTVAVNFLLTAKLFFLLTA

SEQ ID NO: 14436 - protein, 722 aa, synthetic construct
MALPVTALLLPLALLLHAARPDEIVMTQTPATLSVSAGERVTITCKASQSVSNDVTWYQQKPGQAPRLLIYSASNRYSGVPARFSGSGYGTEFTFTISSVQSEDFAVYFCQQDYSSFGQGTKLEIKRLEDLKNVFPPEVAVFEPSEAEISHTQKATLVCLATGFYPDHVELSWWVNGKEVHSGVCTDPQPLKEQPALNDSRYCLSSRLRVSATFWQNPRNHFRCQVQFYGLSENDEWTQDRAKPVTQIVSAEAWGRADDVIKIHWQEKKSNTILGSQEGNTMKTNDTYMKFSWLTVPEKSLDKEHRCIVRHENNKNGVDQEIIFPPIKTDVITMDPKDNCSKDANDTLLLQLTNTSAYYMYLLLLLKSVVYFAIITCCLLMAMVKRKDSRGRAKRSGSGATNFSLLKQAGDVEENPGPTSMDWIWRILFLVGAATGAHSFEQVQLVESGPGVVQPGRSLRISCAVSGFSVTNYGVHWVRQPPGKGLEWLGVIWAGGITNYNSAFMSRLTISKDNSKNTVYLQMNSLRAEDTAMYYCASRGGHYGYALDYWGQGTLVTVSSTRIQNPDPAVYQLRDSKSSDKSVCLFTDFDSQTNVSQSKDSDVYITDKCVLDMRSMDFKSNSAVAWSNKSDFACANAFNNSIIPEDTFFPSPESSDSTDHVKPKETENTKQPSKSCHKPKAIVHTEKVNMMSLTVLGLRMLFAKTVAVNFLLTAKLFFLLTA

SEQ ID NO: 14437 - protein, 724 aa, synthetic construct
MALPVTALLLPLALLLHAARPDIQMTQTASSLPASLGDRVTISCSASQDISNYLNWYQQKPDGTVKLLIFYSSNLHSGVPSRFSGGGSGTDYSLTISNLEPEDIATYFCHQYSKLPWTFGGGTKLEIKRLEDLKNVFPPEVAVFEPSEAEISHTQKATLVCLATGFYPDHVELSWWVNGKEVHSGVCTDPQPLKEQPALNDSRYCLSSRLRVSATFWQNPRNHFRCQVQFYGLSENDEWTQDRAKPVTQIVSAEAWGRADDVIKIHWQEKKSNTILGSQEGNTMKTNDTYMKFSWLTVPEKSLDKEHRCIVRHENNKNGVDQEIIFPPIKTDVITMDPKDNCSKDANDTLLLQLTNTSAYYMYLLLLLKSVVYFAIITCCLLMAMVKRKDSRGRAKRSGSGATNFSLLKQAGDVEENPGPTSMDWIWRILFLVGAATGAHSFEEVTLVESGGDFVKPGGSLKVSCAASGFAFSHYAMSWVRQTPAKRLEWVAYISSGGSGTYYSDSVKGRFTISRDNAKNTLYLQMRSLRSEDSAMYFCTRVKLGTYYFDSWGQGTTLTVSSTRIQNPDPAVYQLRDSKSSDKSVCLFTDFDSQTNVSQSKDSDVYITDKCVLDMRSMDFKSNSAVAWSNKSDFACANAFNNSIIPEDTFFPSPESSDSTDHVKPKETENTKQPSKSCHKPKAIVHTEKVNMMSLTVLGLRMLFAKTVAVNFLLTAKLFFLLTA

SEQ ID NO: 14438 - protein, 726 aa, synthetic construct
MALPVTALLLPLALLLHAARPQFVLTQSPSASAALGASAKLTCTLSSAHKTYTIDWYQQQKGKAPRYLIQVKSDGTYTKATGVPDRFSGSSSGADRYLIIPSVQADDEADYYCGTDYTGGYVFGGGTQLTVTLEDLKNVFPPEVAVFEPSEAEISHTQKATLVCLATGFYPDHVELSWWVNGKEVHSGVCTDPQPLKEQPALNDSRYCLSSRLRVSATFWQNPRNHFRCQVQFYGLSENDEWTQDRAKPVTQIVSAEAWGRADDVIKIHWQEKKSNTILGSQEGNTMKTNDTYMKFSWLTVPEKSLDKEHRCIVRHENNKNGVDQEIIFPPIKTDVITMDPKDNCSKDANDTLLLQLTNTSAYYMYLLLLLKSVVYFAIITCCLLMAMVKRKDSRGRAKRSGSGATNFSLLKQAGDVEENPGPTSMDWIWRILFLVGAATGAHSFEEQLKESGGGLFKPTDTLTLTCTVSGFSLSYYGVNWVRQAPGNGLEWIGTIGGSGDTYYASWAKSRSTIIRNTNENTVTLKMTSLTAADTATYFCVRYANIGYEYFNVWGPGTLVTVSSTRIQNPDPAVYQLRDSKSSDKSVCLFTDFDSQTNVSQSKDSDVYITDKCVLDMRSMDFKSNSAVAWSNKSDFACANAFNNSIIPEDTFFPSPESSDSTDHVKPKETENTKQPSKSCHKPKAIVHTEKVNMMSLTVLGLRMLFAKTVAVNFLLTAKLFFLLTA

SEQ ID NO: 14439 - protein, 731 aa, synthetic construct
MALPVTALLLPLALLLHAARPQFVLTQSPSVSAALGASAKLTCTLSSAHKTYTIDWYQQQQGEAPRYLMQVKSDGSYTKGTGVPDRFSGSSSGADRYLIIPSVQADDEAGYVCGADDNGGYVFGGGTQLTVTLEDLKNVFPPEVAVFEPSEAEISHTQKATLVCLATGFYPDHVELSWWVNGKEVHSGVCTDPQPLKEQPALNDSRYCLSSRLRVSATFWQNPRNHFRCQVQFYGLSENDEWTQDRAKPVTQIVSAEAWGRADDVIKIHWQEKKSNTILGSQEGNTMKTNDTYMKFSWLTVPEKSLDKEHRCIVRHENNKNGVDQEIIFPPIKTDVITMDPKDNCSKDANDTLLLQLTNTSAYYMYLLLLLKSVVYFAIITCCLLMAMVKRKDSRGRAKRSGSGATNFSLLKQAGDVEENPGPTSMDWIWRILFLVGAATGAHSFEQSVKESEGGLFKPTDTLTLTCTVSGFSLSRHALTWVRQAPGNGLEWIGAIDNAGTTYYASWAKSRSTITRNTDLHTVTLKMTSLTASDTATYFCARVFYDINSGYYLDGMDLWGPGTLVTVSSTRIQNPDPAVYQLRDSKSSDKSVCLFTDFDSQTNVSQSKDSDVYITDKCVLDMRSMDFKSNSAVAWSNKSDFACANAFNNSIIPEDTFFPSPESSDSTDHVKPKETENTKQPSKSCHKPKAIVHTEKVNMMSLTVLGLRMLFAKTVAVNFLLTAKLFFLLTA

SEQ ID NO: 14440 - protein, 725 aa, synthetic construct
MALPVTALLLPLALLLHAARPDIQMTQSPSSLSASVGDRVTITCRASQGISSWLAWYQQKPEKAPKSLIYAASSLQSGVPSRFSGSGSGTDFTLTISSLQPEDFATYYCQQYNSYPPTFGGGTKVEIKLEDLKNVFPPEVAVFEPSEAEISHTQKATLVCLATGFYPDHVELSWWVNGKEVHSGVCTDPQPLKEQPALNDSRYCLSSRLRVSATFWQNPRNHFRCQVQFYGLSENDEWTQDRAKPVTQIVSAEAWGRADDVIKIHWQEKKSNTILGSQEGNTMKTNDTYMKFSWLTVPEKSLDKEHRCIVRHENNKNGVDQEIIFPPIKTDVITMDPKDNCSKDANDTLLLQLTNTSAYYMYLLLLLKSVVYFAIITCCLLMAMVKRKDSRGRAKRSGSGATNFSLLKQAGDVEENPGPTSMDWIWRILFLVGAATGAHSFEEVQLVESGGGLVQPGESLRLSCVASGFTFSRYKMNWVRQAPGKGLEWVSYISRSGRDIYYADSVKGRFTISRDNAKNSLYLQMNSLRDEDTAVYYCAGTVTTYYYFGMDVWGHGTTVTVSSTRIQNPDPAVYQLRDSKSSDKSVCLFTDFDSQTNVSQSKDSDVYITDKCVLDMRSMDFKSNSAVAWSNKSDFACANAFNNSIIPEDTFFPSPESSDSTDHVKPKETENTKQPSKSCHKPKAIVHTEKVNMMSLTVLGLRMLFAKTVAVNFLLTAKLFFLLTA

SEQ ID NO: 14441 - protein, 726 aa, synthetic construct
MALPVTALLLPLALLLHAARPDIQMTQSPSSLSASVGDRVTITCRASQGISSWLAWYQQKPEKAPKSLIYAASSLQSGVPSRFSGSGSGTDFTLTISSLQPEDFATYYCQQYNSYPPTFGGGTKVEIKLEDLKNVFPPEVAVFEPSEAEISHTQKATLVCLATGFYPDHVELSWWVNGKEVHSGVCTDPQPLKEQPALNDSRYCLSSRLRVSATFWQNPRNHFRCQVQFYGLSENDEWTQDRAKPVTQIVSAEAWGRADDVIKIHWQEKKSNTILGSQEGNTMKTNDTYMKFSWLTVPEKSLDKEHRCIVRHENNKNGVDQEIIFPPIKTDVITMDPKDNCSKDANDTLLLQLTNTSAYYMYLLLLLKSVVYFAIITCCLLMAMVKRKDSRGRAKRSGSGATNFSLLKQAGDVEENPGPTSMDWIWRILFLVGAATGAHSFEEVQLVESGGGSVQPGESLRLSCVASGFTFSRYKMNWVRQAPGKGLEWVSYISRSGRDIYYADSVKGRFTISRDNAKNSLYLQMNSLRDEDTAVYYCAGTVTTYYYDFGMDVWGQGTTVTVSSTRIQNPDPAVYQLRDSKSSDKSVCLFTDFDSQTNVSQSKDSDVYITDKCVLDMRSMDFKSNSAVAWSNKSDFACANAFNNSIIPEDTFFPSPESSDSTDHVKPKETENTKQPSKSCHKPKAIVHTEKVNMMSLTVLGLRMLFAKTVAVNFLLTAKLFFLLTA

SEQ ID NO: 14442 - protein, 724 aa, synthetic construct
MALPVTALLLPLALLLHAARPQSVLTQPPSASGTPGQRVTISCSGSRSNVGGNYVFWYQQVPGATPKLLIYRSNQRPSGVPDRFAGSKSGSSASLAISGLRSEDEADYYCATWDDSLSGFVFGTGTKVTVLGLEDLKNVFPPEVAVFEPSEAEISHTQKATLVCLATGFYPDHVELSWWVNGKEVHSGVCTDPQPLKEQPALNDSRYCLSSRLRVSATFWQNPRNHFRCQVQFYGLSENDEWTQDRAKPVTQIVSAEAWGRADDVIKIHWQEKKSNTILGSQEGNTMKTNDTYMKFSWLTVPEKSLDKEHRCIVRHENNKNGVDQEIIFPPIKTDVITMDPKDNCSKDANDTLLLQLTNTSAYYMYLLLLLKSVVYFAIITCCLLMAMVKRKDSRGRAKRSGSGATNFSLLKQAGDVEENPGPTSMDWIWRILFLVGAATGAHSFEVQLVESGGGLVKPGGSLRLSCAASGFTFSDYYMSWIRQAPGKGLEWVSYISSSGSTIYYADSVKGRFTISRDNAKNSLYLQMNSLRAEDTAVYYCARGYGKAYDQWGQGTLVTVSSTRIQNPDPAVYQLRDSKSSDKSVCLFTDFDSQTNVSQSKDSDVYITDKCVLDMRSMDFKSNSAVAWSNKSDFACANAFNNSIIPEDTFFPSPESSDSTDHVKPKETENTKQPSKSCHKPKAIVHTEKVNMMSLTVLGLRMLFAKTVAVNFLLTAKLFFLLTA

SEQ ID NO: 14443 - protein, 723 aa, synthetic construct
MALPVTALLLPLALLLHAARPQSVVTQPPSMSAAPGQQVTISCSGGNSNIERNYVSWYLQLPGTAPKLVIFDNDRRPSGIPDRFSGSKSGTSATLGITGLQTGDEADYYCGTWDSSLRGWVFGGGTKLTVLGLEDLKNVFPPEVAVFEPSEAEISHTQKATLVCLATGFYPDHVELSWWVNGKEVHSGVCTDPQPLKEQPALNDSRYCLSSRLRVSATFWQNPRNHFRCQVQFYGLSENDEWTQDRAKPVTQIVSAEAWGRADDVIKIHWQEKKSNTILGSQEGNTMKTNDTYMKFSWLTVPEKSLDKEHRCIVRHENNKNGVDQEIIFPPIKTDVITMDPKDNCSKDANDTLLLQLTNTSAYYMYLLLLLKSVVYFAIITCCLLMAMVKRKDSRGRAKRSGSGATNFSLLKQAGDVEENPGPTSMDWIWRILFLVGAATGAHSFEVQLVESGGGLIQPGGSLRLSCAASGFTFSNYAMNWVRQAPGKGLEWVSTINGRGSSTIYADSVKGRFTISRDNSKNTLYLQMNSLRAEDTATYYCARYISRGLGDSWGQGTLVTVTRIQNPDPAVYQLRDSKSSDKSVCLFTDFDSQTNVSQSKDSDVYITDKCVLDMRSMDFKSNSAVAWSNKSDFACANAFNNSIIPEDTFFPSPESSDSTDHVKPKETENTKQPSKSCHKPKAIVHTEKVNMMSLTVLGLRMLFAKTVAVNFLLTAKLFFLLTA

SEQ ID NO: 14444 - protein, 724 aa, synthetic construct
MALPVTALLLPLALLLHAARPDVVMTQTPLSLPVSLGDQASISCRSSQSLVHSNGNTYLHWYLQKPGQSPKLLIYKVSNRFSGVPDRFSGSGSGTDFTLKISRVEAEDLGVYFCSQNTPVPPKFGSGTKLEIKLEDLKNVFPPEVAVFEPSEAEISHTQKATLVCLATGFYPDHVELSWWVNGKEVHSGVCTDPQPLKEQPALNDSRYCLSSRLRVSATFWQNPRNHFRCQVQFYGLSENDEWTQDRAKPVTQIVSAEAWGRADDVIKIHWQEKKSNTILGSQEGNTMKTNDTYMKFSWLTVPEKSLDKEHRCIVRHENNKNGVDQEIIFPPIKTDVITMDPKDNCSKDANDTLLLQLTNTSAYYMYLLLLLKSVVYFAIITCCLLMAMVKRKDSRGRAKRSGSGATNFSLLKQAGDVEENPGPTSMDWIWRILFLVGAATGAHSFEQVQLQQSGAELVRPGASVKLSCKASGYTFNDYEMHWVKQTPVHGLKWIGALEPKTGDTAYSQKFKGKATLTADKSSSTAYMELRSLTSEDSAVYYCTSCYYYTYSGQGTLVTVSATRIQNPDPAVYQLRDSKSSDKSVCLFTDFDSQTNVSQSKDSDVYITDKCVLDMRSMDFKSNSAVAWSNKSDFACANAFNNSIIPEDTFFPSPESSDSTDHVKPKETENTKQPSKSCHKPKAIVHTEKVNMMSLTVLGLRMLFAKTVAVNFLLTAKLFFLLTA

SEQ ID NO: 14445 - protein, 723 aa, synthetic construct
MALPVTALLLPLALLLHAARPDIQLTQSPSSLSASVGDRVTITCRASQGIRNDLGWYQQKPGKAPKRLIYAASSLQNGVPSRFSGSGSGTEFTLTISSLQPEDFATYYCLQHNTYPAFGQGTKVEIKRLEDLKNVFPPEVAVFEPSEAEISHTQKATLVCLATGFYPDHVELSWWVNGKEVHSGVCTDPQPLKEQPALNDSRYCLSSRLRVSATFWQNPRNHFRCQVQFYGLSENDEWTQDRAKPVTQIVSAEAWGRADDVIKIHWQEKKSNTILGSQEGNTMKTNDTYMKFSWLTVPEKSLDKEHRCIVRHENNKNGVDQEIIFPPIKTDVITMDPKDNCSKDANDTLLLQLTNTSAYYMYLLLLLKSVVYFAIITCCLLMAMVKRKDSRGRAKRSGSGATNFSLLKQAGDVEENPGPTSMDWIWRILFLVGAATGAHSFEQVQLQESGPGLVKPSQTLSLTCTVSGGSISSFNYYWSWIRHHPGKGLEWIGYIYYSGSTYSNPSLKSRVTISVDTSKNQFSLTLSSVTAADTAVYYCARGYNWNYFDYWGQGTLVTVSSTRIQNPDPAVYQLRDSKSSDKSVCLFTDFDSQTNVSQSKDSDVYITDKCVLDMRSMDFKSNSAVAWSNKSDFACANAFNNSIIPEDTFFPSPESSDSTDHVKPKETENTKQPSKSCHKPKAIVHTEKVNMMSLTVLGLRMLFAKTVAVNFLLTAKLFFLLTA

SEQ ID NO: 14446 - protein, 725 aa, synthetic construct
MALPVTALLLPLALLLHAARPDDIVLTQSPASLAVSLGQSVTISCRASESVEYYGTSLMQWYQQKPGQPPKLLIYATSNVESGVPARFSGSGSGTDFSLNIHPVEEDDIAMYFCQQSRKLPSTFGGGTKLEIKLEDLKNVFPPEVAVFEPSEAEISHTQKATLVCLATGFYPDHVELSWWVNGKEVHSGVCTDPQPLKEQPALNDSRYCLSSRLRVSATFWQNPRNHFRCQVQFYGLSENDEWTQDRAKPVTQIVSAEAWGRADDVIKIHWQEKKSNTILGSQEGNTMKTNDTYMKFSWLTVPEKSLDKEHRCIVRHENNKNGVDQEIIFPPIKTDVITMDPKDNCSKDANDTLLLQLTNTSAYYMYLLLLLKSVVYFAIITCCLLMAMVKRKDSRGRAKRSGSGATNFSLLKQAGDVEENPGPTSMDWIWRILFLVGAATGAHSFEDVRLQESGPGQVKPSQTVSLTCSVTGYSITNGNHWWNWIRQVSGSKLEWIGYISSSGSTDSNPSLKSRISITRDTSKNQLFLQLNSVTTEDIATYYCARGYYFDYWGQGTTLTVSSTRIQNPDPAVYQLRDSKSSDKSVCLFTDFDSQTNVSQSKDSDVYITDKCVLDMRSMDFKSNSAVAWSNKSDFACANAFNNSIIPEDTFFPSPESSDSTDHVKPKETENTKQPSKSCHKPKAIVHTEKVNMMSLTVLGLRMLFAKTVAVNFLLTAKLFFLLTA

SEQ ID NO: 14447 - protein, 724 aa, synthetic construct
MALPVTALLLPLALLLHAARPDIQMTQSPSSLSASVGDRVTITCRASQDVNTAVAWYQQKPGKAPKLLIYSASFLESGVPSRFSGSRSGTDFTLTISSLQPEDFATYYCQQHYTTPPTFGQTKVEIKRLEDLKNVFPPEVAVFEPSEAEISHTQKATLVCLATGFYPDHVELSWWVNGKEVHSGVCTDPQPLKEQPALNDSRYCLSSRLRVSATFWQNPRNHFRCQVQFYGLSENDEWTQDRAKPVTQIVSAEAWGRADDVIKIHWQEKKSNTILGSQEGNTMKTNDTYMKFSWLTVPEKSLDKEHRCIVRHENNKNGVDQEIIFPPIKTDVITMDPKDNCSKDANDTLLLQLTNTSAYYMYLLLLLKSVVYFAIITCCLLMAMVKRKDSRGRAKRSGSGATNFSLLKQAGDVEENPGPTSMDWIWRILFLVGAATGAHSFEEVQLVESGGGLVQPGGSLRLSCAASGFNIKDTYIHWVRQAPGKGLEWVARIYPTNGYTRYADSVKGRFTISADTSKNTAYLQMNSLRAEDTAVYYCSRWGGDGFYAMDVWGQGTLVTVSSTRIQNPDPAVYQLRDSKSSDKSVCLFTDFDSQTNVSQSKDSDVYITDKCVLDMRSMDFKSNSAVAWSNKSDFACANAFNNSIIPEDTFFPSPESSDSTDHVKPKETENTKQPSKSCHKPKAIVHTEKVNMMSLTVLGLRMLFAKTVAVNFLLTAKLFFLLTA

SEQ ID NO: 14448 - protein, 723 aa, synthetic construct
MALPVTALLLPLALLLHAARPDQSVLTQPPSVSVAPGKTARIPCEGNYIGSSNVHWYQQKPGQAPVLVIHFDSDRPSGIPDRFSGSNSGNMATLTISRVEAGDEADYYCQVWENHGWVFGGGTKLTVLSLEDLKNVFPPEVAVFEPSEAEISHTQKATLVCLATGFYPDHVELSWWVNGKEVHSGVCTDPQPLKEQPALNDSRYCLSSRLRVSATFWQNPRNHFRCQVQFYGLSENDEWTQDRAKPVTQIVSAEAWGRADDVIKIHWQEKKSNTILGSQEGNTMKTNDTYMKFSWLTVPEKSLDKEHRCIVRHENNKNGVDQEIIFPPIKTDVITMDPKDNCSKDANDTLLLQLTNTSAYYMYLLLLLKSVVYFAIITCCLLMAMVKRKDSRGRAKRSGSGATNFSLLKQAGDVEENPGPTSMDWIWRILFLVGAATGAHSFEEVQLVETGGGLVQPGESLRLSCAASGFTFSDYEMNWVRQAPGKGLEWVSYISSSGSTIYYADSVKGRFTIYRDNAKNSLYLQMNSLRAEDTALYYCARAWGVGPPDYWGQGTLVTVSSTRIQNPDPAVYQLRDSKSSDKSVCLFTDFDSQTNVSQSKDSDVYITDKCVLDMRSMDFKSNSAVAWSNKSDFACANAFNNSIIPEDTFFPSPESSDSTDHVKPKETENTKQPSKSCHKPKAIVHTEKVNMMSLTVLGLRMLFAKTVAVNFLLTAKLFFLLTA

SEQ ID NO: 14449 - protein, 731 aa, synthetic construct
MALPVTALLLPLALLLHAARPDIQMTQSPSSLSASVGDTVTITCQANGYLNWYQQRRGKAPKLLIYDGSKLERGVPSRFSGRRWGQEYNLTINNLQPEDIATYFCQVYEFVVPGTRLDLKRTVAAPLEDLKNVFPPEVAVFEPSEAEISHTQKATLVCLATGFYPDHVELSWWVNGKEVHSGVCTDPQPLKEQPALNDSRYCLSSRLRVSATFWQNPRNHFRCQVQFYGLSENDEWTQDRAKPVTQIVSAEAWGRADDVIKIHWQEKKSNTILGSQEGNTMKTNDTYMKFSWLTVPEKSLDKEHRCIVRHENNKNGVDQEIIFPPIKTDVITMDPKDNCSKDANDTLLLQLTNTSAYYMYLLLLLKSVVYFAIITCCLLMAMVKRKDSRGRAKRSGSGATNFSLLKQAGDVEENPGPTSMDWIWRILFLVGAATGAHSFEQVQLLQSGAAVTKPGASVRVSCEASGYNIRDYFIHWWRQAPGQGLQWVGWINPKTGQPNNPRQFQGRVSLTRHASWDFDTFSFYMDLKALRSDDTAVYFCARQRSDYWDFDVWGSGTQVTVSSASTKGPTRIQNPDPAVYQLRDSKSSDKSVCLFTDFDSQTNVSQSKDSDVYITDKCVLDMRSMDFKSNSAVAWSNKSDFACANAFNNSIIPEDTFFPSPESSDSTDHVKPKETENTKQPSKSCHKPKAIVHTEKVNMMSLTVLGLRMLFAKTVAVNFLLTAKLFFLLTA

SEQ ID NO: 14450 - protein, 737 aa, synthetic construct
MALPVTALLLPLALLLHAARPQSALTQPPSASGSPGQSITISCTGTSNNFVSWYQQHAGKAPKLVIYDVNKRPSGVPDRFSGSKSGNTASLTVSGLQTDDEAVYYCGSLVGNWDVIFGGGTKLTVLLEDLKNVFPPEVAVFEPSEAEISHTQKATLVCLATGFYPDHVELSWWVNGKEVHSGVCTDPQPLKEQPALNDSRYCLSSRLRVSATFWQNPRNHFRCQVQFYGLSENDEWTQDRAKPVTQIVSAEAWGRADDVIKIHWQEKKSNTILGSQEGNTMKTNDTYMKFSWLTVPEKSLDKEHRCIVRHENNKNGVDQEIIFPPIKTDVITMDPKDNCSKDANDTLLLQLTNTSAYYMYLLLLLKSVVYFAIITCCLLMAMVKRKDSRGRAKRSGSGATNFSLLKQAGDVEENPGPTSMDWIWRILFLVGAATGAHSFEQPQLQESGPTLVEASETLSLTCAVSGDSTAACNSFWGWVRQPPGKGLEWVGSLSHCASYWNRGWTYHNPSLKSRLTLALDTPKNLVFLKLNSVTAADTATYYCARFGGEVLRYTDWPKPAWVDLWGRGTLVTVSSTRIQNPDPAVYQLRDSKSSDKSVCLFTDFDSQTNVSQSKDSDVYITDKCVLDMRSMDFKSNSAVAWSNKSDFACANAFNNSIIPEDTFFPSPESSDSTDHVKPKETENTKQPSKSCHKPKAIVHTEKVNMMSLTVLGLRMLFAKTVAVNFLLTAKLFFLLTA

SEQ ID NO: 14451 - protein, 722 aa, synthetic construct
MALPVTALLLPLALLLHAARPEIVLTQSPGTLSLSPGETAIISCRTSQYGSLAWYQQRPGQAPRLVIYSGSTRAAGIPDRFSGSRWGPDYNLTISNLESGDFGVYYCQQYEFFGQGTKVQVDIKRLEDLKNVFPPEVAVFEPSEAEISHTQKATLVCLATGFYPDHVELSWWVNGKEVHSGVCTDPQPLKEQPALNDSRYCLSSRLRVSATFWQNPRNHFRCQVQFYGLSENDEWTQDRAKPVTQIVSAEAWGRADDVIKIHWQEKKSNTILGSQEGNTMKTNDTYMKFSWLTVPEKSLDKEHRCIVRHENNKNGVDQEIIFPPIKTDVITMDPKDNCSKDANDTLLLQLTNTSAYYMYLLLLLKSVVYFAIITCCLLMAMVKRKDSRGRAKRSGSGATNFSLLKQAGDVEENPGPTSMDWIWRILFLVGAATGAHSFEQVQLVQSGGQMKKPGESMRISCRASGYEFIDCTLNWIRLAPGKRPEWMGWLKPRGGAVNYARPLQGRVTMTRDVYSDTAFLELRSLTVDDTAVYFCTRGKNCDYNWDFEHWGRGTPVIVSSTRIQNPDPAVYQLRDSKSSDKSVCLFTDFDSQTNVSQSKDSDVYITDKCVLDMRSMDFKSNSAVAWSNKSDFACANAFNNSIIPEDTFFPSPESSDSTDHVKPKETENTKQPSKSCHKPKAIVHTEKVNMMSLTVLGLRMLFAKTVAVNFLLTAKLFFLLTA

SEQ ID NO: 14452 - protein, 732 aa, synthetic construct
MALPVTALLLPLALLLHAARPELVLTQSPGTLSLSAGERATLSCRASQSVSSGSLAWYQQKPGQAPRLLIYGASTRATGIPDRFSGSGSGTDFTLTIGRLEPEDLAVYYCQQYGTSPYTFGQGTKLEILEDLKNVFPPEVAVFEPSEAEISHTQKATLVCLATGFYPDHVELSWWVNGKEVHSGVCTDPQPLKEQPALNDSRYCLSSRLRVSATFWQNPRNHFRCQVQFYGLSENDEWTQDRAKPVTQIVSAEAWGRADDVIKIHWQEKKSNTILGSQEGNTMKTNDTYMKFSWLTVPEKSLDKEHRCIVRHENNKNGVDQEIIFPPIKTDVITMDPKDNCSKDANDTLLLQLTNTSAYYMYLLLLLKSVVYFAIITCCLLMAMVKRKDSRGRAKRSGSGATNFSLLKQAGDVEENPGPTSMDWIWRILFLVGAATGAHSFELEQSGAEVKKPGSSVQVSCKASGGTFSMYGFNWVRQAPGHGLEWMGGIIPIFGTSNYAQKFRGRVTFTADQATSTAYMELTNLRSDDTAVYYCARDFGPDWEDGDSYDGSGRGFFDFWGQGTLVTVSSTRIQNPDPAVYQLRDSKSSDKSVCLFTDFDSQTNVSQSKDSDVYITDKCVLDMRSMDFKSNSAVAWSNKSDFACANAFNNSIIPEDTFFPSPESSDSTDHVKPKETENTKQPSKSCHKPKAIVHTEKVNMMSLTVLGLRMLFAKTVAVNFLLTAKLFFLLTA

SEQ ID NO: 14453 - protein, 712 aa, synthetic construct
MALPVTALLLPLALLLHAARPDIQMTQSPSSLSASVGDRVTITCQASQDINNYLNWYQQKPGKAPKLLIYDASNLQTGVPSRFSGSGSGTDFTFTIEDIATYYCQQYTFGPGTKVDIKLEDLKNVFPPEVAVFEPSEAEISHTQKATLVCLATGFYPDHVELSWWVNGKEVHSGVCTDPQPLKEQPALNDSRYCLSSRLRVSATFWQNPRNHFRCQVQFYGLSENDEWTQDRAKPVTQIVSAEAWGRADDVIKIHWQEKKSNTILGSQEGNTMKTNDTYMKFSWLTVPEKSLDKEHRCIVRHENNKNGVDQEIIFPPIKTDVITMDPKDNCSKDANDTLLLQLTNTSAYYMYLLLLLKSVVYFAIITCCLLMAMVKRKDSRGRAKRSGSGATNFSLLKQAGDVEENPGPTSMDWIWRILFLVGAATGAHSFEEVQLLESGGGLVQPGGSLRLSCAASGFTFSWYSMTWVRQAPGKGLEWVSSIVPWGDFTQYADSVKGRFTISRDNSKNTLYLQMNSLRAEDTAVYYCAKGPGWGSFDLWGRGTLVTVSSTRIQNPDPAVYQLRDSKSSDKSVCLFTDFDSQTNVSQSKDSDVYITDKCVLDMRSMDFKSNSAVAWSNKSDFACANAFNNSIIPEDTFFPSPESSDSTDHVKPKETENTKQPSKSCHKPKAIVHTEKVNMMSLTVLGLRMLFAKTVAVNFLLTAKLFFLLTA

SEQ ID NO: 14454 - protein, 722 aa, synthetic construct
MALPVTALLLPLALLLHAARPDIQMTQSPSSLSASVGDRVTITCTASLSVSSTYLHWYQQKPGSSPKLWIYSTSNLASGVPSRFSGSGSGTSYTLTISSLQPEDFATYYCHQYHRSPLTFGGGTKVEIKRLEDLKNVFPPEVAVFEPSEAEISHTQKATLVCLATGFYPDHVELSWWVNGKEVHSGVCTDPQPLKEQPALNDSRYCLSSRLRVSATFWQNPRNHFRCQVQFYGLSENDEWTQDRAKPVTQIVSAEAWGRADDVIKIHWQEKKSNTILGSQEGNTMKTNDTYMKFSWLTVPEKSLDKEHRCIVRHENNKNGVDQEIIFPPIKTDVITMDPKDNCSKDANDTLLLQLTNTSAYYMYLLLLLKSVVYFAIITCCLLMAMVKRKDSRGRAKRSGSGATNFSLLKQAGDVEENPGPTSMDWIWRILFLVGAATGAHSFEEVQLVESGGGLVQPGGSLRLSCAASGFSLTKYGVHWVRQAPGKGLEWVGVKWAGGSTDYNSALMSRFTISKDNAKNSLYLQMNSLRAEDTAVYYCARDHRDAMDYWGQGTLVTVSSTRIQNPDPAVYQLRDSKSSDKSVCLFTDFDSQTNVSQSKDSDVYITDKCVLDMRSMDFKSNSAVAWSNKSDFACANAFNNSIIPEDTFFPSPESSDSTDHVKPKETENTKQPSKSCHKPKAIVHTEKVNMMSLTVLGLRMLFAKTVAVNFLLTAKLFFLLTA

SEQ ID NO: 14455 - protein, 726 aa, synthetic construct
MALPVTALLLPLALLLHAARPDIQMTQSPSSLSASVGDRVTITCKASQDVGTAVAWYQQKPGKAPKLLIYSASYRSTGVPSRFSGSGSGTDFTLTISSLQPEDFATYYCQHHYSAPWTFGGGTKVEIKLEDLKNVFPPEVAVFEPSEAEISHTQKATLVCLATGFYPDHVELSWWVNGKEVHSGVCTDPQPLKEQPALNDSRYCLSSRLRVSATFWQNPRNHFRCQVQFYGLSENDEWTQDRAKPVTQIVSAEAWGRADDVIKIHWQEKKSNTILGSQEGNTMKTNDTYMKFSWLTVPEKSLDKEHRCIVRHENNKNGVDQEIIFPPIKTDVITMDPKDNCSKDANDTLLLQLTNTSAYYMYLLLLLKSVVYFAIITCCLLMAMVKRKDSRGRAKRSGSGATNFSLLKQAGDVEENPGPTSMDWIWRILFLVGAATGAHSFEEVQLVESGGGLVQPGGSLRLSCAASGFTFSRNGMSWVRQAPGKGLEWVATVSSGGSYIYYADSVKGRFTISRDNAKNSLYLQMNSLRAEDTAVYYCARQGTTALATRFFDVWGQGTLVTVSSTRIQNPDPAVYQLRDSKSSDKSVCLFTDFDSQTNVSQSKDSDVYITDKCVLDMRSMDFKSNSAVAWSNKSDFACANAFNNSIIPEDTFFPSPESSDSTDHVKPKETENTKQPSKSCHKPKAIVHTEKVNMMSLTVLGLRMLFAKTVAVNFLLTAKLFFLLTA

SEQ ID NO: 14456 - protein, 722 aa, synthetic construct
MALPVTALLLPLALLLHAARPDIQMTQSPPSLSASVGGKVTITCKASQDIDRYMAWYQDKPGKGPKLLIHDTSTLQPGIPSRFSGSGSGRDYSFSISNLEPEDIATYYCLQYDNLWTFGGGTKLEIKRLEDLKNVFPPEVAVFEPSEAEISHTQKATLVCLATGFYPDHVELSWWVNGKEVHSGVCTDPQPLKEQPALNDSRYCLSSRLRVSATFWQNPRNHFRCQVQFYGLSENDEWTQDRAKPVTQIVSAEAWGRADDVIKIHWQEKKSNTILGSQEGNTMKTNDTYMKFSWLTVPEKSLDKEHRCIVRHENNKNGVDQEIIFPPIKTDVITMDPKDNCSKDANDTLLLQLTNTSAYYMYLLLLLKSVVYFAIITCCLLMAMVKRKDSRGRAKRSGSGATNFSLLKQAGDVEENPGPTSMDWIWRILFLVGAATGAHSFEQVQLVQSGAELVKPGASVKMSCKASGYIFTNYNIHWVKKSPGQGLEWIGAIYPGNGDAPYSQKFQDRATLTADTSSSTTYMELSSLTSEDSAVYYCVRANWDVAFAYWGQGTLVSVSSTRIQNPDPAVYQLRDSKSSDKSVCLFTDFDSQTNVSQSKDSDVYITDKCVLDMRSMDFKSNSAVAWSNKSDFACANAFNNSIIPEDTFFPSPESSDSTDHVKPKETENTKQPSKSCHKPKAIVHTEKVNMMSLTVLGLRMLFAKTVAVNFLLTAKLFFLLTA

SEQ ID NO: 14457 - protein, 723 aa, synthetic construct
MALPVTALLLPLALLLHAARPDIQMTQSPASLSASVGETVTITCRVSGNIHNYLAWYQQKQGKSPQLLVYNAKTLADGVPSRFSGSGSGTQYSLKINSLQPEDFGSYYCQHFWSNPYTFGGGTKLEIKLEDLKNVFPPEVAVFEPSEAEISHTQKATLVCLATGFYPDHVELSWWVNGKEVHSGVCTDPQPLKEQPALNDSRYCLSSRLRVSATFWQNPRNHFRCQVQFYGLSENDEWTQDRAKPVTQIVSAEAWGRADDVIKIHWQEKKSNTILGSQEGNTMKTNDTYMKFSWLTVPEKSLDKEHRCIVRHENNKNGVDQEIIFPPIKTDVITMDPKDNCSKDANDTLLLQLTNTSAYYMYLLLLLKSVVYFAIITCCLLMAMVKRKDSRGRAKRSGSGATNFSLLKQAGDVEENPGPTSMDWIWRILFLVGAATGAHSFEQVQLQQSGASVKVSCKASELVRPGTGYAFTNYLIEWVKQRPGQGLEWIGVINPGSGGTNYNEKFKGKATLTADKSSSTAYMQLSSLTSDDSAVYFCARYRSYDWYFDVWGAGTTVTVSSTRIQNPDPAVYQLRDSKSSDKSVCLFTDFDSQTNVSQSKDSDVYITDKCVLDMRSMDFKSNSAVAWSNKSDFACANAFNNSIIPEDTFFPSPESSDSTDHVKPKETENTKQPSKSCHKPKAIVHTEKVNMMSLTVLGLRMLFAKTVAVNFLLTAKLFFLLTA

SEQ ID NO: 14458 - protein, 722 aa, synthetic construct
MALPVTALLLPLALLLHAARPDIQMTQSFSSLSASVGDRVTITCRASQDISNYLNWYQQKPGKAPKLLIYYTSRLHSGVPSRFSGSGSGTDYTLTISSLQPEDFATYFCQQGNTLPWTFGGGTKLEIKRLEDLKNVFPPEVAVFEPSEAEISHTQKATLVCLATGFYPDHVELSWWVNGKEVHSGVCTDPQPLKEQPALNDSRYCLSSRLRVSATFWQNPRNHFRCQVQFYGLSENDEWTQDRAKPVTQIVSAEAWGRADDVIKIHWQEKKSNTILGSQEGNTMKTNDTYMKFSWLTVPEKSLDKEHRCIVRHENNKNGVDQEIIFPPIKTDVITMDPKDNCSKDANDTLLLQLTNTSAYYMYLLLLLKSVVYFAIITCCLLMAMVKRKDSRGRAKRSGSGATNFSLLKQAGDVEENPGPTSMDWIWRILFLVGAATGAHSFEEVQLVQSGGGLVQSGGSLRLSCRASGYTFTRYWMLWVRQRPGKGLEWVAEINPRNDRTNYNEKFKTRFTISVDRSKNTLYLQMDSLRAEDTAVYFCALGGGYAMDYWGQGTLVTVSSTRIQNPDPAVYQLRDSKSSDKSVCLFTDFDSQTNVSQSKDSDVYITDKCVLDMRSMDFKSNSAVAWSNKSDFACANAFNNSIIPEDTFFPSPESSDSTDHVKPKETENTKQPSKSCHKPKAIVHTEKVNMMSLTVLGLRMLFAKTVAVNFLLTAKLFFLLTA

SEQ ID NO: 14459 - protein, 723 aa, synthetic construct
MALPVTALLLPLALLLHAARPDIQMTQSPASLSASVGETVTIICRASVNIYSYLAWYQQKQGKSPQLLVYNAKILAEGVPSRFSGSGSGTQFSLKINSLQPEDFGSYYCQHHYGTFTFGSGTKLEIKRLEDLKNVFPPEVAVFEPSEAEISHTQKATLVCLATGFYPDHVELSWWVNGKEVHSGVCTDPQPLKEQPALNDSRYCLSSRLRVSATFWQNPRNHFRCQVQFYGLSENDEWTQDRAKPVTQIVSAEAWGRADDVIKIHWQEKKSNTILGSQEGNTMKTNDTYMKFSWLTVPEKSLDKEHRCIVRHENNKNGVDQEIIFPPIKTDVITMDPKDNCSKDANDTLLLQLTNTSAYYMYLLLLLKSVVYFAIITCCLLMAMVKRKDSRGRAKRSGSGATNFSLLKQAGDVEENPGPTSMDWIWRILFLVGAATGAHSFEQVQLKESGPGLVAPSQSLSITCTISGFSLTSYGVHWVRQPPGKGLEWLVVIWSDGSTTYNSALKSRLSISKDNSKSQVFLKMNSLQTDDTAIYYCASHYGSTLAFASWGHGTLVTVSAATRIQNPDPAVYQLRDSKSSDKSVCLFTDFDSQTNVSQSKDSDVYITDKCVLDMRSMDFKSNSAVAWSNKSDFACANAFNNSIIPEDTFFPSPESSDSTDHVKPKETENTKQPSKSCHKPKAIVHTEKVNMMSLTVLGLRMLFAKTVAVNFLLTAKLFFLLTA

SEQ ID NO: 14460 - protein, 731 aa, synthetic construct
MALPVTALLLPLALLLHAARPDIVMTQSHKFMSTSVGDRVSVTCKASQNVGNNVAWYQQKPGQSPKVLIYSASYRYSGVPDRFTGSGSGTDFTLTISNVQSEDLAEYFCQQYNTYPFTFGSGTKLEIKLEDLKNVFPPEVAVFEPSEAEISHTQKATLVCLATGFYPDHVELSWWVNGKEVHSGVCTDPQPLKEQPALNDSRYCLSSRLRVSATFWQNPRNHFRCQVQFYGLSENDEWTQDRAKPVTQIVSAEAWGRADDVIKIHWQEKKSNTILGSQEGNTMKTNDTYMKFSWLTVPEKSLDKEHRCIVRHENNKNGVDQEIIFPPIKTDVITMDPKDNCSKDANDTLLLQLTNTSAYYMYLLLLLKSVVYFAIITCCLLMAMVKRKDSRGRAKRSGSGATNFSLLKQAGDVEENPGPTSMDWIWRILFLVGAATGAHSFEEVQLEESGGGLVQPGGSMKLSCVASGFTFSNYWMNWVRQSPEKGLEWVAEIRFKSHNYATHFAESVKGRFTISRDDSKSSVYLQMNNLRAEDTGIYYCTRRIGNSDYDWWYFDVWGAGTSVTVSSASTRIQNPDPAVYQLRDSKSSDKSVCLFTDFDSQTNVSQSKDSDVYITDKCVLDMRSMDFKSNSAVAWSNKSDFACANAFNNSIIPEDTFFPSPESSDSTDHVKPKETENTKQPSKSCHKPKAIVHTEKVNMMSLTVLGLRMLFAKTVAVNFLLTAKLFFLLTA

SEQ ID NO: 14461 - protein, 724 aa, synthetic construct
MALPVTALLLPLALLLHAARPDQIVLTQSPAIMSASPGEKVTISCSASSSVSYMYWYQQKPGSSPKPWIYRTSNLASGVPARFSGSGSGTSYSLTISNMEAEDAAAYYCQQYHSYPTTFGGGTKLEVKLEDLKNVFPPEVAVFEPSEAEISHTQKATLVCLATGFYPDHVELSWWVNGKEVHSGVCTDPQPLKEQPALNDSRYCLSSRLRVSATFWQNPRNHFRCQVQFYGLSENDEWTQDRAKPVTQIVSAEAWGRADDVIKIHWQEKKSNTILGSQEGNTMKTNDTYMKFSWLTVPEKSLDKEHRCIVRHENNKNGVDQEIIFPPIKTDVITMDPKDNCSKDANDTLLLQLTNTSAYYMYLLLLLKSVVYFAIITCCLLMAMVKRKDSRGRAKRSGSGATNFSLLKQAGDVEENPGPTSMDWIWRILFLVGAATGAHSFEEVQLVESGGGLVQPKGSLKLSCAASGFSFNTYAMNWVRQAPGKGLEWIAHIRSKSNNFATYYADSVKDRFSISRDASENILFLQMNNLKTEDTAMYYCVRQGGDFPMDYWGQGTSVTVSSTRIQNPDPAVYQLRDSKSSDKSVCLFTDFDSQTNVSQSKDSDVYITDKCVLDMRSMDFKSNSAVAWSNKSDFACANAFNNSIIPEDTFFPSPESSDSTDHVKPKETENTKQPSKSCHKPKAIVHTEKVNMMSLTVLGLRMLFAKTVAVNFLLTAKLFFLLTA

SEQ ID NO: 14462 - protein, 723 aa, synthetic construct
MALPVTALLLPLALLLHAARPDDIQMTQSSSSFSVSLGDRVTITCMASEDIYIRLAWYQQKPGNAPRLLISAATSLETGVPSRFSGSGSGKDYTLSITSLQTEDVGTYYCQQYWSSPWTFGGGTKLEINLEDLKNVFPPEVAVFEPSEAEISHTQKATLVCLATGFYPDHVELSWWVNGKEVHSGVCTDPQPLKEQPALNDSRYCLSSRLRVSATFWQNPRNHFRCQVQFYGLSENDEWTQDRAKPVTQIVSAEAWGRADDVIKIHWQEKKSNTILGSQEGNTMKTNDTYMKFSWLTVPEKSLDKEHRCIVRHENNKNGVDQEIIFPPIKTDVITMDPKDNCSKDANDTLLLQLTNTSAYYMYLLLLLKSVVYFAIITCCLLMAMVKRKDSRGRAKRSGSGATNFSLLKQAGDVEENPGPTSMDWIWRILFLVGAATGAHSFEDVQLQESGPGLVKPSQSLSLTCTVTGYSITSDYTWNWIRQFPGNKLEWMGYITYSGSTSYNPSLKSRNSITRDTSKNQFFLQLNSVTTEDTATYYCARLGRRYTMDYWGQGTSVTVSSTRIQNPDPAVYQLRDSKSSDKSVCLFTDFDSQTNVSQSKDSDVYITDKCVLDMRSMDFKSNSAVAWSNKSDFACANAFNNSIIPEDTFFPSPESSDSTDHVKPKETENTKQPSKSCHKPKAIVHTEKVNMMSLTVLGLRMLFAKTVAVNFLLTAKLFFLLTA

SEQ ID NO: 14463 - protein, 726 aa, synthetic construct
MALPVTALLLPLALLLHAARPDDIQMTQSPSSLSASVGDRVTITCRASQSISSYLNWYQQKPGKAPKLLIYDASNLETGVPSRFSGSGSGTDFTFTISSLQPEDIATYYCQQYDNLPLTFGGGTKVDIKRLEDLKNVFPPEVAVFEPSEAEISHTQKATLVCLATGFYPDHVELSWWVNGKEVHSGVCTDPQPLKEQPALNDSRYCLSSRLRVSATFWQNPRNHFRCQVQFYGLSENDEWTQDRAKPVTQIVSAEAWGRADDVIKIHWQEKKSNTILGSQEGNTMKTNDTYMKFSWLTVPEKSLDKEHRCIVRHENNKNGVDQEIIFPPIKTDVITMDPKDNCSKDANDTLLLQLTNTSAYYMYLLLLLKSVVYFAIITCCLLMAMVKRKDSRGRAKRSGSGATNFSLLKQAGDVEENPGPTSMDWIWRILFLVGAATGAHSFEQVQLVESGGGVVQPGRSLRLSCAASGFTFSSYAMHWVRQAPGKGLEWVAVISYDGSNKYYADSVKGRFTISRDNSKNTLYLQMNSLRAEDTAVYYCARAHNSSSWSFDYWGQGTLVTVSSTRIQNPDPAVYQLRDSKSSDKSVCLFTDFDSQTNVSQSKDSDVYITDKCVLDMRSMDFKSNSAVAWSNKSDFACANAFNNSIIPEDTFFPSPESSDSTDHVKPKETENTKQPSKSCHKPKAIVHTEKVNMMSLTVLGLRMLFAKTVAVNFLLTAKLFFLLTA

SEQ ID NO: 14464 - protein, 735 aa, synthetic construct
MALPVTALLLPLALLLHAARPDDVVMTQSPLSLPVSLGDQASISCRSSQRLVHSNGNTYLHWYLQKPGQSPKLLIYRVSNRFPGVPDRFSGSGSGTDFTLKISRVEAEDLGIYFCSQSTHVPYTFGGGTKLEIKRLEDLKNVFPPEVAVFEPSEAEISHTQKATLVCLATGFYPDHVELSWWVNGKEVHSGVCTDPQPLKEQPALNDSRYCLSSRLRVSATFWQNPRNHFRCQVQFYGLSENDEWTQDRAKPVTQIVSAEAWGRADDVIKIHWQEKKSNTILGSQEGNTMKTNDTYMKFSWLTVPEKSLDKEHRCIVRHENNKNGVDQEIIFPPIKTDVITMDPKDNCSKDANDTLLLQLTNTSAYYMYLLLLLKSVVYFAIITCCLLMAMVKRKDSRGRAKRSGSGATNFSLLKQAGDVEENPGPTSMDWIWRILFLVGAATGAHSFEEVRLQQSGPDLIKPGASVKMSCKASGYTFTGYVMHWVKQRPGQGLEWIGFINPYNDDIQSNERFRGKATLTSDKSSTTAYMELSSLTSEDSAVYYCARGAGYNFDGAYRFFDFWGQGTTLTVSSTRIQNPDPAVYQLRDSKSSDKSVCLFTDFDSQTNVSQSKDSDVYITDKCVLDMRSMDFKSNSAVAWSNKSDFACANAFNNSIIPEDTFFPSPESSDSTDHVKPKETENTKQPSKSCHKPKAIVHTEKVNMMSLTVLGLRMLFAKTVAVNFLLTAKLFFLLTA

SEQ ID NO: 14465 - protein, 726 aa, synthetic construct
MALPVTALLLPLALLLHAARPDSYELTQPPSVSVSPGQTATISCSGDQLGGKYGHWYQKKPGQSPVLVLYQDRKRPAGIPERFSGSSSGNTITLTISGTQAVDEADYYCQAWDTNLGGVFGGGTKVTVLGQLEDLKNVFPPEVAVFEPSEAEISHTQKATLVCLATGFYPDHVELSWWVNGKEVHSGVCTDPQPLKEQPALNDSRYCLSSRLRVSATFWQNPRNHFRCQVQFYGLSENDEWTQDRAKPVTQIVSAEAWGRADDVIKIHWQEKKSNTILGSQEGNTMKTNDTYMKFSWLTVPEKSLDKEHRCIVRHENNKNGVDQEIIFPPIKTDVITMDPKDNCSKDANDTLLLQLTNTSAYYMYLLLLLKSVVYFAIITCCLLMAMVKRKDSRGRAKRSGSGATNFSLLKQAGDVEENPGPTSMDWIWRILFLVGAATGAHSFEQVQLVESGAEVKKPGASVKVSCKASGYTFTGYYMHWVRQAPGQGLEWMGRINPNSGGTNYAQKFQGRVTMTRDTSISTAYMELSRLRSDDTAVYYCASPRGRGSAFDIWGQGTLVTVSSTRIQNPDPAVYQLRDSKSSDKSVCLFTDFDSQTNVSQSKDSDVYITDKCVLDMRSMDFKSNSAVAWSNKSDFACANAFNNSIIPEDTFFPSPESSDSTDHVKPKETENTKQPSKSCHKPKAIVHTEKVNMMSLTVLGLRMLFAKTVAVNFLLTAKLFFLLTA

SEQ ID NO: 14466 - protein, 729 aa, synthetic construct
MALPVTALLLPLALLLHAARPDNFMLTQPHSVSESPGKTVTISCTRSSGSIASKYVQWYQQRPGSSPTTVIYEDNQRPSGVPDRFSGSIDTSSNSASLTISGLRTEDEADYYCHSYDSNNHSVFGGGTKVTVLGQLEDLKNVFPPEVAVFEPSEAEISHTQKATLVCLATGFYPDHVELSWWVNGKEVHSGVCTDPQPLKEQPALNDSRYCLSSRLRVSATFWQNPRNHFRCQVQFYGLSENDEWTQDRAKPVTQIVSAEAWGRADDVIKIHWQEKKSNTILGSQEGNTMKTNDTYMKFSWLTVPEKSLDKEHRCIVRHENNKNGVDQEIIFPPIKTDVITMDPKDNCSKDANDTLLLQLTNTSAYYMYLLLLLKSVVYFAIITCCLLMAMVKRKDSRGRAKRSGSGATNFSLLKQAGDVEENPGPTSMDWIWRILFLVGAATGAHSFEEVQLVESGGGVVQPGGSLRLSCAASGFTFSSYAMSWVRQAPGKGLEWVSAISGSGGSTYYADSVKGRFSISRDNSKNTLYLQMNSLRAEDTAVYYCARTRSSGAFDIWGQGTLVTVSSTRIQNPDPAVYQLRDSKSSDKSVCLFTDFDSQTNVSQSKDSDVYITDKCVLDMRSMDFKSNSAVAWSNKSDFACANAFNNSIIPEDTFFPSPESSDSTDHVKPKETENTKQPSKSCHKPKAIVHTEKVNMMSLTVLGLRMLFAKTVAVNFLLTAKLFFLLTA

SEQ ID NO: 14467 - protein, 724 aa, synthetic construct
MALPVTALLLPLALLLHAARPDIQMNQSPSSLSASLGDTITITCHASQNINVWLSWYQQKPGNIPKLLIYKASNLHTGVPSRFSGSGSGTGFTITISSLQPEDIATYYCQQGQSYPWTFGGGTKLEIKRLEDLKNVFPPEVAVFEPSEAEISHTQKATLVCLATGFYPDHVELSWWVNGKEVHSGVCTDPQPLKEQPALNDSRYCLSSRLRVSATFWQNPRNHFRCQVQFYGLSENDEWTQDRAKPVTQIVSAEAWGRADDVIKIHWQEKKSNTILGSQEGNTMKTNDTYMKFSWLTVPEKSLDKEHRCIVRHENNKNGVDQEIIFPPIKTDVITMDPKDNCSKDANDTLLLQLTNTSAYYMYLLLLLKSVVYFAIITCCLLMAMVKRKDSRGRAKRSGSGATNFSLLKQAGDVEENPGPTSMDWIWRILFLVGAATGAHSFEEVQLQQSGPELVKPGASVKISCKASGYSFTGYFMNWVKQSHGKSLEYIGRFNPYNGETLYNQKFKGKATLTVDKSSSTVHMELLSVTSEDSAVYYCGRSGNDDAMDYWGQGTSVTVSSATRIQNPDPAVYQLRDSKSSDKSVCLFTDFDSQTNVSQSKDSDVYITDKCVLDMRSMDFKSNSAVAWSNKSDFACANAFNNSIIPEDTFFPSPESSDSTDHVKPKETENTKQPSKSCHKPKAIVHTEKVNMMSLTVLGLRMLFAKTVAVNFLLTAKLFFLLTA

SEQ ID NO: 14468 - protein, 725 aa, synthetic construct
MALPVTALLLPLALLLHAARPEIVLTQSPATLSLSPGERATLSCRASQSVRSYLAWYQQKPGQAPRLLIYDASNRATGIPARFSGSGSGTDFTLTISSLEPEDFAVYYCQQRSNWPPTFGQGTKVEIKLEDLKNVFPPEVAVFEPSEAEISHTQKATLVCLATGFYPDHVELSWWVNGKEVHSGVCTDPQPLKEQPALNDSRYCLSSRLRVSATFWQNPRNHFRCQVQFYGLSENDEWTQDRAKPVTQIVSAEAWGRADDVIKIHWQEKKSNTILGSQEGNTMKTNDTYMKFSWLTVPEKSLDKEHRCIVRHENNKNGVDQEIIFPPIKTDVITMDPKDNCSKDANDTLLLQLTNTSAYYMYLLLLLKSVVYFAIITCCLLMAMVKRKDSRGRAKRSGSGATNFSLLKQAGDVEENPGPTSMDWIWRILFLVGAATGAHSFEQLQVQESGPGLVKPSETLSLTCTVSGGSISNSYFSWGWIRQPPGKGLEWIGSFYYGEKTYYNPSLKSRATISIDTSKSQFSLKLSSVTAADTAVYYCPRGPTMIRGVIDSWGQGTLVTVSSTRIQNPDPAVYQLRDSKSSDKSVCLFTDFDSQTNVSQSKDSDVYITDKCVLDMRSMDFKSNSAVAWSNKSDFACANAFNNSIIPEDTFFPSPESSDSTDHVKPKETENTKQPSKSCHKPKAIVHTEKVNMMSLTVLGLRMLFAKTVAVNFLLTAKLFFLLTA

SEQ ID NO: 14469 - protein, 734 aa, synthetic construct
MALPVTALLLPLALLLHAARPDIVMTQTPLSLPVTPGEPASISCRSSRSLLDSDDGNTYLDWYLQKPGQSPQLLIYTLSYRASGVPDRFSGSGSGTDFTLKISRVEAEDVGVYYCMQRVEFPITFGQGTRLEIKRLEDLKNVFPPEVAVFEPSEAEISHTQKATLVCLATGFYPDHVELSWWVNGKEVHSGVCTDPQPLKEQPALNDSRYCLSSRLRVSATFWQNPRNHFRCQVQFYGLSENDEWTQDRAKPVTQIVSAEAWGRADDVIKIHWQEKKSNTILGSQEGNTMKTNDTYMKFSWLTVPEKSLDKEHRCIVRHENNKNGVDQEIIFPPIKTDVITMDPKDNCSKDANDTLLLQLTNTSAYYMYLLLLLKSVVYFAIITCCLLMAMVKRKDSRGRAKRSGSGATNFSLLKQAGDVEENPGPTSMDWIWRILFLVGAATGAHSFEQVQLVESGGGVVQPGRSLRLSCAASGFIFSRYGMHWVRQAPGKGLKWVAVIWYDGSNKLYADSVKGRFTISRDNSKNTLYLQMNSLRAEDTAVYYCARDYYDNSRHHWGFDYWGQGTLVTVSSTRIQNPDPAVYQLRDSKSSDKSVCLFTDFDSQTNVSQSKDSDVYITDKCVLDMRSMDFKSNSAVAWSNKSDFACANAFNNSIIPEDTFFPSPESSDSTDHVKPKETENTKQPSKSCHKPKAIVHTEKVNMMSLTVLGLRMLFAKTVAVNFLLTAKLFFLLTA

SEQ ID NO: 14470 - protein, 724 aa, synthetic construct
MALPVTALLLPLALLLHAARPEIQMTQSPSSMSASLGDTITITCQATQDIFKNLNWYQQKPGKPPSLLIYYATELAEGVPSRFSGSGSGSDYSLTISNLESEDFAAYYCLQFFEFPFTFGSGTKLEMKLEDLKNVFPPEVAVFEPSEAEISHTQKATLVCLATGFYPDHVELSWWVNGKEVHSGVCTDPQPLKEQPALNDSRYCLSSRLRVSATFWQNPRNHFRCQVQFYGLSENDEWTQDRAKPVTQIVSAEAWGRADDVIKIHWQEKKSNTILGSQEGNTMKTNDTYMKFSWLTVPEKSLDKEHRCIVRHENNKNGVDQEIIFPPIKTDVITMDPKDNCSKDANDTLLLQLTNTSAYYMYLLLLLKSVVYFAIITCCLLMAMVKRKDSRGRAKRSGSGATNFSLLKQAGDVEENPGPTSMDWIWRILFLVGAATGAHSFEQVQLQQSGAELVRPGTSVKVSCKASGYVFTNYWIEWIKQRPGQGLEWIGVMNPGSGETTYNEKFKGKATLTADKSSSTAYMQLSSLTSVDSAVYFCARDHDRDYYAMDYWGQGTSVTVSSTRIQNPDPAVYQLRDSKSSDKSVCLFTDFDSQTNVSQSKDSDVYITDKCVLDMRSMDFKSNSAVAWSNKSDFACANAFNNSIIPEDTFFPSPESSDSTDHVKPKETENTKQPSKSCHKPKAIVHTEKVNMMSLTVLGLRMLFAKTVAVNFLLTAKLFFLLTA

SEQ ID NO: 14471 - protein, 721 aa, synthetic construct
MALPVTALLLPLALLLHAARPDILLTQSPAILSVSPGERVSFSCRASQNIGTSIHWYQQRTNGSPRLLIKYASESVSGIPSRFSGSGSGTDFTLSINSVESEDIADYYCQHTNSWPTTFGGGTKLEIKRLEDLKNVFPPEVAVFEPSEAEISHTQKATLVCLATGFYPDHVELSWWVNGKEVHSGVCTDPQPLKEQPALNDSRYCLSSRLRVSATFWQNPRNHFRCQVQFYGLSENDEWTQDRAKPVTQIVSAEAWGRADDVIKIHWQEKKSNTILGSQEGNTMKTNDTYMKFSWLTVPEKSLDKEHRCIVRHENNKNGVDQEIIFPPIKTDVITMDPKDNCSKDANDTLLLQLTNTSAYYMYLLLLLKSVVYFAIITCCLLMAMVKRKDSRGRAKRSGSGATNFSLLKQAGDVEENPGPTSMDWIWRILFLVGAATGAHSFEQVQLQQSDAELVKPGASVKISCKASGYTFTDHAIHWVKQKPEQGLEWIGYFSPGNGDIKYNEKFKGKATLTADKSSSTAYMQLNSLTSEDSAVYFCKRSYGNYDYWGQGTTLTVSSTRIQNPDPAVYQLRDSKSSDKSVCLFTDFDSQTNVSQSKDSDVYITDKCVLDMRSMDFKSNSAVAWSNKSDFACANAFNNSIIPEDTFFPSPESSDSTDHVKPKETENTKQPSKSCHKPKAIVHTEKVNMMSLTVLGLRMLFAKTVAVNFLLTAKLFFLLTA

SEQ ID NO: 14472 - protein, 726 aa, synthetic construct
MALPVTALLLPLALLLHAARPDIVMTQSPDSLAVSLGERATINCKSSQSLLNSGDQKNYLTWYQQKPGQPPKLLIYWASTRESGVPDRFSGSGSGTDFTLTISSLQAEDVAVYYCQNDYSYPLTFGQGTKVEIKLEDLKNVFPPEVAVFEPSEAEISHTQKATLVCLATGFYPDHVELSWWVNGKEVHSGVCTDPQPLKEQPALNDSRYCLSSRLRVSATFWQNPRNHFRCQVQFYGLSENDEWTQDRAKPVTQIVSAEAWGRADDVIKIHWQEKKSNTILGSQEGNTMKTNDTYMKFSWLTVPEKSLDKEHRCIVRHENNKNGVDQEIIFPPIKTDVITMDPKDNCSKDANDTLLLQLTNTSAYYMYLLLLLKSVVYFAIITCCLLMAMVKRKDSRGRAKRSGSGATNFSLLKQAGDVEENPGPTSMDWIWRILFLVGAATGAHSFEQVQLVQSGAEVKKTGSSVKVSCKASGYTFTDHAIHVWRQAPGQALEWMGHFSPGNTDIKYNDKFKGRVTLTVDRSMSTAYMELSSLRSEDTAMYYCKTSTFFFDYWGQGTMVTVSSTRIQNPDPAVYQLRDSKSSDKSVCLFTDFDSQTNVSQSKDSDVYITDKCVLDMRSMDFKSNSAVAWSNKSDFACANAFNNSIIPEDTFFPSPESSDSTDHVKPKETENTKQPSKSCHKPKAIVHTEKVNMMSLTVLGLRMLFAKTVAVNFLLTAKLFFLLTA

SEQ ID NO: 14473 - protein, 725 aa, synthetic construct
MALPVTALLLPLALLLHAARPDIQMTQSPSSLSASVGDRVTITCKASQDVSIAVAWYQQKPGKAPKVLIYSASYRYTGVPDRFSGSGSGTDFTFTISSLQPEDIAVYYCQQHYITPLTFGGGTKVEIKLEDLKNVFPPEVAVFEPSEAEISHTQKATLVCLATGFYPDHVELSWWVNGKEVHSGVCTDPQPLKEQPALNDSRYCLSSRLRVSATFWQNPRNHFRCQVQFYGLSENDEWTQDRAKPVTQIVSAEAWGRADDVIKIHWQEKKSNTILGSQEGNTMKTNDTYMKFSWLTVPEKSLDKEHRCIVRHENNKNGVDQEIIFPPIKTDVITMDPKDNCSKDANDTLLLQLTNTSAYYMYLLLLLKSVVYFAIITCCLLMAMVKRKDSRGRAKRSGSGATNFSLLKQAGDVEENPGPTSMDWIWRILFLVGAATGAHSFEQIQLVQSGHEVKKPGASVKVSCKASGYTFTNYGMNWVRQAPGQGLEWMGWINTKTGEPTYAEEFKGRFVFSLETSASTAYLQISSLKAEDTAMYFCGRGGYGSSYWYFDVWGQGTTVTVSSTRIQNPDPAVYQLRDSKSSDKSVCLFTDFDSQTNVSQSKDSDVYITDKCVLDMRSMDFKSNSAVAWSNKSDFACANAFNNSIIPEDTFFPSPESSDSTDHVKPKETENTKQPSKSCHKPKAIVHTEKVNMMSLTVLGLRMLFAKTVAVNFLLTAKLFFLLTA

SEQ ID NO: 14474 - protein, 727 aa, synthetic construct
MALPVTALLLPLALLLHAARPDIVMTQSPDSLAVSLGERATINCRASKSVSTSGYSYMHWYQQKPGQPPKLLIYLASNLESGVPDRFSGSGSGTDFTLTISSLQAEDVAVYYCQHSRELPYTFGQGTKLEIKLEDLKNVFPPEVAVFEPSEAEISHTQKATLVCLATGFYPDHVELSWWVNGKEVHSGVCTDPQPLKEQPALNDSRYCLSSRLRVSATFWQNPRNHFRCQVQFYGLSENDEWTQDRAKPVTQIVSAEAWGRADDVIKIHWQEKKSNTILGSQEGNTMKTNDTYMKFSWLTVPEKSLDKEHRCIVRHENNKNGVDQEIIFPPIKTDVITMDPKDNCSKDANDTLLLQLTNTSAYYMYLLLLLKSVVYFAIITCCLLMAMVKRKDSRGRAKRSGSGATNFSLLKQAGDVEENPGPTSMDWIWRILFLVGAATGAHSFEQVQLQESGPGLVKPSETLSLTCTVSGGSISSYGVHWIRQPPGKGLEWIGVIWTSGVTDYNSALMGRVTISVDTSKNQFSLKLSSVTAADTAVYYCARDGDYDRYTMDYWGQGTLVTVSSTRIQNPDPAVYQLRDSKSSDKSVCLFTDFDSQTNVSQSKDSDVYITDKCVLDMRSMDFKSNSAVAWSNKSDFACANAFNNSIIPEDTFFPSPESSDSTDHVKPKETENTKQPSKSCHKPKAIVHTEKVNMMSLTVLGLRMLFAKTVAVNFLLTAKLFFLLTA

SEQ ID NO: 14475 - protein, 727 aa, synthetic construct
MALPVTALLLPLALLLHAARPDIQMTQSPSSLSASVGDRVTITCRASQSIGTSLHWYQQKPGKAPKLLIKFASRLQSGVPSRFSGSGSGTDFTLTISSLQPEDFATYYCQQSPGFPPTFGQGTKLEIKRLEDLKNVFPPEVAVFEPSEAEISHTQKATLVCLATGFYPDHVELSWWVNGKEVHSGVCTDPQPLKEQPALNDSRYCLSSRLRVSATFWQNPRNHFRCQVQFYGLSENDEWTQDRAKPVTQIVSAEAWGRADDVIKIHWQEKKSNTILGSQEGNTMKTNDTYMKFSWLTVPEKSLDKEHRCIVRHENNKNGVDQEIIFPPIKTDVITMDPKDNCSKDANDTLLLQLTNTSAYYMYLLLLLKSVVYFAIITCCLLMAMVKRKDSRGRAKRSGSGATNFSLLKQAGDVEENPGPTSMDWIWRILFLVGAATGAHSFEQVQLVESGGGLVKPGGSLRLSCAASGFSITTSGYYWTWIRQFPGKGLEWMGYIGYNSKTYYNPALKSRITISRDNAKNSLYLQMNSLRAEDTAVYYCARSLYGGYKDAFDSWGQGTLVTVSSTRIQNPDPAVYQLRDSKSSDKSVCLFTDFDSQTNVSQSKDSDVYITDKCVLDMRSMDFKSNSAVAWSNKSDFACANAFNNSIIPEDTFFPSPESSDSTDHVKPKETENTKQPSKSCHKPKAIVHTEKVNMMSLTVLGLRMLFAKTVAVNFLLTAKLFFLLTA

SEQ ID NO: 14476 - protein, 732 aa, synthetic construct
MALPVTALLLPLALLLHAARPDEIVLTQSPLSLPVTPGEPASISCRSSQSLLHSIGYNYLDWYLQKPGQSPQLLIYLGSNRASGVPDRFSGSGSGTDFTLKISRVEAEDVGVYYCMQALQTPLTFGGGTKVEIKRLEDLKNVFPPEVAVFEPSEAEISHTQKATLVCLATGFYPDHVELSWWVNGKEVHSGVCTDPQPLKEQPALNDSRYCLSSRLRVSATFWQNPRNHFRCQVQFYGLSENDEWTQDRAKPVTQIVSAEAWGRADDVIKIHWQEKKSNTILGSQEGNTMKTNDTYMKFSWLTVPEKSLDKEHRCIVRHENNKNGVDQEIIFPPIKTDVITMDPKDNCSKDANDTLLLQLTNTSAYYMYLLLLLKSVVYFAIITCCLLMAMVKRKDSRGRAKRSGSGATNFSLLKQAGDVEENPGPTSMDWIWRILFLVGAATGAHSFEEVQLVESGGGVVQPGRSLRLSCAASGFTFRSYGMHWVRQAPGKGLEWVAVISYDGSNKYYTDSVNGRFTISRDNSKNTLYLQMNSLRAEDTAVYYCARGGGYYETSGPDYWGQGTLVTVSSTRIQNPDPAVYQLRDSKSSDKSVCLFTDFDSQTNVSQSKDSDVYITDKCVLDMRSMDFKSNSAVAWSNKSDFACANAFNNSIIPEDTFFPSPESSDSTDHVKPKETENTKQPSKSCHKPKAIVHTEKVNMMSLTVLGLRMLFAKTVAVNFLLTAKLFFLLTA

SEQ ID NO: 14477 - protein, 730 aa, synthetic construct
MALPVTALLLPLALLLHAARPDDVVMTQSPLSLPVTPGEPASISCRSSQSLLHSIGYNYLHWFLQKPGQSPQLLIYLGSNRASGVPDRFSGSGSGTDFTLKISRVEAEDVGVYYCMQALQTPPTFGQGTRLEIKRLEDLKNVFPPEVAVFEPSEAEISHTQKATLVCLATGFYPDHVELSWWVNGKEVHSGVCTDPQPLKEQPALNDSRYCLSSRLRVSATFWQNPRNHFRCQVQFYGLSENDEWTQDRAKPVTQIVSAEAWGRADDVIKIHWQEKKSNTILGSQEGNTMKTNDTYMKFSWLTVPEKSLDKEHRCIVRHENNKNGVDQEIIFPPIKTDVITMDPKDNCSKDANDTLLLQLTNTSAYYMYLLLLLKSVVYFAIITCCLLMAMVKRKDSRGRAKRSGSGATNFSLLKQAGDVEENPGPTSMDWIWRILFLVGAATGAHSFEQLQLQESGPGLVKPSGTLSLTCAVSGGSISSSNWWSWVRQPPGKGLEWIGEIYHSGSTNYNPSLKSRVTISVDKSKNQFSLKLSSVTAADTAVYYCVGSPYGDYVLDYWGQGTLVTVSSTRIQNPDPAVYQLRDSKSSDKSVCLFTDFDSQTNVSQSKDSDVYITDKCVLDMRSMDFKSNSAVAWSNKSDFACANAFNNSIIPEDTFFPSPESSDSTDHVKPKETENTKQPSKSCHKPKAIVHTEKVNMMSLTVLGLRMLFAKTVAVNFLLTAKLFFLLTA

SEQ ID NO: 14478 - protein, 728 aa, synthetic construct
MALPVTALLLPLALLLHAARPDEIVLTQSPGTLSLSLGERATLSCRASQSISSSFLAWYQQKPGQAPKLLIYAASTRATGIPDRFSGSGSGTDFTLTISRLEPEDFAVYYCQQYGRSLSFGGGTKVEVKLEDLKNVFPPEVAVFEPSEAEISHTQKATLVCLATGFYPDHVELSWWVNGKEVHSGVCTDPQPLKEQPALNDSRYCLSSRLRVSATFWQNPRNHFRCQVQFYGLSENDEWTQDRAKPVTQIVSAEAWGRADDVIKIHWQEKKSNTILGSQEGNTMKTNDTYMKFSWLTVPEKSLDKEHRCIVRHENNKNGVDQEIIFPPIKTDVITMDPKDNCSKDANDTLLLQLTNTSAYYMYLLLLLKSVVYFAIITCCLLMAMVKRKDSRGRAKRSGSGATNFSLLKQAGDVEENPGPTSMDWIWRILFLVGAATGAHSFEQVQLQQSGPGLVKPSQTLSLTCAISGDSVSGNSATWNWIRQSPSRGLEWLGRTYYRSKWNHDYAESVKSRITINPDTSKNQFSLQLNSVTPEDTAVYYCARGDSSSWYAFDYWGQGTLVTVSSTRIQNPDPAVYQLRDSKSSDKSVCLFTDFDSQTNVSQSKDSDVYITDKCVLDMRSMDFKSNSAVAWSNKSDFACANAFNNSIIPEDTFFPSPESSDSTDHVKPKETENTKQPSKSCHKPKAIVHTEKVNMMSLTVLGLRMLFAKTVAVNFLLTAKLFFLLTA

SEQ ID NO: 14479 - protein, 727 aa, synthetic construct
MALPVTALLLPLALLLHAARPDQSVVTQPPSVSVAPGKTARITCGRNNIGSKSVHWYQQKPGQAPVLVVYDDSDRPSGIPERFSGSNSGNTATLTISRVEAGDEADYYCQVWDSSSDHVVFGGGTKLTVLGLEDLKNVFPPEVAVFEPSEAEISHTQKATLVCLATGFYPDHVELSWWVNGKEVHSGVCTDPQPLKEQPALNDSRYCLSSRLRVSATFWQNPRNHFRCQVQFYGLSENDEWTQDRAKPVTQIVSAEAWGRADDVIKIHWQEKKSNTILGSQEGNTMKTNDTYMKFSWLTVPEKSLDKEHRCIVRHENNKNGVDQEIIFPPIKTDVITMDPKDNCSKDANDTLLLQLTNTSAYYMYLLLLLKSVVYFAIITCCLLMAMVKRKDSRGRAKRSGSGATNFSLLKQAGDVEENPGPTSMDWIWRILFLVGAATGAHSFEVQLVQSGGGVMRPGGSLRLSCAASGFTFDDYGMSWVRQAPGKGLEWVSGINWNGGSTGYADSVRGRFTISRDNAKNSLYLQMNSLRAEDTALYYCARERGYGYHDPHDYWGQGTLVTVSSTRIQNPDPAVYQLRDSKSSDKSVCLFTDFDSQTNVSQSKDSDVYITDKCVLDMRSMDFKSNSAVAWSNKSDFACANAFNNSIIPEDTFFPSPESSDSTDHVKPKETENTKQPSKSCHKPKAIVHTEKVNMMSLTVLGLRMLFAKTVAVNFLLTAKLFFLLTA

SEQ ID NO: 14480 - protein, 740 aa, synthetic construct
MALPVTALLLPLALLLHAARPEQKLISEEDLEFQAVVTQPPSASGTPGQRVTISCSGSSSNIGSNTVNWYQQVPGTAPKLLIYSNNQRPSGVPDRFSGSKSGTSASLAISGLQSEDEADYYCAAWDDSLNGWVFGGGTKLTVLLEDLKNVFPPEVAVFEPSEAEISHTQKATLVCLATGFYPDHVELSWWVNGKEVHSGVCTDPQPLKEQPALNDSRYCLSSRLRVSATFWQNPRNHFRCQVQFYGLSENDEWTQDRAKPVTQIVSAEAWGRADDVIKIHWQEKKSNTILGSQEGNTMKTNDTYMKFSWLTVPEKSLDKEHRCIVRHENNKNGVDQEIIFPPIKTDVITMDPKDNCSKDANDTLLLQLTNTSAYYMYLLLLLKSVVYFAIITCCLLMAMVKRKDSRGRAKRSGSGATNFSLLKQAGDVEENPGPTSMDWIWRILFLVGAATGAHSFEQMQLVQSGAEVKEPGESLRISCKGSGYSFTNFWISWVRQMPGKGLEWMGRVDPGYSYSTYSPSFQGHVTISADKSTSTAYLQWNSLKASDTAMYYCARVQYSGYYDWFDPWGQGTLVTVSSTRIQNPDPAVYQLRDSKSSDKSVCLFTDFDSQTNVSQSKDSDVYITDKCVLDMRSMDFKSNSAVAWSNKSDFACANAFNNSIIPEDTFFPSPESSDSTDHVKPKETENTKQPSKSCHKPKAIVHTEKVNMMSLTVLGLRMLFAKTVAVNFLLTAKLFFLLTA

SEQ ID NO: 14481 - protein, 734 aa, synthetic construct
MALPVTALLLPLALLLHAARPEQKLISEEDLEFDIQMTQSPSTLSASVGDRVTITCRASQNINKWLAWYQQRPGKAPQLLIYKASSLESGVPSRFSGSGSGTEYTLTISSLQPDDFATYYCQQYNSYATFGQGTKVEIKRLEDLKNVFPPEVAVFEPSEAEISHTQKATLVCLATGFYPDHVELSWWVNGKEVHSGVCTDPQPLKEQPALNDSRYCLSSRLRVSATFWQNPRNHFRCQVQFYGLSENDEWTQDRAKPVTQIVSAEAWGRADDVIKIHWQEKKSNTILGSQEGNTMKTNDTYMKFSWLTVPEKSLDKEHRCIVRHENNKNGVDQEIIFPPIKTDVITMDPKDNCSKDANDTLLLQLTNTSAYYMYLLLLLKSVVYFAIITCCLLMAMVKRKDSRGRAKRSGSGATNFSLLKQAGDVEENPGPTSMDWIWRILFLVGAATGAHSFEQVQLVQSGAEVKKPGESLKISCKGSGYNFSNKWIGWVRQLPGRGLEWIAIIYPGYSDITYSPSFQGRVTISADTSINTAYLHWHSLKASDTAMYYCVRHTALAGFDYWGLGTLVTVSSTRIQNPDPAVYQLRDSKSSDKSVCLFTDFDSQTNVSQSKDSDVYITDKCVLDMRSMDFKSNSAVAWSNKSDFACANAFNNSIIPEDTFFPSPESSDSTDHVKPKETENTKQPSKSCHKPKAIVHTEKVNMMSLTVLGLRMLFAKTVAVNFLLTAKLFFLLTA

SEQ ID NO: 14482 - protein, 725 aa, synthetic construct
MALPVTALLLPLALLLHAARPIVLTQSPASLAVSLGQRATISCRASESVDNYGNTFMHWYQQKPGQPPKLLIYRASNLESGIPARFSGSGSRTDFTLTINPVEADDVATYYCQQSNEDPPTFGAGTKLELKLEDLKNVFPPEVAVFEPSEAEISHTQKATLVCLATGFYPDHVELSWWVNGKEVHSGVCTDPQPLKEQPALNDSRYCLSSRLRVSATFWQNPRNHFRCQVQFYGLSENDEWTQDRAKPVTQIVSAEAWGRADDVIKIHWQEKKSNTILGSQEGNTMKTNDTYMKFSWLTVPEKSLDKEHRCIVRHENNKNGVDQEIIFPPIKTDVITMDPKDNCSKDANDTLLLQLTNTSAYYMYLLLLLKSVVYFAIITCCLLMAMVKRKDSRGRAKRSGSGATNFSLLKQAGDVEENPGPTSMDWIWRILFLVGAATGAHSFEQIQLVQSGPELKKPGETVKISCKASGYIFTNYGMNWVKQAPGKSFKWMGWINTYTGESTYSADFKGRFAFSLETSASTAYLHINDLKNEDTATYFCARSGGYDPMDYWGQGTSVTVSSTRIQNPDPAVYQLRDSKSSDKSVCLFTDFDSQTNVSQSKDSDVYITDKCVLDMRSMDFKSNSAVAWSNKSDFACANAFNNSIIPEDTFFPSPESSDSTDHVKPKETENTKQPSKSCHKPKAIVHTEKVNMMSLTVLGLRMLFAKTVAVNFLLTAKLFFLLTA

SEQ ID NO: 14483 - protein, 724 aa, synthetic construct
MALPVTALLLPLALLLHAARPEIVLTQSPGTLSLSPGERATLSCRASQSVSNTYLAWYHQRPGQAPRLLIYGASSRATGIPDRFSGSGSGTDFALTISSLEPEDFAVYYCQQYSNSWTFGQGTKVEIKRLEDLKNVFPPEVAVFEPSEAEISHTQKATLVCLATGFYPDHVELSWWVNGKEVHSGVCTDPQPLKEQPALNDSRYCLSSRLRVSATFWQNPRNHFRCQVQFYGLSENDEWTQDRAKPVTQIVSAEAWGRADDVIKIHWQEKKSNTILGSQEGNTMKTNDTYMKFSWLTVPEKSLDKEHRCIVRHENNKNGVDQEIIFPPIKTDVITMDPKDNCSKDANDTLLLQLTNTSAYYMYLLLLLKSVVYFAIITCCLLMAMVKRKDSRGRAKRSGSGATNFSLLKQAGDVEENPGPTSMDWIWRILFLVGAATGAHSFEQVQLVESGGGVVQPGRSLRLSCAASGFTFSSYDMHWVRQAPGKGLEWVAVISYDGTNEYYADSVKGRFTISRDTSKNTLYLQMNSLRAEDTAVYYCARERYFDWSFDYWGQGTLVSVSSTRIQNPDPAVYQLRDSKSSDKSVCLFTDFDSQTNVSQSKDSDVYITDKCVLDMRSMDFKSNSAVAWSNKSDFACANAFNNSIIPEDTFFPSPESSDSTDHVKPKETENTKQPSKSCHKPKAIVHTEKVNMMSLTVLGLRMLFAKTVAVNFLLTAKLFFLLTA

SEQ ID NO: 14484 - protein, 723 aa, synthetic construct
MALPVTALLLPLALLLHAARPELTQDPAVSVALGQTVRITCQGDSLRSNYANWYQQKPGQAPVLVIYGQNNRPSGIPDRFSGSSSGNTASLTITGAQAADEADYYCDSRVSTGNHVVFGGGTKLTVLGQLEDLKNVFPPEVAVFEPSEAEISHTQKATLVCLATGFYPDHVELSWWVNGKEVHSGVCTDPQPLKEQPALNDSRYCLSSRLRVSATFWQNPRNHFRCQVQFYGLSENDEWTQDRAKPVTQIVSAEAWGRADDVIKIHWQEKKSNTILGSQEGNTMKTNDTYMKFSWLTVPEKSLDKEHRCIVRHENNKNGVDQEIIFPPIKTDVITMDPKDNCSKDANDTLLLQLTNTSAYYMYLLLLLKSVVYFAIITCCLLMAMVKRKDSRGRAKRSGSGATNFSLLKQAGDVEENPGPTSMDWIWRILFLVGAATGAHSFEEVQLVQSGAEVKKPGASVKVSCKASGYTFTSYAMHWVRQAPGQRLEWMGWINAGNGNTKYSQKFQGRVTITRDTSASTAYMELSSLRSEDTAVYYCARDISYGSFDYWGQGTLVTVSSTRIQNPDPAVYQLRDSKSSDKSVCLFTDFDSQTNVSQSKDSDVYITDKCVLDMRSMDFKSNSAVAWSNKSDFACANAFNNSIIPEDTFFPSPESSDSTDHVKPKETENTKQPSKSCHKPKAIVHTEKVNMMSLTVLGLRMLFAKTVAVNFLLTAKLFFLLTA

SEQ ID NO: 14485 - protein, 725 aa, synthetic construct
MALPVTALLLPLALLLHAARPDIVLTQTPATLSVTPGDSVSLSCRASQSISNNLHWYQQKSHESPRLLIKNASQSISGIPSKFSGSGSGTDFTLRINSVETEDFGMYFCQQSNSWPYTFGSGTKLEIKLEDLKNVFPPEVAVFEPSEAEISHTQKATLVCLATGFYPDHVELSWWVNGKEVHSGVCTDPQPLKEQPALNDSRYCLSSRLRVSATFWQNPRNHFRCQVQFYGLSENDEWTQDRAKPVTQIVSAEAWGRADDVIKIHWQEKKSNTILGSQEGNTMKTNDTYMKFSWLTVPEKSLDKEHRCIVRHENNKNGVDQEIIFPPIKTDVITMDPKDNCSKDANDTLLLQLTNTSAYYMYLLLLLKSVVYFAIITCCLLMAMVKRKDSRGRAKRSGSGATNFSLLKQAGDVEENPGPTSMDWIWRILFLVGAATGAHSFEQVKLQQSGPELVKPGASVKISCKASGYSFTGYYMHWVKQSHGNILDWIGYIYPYNGVSSYNQKFKGKATLTVDKSSSTAYMELRSLTSEDSAVYYCARERGLYQLRAMDYWGQGTSVTVSSTRIQNPDPAVYQLRDSKSSDKSVCLFTDFDSQTNVSQSKDSDVYITDKCVLDMRSMDFKSNSAVAWSNKSDFACANAFNNSIIPEDTFFPSPESSDSTDHVKPKETENTKQPSKSCHKPKAIVHTEKVNMMSLTVLGLRMLFAKTVAVNFLLTAKLFFLLTA

SEQ ID NO: 14486 - protein, 716 aa, synthetic construct
MALPVTALLLPLALLLHAARPDIVMTQTPAIMSASPGQKVTITCSASSSVNYMHWYQQKLGSSPKLWIYDTSKLAPGVPARFSGSGSGTSYSLTISSMEAEDAASYFCHQWSSYPYTFGSGTKLEIKLEDLKNVFPPEVAVFEPSEAEISHTQKATLVCLATGFYPDHVELSWWVNGKEVHSGVCTDPQPLKEQPALNDSRYCLSSRLRVSATFWQNPRNHFRCQVQFYGLSENDEWTQDRAKPVTQIVSAEAWGRADDVIKIHWQEKKSNTILGSQEGNTMKTNDTYMKFSWLTVPEKSLDKEHRCIVRHENNKNGVDQEIIFPPIKTDVITMDPKDNCSKDANDTLLLQLTNTSAYYMYLLLLLKSVVYFAIITCCLLMAMVKRKDSRGRAKRSGSGATNFSLLKQAGDVEENPGPTSMDWIWRILFLVGAATGAHSFEEVQLQESGPDLVKPSQSLSLTCTVTGYSITSGYGWHWIRQFPGNKLEWMGYIHYSGSTTYNPSLKSRISISRDTSKNQFFLQLNSVTTEDTATYYCARSLRYWGQGTTLTVSSTRIQNPDPAVYQLRDSKSSDKSVCLFTDFDSQTNVSQSKDSDVYITDKCVLDMRSMDFKSNSAVAWSNKSDFACANAFNNSIIPEDTFFPSPESSDSTDHVKPKETENTKQPSKSCHKPKAIVHTEKVNMMSLTVLGLRMLFAKTVAVNFLLTAKLFFLLTA

SEQ ID NO: 14487 - protein, 719 aa, synthetic construct
MALPVTALLLPLALLLHAARPDIQMTQSPSSLSASVGDRVTITCSATSSISYMHWYQQKPGKAPKGWIYDTSKLAHGVPSRFSGSGSGTDFTLTISSLQPEDFATYYCHQRRSYPFTFGQGTKVEIKLEDLKNVFPPEVAVFEPSEAEISHTQKATLVCLATGFYPDHVELSWWVNGKEVHSGVCTDPQPLKEQPALNDSRYCLSSRLRVSATFWQNPRNHFRCQVQFYGLSENDEWTQDRAKPVTQIVSAEAWGRADDVIKIHWQEKKSNTILGSQEGNTMKTNDTYMKFSWLTVPEKSLDKEHRCIVRHENNKNGVDQEIIFPPIKTDVITMDPKDNCSKDANDTLLLQLTNTSAYYMYLLLLLKSVVYFAIITCCLLMAMVKRKDSRGRAKRSGSGATNFSLLKQAGDVEENPGPTSMDWIWRILFLVGAATGAHSFEEVQLVQSGAEVKKPGASVKVSCKASGYTFTNFWIHWVRQAPGQGLEWIGEIDPSDSYTNYNQKFKGRVTITRDTSTSTAYLELSSLRSEDTAVYYCAREITTVDYWGQGTLVTVSSTRIQNPDPAVYQLRDSKSSDKSVCLFTDFDSQTNVSQSKDSDVYITDKCVLDMRSMDFKSNSAVAWSNKSDFACANAFNNSIIPEDTFFPSPESSDSTDHVKPKETENTKQPSKSCHKPKAIVHTEKVNMMSLTVLGLRMLFAKTVAVNFLLTAKLFFLLTA

SEQ ID NO: 14488 - protein, 726 aa, synthetic construct
MALPVTALLLPLALLLHAARPDIQMTQSPSSLSASVGDRVTITCKASQGFNKYVAWYQQKPGKAPKLLIYYTSTLQPGVPSRFSGSGSGRDYTLTISSLQPEDFATYYCLQYGNLLYAFGQGTKVEIKRLEDLKNVFPPEVAVFEPSEAEISHTQKATLVCLATGFYPDHVELSWWVNGKEVHSGVCTDPQPLKEQPALNDSRYCLSSRLRVSATFWQNPRNHFRCQVQFYGLSENDEWTQDRAKPVTQIVSAEAWGRADDVIKIHWQEKKSNTILGSQEGNTMKTNDTYMKFSWLTVPEKSLDKEHRCIVRHENNKNGVDQEIIFPPIKTDVITMDPKDNCSKDANDTLLLQLTNTSAYYMYLLLLLKSVVYFAIITCCLLMAMVKRKDSRGRAKRSGSGATNFSLLKQAGDVEENPGPTSMDWIWRILFLVGAATGAHSFEEVQLVQSGAEVKKPGASVKVSCKASGYTFTSYWIGWVRQAPGQGLEWIGDIYPGGGYTNYNEKFKGRVTITRDTSTSTAYLELSSLRSEDTAVYYCARLDGSSYRGAMDSWGQGTLVTVSSTRIQNPDPAVYQLRDSKSSDKSVCLFTDFDSQTNVSQSKDSDVYITDKCVLDMRSMDFKSNSAVAWSNKSDFACANAFNNSIIPEDTFFPSPESSDSTDHVKPKETENTKQPSKSCHKPKAIVHTEKVNMMSLTVLGLRMLFAKTVAVNFLLTAKLFFLLTA

SEQ ID NO: 14489 - protein, 722 aa, synthetic construct
MALPVTALLLPLALLLHAARPDIQMTQSPSSLSASVGDRVTITCRASQDIRYYLNWYQQKPGKAPKLLIYVASSLQSGVPSRFSGSGSGTEFTLTVSSLQPEDFATYYCLQVYSTPRTFGQGTKVEIKLEDLKNVFPPEVAVFEPSEAEISHTQKATLVCLATGFYPDHVELSWWVNGKEVHSGVCTDPQPLKEQPALNDSRYCLSSRLRVSATFWQNPRNHFRCQVQFYGLSENDEWTQDRAKPVTQIVSAEAWGRADDVIKIHWQEKKSNTILGSQEGNTMKTNDTYMKFSWLTVPEKSLDKEHRCIVRHENNKNGVDQEIIFPPIKTDVITMDPKDNCSKDANDTLLLQLTNTSAYYMYLLLLLKSVVYFAIITCCLLMAMVKRKDSRGRAKRSGSGATNFSLLKQAGDVEENPGPTSMDWIWRILFLVGAATGAHSFEEVQLVESGGGLAKPGGSLRLSCAASGFRFTFNNYYMDWVRQAPGQGLEWVSRISSSGDPTWYADSVKGRFTISRENAKNTLFLQMNSLRAEDTAVYYCASLTTGSDSWGQGVLVTVSSTRIQNPDPAVYQLRDSKSSDKSVCLFTDFDSQTNVSQSKDSDVYITDKCVLDMRSMDFKSNSAVAWSNKSDFACANAFNNSIIPEDTFFPSPESSDSTDHVKPKETENTKQPSKSCHKPKAIVHTEKVNMMSLTVLGLRMLFAKTVAVNFLLTAKLFFLLTA

SEQ ID NO: 14490 - protein, 723 aa, synthetic construct
MALPVTALLLPLALLLHAARPEIVMTQSPATLSVSPGERATLSCRASQSVSRNLAWYQQKPGQAPRLLIYGASTRATGIPARFSGSGSGTEFTLTIGSLQSEDFAVYYCQQYKTWPRTFGQGTNVEIKLEDLKNVFPPEVAVFEPSEAEISHTQKATLVCLATGFYPDHVELSWWVNGKEVHSGVCTDPQPLKEQPALNDSRYCLSSRLRVSATFWQNPRNHFRCQVQFYGLSENDEWTQDRAKPVTQIVSAEAWGRADDVIKIHWQEKKSNTILGSQEGNTMKTNDTYMKFSWLTVPEKSLDKEHRCIVRHENNKNGVDQEIIFPPIKTDVITMDPKDNCSKDANDTLLLQLTNTSAYYMYLLLLLKSVVYFAIITCCLLMAMVKRKDSRGRAKRSGSGATNFSLLKQAGDVEENPGPTSMDWIWRILFLVGAATGAHSFEQVQLQQWGAGLLKPSETLSLTCAVFGGSFSGYYWSWIRQPPGKGLEWIGEINHRGNTNDNPSLKSRVTISVDTSKNQFALKLSSVTAADTAVYYCARERGYTYGNFDHWGQGTLVTVSSTRIQNPDPAVYQLRDSKSSDKSVCLFTDFDSQTNVSQSKDSDVYITDKCVLDMRSMDFKSNSAVAWSNKSDFACANAFNNSIIPEDTFFPSPESSDSTDHVKPKETENTKQPSKSCHKPKAIVHTEKVNMMSLTVLGLRMLFAKTVAVNFLLTAKLFFLLTA

SEQ ID NO: 14491 - protein, 724 aa, synthetic construct
MALPVTALLLPLALLLHAARPEIVMTPSSATLSVSPGERATLSCRASQSVSRNLAWYQQKPGQAPRLLIYGASTRATGIPARFSGSGSGTEFTLTISSLQSEDFAVYYCHQYSNWMCSFGQGTKLEIKLEDLKNVFPPEVAVFEPSEAEISHTQKATLVCLATGFYPDHVELSWWVNGKEVHSGVCTDPQPLKEQPALNDSRYCLSSRLRVSATFWQNPRNHFRCQVQFYGLSENDEWTQDRAKPVTQIVSAEAWGRADDVIKIHWQEKKSNTILGSQEGNTMKTNDTYMKFSWLTVPEKSLDKEHRCIVRHENNKNGVDQEIIFPPIKTDVITMDPKDNCSKDANDTLLLQLTNTSAYYMYLLLLLKSVVYFAIITCCLLMAMVKRKDSRGRAKRSGSGATNFSLLKQAGDVEENPGPTSMDWIWRILFLVGAATGAHSFEEVQLLESGGGLVQPGGSLRLSCAASGFTFSRYAMNWVRQAPGKGLEWVSGISGSGGRTYYADSVKGRFTISRDNSKNTLYLQMNSLRAEDTAVYYCAKDRDFWSGPFDYWGQGTLVTVSSTRIQNPDPAVYQLRDSKSSDKSVCLFTDFDSQTNVSQSKDSDVYITDKCVLDMRSMDFKSNSAVAWSNKSDFACANAFNNSIIPEDTFFPSPESSDSTDHVKPKETENTKQPSKSCHKPKAIVHTEKVNMMSLTVLGLRMLFAKTVAVNFLLTAKLFFLLTA

SEQ ID NO: 14492 - protein, 729 aa, synthetic construct
MALPVTALLLPLALLLHAARPDIQMTQSPSSLSASVGDRVTITCKASKNIRSYLAWYQQKPGKAPKLLIYSGSTLHSGVPSRFSGSGSGTDFTLTISSLQPEDFATYYCQQHHEYPLTFGQGTKVEIKRLEDLKNVFPPEVAVFEPSEAEISHTQKATLVCLATGFYPDHVELSWWVNGKEVHSGVCTDPQPLKEQPALNDSRYCLSSRLRVSATFWQNPRNHFRCQVQFYGLSENDEWTQDRAKPVTQIVSAEAWGRADDVIKIHWQEKKSNTILGSQEGNTMKTNDTYMKFSWLTVPEKSLDKEHRCIVRHENNKNGVDQEIIFPPIKTDVITMDPKDNCSKDANDTLLLQLTNTSAYYMYLLLLLKSVVYFAIITCCLLMAMVKRKDSRGRAKRSGSGATNFSLLKQAGDVEENPGPTSMDWIWRILFLVGAATGAHSFEQVQLQESGPGLVKPSETLSLTCTVSGYTITSGYDWSWIRQPPGKGLEWIGYINYGGSTNYKPSLGSRVTISVDTSKNQFSLKLSSVTAADTAVYYCARYNEYKSYIYDWYFDFWGQGTLVTVSSTRIQNPDPAVYQLRDSKSSDKSVCLFTDFDSQTNVSQSKDSDVYITDKCVLDMRSMDFKSNSAVAWSNKSDFACANAFNNSIIPEDTFFPSPESSDSTDHVKPKETENTKQPSKSCHKPKAIVHTEKVNMMSLTVLGLRMLFAKTVAVNFLLTAKLFFLLTA

SEQ ID NO: 14493 - protein, 731 aa, synthetic construct
MALPVTALLLPLALLLHAARPQSVVTQPPSVSAAPGQKVTISCSGSSSNIGNNYVSWYQQLPGTAPKLLIYDNNKRPSGIPDRFSGSKSGTSATLGITGLQTGDEADYYCGTWDGSLYTMLFGGGTKLTVLLEDLKNVFPPEVAVFEPSEAEISHTQKATLVCLATGFYPDHVELSWWVNGKEVHSGVCTDPQPLKEQPALNDSRYCLSSRLRVSATFWQNPRNHFRCQVQFYGLSENDEWTQDRAKPVTQIVSAEAWGRADDVIKIHWQEKKSNTILGSQEGNTMKTNDTYMKFSWLTVPEKSLDKEHRCIVRHENNKNGVDQEIIFPPIKTDVITMDPKDNCSKDANDTLLLQLTNTSAYYMYLLLLLKSVVYFAIITCCLLMAMVKRKDSRGRAKRSGSGATNFSLLKQAGDVEENPGPTSMDWIWRILFLVGAATGAHSFEEVQLVESGGGLVKPGGSLRLSCAASGFTFSNAWMSWVRQAPGKGLEWVGFIRSKAYGGTTEYAASVKGRFTISRDDSKSIAYLQMNNLKTEDTAVYYCARDGLYSSSWYDSDYWGQGTLVTVSSTRIQNPDPAVYQLRDSKSSDKSVCLFTDFDSQTNVSQSKDSDVYITDKCVLDMRSMDFKSNSAVAWSNKSDFACANAFNNSIIPEDTFFPSPESSDSTDHVKPKETENTKQPSKSCHKPKAIVHTEKVNMMSLTVLGLRMLFAKTVAVNFLLTAKLFFLLTA

SEQ ID NO: 14494 - protein, 736 aa, synthetic construct
MALPVTALLLPLALLLHAARPQSVLTQPPSVSGAPGQRVTISCTGSSSNIGAGYDVHWYQQLPGTAPKLLIFGNSNRPSGVPDRFSGFKSGTSASLAITGLQAEDEADYFCQSYDSSLSGSGVFGTGTKVTVLGLEDLKNVFPPEVAVFEPSEAEISHTQKATLVCLATGFYPDHVELSWWVNGKEVHSGVCTDPQPLKEQPALNDSRYCLSSRLRVSATFWQNPRNHFRCQVQFYGLSENDEWTQDRAKPVTQIVSAEAWGRADDVIKIHWQEKKSNTILGSQEGNTMKTNDTYMKFSWLTVPEKSLDKEHRCIVRHENNKNGVDQEIIFPPIKTDVITMDPKDNCSKDANDTLLLQLTNTSAYYMYLLLLLKSVVYFAIITCCLLMAMVKRKDSRGRAKRSGSGATNFSLLKQAGDVEENPGPTSMDWIWRILFLVGAATGAHSFEQMQLVQSGGGLVQPGRSLRLSCAASGFTFDDYAMHWVRQAPGKGLEWVSGISWNSGSIGYADSVKGRFTISRDNAKNSLYLQMNSLRAEDTALYYCAKDIHSGSYYGLLYYAMDVWGQGTTVTVSSTRIQNPDPAVYQLRDSKSSDKSVCLFTDFDSQTNVSQSKDSDVYITDKCVLDMRSMDFKSNSAVAWSNKSDFACANAFNNSIIPEDTFFPSPESSDSTDHVKPKETENTKQPSKSCHKPKAIVHTEKVNMMSLTVLGLRMLFAKTVAVNFLLTAKLFFLLTA

SEQ ID NO: 14495 - protein, 736 aa, synthetic construct
MALPVTALLLPLALLLHAARPLPVLTQPPSASGTPGQRVTISCSGRSSNIGSNSVNWYRQLPGAAPKLLIYSNNQRPPGVPVRFSGSKSGTSASLAISGLQSEDEATYYCATWDDNLNVHYVFGTGTKVTVLGSRLEDLKNVFPPEVAVFEPSEAEISHTQKATLVCLATGFYPDHVELSWWVNGKEVHSGVCTDPQPLKEQPALNDSRYCLSSRLRVSATFWQNPRNHFRCQVQFYGLSENDEWTQDRAKPVTQIVSAEAWGRADDVIKIHWQEKKSNTILGSQEGNTMKTNDTYMKFSWLTVPEKSLDKEHRCIVRHENNKNGVDQEIIFPPIKTDVITMDPKDNCSKDANDTLLLQLTNTSAYYMYLLLLLKSVVYFAIITCCLLMAMVKRKDSRGRAKRSGSGATNFSLLKQAGDVEENPGPTSMDWIWRILFLVGAATGAHSFELEMAQVQLVQSGAEVKKPGSSVKVSCKASGGTFSSYAISWVRQAPGQGLEWMGRIIPILGIANYAQKFQGRVTITADKSTSTAYMELSSLRSEDTAVYYCARGGYYSHDMWSEDWGQGTLVTVSSTRIQNPDPAVYQLRDSKSSDKSVCLFTDFDSQTNVSQSKDSDVYITDKCVLDMRSMDFKSNSAVAWSNKSDFACANAFNNSIIPEDTFFPSPESSDSTDHVKPKETENTKQPSKSCHKPKAIVHTEKVNMMSLTVLGLRMLFAKTVAVNFLLTAKLFFLLTA

SEQ ID NO: 14496 - protein, 730 aa, synthetic construct
MALPVTALLLPLALLLHAARPDFVMTQSPDSLAVSLGERVTMSCKSSQSLLNSGNQKNYLTWYQQKPGQPPKLLIYWASTRESGVPDRFSGSGSGTDFTLTISSLQAEDVAVYYCQNDYSYPYTFGQGTKLEIKLEDLKNVFPPEVAVFEPSEAEISHTQKATLVCLATGFYPDHVELSWWVNGKEVHSGVCTDPQPLKEQPALNDSRYCLSSRLRVSATFWQNPRNHFRCQVQFYGLSENDEWTQDRAKPVTQIVSAEAWGRADDVIKIHWQEKKSNTILGSQEGNTMKTNDTYMKFSWLTVPEKSLDKEHRCIVRHENNKNGVDQEIIFPPIKTDVITMDPKDNCSKDANDTLLLQLTNTSAYYMYLLLLLKSVVYFAIITCCLLMAMVKRKDSRGRAKRSGSGATNFSLLKQAGDVEENPGPTSMDWIWRILFLVGAATGAHSFEEVQLVQSGAELKKPGASVKVSCKASGYTFTDYYMKWVRQAPGQGLEWIGDIIPSNGATFYNQKFKGRVTITVDKSTSTAYMELSSLRSEDTAVYYCARSHLLRASWFAYWGQGTLVTVSSTRIQNPDPAVYQLRDSKSSDKSVCLFTDFDSQTNVSQSKDSDVYITDKCVLDMRSMDFKSNSAVAWSNKSDFACANAFNNSIIPEDTFFPSPESSDSTDHVKPKETENTKQPSKSCHKPKAIVHTEKVNMMSLTVLGLRMLFAKTVAVNFLLTAKLFFLLTA

SEQ ID NO: 14497 - protein, 730 aa, synthetic construct
MALPVTALLLPLALLLHAARPDFVMTQSPDSLAVSLGERVTMSCKSSQSLLNSGNQKNYLTWYQQKPGQPPKLLIYWASTRESGVPDRFSGSGSGTDFTLTISSLQAEDVAVYYCQNDYSYPYTFGQGTKLEIKLEDLKNVFPPEVAVFEPSEAEISHTQKATLVCLATGFYPDHVELSWWVNGKEVHSGVCTDPQPLKEQPALNDSRYCLSSRLRVSATFWQNPRNHFRCQVQFYGLSENDEWTQDRAKPVTQIVSAEAWGRADDVIKIHWQEKKSNTILGSQEGNTMKTNDTYMKFSWLTVPEKSLDKEHRCIVRHENNKNGVDQEIIFPPIKTDVITMDPKDNCSKDANDTLLLQLTNTSAYYMYLLLLLKSVVYFAIITCCLLMAMVKRKDSRGRAKRSGSGATNFSLLKQAGDVEENPGPTSMDWIWRILFLVGAATGAHSFEQVQLVQSGAELKKPGASVKVSCKASGYTFTDYYMKWVRQAPGQGLEWIGDIIPSNGATFYNQKFKGRVTITVDKSTSTAYMELSSLRSEDTAVYYCARSHLLRASWFAYWGQGTLVTVSSTRIQNPDPAVYQLRDSKSSDKSVCLFTDFDSQTNVSQSKDSDVYITDKCVLDMRSMDFKSNSAVAWSNKSDFACANAFNNSIIPEDTFFPSPESSDSTDHVKPKETENTKQPSKSCHKPKAIVHTEKVNMMSLTVLGLRMLFAKTVAVNFLLTAKLFFLLTA

SEQ ID NO: 14498 - protein, 720 aa, synthetic construct
MALPVTALLLPLALLLHAARPDVQITQSPSYLAASPGETITINCRASKSISKDLAWYQEKPGKTNKLLIYSGSTLQSGIPSRFSGSGSGTDFTLTISSLEPEDFAMYYCQQHNKYPYTFGGGTKLEIKRLEDLKNVFPPEVAVFEPSEAEISHTQKATLVCLATGFYPDHVELSWWVNGKEVHSGVCTDPQPLKEQPALNDSRYCLSSRLRVSATFWQNPRNHFRCQVQFYGLSENDEWTQDRAKPVTQIVSAEAWGRADDVIKIHWQEKKSNTILGSQEGNTMKTNDTYMKFSWLTVPEKSLDKEHRCIVRHENNKNGVDQEIIFPPIKTDVITMDPKDNCSKDANDTLLLQLTNTSAYYMYLLLLLKSVVYFAIITCCLLMAMVKRKDSRGRAKRSGSGATNFSLLKQAGDVEENPGPTSMDWIWRILFLVGAATGAHSFEQVQLQQPGAELVRPGASVKLSCKASGYTFTSYWMNWVKQRPDQGLEWIGRIDPYDSETHYNQKFKDKAILTVDKSSSTAYMQLSSLTSEDSAVYYCARGNWDDYWGQGTTLTVSSTRIQNPDPAVYQLRDSKSSDKSVCLFTDFDSQTNVSQSKDSDVYITDKCVLDMRSMDFKSNSAVAWSNKSDFACANAFNNSIIPEDTFFPSPESSDSTDHVKPKETENTKQPSKSCHKPKAIVHTEKVNMMSLTVLGLRMLFAKTVAVNFLLTAKLFFLLTA

SEQ ID NO: 14499 - protein, 722 aa, synthetic construct
MALPVTALLLPLALLLHAARPEIVLTQSPTSMTASPGEQVTITCRASSSINYMHWYQQKPGASPRPWIYETSKLASGVPDRFSGSASGTSYSLTINNMEAEDAATYYCQQWNYPSWTFGGGTKLELKLEDLKNVFPPEVAVFEPSEAEISHTQKATLVCLATGFYPDHVELSWWVNGKEVHSGVCTDPQPLKEQPALNDSRYCLSSRLRVSATFWQNPRNHFRCQVQFYGLSENDEWTQDRAKPVTQIVSAEAWGRADDVIKIHWQEKKSNTILGSQEGNTMKTNDTYMKFSWLTVPEKSLDKEHRCIVRHENNKNGVDQEIIFPPIKTDVITMDPKDNCSKDANDTLLLQLTNTSAYYMYLLLLLKSVVYFAIITCCLLMAMVKRKDSRGRAKRSGSGATNFSLLKQAGDVEENPGPTSMDWIWRILFLVGAATGAHSFEEVQLVESGGGLVQPGRSLKLSCAASGFTFSDYNMAWVRQAPKKGLEWVATILYDGGRTYYRGSVKGRFTISRDNAKSTLYLRMDSLRSEDTATYYCATHSRGTDYFDYWGQGVMVTVSSTRIQNPDPAVYQLRDSKSSDKSVCLFTDFDSQTNVSQSKDSDVYITDKCVLDMRSMDFKSNSAVAWSNKSDFACANAFNNSIIPEDTFFPSPESSDSTDHVKPKETENTKQPSKSCHKPKAIVHTEKVNMMSLTVLGLRMLFAKTVAVNFLLTAKLFFLLTA

SEQ ID NO: 14500 - protein, 731 aa, synthetic construct
MALPVTALLLPLALLLHAARPDIVMTQSPSSLAVSEGETVTINCKSSQSFLSSGDGKNYVAWYQYKPGQSPKLLIYWASTRQSGVPDRFIGSGSGTDFTLTISTVQAEDLAIYYCQQYYDTPLTFGSGTKLEIKLEDLKNVFPPEVAVFEPSEAEISHTQKATLVCLATGFYPDHVELSWWVNGKEVHSGVCTDPQPLKEQPALNDSRYCLSSRLRVSATFWQNPRNHFRCQVQFYGLSENDEWTQDRAKPVTQIVSAEAWGRADDVIKIHWQEKKSNTILGSQEGNTMKTNDTYMKFSWLTVPEKSLDKEHRCIVRHENNKNGVDQEIIFPPIKTDVITMDPKDNCSKDANDTLLLQLTNTSAYYMYLLLLLKSVVYFAIITCCLLMAMVKRKDSRGRAKRSGSGATNFSLLKQAGDVEENPGPTSMDWIWRILFLVGAATGAHSFEEVKLQESGPSLVQSSQTLSLTCTVSGFSLTSYHIHWVRQTPGKGLEWMGVMWSDGDTSYNSALKSRLSISRDTSQSQVFLKMNSLQTEDTATYYCARGYYSSYLYLWFAYWGQGTLVTVSSTRIQNPDPAVYQLRDSKSSDKSVCLFTDFDSQTNVSQSKDSDVYITDKCVLDMRSMDFKSNSAVAWSNKSDFACANAFNNSIIPEDTFFPSPESSDSTDHVKPKETENTKQPSKSCHKPKAIVHTEKVNMMSLTVLGLRMLFAKTVAVNFLLTAKLFFLLTA

SEQ ID NO: 14501 - protein, 735 aa, synthetic construct
MALPVTALLLPLALLLHAARPDVLMTQTPVSLPVSLGGQVSISCRSSQSLVHSDGDTYLHWYLQKPGQSPQLLIYRVSNRFSGVPDRFSGSGSGTDFTLKISRVEPEDLGLYYCLQTTHFPPWTFGGGTKLEMKLEDLKNVFPPEVAVFEPSEAEISHTQKATLVCLATGFYPDHVELSWWVNGKEVHSGVCTDPQPLKEQPALNDSRYCLSSRLRVSATFWQNPRNHFRCQVQFYGLSENDEWTQDRAKPVTQIVSAEAWGRADDVIKIHWQEKKSNTILGSQEGNTMKTNDTYMKFSWLTVPEKSLDKEHRCIVRHENNKNGVDQEIIFPPIKTDVITMDPKDNCSKDANDTLLLQLTNTSAYYMYLLLLLKSVVYFAIITCCLLMAMVKRKDSRGRAKRSGSGATNFSLLKQAGDVEENPGPTSMDWIWRILFLVGAATGAHSFEQVQLQQSGPELRRPGSSVRLSCKASGYRIKDFLIHWIKNRPEHGLEWIGWIDPEDGETKYAQKFQTKATLTADTSSNTAYMQLSSLTSEDTATYFCARWGDVYYGLMRGHVMDAWGQGTSVTVSSTRIQNPDPAVYQLRDSKSSDKSVCLFTDFDSQTNVSQSKDSDVYITDKCVLDMRSMDFKSNSAVAWSNKSDFACANAFNNSIIPEDTFFPSPESSDSTDHVKPKETENTKQPSKSCHKPKAIVHTEKVNMMSLTVLGLRMLFAKTVAVNFLLTAKLFFLLTA

SEQ ID NO: 14502 - protein, 730 aa, synthetic construct
MALPVTALLLPLALLLHAARPDIVMTQSPATLSLSPGERATLSCRSSKSLQNVNGNTYLYWFQQKPGQSPQLLIYRMSNLNSGVPDRFSGSGSGTEFTLTISSLEPEDFAVYYCMQHLEYPITFGAGTKLEIKLEDLKNVFPPEVAVFEPSEAEISHTQKATLVCLATGFYPDHVELSWWVNGKEVHSGVCTDPQPLKEQPALNDSRYCLSSRLRVSATFWQNPRNHFRCQVQFYGLSENDEWTQDRAKPVTQIVSAEAWGRADDVIKIHWQEKKSNTILGSQEGNTMKTNDTYMKFSWLTVPEKSLDKEHRCIVRHENNKNGVDQEIIFPPIKTDVITMDPKDNCSKDANDTLLLQLTNTSAYYMYLLLLLKSVVYFAIITCCLLMAMVKRKDSRGRAKRSGSGATNFSLLKQAGDVEENPGPTSMDWIWRILFLVGAATGAHSFEEVQLVESGGGLVKPGGSLKLSCAASGYTFTSYVMHWVRQAPGKGLEWIGYINPYNDGTKYNEKFQGRVTISSDKSISTAYMELSSLRSEDTAMYYCARGTYYYGTRVFDYWGQGTLVTVSSTRIQNPDPAVYQLRDSKSSDKSVCLFTDFDSQTNVSQSKDSDVYITDKCVLDMRSMDFKSNSAVAWSNKSDFACANAFNNSIIPEDTFFPSPESSDSTDHVKPKETENTKQPSKSCHKPKAIVHTEKVNMMSLTVLGLRMLFAKTVAVNFLLTAKLFFLLTA

SEQ ID NO: 14503 - protein, 726 aa, synthetic construct
MALPVTALLLPLALLLHAARPDIQMTQSPSSLSASVGDRVTITCKASDHINNWLAWYQQKPGQAPKLLIYGATTLETGVPSRFSGSGSGTDYTLTISSLQPEDFATYYCQQSWNTPWTFGQGTKLEIKRLEDLKNVFPPEVAVFEPSEAEISHTQKATLVCLATGFYPDHVELSWWVNGKEVHSGVCTDPQPLKEQPALNDSRYCLSSRLRVSATFWQNPRNHFRCQVQFYGLSENDEWTQDRAKPVTQIVSAEAWGRADDVIKIHWQEKKSNTILGSQEGNTMKTNDTYMKFSWLTVPEKSLDKEHRCIVRHENNKNGVDQEIIFPPIKTDVITMDPKDNCSKDANDTLLLQLTNTSAYYMYLLLLLKSVVYFAIITCCLLMAMVKRKDSRGRAKRSGSGATNFSLLKQAGDVEENPGPTSMDWIWRILFLVGAATGAHSFEQVQLQQPGAELVKPGASVKMSCKASGYAFSSYWINWMKQKPGQGLEWIGQIYPGDGDTNYNGKFKGRATLTADTSSSTAYMQLSSLTSEDSAVYFCARSITTVVGCAMDYWGQGTSVTVSSTRIQNPDPAVYQLRDSKSSDKSVCLFTDFDSQTNVSQSKDSDVYITDKCVLDMRSMDFKSNSAVAWSNKSDFACANAFNNSIIPEDTFFPSPESSDSTDHVKPKETENTKQPSKSCHKPKAIVHTEKVNMMSLTVLGLRMLFAKTVAVNFLLTAKLFFLLTA

SEQ ID NO: 14504 - protein, 728 aa, synthetic construct
MALPVTALLLPLALLLHAARPQIVLSQSPAILSASPGEKVTMTCRASSSVSYMHWYQQKPGSSPKPWIYATSNLASGVPARFSGSGSGTSYSFTISRVEAEDAATYYCQQWTFNPPTFGGGTRLEIKRTVAALEDLKNVFPPEVAVFEPSEAEISHTQKATLVCLATGFYPDHVELSWWVNGKEVHSGVCTDPQPLKEQPALNDSRYCLSSRLRVSATFWQNPRNHFRCQVQFYGLSENDEWTQDRAKPVTQIVSAEAWGRADDVIKIHWQEKKSNTILGSQEGNTMKTNDTYMKFSWLTVPEKSLDKEHRCIVRHENNKNGVDQEIIFPPIKTDVITMDPKDNCSKDANDTLLLQLTNTSAYYMYLLLLLKSVVYFAIITCCLLMAMVKRKDSRGRAKRSGSGATNFSLLKQAGDVEENPGPTSMDWIWRILFLVGAATGAHSFEQAYLQQSGAELVRPGASVKMSCKASGYTFTSYNMHWVKQTPRQGLEWIGGIYPGNGDTSYNQKFKGKATLTVGKSSSTAYMQLSSLTSEDSAVYFCARYDYNYAMDYWGQGTSVTVSSASTRIQNPDPAVYQLRDSKSSDKSVCLFTDFDSQTNVSQSKDSDVYITDKCVLDMRSMDFKSNSAVAWSNKSDFACANAFNNSIIPEDTFFPSPESSDSTDHVKPKETENTKQPSKSCHKPKAIVHTEKVNMMSLTVLGLRMLFAKTVAVNFLLTAKLFFLLTA

SEQ ID NO: 14505 - protein, 726 aa, synthetic construct
MALPVTALLLPLALLLHAARPEIVLTQSPATLSLSPGERATLSCRASQSVSSYLAWYQQKPGQAPRLLIYDASNRATGIPARFSGSGSGTDFTLTISSLEPEDFAVYYCQQRSNWPITFGQGTRLEIKLEDLKNVFPPEVAVFEPSEAEISHTQKATLVCLATGFYPDHVELSWWVNGKEVHSGVCTDPQPLKEQPALNDSRYCLSSRLRVSATFWQNPRNHFRCQVQFYGLSENDEWTQDRAKPVTQIVSAEAWGRADDVIKIHWQEKKSNTILGSQEGNTMKTNDTYMKFSWLTVPEKSLDKEHRCIVRHENNKNGVDQEIIFPPIKTDVITMDPKDNCSKDANDTLLLQLTNTSAYYMYLLLLLKSVVYFAIITCCLLMAMVKRKDSRGRAKRSGSGATNFSLLKQAGDVEENPGPTSMDWIWRILFLVGAATGAHSFEEVQLVESGGGLVQPDRSLRLSCAASGFTFHDYAMHWVRQAPGKGLEWVSTISWNSGTIGYADSVKGRFTISRDNAKNSLYLQMNSLRAEDTALYYCAKDIQYGNYYYGMDVWGQGTTVTVSSTRIQNPDPAVYQLRDSKSSDKSVCLFTDFDSQTNVSQSKDSDVYITDKCVLDMRSMDFKSNSAVAWSNKSDFACANAFNNSIIPEDTFFPSPESSDSTDHVKPKETENTKQPSKSCHKPKAIVHTEKVNMMSLTVLGLRMLFAKTVAVNFLLTAKLFFLLTA

SEQ ID NO: 14506 - protein, 721 aa, synthetic construct
MALPVTALLLPLALLLHAARPDIQMTQSPSSLSASVGDRVTINCKASQDINSYLSWFQQKPGKAPKTLIYRANRLVDGVPSRFSGSGSGQDYTLTISSLQPEDFATYYCLQYDEFPLTFGGGTKVEIKLEDLKNVFPPEVAVFEPSEAEISHTQKATLVCLATGFYPDHVELSWWVNGKEVHSGVCTDPQPLKEQPALNDSRYCLSSRLRVSATFWQNPRNHFRCQVQFYGLSENDEWTQDRAKPVTQIVSAEAWGRADDVIKIHWQEKKSNTILGSQEGNTMKTNDTYMKFSWLTVPEKSLDKEHRCIVRHENNKNGVDQEIIFPPIKTDVITMDPKDNCSKDANDTLLLQLTNTSAYYMYLLLLLKSVVYFAIITCCLLMAMVKRKDSRGRAKRSGSGATNFSLLKQAGDVEENPGPTSMDWIWRILFLVGAATGAHSFEQVQLVQSGAEVKKPGASVKVSCKASGYTFTNYDINWVRQAPGQGLEWIGWIYPGDGSTKYNEKFKAKATLTADTSTSTAYMELRSLRSDDTAVYYCASGYEDAMDYWGQGTTVTVSSTRIQNPDPAVYQLRDSKSSDKSVCLFTDFDSQTNVSQSKDSDVYITDKCVLDMRSMDFKSNSAVAWSNKSDFACANAFNNSIIPEDTFFPSPESSDSTDHVKPKETENTKQPSKSCHKPKAIVHTEKVNMMSLTVLGLRMLFAKTVAVNFLLTAKLFFLLTA

SEQ ID NO: 14507 - protein, 723 aa, synthetic construct
MALPVTALLLPLALLLHAARPDIVMTQTPLSLSVTPGQPASISCKSSQSLLDGDGKTYLNWLLQKPGQSPQRLIYLVSKLDSGVPDRFSGSGSGTDFTLKISRVEAEDVGVYYCWQGTHFPRTFGQGTKLEIKLEDLKNVFPPEVAVFEPSEAEISHTQKATLVCLATGFYPDHVELSWWVNGKEVHSGVCTDPQPLKEQPALNDSRYCLSSRLRVSATFWQNPRNHFRCQVQFYGLSENDEWTQDRAKPVTQIVSAEAWGRADDVIKIHWQEKKSNTILGSQEGNTMKTNDTYMKFSWLTVPEKSLDKEHRCIVRHENNKNGVDQEIIFPPIKTDVITMDPKDNCSKDANDTLLLQLTNTSAYYMYLLLLLKSVVYFAIITCCLLMAMVKRKDSRGRAKRSGSGATNFSLLKQAGDVEENPGPTSMDWIWRILFLVGAATGAHSFEQVQLVQSGAEVKKPGASVKVSCKASGYTFKDTYIHWVRQAPGQGLEWMGRIDPANGNTKYDPKFQGRVTMTRDTSISTAYMELSRLRSDDTAVYYCARRGGVDWGQGTLVTVSSTRIQNPDPAVYQLRDSKSSDKSVCLFTDFDSQTNVSQSKDSDVYITDKCVLDMRSMDFKSNSAVAWSNKSDFACANAFNNSIIPEDTFFPSPESSDSTDHVKPKETENTKQPSKSCHKPKAIVHTEKVNMMSLTVLGLRMLFAKTVAVNFLLTAKLFFLLTA

SEQ ID NO: 14508 - protein, 724 aa, synthetic construct
MALPVTALLLPLALLLHAARPDIQMTQSPSSLSASVGDRVTITCKASQDVSTAVAWFQQKPGKAPKLLIYSPSYRYTGVPSRFSGSGSGTDFTLTISSLQPEDFTYYCQQLYSTPYTFGQGTKVEIKLEDLKNVFPPEVAVFEPSEAEISHTQKATLVCLATGFYPDHVELSWWVNGKEVHSGVCTDPQPLKEQPALNDSRYCLSSRLRVSATFWQNPRNHFRCQVQFYGLSENDEWTQDRAKPVTQIVSAEAWGRADDVIKIHWQEKKSNTILGSQEGNTMKTNDTYMKFSWLTVPEKSLDKEHRCIVRHENNKNGVDQEIIFPPIKTDVITMDPKDNCSKDANDTLLLQLTNTSAYYMYLLLLLKSVVYFAIITCCLLMAMVKRKDSRGRAKRSGSGATNFSLLKQAGDVEENPGPTSMDWIWRILFLVGAATGAHSFEEVQLVQSGAEVKKPGASVKVSCKASGYTFTDYYLDVVVRQAPGQGLEWIGRVNPYNGGTIYNQKFKGRVTLTRDTSTSTAYLELSSLRSEDTAVYYCARDHYRYDPLLDYWGQGTLVTVSSTRIQNPDPAVYQLRDSKSSDKSVCLFTDFDSQTNVSQSKDSDVYITDKCVLDMRSMDFKSNSAVAWSNKSDFACANAFNNSIIPEDTFFPSPESSDSTDHVKPKETENTKQPSKSCHKPKAIVHTEKVNMMSLTVLGLRMLFAKTVAVNFLLTAKLFFLLTA

SEQ ID NO: 14509 - protein, 730 aa, synthetic construct
MALPVTALLLPLALLLHAARPDIQMTQSPSSLSASVGDRVTITCRASQSVSTSSYNYMHWYQQKPGKPPKLLIKYASNLESGVPSRFSGSGSGTDFTLTISSLQPEDFATYYCQHSWEIPLTFGQGTKVEIKLEDLKNVFPPEVAVFEPSEAEISHTQKATLVCLATGFYPDHVELSWWVNGKEVHSGVCTDPQPLKEQPALNDSRYCLSSRLRVSATFWQNPRNHFRCQVQFYGLSENDEWTQDRAKPVTQIVSAEAWGRADDVIKIHWQEKKSNTILGSQEGNTMKTNDTYMKFSWLTVPEKSLDKEHRCIVRHENNKNGVDQEIIFPPIKTDVITMDPKDNCSKDANDTLLLQLTNTSAYYMYLLLLLKSVVYFAIITCCLLMAMVKRKDSRGRAKRSGSGATNFSLLKQAGDVEENPGPTSMDWIWRILFLVGAATGAHSFEEVQLVQSGAEVKKPGASVKVSCKASGYSFTDYYMHWVRQAPGQGLEWIGRINPYNGAAFYSQNFKDRVTLTVDTSTSTAYLELSSLRSEDTAVYYCAIERGADLEGYAMDYWGQGTLVTVSSTRIQNPDPAVYQLRDSKSSDKSVCLFTDFDSQTNVSQSKDSDVYITDKCVLDMRSMDFKSNSAVAWSNKSDFACANAFNNSIIPEDTFFPSPESSDSTDHVKPKETENTKQPSKSCHKPKAIVHTEKVNMMSLTVLGLRMLFAKTVAVNFLLTAKLFFLLTA

SEQ ID NO: 14510 - protein, 728 aa, synthetic construct
MALPVTALLLPLALLLHAARPEIVLTQSPATLSASPGERVTLTCRASSNVISSYVHWYQQKPGSSPRLFLYSTSNLASGVPSRFSGSGSGTDFTFTISSLEAEDAATYYCQQYSGYPLTFGQGTRLEIKLEDLKNVFPPEVAVFEPSEAEISHTQKATLVCLATGFYPDHVELSWWVNGKEVHSGVCTDPQPLKEQPALNDSRYCLSSRLRVSATFWQNPRNHFRCQVQFYGLSENDEWTQDRAKPVTQIVSAEAWGRADDVIKIHWQEKKSNTILGSQEGNTMKTNDTYMKFSWLTVPEKSLDKEHRCIVRHENNKNGVDQEIIFPPIKTDVITMDPKDNCSKDANDTLLLQLTNTSAYYMYLLLLLKSVVYFAIITCCLLMAMVKRKDSRGRAKRSGSGATNFSLLKQAGDVEENPGPTSMDWIWRILFLVGAATGAHSFEQVQLQESGPGLVKPSETLSLTCAVSGYSITSAYYWNWIRQPPGKGLEWIGYISYDGRNNYNPSLKNRITINPDTSKNQFSLQLNSVTPEDTAVYYCAREGDYDVGNYYAMDYWGQGTLVTVSSTRIQNPDPAVYQLRDSKSSDKSVCLFTDFDSQTNVSQSKDSDVYITDKCVLDMRSMDFKSNSAVAWSNKSDFACANAFNNSIIPEDTFFPSPESSDSTDHVKPKETENTKQPSKSCHKPKAIVHTEKVNMMSLTVLGLRMLFAKTVAVNFLLTAKLFFLLTA

SEQ ID NO: 14511 - protein, 728 aa, synthetic construct
MALPVTALLLPLALLLHAARPEIVLTQSPATLSLSPGERATLSCRASSNVISSYVHWYQQKPGQAPRLLIYSTSNLASGIPARFSGSGSGTDFTLTISSLEPEDFAVYYCQQYSGYPLTFGQGTRLEIKLEDLKNVFPPEVAVFEPSEAEISHTQKATLVCLATGFYPDHVELSWWVNGKEVHSGVCTDPQPLKEQPALNDSRYCLSSRLRVSATFWQNPRNHFRCQVQFYGLSENDEWTQDRAKPVTQIVSAEAWGRADDVIKIHWQEKKSNTILGSQEGNTMKTNDTYMKFSWLTVPEKSLDKEHRCIVRHENNKNGVDQEIIFPPIKTDVITMDPKDNCSKDANDTLLLQLTNTSAYYMYLLLLLKSVVYFAIITCCLLMAMVKRKDSRGRAKRSGSGATNFSLLKQAGDVEENPGPTSMDWIWRILFLVGAATGAHSFEEVQLVESGGGLVQPGRSLRLSCAASGYSITSAYYWNWVRQAPGKGLEWVSYISYDGRNNYNPSLKNRFTISRDNAKKSLYLQMNSLRAEDTALYYCAKEGDYDVGNYYAMDYWGQGTTVTVSSTRIQNPDPAVYQLRDSKSSDKSVCLFTDFDSQTNVSQSKDSDVYITDKCVLDMRSMDFKSNSAVAWSNKSDFACANAFNNSIIPEDTFFPSPESSDSTDHVKPKETENTKQPSKSCHKPKAIVHTEKVNMMSLTVLGLRMLFAKTVAVNFLLTAKLFFLLTA

SEQ ID NO: 14512 - protein, 727 aa, synthetic construct
MALPVTALLLPLALLLHAARPDVVMTQTPLSLPVSLGDQASISCRSSQSLVHSNGNTYLRWYLQKPGQSPKVLIYKVSNRVSGVPDRFSGSGSGTDFTLKINRVEAEDLGVYFCSQSTHVPWTFGGGTKLEIKLEDLKNVFPPEVAVFEPSEAEISHTQKATLVCLATGFYPDHVELSWWVNGKEVHSGVCTDPQPLKEQPALNDSRYCLSSRLRVSATFWQNPRNHFRCQVQFYGLSENDEWTQDRAKPVTQIVSAEAWGRADDVIKIHWQEKKSNTILGSQEGNTMKTNDTYMKFSWLTVPEKSLDKEHRCIVRHENNKNGVDQEIIFPPIKTDVITMDPKDNCSKDANDTLLLQLTNTSAYYMYLLLLLKSVVYFAIITCCLLMAMVKRKDSRGRAKRSGSGATNFSLLKQAGDVEENPGPTSMDWIWRILFLVGAATGAHSFEGVKLDETGGGLVQPGGAMKLSCVTSGFTFGHYWMNWVRQSPEKGLEWVAQFRNKPYNYETYYSDSVKGRFTISRDDSKSSVYLQMNNLRVEDTGIYYCTGASYGMEYLGQGTSVTVSTTRIQNPDPAVYQLRDSKSSDKSVCLFTDFDSQTNVSQSKDSDVYITDKCVLDMRSMDFKSNSAVAWSNKSDFACANAFNNSIIPEDTFFPSPESSDSTDHVKPKETENTKQPSKSCHKPKAIVHTEKVNMMSLTVLGLRMLFAKTVAVNFLLTAKLFFLLTA

SEQ ID NO: 14513 - protein, 733 aa, synthetic construct
MALPVTALLLPLALLLHAARPQVQLVESGGNLVQPGGSLRLSCAASGFTFGSFSMSWVRQAPGGGLEWVAGLSARSSLTHYADSVKGRFTISRDNAKNSVYLQMNSLRVEDTAVYYCARRSYDSSGYWGHFYSYMDVWGQGTLVTVSLEDLKNVFPPEVAVFEPSEAEISHTQKATLVCLATGFYPDHVELSWWVNGKEVHSGVCTDPQPLKEQPALNDSRYCLSSRLRVSATFWQNPRNHFRCQVQFYGLSENDEWTQDRAKPVTQIVSAEAWGRADDVIKIHWQEKKSNTILGSQEGNTMKTNDTYMKFSWLTVPEKSLDKEHRCIVRHENNKNGVDQEIIFPPIKTDVITMDPKDNCSKDANDTLLLQLTNTSAYYMYLLLLLKSVVYFAIITCCLLMAMVKRKDSRGRAKRSGSGATNFSLLKQAGDVEENPGPTSMDWIWRILFLVGAATGAHSFESVLTQPSSVSAAPGQKVTISCSGSTSNIGNNYVSWYQQHPGKAPKLMIYDVSKRPSGVPDRFSGSKSGNSASLDISGLQSEDEADYYCAAWDDSLSEFLFGTGTKLTVLGTRIQNPDPAVYQLRDSKSSDKSVCLFTDFDSQTNVSQSKDSDVYITDKCVLDMRSMDFKSNSAVAWSNKSDFACANAFNNSIIPEDTFFPSPESSDSTDHVKPKETENTKQPSKSCHKPKAIVHTEKVNMMSLTVLGLRMLFAKTVAVNFLLTAKLFFLLTA

SEQ ID NO: 14514 - protein, 728 aa, synthetic construct
MALPVTALLLPLALLLHAARPDVVMTQSPSSLSASVGDRVTITCQSSLDISHYLNWYQQKPGKAPKLLIYDASNLETGVPSRFSGSGSGTHFTFTISSLQPEDFATYYCQQYDNLPLTFGGGTKLEIKRLEDLKNVFPPEVAVFEPSEAEISHTQKATLVCLATGFYPDHVELSWWVNGKEVHSGVCTDPQPLKEQPALNDSRYCLSSRLRVSATFWQNPRNHFRCQVQFYGLSENDEWTQDRAKPVTQIVSAEAWGRADDVIKIHWQEKKSNTILGSQEGNTMKTNDTYMKFSWLTVPEKSLDKEHRCIVRHENNKNGVDQEIIFPPIKTDVITMDPKDNCSKDANDTLLLQLTNTSAYYMYLLLLLKSVVYFAIITCCLLMAMVKRKDSRGRAKRSGSGATNFSLLKQAGDVEENPGPTSMDWIWRILFLVGAATGAHSFEQVQLVQSGGGVVQPGGSLRVSCAASGVTLSDYGMHWVRQAPGKGLEWVAFIRNDGSDKYYADSVKGRFTISRDNSEKTVSLQMSSLRAEDTAVYYCAKNGESGPLDYWYLDLWGRGTLVTVSSTRIQNPDPAVYQLRDSKSSDKSVCLFTDFDSQTNVSQSKDSDVYITDKCVLDMRSMDFKSNSAVAWSNKSDFACANAFNNSIIPEDTFFPSPESSDSTDHVKPKETENTKQPSKSCHKPKAIVHTEKVNMMSLTVLGLRMLFAKTVAVNFLLTAKLFFLLTA

SEQ ID NO: 14515 - protein, 732 aa, synthetic construct
MALPVTALLLPLALLLHAARPSYELTQPPSVSGTPGQRVAISCSGSSSNIGTRMVTWYQHVPGTAPKLLIFNNNQRPSGVPDRFSASKSGTSASLAIIGLQSDDEADYYCATWDDNVKSYVFGTGTKVTVLGSRLEDLKNVFPPEVAVFEPSEAEISHTQKATLVCLATGFYPDHVELSWWVNGKEVHSGVCTDPQPLKEQPALNDSRYCLSSRLRVSATFWQNPRNHFRCQVQFYGLSENDEWTQDRAKPVTQIVSAEAWGRADDVIKIHWQEKKSNTILGSQEGNTMKTNDTYMKFSWLTVPEKSLDKEHRCIVRHENNKNGVDQEIIFPPIKTDVITMDPKDNCSKDANDTLLLQLTNTSAYYMYLLLLLKSVVYFAIITCCLLMAMVKRKDSRGRAKRSGSGATNFSLLKQAGDVEENPGPTSMDWIWRILFLVGAATGAHSFELEMAQVQLQQWGAGLLKPSETLSLTCAVYGGSFSGYYWSWIRQPPGKGLEWIGEINHSGSTNYNPSLKSRVTISVDTSKNQFSLKLSSVTAADTAVYYCARAPQSWYVGDVWGQGTLVTVSSTRIQNPDPAVYQLRDSKSSDKSVCLFTDFDSQTNVSQSKDSDVYITDKCVLDMRSMDFKSNSAVAWSNKSDFACANAFNNSIIPEDTFFPSPESSDSTDHVKPKETENTKQPSKSCHKPKAIVHTEKVNMMSLTVLGLRMLFAKTVAVNFLLTAKLFFLLTA

SEQ ID NO: 14516 - protein, 729 aa, synthetic construct
MALPVTALLLPLALLLHAARPQSVLTQPPSLSVAPGKTASITCGGNNIGMKSVHWYQQRPGQAPVLVIYYDSDRPSGIPGRFSGSNSGNTATLTISRVEAGDEADYYCQVWDTTGDHPGYVFGTGTKVTVLLEDLKNVFPPEVAVFEPSEAEISHTQKATLVCLATGFYPDHVELSWWVNGKEVHSGVCTDPQPLKEQPALNDSRYCLSSRLRVSATFWQNPRNHFRCQVQFYGLSENDEWTQDRAKPVTQIVSAEAWGRADDVIKIHWQEKKSNTILGSQEGNTMKTNDTYMKFSWLTVPEKSLDKEHRCIVRHENNKNGVDQEIIFPPIKTDVITMDPKDNCSKDANDTLLLQLTNTSAYYMYLLLLLKSVVYFAIITCCLLMAMVKRKDSRGRAKRSGSGATNFSLLKQAGDVEENPGPTSMDWIWRILFLVGAATGAHSFEQVQLVQSGAEVKKPGSSVKVSCKASGGTFSSYAISWVRQAPGQGLEWMGGIIPIFGTANYAQKFQGRVTITADESTSTAYMELSSLRSEDTAVYYCARGVYGYSGSAPYDEWGQGTLVTVSSTRIQNPDPAVYQLRDSKSSDKSVCLFTDFDSQTNVSQSKDSDVYITDKCVLDMRSMDFKSNSAVAWSNKSDFACANAFNNSIIPEDTFFPSPESSDSTDHVKPKETENTKQPSKSCHKPKAIVHTEKVNMMSLTVLGLRMLFAKTVAVNFLLTAKLFFLLTA

SEQ ID NO: 14517 - protein, 727 aa, synthetic construct
MALPVTALLLPLALLLHAARPEVQLVESGGGLVQPGRSLRLSCAASGFTFDDYAMHWVRQAPGKGLEWVSGISWNSGSIGYADSVKGRFTISRDNAKNSLYLQMNSLRAEDTALYYCAKDKGGGYYDFWSGSDYWGQGTLVTVSSLEDLKNVFPPEVAVFEPSEAEISHTQKATLVCLATGFYPDHVELSWWVNGKEVHSGVCTDPQPLKEQPALNDSRYCLSSRLRVSATFWQNPRNHFRCQVQFYGLSENDEWTQDRAKPVTQIVSAEAWGRADDVIKIHWQEKKSNTILGSQEGNTMKTNDTYMKFSWLTVPEKSLDKEHRCIVRHENNKNGVDQEIIFPPIKTDVITMDPKDNCSKDANDTLLLQLTNTSAYYMYLLLLLKSVVYFAIITCCLLMAMVKRKDSRGRAKRSGSGATNFSLLKQAGDVEENPGPTSMDWIWRILFLVGAATGAHSFESSELTQDPAVSVALGQTVRITCQGDSLRSYYASWYQQKPGQAPVLVIYGKNNRPSGIPDRFSGSSSGNTASLTITGAQAEDEADYYCNSRDSSGWVFGGGTKLTVLTRIQNPDPAVYQLRDSKSSDKSVCLFTDFDSQTNVSQSKDSDVYITDKCVLDMRSMDFKSNSAVAWSNKSDFACANAFNNSIIPEDTFFPSPESSDSTDHVKPKETENTKQPSKSCHKPKAIVHTEKVNMMSLTVLGLRMLFAKTVAVNFLLTAKLFFLLTA

SEQ ID NO: 14518 - protein, 736 aa, synthetic construct
MALPVTALLLPLALLLHAARPEVQLQQSGPGLVKPSQTLSLTCAISGDSVLSNSDTWNWIRQSPSRGLEWLGRTYHRSTWYDDYASSVRGRVSINVDTSKNQYSLQLNAVTPEDTGVYYCARDRLQDGNSWSDAFDVWGQGTMVTVSSLEDLKNVFPPEVAVFEPSEAEISHTQKATLVCLATGFYPDHVELSWWVNGKEVHSGVCTDPQPLKEQPALNDSRYCLSSRLRVSATFWQNPRNHFRCQVQFYGLSENDEWTQDRAKPVTQIVSAEAWGRADDVIKIHWQEKKSNTILGSQEGNTMKTNDTYMKFSWLTVPEKSLDKEHRCIVRHENNKNGVDQEIIFPPIKTDVITMDPKDNCSKDANDTLLLQLTNTSAYYMYLLLLLKSVVYFAIITCCLLMAMVKRKDSRGRAKRSGSGATNFSLLKQAGDVEENPGPTSMDWIWRILFLVGAATGAHSFEQSALTQPASVSGSPGQSITISCTGTSSDVGGYNYVSWYQQHPGKAPKLMIYDVSNRPSGVSNRFSGSKSGNTASLTISGLQAEDEADYYCSSYTSSSTLVYVFGTGTKVTVLTRIQNPDPAVYQLRDSKSSDKSVCLFTDFDSQTNVSQSKDSDVYITDKCVLDMRSMDFKSNSAVAWSNKSDFACANAFNNSIIPEDTFFPSPESSDSTDHVKPKETENTKQPSKSCHKPKAIVHTEKVNMMSLTVLGLRMLFAKTVAVNFLLTAKLFFLLTA

SEQ ID NO: 14519 - protein, 714 aa, synthetic construct
MALPVTALLLPLALLLHAARPQVQLVQSGAEVKKPGASVKVSCKASGYTFTSYDINWVRQATGQGLEWMGWMNPNSGNTGYAQKFQGRVTMTRNTSISTAYMELSSLRSEDTAVYYCARGDSTKVEIKLEDLKNVFPPEVAVFEPSEAEISHTQKATLVCLATGFYPDHVELSWWVNGKEVHSGVCTDPQPLKEQPALNDSRYCLSSRLRVSATFWQNPRNHFRCQVQFYGLSENDEWTQDRAKPVTQIVSAEAWGRADDVIKIHWQEKKSNTILGSQEGNTMKTNDTYMKFSWLTVPEKSLDKEHRCIVRHENNKNGVDQEIIFPPIKTDVITMDPKDNCSKDANDTLLLQLTNTSAYYMYLLLLLKSVVYFAIITCCLLMAMVKRKDSRGRAKRSGSGATNFSLLKQAGDVEENPGPTSMDWIWRILFLVGAATGAHSFEQSVLTQPRSVSGSPGQSVTISCTGTSSDVGGYNYVSWYQQHPGEAPKLIIYDADKRPSGISNRFSSGKSGNTASLTISGLQVEDEADYYCCSYAGGSTWVFGGGTKVTVLTRIQNPDPAVYQLRDSKSSDKSVCLFTDFDSQTNVSQSKDSDVYITDKCVLDMRSMDFKSNSAVAWSNKSDFACANAFNNSIIPEDTFFPSPESSDSTDHVKPKETENTKQPSKSCHKPKAIVHTEKVNMMSLTVLGLRMLFAKTVAVNFLLTAKLFFLLTA

SEQ ID NO: 14520 - protein, 736 aa, synthetic construct
MALPVTALLLPLALLLHAARPEVQLQQSGPGLVKPSQTLSLTCAISGDSVSSNSAAWNWIRQSPSRGLEWLGRTYYRSKWYSDYAVSVKSRITINPDTSKNQFSLQLNSVTPEDTAVYYCARDPYDFWSGYPDAFDIWGQGTMVTVSSLEDLKNVFPPEVAVFEPSEAEISHTQKATLVCLATGFYPDHVELSWWVNGKEVHSGVCTDPQPLKEQPALNDSRYCLSSRLRVSATFWQNPRNHFRCQVQFYGLSENDEWTQDRAKPVTQIVSAEAWGRADDVIKIHWQEKKSNTILGSQEGNTMKTNDTYMKFSWLTVPEKSLDKEHRCIVRHENNKNGVDQEIIFPPIKTDVITMDPKDNCSKDANDTLLLQLTNTSAYYMYLLLLLKSVVYFAIITCCLLMAMVKRKDSRGRAKRSGSGATNFSLLKQAGDVEENPGPTSMDWIWRILFLVGAATGAHSFEQSALTQPASVSGSPGQSITISCTGTSSDVGGYNYVSWYQQHPGKAPKVIISEVNNRPSGVSHRFSGSKSGNTASLTISGLQAEDEADYFCSSYTSGRTLYVFGTGSKVTVLGTRIQNPDPAVYQLRDSKSSDKSVCLFTDFDSQTNVSQSKDSDVYITDKCVLDMRSMDFKSNSAVAWSNKSDFACANAFNNSIIPEDTFFPSPESSDSTDHVKPKETENTKQPSKSCHKPKAIVHTEKVNMMSLTVLGLRMLFAKTVAVNFLLTAKLFFLLTA

SEQ ID NO: 14521 - protein, 735 aa, synthetic construct
MALPVTALLLPLALLLHAARPQSALTQPASASGSPGQSVTISCTGTSSDVGGYNYVSWYQQHPGKAPKLMIYDVSNRPSGVSNRFSGSKSGNTASLTISGLQAEDEADYYCSSYTSSSTLYVFGTGTQLTVLLEDLKNVFPPEVAVFEPSEAEISHTQKATLVCLATGFYPDHVELSWWVNGKEVHSGVCTDPQPLKEQPALNDSRYCLSSRLRVSATFWQNPRNHFRCQVQFYGLSENDEWTQDRAKPVTQIVSAEAWGRADDVIKIHWQEKKSNTILGSQEGNTMKTNDTYMKFSWLTVPEKSLDKEHRCIVRHENNKNGVDQEIIFPPIKTDVITMDPKDNCSKDANDTLLLQLTNTSAYYMYLLLLLKSVVYFAIITCCLLMAMVKRKDSRGRAKRSGSGATNFSLLKQAGDVEENPGPTSMDWIWRILFLVGAATGAHSFEEVQLQQSGPGLVKPSQTLSLTCAISGDSMLSNSDTWNWIRQSPSRGLEWLGRTYHRSTWYDDYASSVRGRVSINVDTSKNQYSLQLNAVTPEDTGVYYCARVRLQDGNSWSDAFDVWGQGTMVTVSSTRIQNPDPAVYQLRDSKSSDKSVCLFTDFDSQTNVSQSKDSDVYITDKCVLDMRSMDFKSNSAVAWSNKSDFACANAFNNSIIPEDTFFPSPESSDSTDHVKPKETENTKQPSKSCHKPKAIVHTEKVNMMSLTVLGLRMLFAKTVAVNFLLTAKLFFLLTA

SEQ ID NO: 14522 - protein, 735 aa, synthetic construct
MALPVTALLLPLALLLHAARPDVMLTQTPLSLPVSLGDQASISCRSSQSILHSTGDTYLEWYLQKPGQSPKLLINKVSNRLSGVPDRFSGSGSGTDFTLKISRVEAEDLGVYYCFQGSHVPWTFGGGTKLEIKRADAAPTVSIFPLEDLKNVFPPEVAVFEPSEAEISHTQKATLVCLATGFYPDHVELSWWVNGKEVHSGVCTDPQPLKEQPALNDSRYCLSSRLRVSATFWQNPRNHFRCQVQFYGLSENDEWTQDRAKPVTQIVSAEAWGRADDVIKIHWQEKKSNTILGSQEGNTMKTNDTYMKFSWLTVPEKSLDKEHRCIVRHENNKNGVDQEIIFPPIKTDVITMDPKDNCSKDANDTLLLQLTNTSAYYMYLLLLLKSVVYFAIITCCLLMAMVKRKDSRGRAKRSGSGATNFSLLKQAGDVEENPGPTSMDWIWRILFLVGAATGAHSFEQVKLQQSGPSLVKPGASVKMSCKASGYTFTDFYMKWVKQSHGKSLEWIGDINPNIGDTFYNQKFKGKATLTVDKSSSTAYMQLNSLTSEDSAVYFCSVGYFDVWGAGTTVTVSSTRIQNPDPAVYQLRDSKSSDKSVCLFTDFDSQTNVSQSKDSDVYITDKCVLDMRSMDFKSNSAVAWSNKSDFACANAFNNSIIPEDTFFPSPESSDSTDHVKPKETENTKQPSKSCHKPKAIVHTEKVNMMSLTVLGLRMLFAKTVAVNFLLTAKLFFLLTA

SEQ ID NO: 14523 - protein, 731 aa, synthetic construct
MALPVTALLLPLALLLHAARPEIVLTQSPATLSLSPGERATLSCRASQSVSIYLAWYQQKPGQAPRLLIYDASNRATGIPARFSGSGSGTDFTLTISSLEPEDFAVYYCQQRSNWPPFTFGPGTKVDIKLEDLKNVFPPEVAVFEPSEAEISHTQKATLVCLATGFYPDHVELSWWVNGKEVHSGVCTDPQPLKEQPALNDSRYCLSSRLRVSATFWQNPRNHFRCQVQFYGLSENDEWTQDRAKPVTQIVSAEAWGRADDVIKIHWQEKKSNTILGSQEGNTMKTNDTYMKFSWLTVPEKSLDKEHRCIVRHENNKNGVDQEIIFPPIKTDVITMDPKDNCSKDANDTLLLQLTNTSAYYMYLLLLLKSVVYFAIITCCLLMAMVKRKDSRGRAKRSGSGATNFSLLKQAGDVEENPGPTSMDWIWRILFLVGAATGAHSFEQVQLVESGGGVVQPGRSLRLSCAASGFTFSSYGMHWVRQAPGKGLEWVAVIWDDGSNKYYVDSVKGRFTISRDNSKNTLYLQMNSLRAEDTAVYYCARDDYYGSGSFNSYYGTDVWGQGTTVTVSSTRIQNPDPAVYQLRDSKSSDKSVCLFTDFDSQTNVSQSKDSDVYITDKCVLDMRSMDFKSNSAVAWSNKSDFACANAFNNSIIPEDTFFPSPESSDSTDHVKPKETENTKQPSKSCHKPKAIVHTEKVNMMSLTVLGLRMLFAKTVAVNFLLTAKLFFLLTA

SEQ ID NO: 14524 - protein, 716 aa, synthetic construct
MALPVTALLLPLALLLHAARPDIQMTQSPSSLSASVGDRVTITCRASQGISSWLAWYQQKPEKAPKSLIYAASSLQSGVPSRFSGSGSGTDFTLTISSLQPEDFATYYCQQYNSYPYTFGQGTKLEIKLEDLKNVFPPEVAVFEPSEAEISHTQKATLVCLATGFYPDHVELSWWVNGKEVHSGVCTDPQPLKEQPALNDSRYCLSSRLRVSATFWQNPRNHFRCQVQFYGLSENDEWTQDRAKPVTQIVSAEAWGRADDVIKIHWQEKKSNTILGSQEGNTMKTNDTYMKFSWLTVPEKSLDKEHRCIVRHENNKNGVDQEIIFPPIKTDVITMDPKDNCSKDANDTLLLQLTNTSAYYMYLLLLLKSVVYFAIITCCLLMAMVKRKDSRGRAKRSGSGATNFSLLKQAGDVEENPGPTSMDWIWRILFLVGAATGAHSFEEVQLVQSGGGLVHPGGSLRLSCAGSGFTFSTYLMYWVRQAPGKTLEWVSAIGSGGDTYYADSVKGRFTISRDNAKNSLYLQMNSLRAEDMAVYYCARGLGYWGQGTLVTVSSTRIQNPDPAVYQLRDSKSSDKSVCLFTDFDSQTNVSQSKDSDVYITDKCVLDMRSMDFKSNSAVAWSNKSDFACANAFNNSIIPEDTFFPSPESSDSTDHVKPKETENTKQPSKSCHKPKAIVHTEKVNMMSLTVLGLRMLFAKTVAVNFLLTAKLFFLLTA

SEQ ID NO: 14525 - protein, 735 aa, synthetic construct
MALPVTALLLPLALLLHAARPLPVLTQPPSVSVAPGKTARITCGGNNIGSKSVHWYQQKPGQAPVLVVYDDSDRPSGIPERFSGSNSGNTATLTISRVEAGDEADYYCQVWDSSSDYVVFGGGTKLTVLLEDLKNVFPPEVAVFEPSEAEISHTQKATLVCLATGFYPDHVELSWWVNGKEVHSGVCTDPQPLKEQPALNDSRYCLSSRLRVSATFWQNPRNHFRCQVQFYGLSENDEWTQDRAKPVTQIVSAEAWGRADDVIKIHWQEKKSNTILGSQEGNTMKTNDTYMKFSWLTVPEKSLDKEHRCIVRHENNKNGVDQEIIFPPIKTDVITMDPKDNCSKDANDTLLLQLTNTSAYYMYLLLLLKSVVYFAIITCCLLMAMVKRKDSRGRAKRSGSGATNFSLLKQAGDVEENPGPTSMDWIWRILFLVGAATGAHSFEEVQLVQSGAEVKKPGESLKISCKGSGYSFTSYWIGWVRQMPGKGLEWMGIIYPGDSDTRYSPSFQGQVTISADKSISTAYLQWSSLKASDTAMYYCARQVWGWQGGMYPRSNWWYNLDSWGQGTLVTVSSTRIQNPDPAVYQLRDSKSSDKSVCLFTDFDSQTNVSQSKDSDVYITDKCVLDMRSMDFKSNSAVAWSNKSDFACANAFNNSIIPEDTFFPSPESSDSTDHVKPKETENTKQPSKSCHKPKAIVHTEKVNMMSLTVLGLRMLFAKTVAVNFLLTAKLFFLLTA

SEQ ID NO: 14526 - protein, 728 aa, synthetic construct
MALPVTALLLPLALLLHAARPELVMTQSPASLAVSLGQRATISCRASESVDSYGKSFMHWYQLKPGQPPKLLIYRASNLESGVPARFSGSGSRTDFTLTIDPVEADDAATYYCQQNNEDPWTFGGGTKLEIKLEDLKNVFPPEVAVFEPSEAEISHTQKATLVCLATGFYPDHVELSWWVNGKEVHSGVCTDPQPLKEQPALNDSRYCLSSRLRVSATFWQNPRNHFRCQVQFYGLSENDEWTQDRAKPVTQIVSAEAWGRADDVIKIHWQEKKSNTILGSQEGNTMKTNDTYMKFSWLTVPEKSLDKEHRCIVRHENNKNGVDQEIIFPPIKTDVITMDPKDNCSKDANDTLLLQLTNTSAYYMYLLLLLKSVVYFAIITCCLLMAMVKRKDSRGRAKRSGSGATNFSLLKQAGDVEENPGPTSMDWIWRILFLVGAATGAHSFEEVQLEQSGPELVKPGASVKMSCKASGYTFTNYYMKWVKQSHGKSLEWIGDLNPNNGDTFYNQKFKGKATLTVDKSSNTAYMQLNSLTSEDSAVYYCARTGRYEENAMDYWGQGTSVTVSSTRIQNPDPAVYQLRDSKSSDKSVCLFTDFDSQTNVSQSKDSDVYITDKCVLDMRSMDFKSNSAVAWSNKSDFACANAFNNSIIPEDTFFPSPESSDSTDHVKPKETENTKQPSKSCHKPKAIVHTEKVNMMSLTVLGLRMLFAKTVAVNFLLTAKLFFLLTA

SEQ ID NO: 14527 - protein, 722 aa, synthetic construct
MALPVTALLLPLALLLHAARPDVVMTQSPSSLSASVGDRVTITCMASEDIYIRLAWYQQKPGNAPKLLIYAATSLETGVPSRFSGSGSGTDFTLTISSLQPEDFATYYCQQYWSSPWTFGGGTKVEIKLEDLKNVFPPEVAVFEPSEAEISHTQKATLVCLATGFYPDHVELSWWVNGKEVHSGVCTDPQPLKEQPALNDSRYCLSSRLRVSATFWQNPRNHFRCQVQFYGLSENDEWTQDRAKPVTQIVSAEAWGRADDVIKIHWQEKKSNTILGSQEGNTMKTNDTYMKFSWLTVPEKSLDKEHRCIVRHENNKNGVDQEIIFPPIKTDVITMDPKDNCSKDANDTLLLQLTNTSAYYMYLLLLLKSVVYFAIITCCLLMAMVKRKDSRGRAKRSGSGATNFSLLKQAGDVEENPGPTSMDWIWRILFLVGAATGAHSFEQVQLQESGPGLVKPSQTLSLTCTVSGYSITSDYTWNWIRQPPGNGLEWIGYITYSGSTSYNPSLKSRVLISVDTSKNQVSLKLSSVTAADTAVYYCARLGRRYTMDYWGQGTTVTVSSTRIQNPDPAVYQLRDSKSSDKSVCLFTDFDSQTNVSQSKDSDVYITDKCVLDMRSMDFKSNSAVAWSNKSDFACANAFNNSIIPEDTFFPSPESSDSTDHVKPKETENTKQPSKSCHKPKAIVHTEKVNMMSLTVLGLRMLFAKTVAVNFLLTAKLFFLLTA

SEQ ID NO: 14528 - protein, 726 aa, synthetic construct; identical to SEQ ID NO: 14391

SEQ ID NO: 14529 - protein, 726 aa, synthetic construct
MALPVTALLLPLALLLHAARPDIVLTQSPATLSLSPGDRATLSCRASESVTILGSHLIYWYQQKPGQAPRLLIQLASNVQTGIPARFSGSGSRTDFTLTISSLEPEDFAVYYCLQSRTIPRTFGQGTKLEIKRLEDLKNVFPPEVAVFEPSEAEISHTQKATLVCLATGFYPDHVELSWWVNGKEVHSGVCTDPQPLKEQPALNDSRYCLSSRLRVSATFWQNPRNHFRCQVQFYGLSENDEWTQDRAKPVTQIVSAEAWGRADDVIKIHWQEKKSNTILGSQEGNTMKTNDTYMKFSWLTVPEKSLDKEHRCIVRHENNKNGVDQEIIFPPIKTDVITMDPKDNCSKDANDTLLLQLTNTSAYYMYLLLLLKSVVYFAIITCCLLMAMVKRKDSRGRAKRSGSGATNFSLLKQAGDVEENPGPTSMDWIWRILFLVGAATGAHSFEQVQLVQSGSELKKPGESVKISCKASGYTFTHYSMNWVRQAPGQGLEWMGRINTETGEPLYADDFKGRFVFSLDTSASTAYLQISSLKAEDTAVYYCSNDYLYSLDYWGQGTLVTVSSTRIQNPDPAVYQLRDSKSSDKSVCLFTDFDSQTNVSQSKDSDVYITDKCVLDMRSMDFKSNSAVAWSNKSDFACANAFNNSIIPEDTFFPSPESSDSTDHVKPKETENTKQPSKSCHKPKAIVHTEKVNMMSLTVLGLRMLFAKTVAVNFLLTAKLFFLLTA

SEQ ID NO: 14530 - protein, 727 aa, synthetic construct
MALPVTALLLPLALLLHAARPDIQLTQSPSFLSASVGDRVTITCRASQGISTDLNWYQQKPGKAPKLLIYAASNLESGVPSRFSGSGSGTEFTLTISSLQPEDFATYYCQQSYNWPYTFGGGTKVEIKRLEDLKNVFPPEVAVFEPSEAEISHTQKATLVCLATGFYPDHVELSWWVNGKEVHSGVCTDPQPLKEQPALNDSRYCLSSRLRVSATFWQNPRNHFRCQVQFYGLSENDEWTQDRAKPVTQIVSAEAWGRADDVIKIHWQEKKSNTILGSQEGNTMKTNDTYMKFSWLTVPEKSLDKEHRCIVRHENNKNGVDQEIIFPPIKTDVITMDPKDNCSKDANDTLLLQLTNTSAYYMYLLLLLKSVVYFAIITCCLLMAMVKRKDSRGRAKRSGSGATNFSLLKQAGDVEENPGPTSMDWIWRILFLVGAATGAHSFEEVQLVESGGGLVKPGGSLRLSCAASGFTFSNFEMNWVRQAPGKGLEWVSGISSNGRYINYADSVKGRFTISRDNAKNSLYLQMNSLRAEDTAVYYCARVVDFDQDYNGFDYWGQGTLVTVSSTRIQNPDPAVYQLRDSKSSDKSVCLFTDFDSQTNVSQSKDSDVYITDKCVLDMRSMDFKSNSAVAWSNKSDFACANAFNNSIIPEDTFFPSPESSDSTDHVKPKETENTKQPSKSCHKPKAIVHTEKVNMMSLTVLGLRMLFAKTVAVNFLLTAKLFFLLTA

SEQ ID NO: 14531 - protein, 725 aa, synthetic construct
MALPVTALLLPLALLLHAARPDIQLTQSPSFLSASVGDRVTITCSLSLGISTWRDWFPPRLGRGLEPLTYAASTLQSGVPSRFSGSGSGTEFTLTISSLQPEDFATYYCQQLNSYPLTFGGGTKVEIKRLEDLKNVFPPEVAVFEPSEAEISHTQKATLVCLATGFYPDHVELSWWVNGKEVHSGVCTDPQPLKEQPALNDSRYCLSSRLRVSATFWQNPRNHFRCQVQFYGLSENDEWTQDRAKPVTQIVSAEAWGRADDVIKIHWQEKKSNTILGSQEGNTMKTNDTYMKFSWLTVPEKSLDKEHRCIVRHENNKNGVDQEIIFPPIKTDVITMDPKDNCSKDANDTLLLQLTNTSAYYMYLLLLLKSVVYFAIITCCLLMAMVKRKDSRGRAKRSGSGATNFSLLKQAGDVEENPGPTSMDWIWRILFLVGAATGAHSFEEVQLVESGGGLVKPGGSLRLSCAASGFTFSTYGMSWVRQAPGKGLEWVAYINNGSGYIYYADSVKGRFTISRDNAKNSLYLQMNSLRAEDTAVYYCARGQWWSGGDFDYWGQGTLVTVSSTRIQNPDPAVYQLRDSKSSDKSVCLFTDFDSQTNVSQSKDSDVYITDKCVLDMRSMDFKSNSAVAWSNKSDFACANAFNNSIIPEDTFFPSPESSDSTDHVKPKETENTKQPSKSCHKPKAIVHTEKVNMMSLTVLGLRMLFAKTVAVNFLLTAKLFFLLTA

SEQ ID NO: 14532 - protein, 726 aa, synthetic construct
MALPVTALLLPLALLLHAARPEIVLTQSPATLSLSPGERATLSCSASSSVSYMYWYQQKPGQAPRLLIYRTSNLASGIPARFSGSGSGTDFTLTISSLEPEDFAVYYCQQYHSYPTTFGQGTKVEIKRTVLEDLKNVFPPEVAVFEPSEAEISHTQKATLVCLATGFYPDHVELSWWVNGKEVHSGVCTDPQPLKEQPALNDSRYCLSSRLRVSATFWQNPRNHFRCQVQFYGLSENDEWTQDRAKPVTQIVSAEAWGRADDVIKIHWQEKKSNTILGSQEGNTMKTNDTYMKFSWLTVPEKSLDKEHRCIVRHENNKNGVDQEIIFPPIKTDVITMDPKDNCSKDANDTLLLQLTNTSAYYMYLLLLLKSVVYFAIITCCLLMAMVKRKDSRGRAKRSGSGATNFSLLKQAGDVEENPGPTSMDWIWRILFLVGAATGAHSFEEVQLVESGGGLVQPGGSLRLSCAASGFSFNTYAMNWVRQAPGKGLEWVSHIRSKSNNFATYYADSVKDRFTISRDNAKNSLYLQMNSLRAEDTAVYYCARQGGDFPMDYWGQGTLVTVSSTRIQNPDPAVYQLRDSKSSDKSVCLFTDFDSQTNVSQSKDSDVYITDKCVLDMRSMDFKSNSAVAWSNKSDFACANAFNNSIIPEDTFFPSPESSDSTDHVKPKETENTKQPSKSCHKPKAIVHTEKVNMMSLTVLGLRMLFAKTVAVNFLLTAKLFFLLTA

SEQ ID NO: 14533 - protein, 722 aa, synthetic construct
MALPVTALLLPLALLLHAARPDVVMTQSPSSLSASVGDRVTITCKASEDIYIRLAWYQQKPGKAPKLLIYAATSLETGVPSRFSGSGSGTDFTLTISSLQPEDFATYYCQQYWTTPWTFGGGTKVEIKLEDLKNVFPPEVAVFEPSEAEISHTQKATLVCLATGFYPDHVELSWWVNGKEVHSGVCTDPQPLKEQPALNDSRYCLSSRLRVSATFWQNPRNHFRCQVQFYGLSENDEWTQDRAKPVTQIVSAEAWGRADDVIKIHWQEKKSNTILGSQEGNTMKTNDTYMKFSWLTVPEKSLDKEHRCIVRHENNKNGVDQEIIFPPIKTDVITMDPKDNCSKDANDTLLLQLTNTSAYYMYLLLLLKSVVYFAIITCCLLMAMVKRKDSRGRAKRSGSGATNFSLLKQAGDVEENPGPTSMDWIWRILFLVGAATGAHSFEQVQLQESGPGLVKPSQTLSLTCTVSGYSITIDYTWNWIRQPPGKGLEWIGYITYSGSTDYNPSLKSRVLISVDTSKNQVSLKLSSVTAADTAVYYCARLGRRYALDYWGQGTTVTVSSTRIQNPDPAVYQLRDSKSSDKSVCLFTDFDSQTNVSQSKDSDVYITDKCVLDMRSMDFKSNSAVAWSNKSDFACANAFNNSIIPEDTFFPSPESSDSTDHVKPKETENTKQPSKSCHKPKAIVHTEKVNMMSLTVLGLRMLFAKTVAVNFLLTAKLFFLLTA

SEQ ID NO: 14534 - protein, 727 aa, synthetic construct
MALPVTALLLPLALLLHAARPDIQMTQTTSSLSASLGDRVTISCRASQDISNYLNWYQQKPDGTVKLLIYYTSILHSGVPSRFSGSGSGTDYSLTISNLEQEDFATYFCQQGNTLPWTFGGGTKLEIKALEDLKNVFPPEVAVFEPSEAEISHTQKATLVCLATGFYPDHVELSWWVNGKEVHSGVCTDPQPLKEQPALNDSRYCLSSRLRVSATFWQNPRNHFRCQVQFYGLSENDEWTQDRAKPVTQIVSAEAWGRADDVIKIHWQEKKSNTILGSQEGNTMKTNDTYMKFSWLTVPEKSLDKEHRCIVRHENNKNGVDQEIIFPPIKTDVITMDPKDNCSKDANDTLLLQLTNTSAYYMYLLLLLKSVVYFAIITCCLLMAMVKRKDSRGRAKRSGSGATNFSLLKQAGDVEENPGPTSMDWIWRILFLVGAATGAHSFEEVQLVESGGGLVKPGGSLKLSCAASGFAFSIYDMSWVRQTPEKRLEWVAYISSGGGTYYPDTVKGRFTISRDNAKNTLYLQMSSLKSEDTAMYYCARHSGYGTHWGVLFAYWGQGTLVTVSATRIQNPDPAVYQLRDSKSSDKSVCLFTDFDSQTNVSQSKDSDVYITDKCVLDMRSMDFKSNSAVAWSNKSDFACANAFNNSIIPEDTFFPSPESSDSTDHVKPKETENTKQPSKSCHKPKAIVHTEKVNMMSLTVLGLRMLFAKTVAVNFLLTAKLFFLLTA

SEQ ID NO: 14535 - protein, 737 aa, synthetic construct
MALPVTALLLPLALLLHAARPDIVMTQSPDSLAVSLGERATINCKSSQSLLYRSNQKNYLAWYQQKPGQPPKLLIYWASTRESGVPDRFSGSGSGTDFTLTISSLQAEDVAVYYCQQYYNYPRTFGQGTKVEIKRTVLEDLKNVFPPEVAVFEPSEAEISHTQKATLVCLATGFYPDHVELSWWVNGKEVHSGVCTDPQPLKEQPALNDSRYCLSSRLRVSATFWQNPRNHFRCQVQFYGLSENDEWTQDRAKPVTQIVSAEAWGRADDVIKIHWQEKKSNTILGSQEGNTMKTNDTYMKFSWLTVPEKSLDKEHRCIVRHENNKNGVDQEIIFPPIKTDVITMDPKDNCSKDANDTLLLQLTNTSAYYMYLLLLLKSVVYFAIITCCLLMAMVKRKDSRGRAKRSGSGATNFSLLKQAGDVEENPGPTSMDWIWRILFLVGAATGAHSFEEVQLLESGGGLVQPGGSLRLSCAASGYSITSDYAWNWVRQAPGKGLEWVSYISNSGSTSYNPSLKSRFTISRDNSKNTLYLQMNSLRAEDTAVYYCAKERNYDYDDYYYAMDYWGQGTLVTVSSTRIQNPDPAVYQLRDSKSSDKSVCLFTDFDSQTNVSQSKDSDVYITDKCVLDMRSMDFKSNSAVAWSNKSDFACANAFNNSIIPEDTFFPSPESSDSTDHVKPKETENTKQPSKSCHKPKAIVHTEKVNMMSLTVLGLRMLFAKTVAVNFLLTAKLFFLLTA

SEQ ID NO: 14536 - protein, 730 aa, synthetic construct
MALPVTALLLPLALLLHAARPDVVMTQSPLSLPVTLGQPASISCRSSQSLLHSSGNTYLEWYQQRPGQSPRPLIYKISTRFSGVPDRFSGSGSGTDFTLKISRVEAEDVGVYYCFQGSHVPYTFGGGTKVEIKRLEDLKNVFPPEVAVFEPSEAEISHTQKATLVCLATGFYPDHVELSWWVNGKEVHSGVCTDPQPLKEQPALNDSRYCLSSRLRVSATFWQNPRNHFRCQVQFYGLSENDEWTQDRAKPVTQIVSAEAWGRADDVIKIHWQEKKSNTILGSQEGNTMKTNDTYMKFSWLTVPEKSLDKEHRCIVRHENNKNGVDQEIIFPPIKTDVITMDPKDNCSKDANDTLLLQLTNTSAYYMYLLLLLKSVVYFAIITCCLLMAMVKRKDSRGRAKRSGSGATNFSLLKQAGDVEENPGPTSMDWIWRILFLVGAATGAHSFEQVQLVQSGAEVKKPGASVKVSCKASGLTIEDYYMHWVRQAPGQGLEWMGWIDPENGDTEYGPKFQGRVTMTRDTSINTAYMELSRLRSDDTAVYYCAVHNAHYGTWFAYWGQGTLVTVSSTRIQNPDPAVYQLRDSKSSDKSVCLFTDFDSQTNVSQSKDSDVYITDKCVLDMRSMDFKSNSAVAWSNKSDFACANAFNNSIIPEDTFFPSPESSDSTDHVKPKETENTKQPSKSCHKPKAIVHTEKVNMMSLTVLGLRMLFAKTVAVNFLLTAKLFFLLTA

SEQ ID NO: 14537 - protein, 722 aa, synthetic construct
MALPVTALLLPLALLLHAARPDIQMTQSPSSLSASVGDRVTITCRASENIYSNLAWYQQKPGKAPKLLIYAATNLADGVPSRFSGSGSGTDFTLTISSLQPEDFATYYCQHFWGTPTFGQGTKVEIKRTVLEDLKNVFPPEVAVFEPSEAEISHTQKATLVCLATGFYPDHVELSWWVNGKEVHSGVCTDPQPLKEQPALNDSRYCLSSRLRVSATFWQNPRNHFRCQVQFYGLSENDEWTQDRAKPVTQIVSAEAWGRADDVIKIHWQEKKSNTILGSQEGNTMKTNDTYMKFSWLTVPEKSLDKEHRCIVRHENNKNGVDQEIIFPPIKTDVITMDPKDNCSKDANDTLLLQLTNTSAYYMYLLLLLKSVVYFAIITCCLLMAMVKRKDSRGRAKRSGSGATNFSLLKQAGDVEENPGPTSMDWIWRILFLVGAATGAHSFEEVQLVESGGGLVQPGGSLRLSCAASGFSLTNYGVHWVRQAPGKGLEWVSVIWSGGSTDYNAAFISRFTISADTSKNTAYLQMNSLRAEDTAVYYCARELIHAMDNWGQGTLVTVSSTRIQNPDPAVYQLRDSKSSDKSVCLFTDFDSQTNVSQSKDSDVYITDKCVLDMRSMDFKSNSAVAWSNKSDFACANAFNNSIIPEDTFFPSPESSDSTDHVKPKETENTKQPSKSCHKPKAIVHTEKVNMMSLTVLGLRMLFAKTVAVNFLLTAKLFFLLTA

SEQ ID NO: 14538 - protein, 729 aa, synthetic construct
MALPVTALLLPLALLLHAARPDFVMTQSPLSLPVTPGEPASISCRSSQSIVHSNGNTYLEWYLQKPGQSPQLLIYKVSNRFSGVPDRFSGSGSGTDFTLKISRVEAEDVGVYYCFQGSHVPLTFGQGTKLEIKRLEDLKNVFPPEVAVFEPSEAEISHTQKATLVCLATGFYPDHVELSWWVNGKEVHSGVCTDPQPLKEQPALNDSRYCLSSRLRVSATFWQNPRNHFRCQVQFYGLSENDEWTQDRAKPVTQIVSAEAWGRADDVIKIHWQEKKSNTILGSQEGNTMKTNDTYMKFSWLTVPEKSLDKEHRCIVRHENNKNGVDQEIIFPPIKTDVITMDPKDNCSKDANDTLLLQLTNTSAYYMYLLLLLKSVVYFAIITCCLLMAMVKRKDSRGRAKRSGSGATNFSLLKQAGDVEENPGPTSMDWIWRILFLVGAATGAHSFEEVQLVESGAEVKKPGASVKVSCKASGYTFTSYWIHWVRQAPGQGLEWMGENDPSNGRTNYNEKFKNRVTLTVDTSISTAYMELSRLRSDDTAVYYCARGPNYFYSMDYWGQGTMVTVSSTRIQNPDPAVYQLRDSKSSDKSVCLFTDFDSQTNVSQSKDSDVYITDKCVLDMRSMDFKSNSAVAWSNKSDFACANAFNNSIIPEDTFFPSPESSDSTDHVKPKETENTKQPSKSCHKPKAIVHTEKVNMMSLTVLGLRMLFAKTVAVNFLLTAKLFFLLTA

SEQ ID NO: 14539 - protein, 722 aa, synthetic construct
MALPVTALLLPLALLLHAARPDIQLTQSPSFLSASVGDRVTITCSARSSISFMYWYQQKPGKAPKLLIYDTSNLASGVPSRFSGSGSGTEFTLTISSLEAEDAATYYCQQWSSYPLTFGQGTKLEIKLEDLKNVFPPEVAVFEPSEAEISHTQKATLVCLATGFYPDHVELSWWVNGKEVHSGVCTDPQPLKEQPALNDSRYCLSSRLRVSATFWQNPRNHFRCQVQFYGLSENDEWTQDRAKPVTQIVSAEAWGRADDVIKIHWQEKKSNTILGSQEGNTMKTNDTYMKFSWLTVPEKSLDKEHRCIVRHENNKNGVDQEIIFPPIKTDVITMDPKDNCSKDANDTLLLQLTNTSAYYMYLLLLLKSVVYFAIITCCLLMAMVKRKDSRGRAKRSGSGATNFSLLKQAGDVEENPGPTSMDWIWRILFLVGAATGAHSFEQVQLVQSGAEVKKPGASVKVSCKASGYTFTGSWMNWVRQAPGQGLEWIGRIYPGDGETNYNGKFKDRVTITADKSTSTAYMELSSLRSEDTAVYYCARIYGNNVYFDVWGQGTTVTVSSTRIQNPDPAVYQLRDSKSSDKSVCLFTDFDSQTNVSQSKDSDVYITDKCVLDMRSMDFKSNSAVAWSNKSDFACANAFNNSIIPEDTFFPSPESSDSTDHVKPKETENTKQPSKSCHKPKAIVHTEKVNMMSLTVLGLRMLFAKTVAVNFLLTAKLFFLLTA

SEQ ID NO: 14540 - protein, 730 aa, synthetic construct
MALPVTALLLPLALLLHAARPQLVLTQSPSASASLGSSVKLTCTLSSGHKTDTIDWYQQQPGKAPRYLMKLEGSGSYNKGSGVPDRFSGSSSGADWYLTISSLQSEDEADYYCGTDYPGNYLFGGGTQLTVLGLEDLKNVFPPEVAVFEPSEAEISHTQKATLVCLATGFYPDHVELSWWVNGKEVHSGVCTDPQPLKEQPALNDSRYCLSSRLRVSATFWQNPRNHFRCQVQFYGLSENDEWTQDRAKPVTQIVSAEAWGRADDVIKIHWQEKKSNTILGSQEGNTMKTNDTYMKFSWLTVPEKSLDKEHRCIVRHENNKNGVDQEIIFPPIKTDVITMDPKDNCSKDANDTLLLQLTNTSAYYMYLLLLLKSVVYFAIITCCLLMAMVKRKDSRGRAKRSGSGATNFSLLKQAGDVEENPGPTSMDWIWRILFLVGAATGAHSFEQEQLVESGGGLVQPGGSLRLSCAASGFTFSDYYMSWIRQAPGKGLEWVATIYPSSGKTYYADSAKGRLTISSDNAKDSLYLQMNSLRAEDTAVYYCTRDSYADDAALFDIWGQGTTVTVSSTRIQNPDPAVYQLRDSKSSDKSVCLFTDFDSQTNVSQSKDSDVYITDKCVLDMRSMDFKSNSAVAWSNKSDFACANAFNNSIIPEDTFFPSPESSDSTDHVKPKETENTKQPSKSCHKPKAIVHTEKVNMMSLTVLGLRMLFAKTVAVNFLLTAKLFFLLTA

SEQ ID NO: 14541 - protein, 722 aa, synthetic construct; identical to SEQ ID NO: 14537

SEQ ID NO: 14542 - protein, 729 aa, synthetic construct; identical to SEQ ID NO: 14538

SEQ ID NO: 14543 - protein, 722 aa, synthetic construct; identical to SEQ ID NO: 14539

SEQ ID NO: 14544 - protein, 730 aa, synthetic construct; identical to SEQ ID NO: 14540

SEQ ID NO: 14545 - protein, 729 aa, synthetic construct
MALPVTALLLPLALLLHAARPDIQLTQSPSSLSASVGDRVSFTCQASQDINNFLNWYQQKPGKAPKLLIYDASNLETGVPSRFSGSGSGTDFTFTISSLQPEDIATYYCQQYGNLPFTFGGGTKVEIKRLEDLKNVFPPEVAVFEPSEAEISHTQKATLVCLATGFYPDHVELSWWVNGKEVHSGVCTDPQPLKEQPALNDSRYCLSSRLRVSATFWQNPRNHFRCQVQFYGLSENDEWTQDRAKPVTQIVSAEAWGRADDVIKIHWQEKKSNTILGSQEGNTMKTNDTYMKFSWLTVPEKSLDKEHRCIVRHENNKNGVDQEIIFPPIKTDVITMDPKDNCSKDANDTLLLQLTNTSAYYMYLLLLLKSVVYFAIITCCLLMAMVKRKDSRGRAKRSGSGATNFSLLKQAGDVEENPGPTSMDWIWRILFLVGAATGAHSFEQVQLQESGPGLVKPSQTLSLTCTVSGGSISSGGFYWSWIRQHPGKGLEWIGYIHHSGSTHYNPSLKSRVTISIDTSKNLFSLRLSSVTAADTAVYYCASLVYCGGDCYSGFDYWGQGTLVTVSSTRIQNPDPAVYQLRDSKSSDKSVCLFTDFDSQTNVSQSKDSDVYITDKCVLDMRSMDFKSNSAVAWSNKSDFACANAFNNSIIPEDTFFPSPESSDSTDHVKPKETENTKQPSKSCHKPKAIVHTEKVNMMSLTVLGLRMLFAKTVAVNFLLTAKLFFLLTA

SEQ ID NO: 14546 - protein, 725 aa, synthetic construct
MALPVTALLLPLALLLHAARPDIQMTQSPSSLSASVGDRVTITCKSSQSVLYSSNQKNYLAWFQQKPGKAPKLLIYWASTRESGVPSRFSGSGSGTDFTLTISSLQPEDFATYFCHQYLSSYTFGQGTKVEIKRLEDLKNVFPPEVAVFEPSEAEISHTQKATLVCLATGFYPDHVELSWWVNGKEVHSGVCTDPQPLKEQPALNDSRYCLSSRLRVSATFWQNPRNHFRCQVQFYGLSENDEWTQDRAKPVTQIVSAEAWGRADDVIKIHWQEKKSNTILGSQEGNTMKTNDTYMKFSWLTVPEKSLDKEHRCIVRHENNKNGVDQEIIFPPIKTDVITMDPKDNCSKDANDTLLLQLTNTSAYYMYLLLLLKSVVYFAIITCCLLMAMVKRKDSRGRAKRSGSGATNFSLLKQAGDVEENPGPTSMDWIWRILFLVGAATGAHSFEEVQLVESGGGLVQPGGSLRLSCAASGYTFTTYWMHWVRQAPGKGLEWVGYIRPSTGYTEYNQKFKDRFTISADTSKNTAYLQMNSLRAEDTAVYYCARSRWLLDYWGQGTLVTVSTRIQNPDPAVYQLRDSKSSDKSVCLFTDFDSQTNVSQSKDSDVYITDKCVLDMRSMDFKSNSAVAWSNKSDFACANAFNNSIIPEDTFFPSPESSDSTDHVKPKETENTKQPSKSCHKPKAIVHTEKVNMMSLTVLGLRMLFAKTVAVNFLLTAKLFFLLTA

SEQ ID NO: 14547 - protein, 722 aa, synthetic construct
MALPVTALLLPLALLLHAARPDIQMTQSPSSLSASVGDRVTITCRASQDISNYLNWYQQKPGKAPKLLIYYTSRLHSGVPSRFSGSGSGTDFTLTISSLQPEDFATYYCQQGNTLPYTFGQGTKVEIKRLEDLKNVFPPEVAVFEPSEAEISHTQKATLVCLATGFYPDHVELSWWVNGKEVHSGVCTDPQPLKEQPALNDSRYCLSSRLRVSATFWQNPRNHFRCQVQFYGLSENDEWTQDRAKPVTQIVSAEAWGRADDVIKIHWQEKKSNTILGSQEGNTMKTNDTYMKFSWLTVPEKSLDKEHRCIVRHENNKNGVDQEIIFPPIKTDVITMDPKDNCSKDANDTLLLQLTNTSAYYMYLLLLLKSVVYFAIITCCLLMAMVKRKDSRGRAKRSGSGATNFSLLKQAGDVEENPGPTSMDWIWRILFLVGAATGAHSFEEVQLVESGGGLVQPGGSLRLSCAASGFTFSDYFMSWVRQAPGKGLEWVATISNGGTYTYYPDSVKGRFTISRDNSKNTLYLQMNSLRAEDTAVYYCARFDGYIFDYWGQGTLVTVSSTRIQNPDPAVYQLRDSKSSDKSVCLFTDFDSQTNVSQSKDSDVYITDKCVLDMRSMDFKSNSAVAWSNKSDFACANAFNNSIIPEDTFFPSPESSDSTDHVKPKETENTKQPSKSCHKPKAIVHTEKVNMMSLTVLGLRMLFAKTVAVNFLLTAKLFFLLTA

SEQ ID NO: 14548 - protein, 727 aa, synthetic construct
MALPVTALLLPLALLLHAARPDIQMTQTTSSLSASLGDRVTISCRASQDISKYLNWYQQKPDGTVKLLIYHTSRLHSGVPSRFSGSGSGTDYSLTISNLEQEDIATYFCQQGNTLPYTFGGGTKLEITLEIQNPDPAVYQLRDSKSSDKSVCLFTDFDSQTNVSQSKDSDVYITDKCVLDMRSMDFKSNSAVAWSNKSDFACANAFNNSIIPEDTFFPSPESSDSTDHVKPKETENTKQPSKSCHKPKAIVHTEKVNMMSLTVLGLRMLFAKTVAVNFLLTAKLFFLLTARAKRSGSGVKQTLNFDLLKLAGDVESNPGPTSMDWIWRILFLVGAATGAHSFEVKLQESGPGLVAPSQSLSVTCTVSGVSLPDYGVSWIRQPPRKGLEWLGVIWGSETTYYNSALKSRLTIIKDNSKSQVFLKMNSLQTDDTAIYYCAKHYYYGGSYAMDYWGQGTSVTVSSTREDLKNVFPPEVAVFEPSEAEISHTQKATLVCLATGFYPDHVELSWWVNGKEVHSGVCTDPQPLKEQPALNDSRYCLSSRLRVSATFWQNPRNHFRCQVQFYGLSENDEWTQDRAKPVTQIVSAEAWGRADDVIKIHWQEKKSNTILGSQEGNTMKTNDTYMKFSWLTVPEKSLDKEHRCIVRHENNKNGVDQEIIFPPIKTDVITMDPKDNCSKDANDTLLLQLTNTSAYYMYLLLLLKSVVYFAIITCCLLMAMVKRKDSRG

SEQ ID NO: 14549 - protein, 728 aa, synthetic construct
MALPVTALLLPLALLLHAARPEIVMTQSPATLSLSPGERATLSCRASQDISKYLNWYQQKPGQAPRLLIYHTSRLHSGIPARFSGSGSGTDYTLTISSLQPEDFAVYFCQQGNTLPYTFGQGTKLEIKLEIQNPDPAVYQLRDSKSSDKSVCLFTDFDSQTNVSQSKDSDVYITDKCVLDMRSMDFKSNSAVAWSNKSDFACANAFNNSIIPEDTFFPSPESSDSTDHVKPKETENTKQPSKSCHKPKAIVHTEKVNMMSLTVLGLRMLFAKTVAVNFLLTAKLFFLLTARAKRSGSGVKQTLNFDLLKLAGDVESNPGPTSMDWIWRILFLVGAATGAHSFEQVQLQESGPGLVKPSETLSLTCTVSGVSLPDYGVSWIRQPPGKGLEWIGVIWGSETTYYNSSLKSRVTISKDNSKNQVSLKLSSVTAADTAVYYCAKHYYYGGSYAMDYWGQGTLVTVSSTREDLKNVFPPEVAVFEPSEAEISHTQKATLVCLATGFYPDHVELSWWVNGKEVHSGVCTDPQPLKEQPALNDSRYCLSSRLRVSATFWQNPRNHFRCQVQFYGLSENDEWTQDRAKPVTQIVSAEAWGRADDVIKIHWQEKKSNTILGSQEGNTMKTNDTYMKFSWLTVPEKSLDKEHRCIVRHENNKNGVDQEIIFPPIKTDVITMDPKDNCSKDANDTLLLQLTNTSAYYMYLLLLLKSVVYFAIITCCLLMAMVKRKDSRG

SEQ ID NO: 14550 - protein, 729 aa, synthetic construct
MALPVTALLLPLALLLHAARPDEIVLTQSPATLSLSPGERATLSCSASSSVSYMHWYQQKPGQAPRLLIYDTSKLASGIPARFSGSGSGTDFTLTISSLEPEDVAVYYCFQGSVYPFTFGQGTKLEIKRLEIQNPDPAVYQLRDSKSSDKSVCLFTDFDSQTNVSQSKDSDVYITDKCVLDMRSMDFKSNSAVAWSNKSDFACANAFNNSIIPEDTFFPSPESSDSTDHVKPKETENTKQPSKSCHKPKAIVHTEKVNMMSLTVLGLRMLFAKTVAVNFLLTAKLFFLLTARAKRSGSGVKQTLNFDLLKLAGDVESNPGPTSMDWIWRILFLVGAATGAHSFEQVQLQESGPGLVKPSQTLSLTCTVSGGSISTSGMGVGWIRQHPGKGLEWIGHIWWDDDKRYNPALKSRVTISVDTSKNQFSLKLSSVTAADTAVYYCARMELWSYYFDYWGQGTLVTVSSTREDLKNVFPPEVAVFEPSEAEISHTQKATLVCLATGFYPDHVELSWWVNGKEVHSGVCTDPQPLKEQPALNDSRYCLSSRLRVSATFWQNPRNHFRCQVQFYGLSENDEWTQDRAKPVTQIVSAEAWGRADDVIKIHWQEKKSNTILGSQEGNTMKTNDTYMKFSWLTVPEKSLDKEHRCIVRHENNKNGVDQEIIFPPIKTDVITMDPKDNCSKDANDTLLLQLTNTSAYYMYLLLLLKSVVYFAIITCCLLMAMVKRKDSRG

SEQ ID NO: 14551 - protein, 727 aa, synthetic construct
MALPVTALLLPLALLLHAARPDYIHVTQSPSSLSVSIGDRVTINCQTSQGVGSDLHWYQHKPGRAPKLLIHHASSVEDGVPSRFSGTGFHTSFNLTINDLQADDIGTYYCQVLQSFGRGSRLDTKLEIQNPDPAVYQLRDSKSSDKSVCLFTDFDSQTNVSQSKDSDVYITDKCVLDMRSMDFKSNSAVAWSNKSDFACANAFNNSIIPEDTFFPSPESSDSTDHVKPKETENTKQPSKSCHKPKAIVHTEKVNMMSLTVLGLRMLFAKTVAVNFLLTAKLFFLLTARAKRSGSGVKQTLNFDLLKLAGDVESNPGPTSMDWIWRILFLVGAATGAHSFERAHLVQSGTAMKKPGASVRVSCQTSGYTFTAHILFWFRQAPGRGLEWVGWIKPQYGAVNFGGGFRDRVTLTRDVYREIAYMDIRGLKPDDTAVYYCARDRSYGDSSWALDAWGQGTTVVVSATREDLKNVFPPEVAVFEPSEAEISHTQKATLVCLATGFYPDHVELSWWVNGKEVHSGVCTDPQPLKEQPALNDSRYCLSSRLRVSATFWQNPRNHFRCQVQFYGLSENDEWTQDRAKPVTQIVSAEAWGRADDVIKIHWQEKKSNTILGSQEGNTMKTNDTYMKFSWLTVPEKSLDKEHRCIVRHENNKNGVDQEIIFPPIKTDVITMDPKDNCSKDANDTLLLQLTNTSAYYMYLLLLLKSVVYFAIITCCLLMAMVKRKDSRG

SEQ ID NO: 14552 - protein, 737 aa, synthetic construct
MALPVTALLLPLALLLHAARPDVQMIQTPDSLAVSLGQRATISCRASESVDNYGISFMHWYQQKPGQSPKLLIYRASNLESGIPARFSGSGSRTDFTLTINPVETDDVATYYCQQNNKDPPTFGGGTKLEIKLEIQNPDPAVYQLRDSKSSDKSVCLFTDFDSQTNVSQSKDSDVYITDKCVLDMRSMDFKSNSAVAWSNKSDFACANAFNNSIIPEDTFFPSPESSDSTDHVKPKETENTKQPSKSCHKPKAIVHTEKVNMMSLTVLGLRMLFAKTVAVNFLLTAKLFFLLTARAKRSGSGVKQTLNFDLLKLAGDVESNPGPTSMDWIWRILFLVGAATGAHSFEGGGGSQVQLQQSGAELVKPGASVKISCKASGYAFSSYWMNWVKQRPGKGLEWIGQIYPGDGDTTYNGKFKGKATLTADKSSSTVYMQLNSLTSEDSAVYFCVRYYYGSSGYFDYWGQGTTLTVSSTREDLKNVFPPEVAVFEPSEAEISHTQKATLVCLATGFYPDHVELSWWVNGKEVHSGVCTDPQPLKEQPALNDSRYCLSSRLRVSATFWQNPRNHFRCQVQFYGLSENDEWTQDRAKPVTQIVSAEAWGRADDVIKIHWQEKKSNTILGSQEGNTMKTNDTYMKFSWLTVPEKSLDKEHRCIVRHENNKNGVDQEIIFPPIKTDVITMDPKDNCSKDANDTLLLQLTNTSAYYMYLLLLLKSVVYFAIITCCLLMAMVKRKDSRG

SEQ ID NO: 14553 - protein, 728 aa, synthetic construct
MALPVTALLLPLALLLHAARPDVQMIQTPSSLSASLGDRVTISCRASQDIGNYLNWYQQKPDGTVKLLIYYTSRLHSGVPSRFSGSGSGTEYSLTISNLEQEDIATYFCQQGSALPPTFGGGTKLEINLEIQNPDPAVYQLRDSKSSDKSVCLFTDFDSQTNVSQSKDSDVYITDKCVLDMRSMDFKSNSAVAWSNKSDFACANAFNNSIIPEDTFFPSPESSDSTDHVKPKETENTKQPSKSCHKPKAIVHTEKVNMMSLTVLGLRMLFAKTVAVNFLLTAKLFFLLTARAKRSGSGVKQTLNFDLLKLAGDVESNPGPTSMDWIWRILFLVGAATGAHSFEALQLQQSGAELVRPGASVTLSCKASGYTFTDYEMHWVKQTPVHGLEWIGAIDPETGGTAYNQKFEGKAILTADKSSSTAYMELRSLTSEDSPVYYCARRRYYGSSSFDYWGQGTTLTVSSTREDLKNVFPPEVAVFEPSEAEISHTQKATLVCLATGFYPDHVELSWWVNGKEVHSGVCTDPQPLKEQPALNDSRYCLSSRLRVSATFWQNPRNHFRCQVQFYGLSENDEWTQDRAKPVTQIVSAEAWGRADDVIKIHWQEKKSNTILGSQEGNTMKTNDTYMKFSWLTVPEKSLDKEHRCIVRHENNKNGVDQEIIFPPIKTDVITMDPKDNCSKDANDTLLLQLTNTSAYYMYLLLLLKSVVYFAIITCCLLMAMVKRKDSRG

SEQ ID NO: 14554 - protein, 732 aa, synthetic construct
MALPVTALLLPLALLLHAARPDIVLTQSPASLAVSLGQRATISCRASKSVSTSGYSYLHWYQQKPGQPPKLLIYLASNLESGVPARFSGSGSGTDFTLNIHPVEEEDAATYYCQHSRELPFTFGSGTKLEIKLEIQNPDPAVYQLRDSKSSDKSVCLFTDFDSQTNVSQSKDSDVYITDKCVLDMRSMDFKSNSAVAWSNKSDFACANAFNNSIIPEDTFFPSPESSDSTDHVKPKETENTKQPSKSCHKPKAIVHTEKVNMMSLTVLGLRMLFAKTVAVNFLLTAKLFFLLTARAKRSGSGVKQTLNFDLLKLAGDVESNPGPTSMDWIWRILFLVGAATGAHSFEQVQLVESGGGLVQPGGSLKLSCAASGFDFSRYWMSWVRQAPGKGLEWIGEINPTSSTINFTPSLKDKVFISRDNAKNTLYLQMSKVRSEDTALYYCARGNYYRYGDAMDYWGQGTSVTVSTREDLKNVFPPEVAVFEPSEAEISHTQKATLVCLATGFYPDHVELSWWVNGKEVHSGVCTDPQPLKEQPALNDSRYCLSSRLRVSATFWQNPRNHFRCQVQFYGLSENDEWTQDRAKPVTQIVSAEAWGRADDVIKIHWQEKKSNTILGSQEGNTMKTNDTYMKFSWLTVPEKSLDKEHRCIVRHENNKNGVDQEIIFPPIKTDVITMDPKDNCSKDANDTLLLQLTNTSAYYMYLLLLLKSVVYFAIITCCLLMAMVKRKDSRG

SEQ ID NO: 14555 - protein, 730 aa, synthetic construct
MALPVTALLLPLALLLHAARPDIQMTQSPSSLSASVGDRVTITCSASQDISNYLNWYQQKPGKAPKLLIYYTSNLHSGVPSRFSGSGSGTDFTLTISSLQPEDFATYYCQQYRKLPWTFGQGTKLEIKRLEIQNPDPAVYQLRDSKSSDKSVCLFTDFDSQTNVSQSKDSDVYITDKCVLDMRSMDFKSNSAVAWSNKSDFACANAFNNSIIPEDTFFPSPESSDSTDHVKPKETENTKQPSKSCHKPKAIVHTEKVNMMSLTVLGLRMLFAKTVAVNFLLTAKLFFLLTARAKRSGSGVKQTLNFDLLKLAGDVESNPGPTSMDWIWRILFLVGAATGAHSFEQVQLVQSGAEVKKPGSSVKVSCKASGGTFSNYWMHWVRQAPGQGLEWMGATYRGHSDTYYNQKFKGRVTITADKSTSTAYMELSSLRSEDTAVYYCARGAIYDGYDVLDNWGQGTLVTVSSTREDLKNVFPPEVAVFEPSEAEISHTQKATLVCLATGFYPDHVELSWWVNGKEVHSGVCTDPQPLKEQPALNDSRYCLSSRLRVSATFWQNPRNHFRCQVQFYGLSENDEWTQDRAKPVTQIVSAEAWGRADDVIKIHWQEKKSNTILGSQEGNTMKTNDTYMKFSWLTVPEKSLDKEHRCIVRHENNKNGVDQEIIFPPIKTDVITMDPKDNCSKDANDTLLLQLTNTSAYYMYLLLLLKSVVYFAIITCCLLMAMVKRKDSRG

SEQ ID NO: 14556 - protein, 730 aa, synthetic construct
MALPVTALLLPLALLLHAARPDIVLTQSPATLSLSPGDRATISCRASESVTILGSHLIYWYQQKPGQPPRLLIQLASNVQTGVPARFSGSGSRTDFTLTISSVEPEDFAVYYCLQSRTIPRTFGQGTKLEIKRLEIQNPDPAVYQLRDSKSSDKSVCLFTDFDSQTNVSQSKDSDVYITDKCVLDMRSMDFKSNSAVAWSNKSDFACANAFNNSIIPEDTFFPSPESSDSTDHVKPKETENTKQPSKSCHKPKAIVHTEKVNMMSLTVLGLRMLFAKTVAVNFLLTAKLFFLLTARAKRSGSGVKQTLNFDLLKLAGDVESNPGPTSMDWIWRILFLVGAATGAHSFEQVQLVQSGPEVKKPGESVKISCKASGYTFRHYSMNWVKQAPGQGLKWMGRINTESGVPIYADDFKGRFSFTVDTSASTAYLEISSLTSEDTAVYFCSNDYLYSLDFWGQGTTLTVSSTREDLKNVFPPEVAVFEPSEAEISHTQKATLVCLATGFYPDHVELSWWVNGKEVHSGVCTDPQPLKEQPALNDSRYCLSSRLRVSATFWQNPRNHFRCQVQFYGLSENDEWTQDRAKPVTQIVSAEAWGRADDVIKIHWQEKKSNTILGSQEGNTMKTNDTYMKFSWLTVPEKSLDKEHRCIVRHENNKNGVDQEIIFPPIKTDVITMDPKDNCSKDANDTLLLQLTNTSAYYMYLLLLLKSVVYFAIITCCLLMAMVKRKDSRG

SEQ ID NO: 14557 - protein, 731 aa, synthetic construct
MALPVTALLLPLALLLHAARPQSVLTQPPSVSGAPGQRVTISCTGSSSNIGAGFDVHWYQQLPGTAPKLLIYGNSNRPSGVPDRFSGSKSGTSASLAITGLQAEDEADYYCQSYDSSLSGYVFGTGTKVTVLGLEIQNPDPAVYQLRDSKSSDKSVCLFTDFDSQTNVSQSKDSDVYITDKCVLDMRSMDFKSNSAVAWSNKSDFACANAFNNSIIPEDTFFPSPESSDSTDHVKPKETENTKQPSKSCHKPKAIVHTEKVNMMSLTVLGLRMLFAKTVAVNFLLTAKLFFLLTARAKRSGSGVKQTLNFDLLKLAGDVESNPGPTSMDWIWRILFLVGAATGAHSFEQVQLVQSGAEVKKPGASVKVSCKASGYTFTDYYMHWVRQAPGQRLEWMGWINPNSGGTNYAQKFQDRITVTRDTSSNTGYMELTRLRSDDTAVYYCARSPYSGVLDKWGQGTLVTVSSTREDLKNVFPPEVAVFEPSEAEISHTQKATLVCLATGFYPDHVELSWWVNGKEVHSGVCTDPQPLKEQPALNDSRYCLSSRLRVSATFWQNPRNHFRCQVQFYGLSENDEWTQDRAKPVTQIVSAEAWGRADDVIKIHWQEKKSNTILGSQEGNTMKTNDTYMKFSWLTVPEKSLDKEHRCIVRHENNKNGVDQEIIFPPIKTDVITMDPKDNCSKDANDTLLLQLTNTSAYYMYLLLLLKSVVYFAIITCCLLMAMVKRKDSRG

SEQ ID NO: 14558 - protein, 728 aa, synthetic construct
MALPVTALLLPLALLLHAARPQAVLTQPPSASGTPGQRVTISCSGSSSNIGSYTVSWYQQLPGTAPKFLIYSNNQRPSGVPDRFSGSKSGTSASLAISGLQSEDEADYYCAAWDDSLNGYVFGTGTKVTVLGLEIQNPDPAVYQLRDSKSSDKSVCLFTDFDSQTNVSQSKDSDVYITDKCVLDMRSMDFKSNSAVAWSNKSDFACANAFNNSIIPEDTFFPSPESSDSTDHVKPKETENTKQPSKSCHKPKAIVHTEKVNMMSLTVLGLRMLFAKTVAVNFLLTAKLFFLLTARAKRSGSGVKQTLNFDLLKLAGDVESNPGPTSMDWIWRILFLVGAATGAHSFEVQLVQSGAEVKKPGESLKISCKGSGYDFTTYWIGWVRQMPGKGLEWMGIIYPGDSDTRYSPSVRGRVTISADKSINTAYLQWSSLEASDTAMYYCARMWTFSQDGWGQGTLVTVSSTREDLKNVFPPEVAVFEPSEAEISHTQKATLVCLATGFYPDHVELSWWVNGKEVHSGVCTDPQPLKEQPALNDSRYCLSSRLRVSATFWQNPRNHFRCQVQFYGLSENDEWTQDRAKPVTQIVSAEAWGRADDVIKIHWQEKKSNTILGSQEGNTMKTNDTYMKFSWLTVPEKSLDKEHRCIVRHENNKNGVDQEIIFPPIKTDVITMDPKDNCSKDANDTLLLQLTNTSAYYMYLLLLLKSVVYFAIITCCLLMAMVKRKDSRG

SEQ ID NO: 14559 - protein, 731 aa, synthetic construct
MALPVTALLLPLALLLHAARPDIVMTQSPDSLAVSLGERATINCKSSQSILYSSNQKNYLAWYQQKPGQSPKLLIYWASTRESGVPDRFSGSGSGTDFTLTISSLQAEDVAVYYCHQYISSYTFGQGTKLEIKLEIQNPDPAVYQLRDSKSSDKSVCLFTDFDSQTNVSQSKDSDVYITDKCVLDMRSMDFKSNSAVAWSNKSDFACANAFNNSIIPEDTFFPSPESSDSTDHVKPKETENTKQPSKSCHKPKAIVHTEKVNMMSLTVLGLRMLFAKTVAVNFLLTAKLFFLLTARAKRSGSGVKQTLNFDLLKLAGDVESNPGPTSMDWIWRILFLVGAATGAHSFEQVQLVQSGAEVKKPGASVKVSCKASGYTFASQWMHWMRQAPGQGLEWIGWINPGNVNTKYNEKFKGRATLTVDTSTNTAYMELSSLRSEDTAVYYCARSTWYRPLDYWGQGTLVTVSSTREDLKNVFPPEVAVFEPSEAEISHTQKATLVCLATGFYPDHVELSWWVNGKEVHSGVCTDPQPLKEQPALNDSRYCLSSRLRVSATFWQNPRNHFRCQVQFYGLSENDEWTQDRAKPVTQIVSAEAWGRADDVIKIHWQEKKSNTILGSQEGNTMKTNDTYMKFSWLTVPEKSLDKEHRCIVRHENNKNGVDQEIIFPPIKTDVITMDPKDNCSKDANDTLLLQLTNTSAYYMYLLLLLKSVVYFAIITCCLLMAMVKRKDSRG

SEQ ID NO: 14560 - protein, 731 aa, synthetic construct
MALPVTALLLPLALLLHAARPDHIVLTQSPSSLSASLGDRVTISCRASQDISTYLNWYQQKPDGTVKLLIFYTSRLHAGVPSRFSGSGSGTHHSLTISNLEQEDIATYFCQQGNSLPFTFGSGTKLEIKRLEIQNPDPAVYQLRDSKSSDKSVCLFTDFDSQTNVSQSKDSDVYITDKCVLDMRSMDFKSNSAVAWSNKSDFACANAFNNSIIPEDTFFPSPESSDSTDHVKPKETENTKQPSKSCHKPKAIVHTEKVNMMSLTVLGLRMLFAKTVAVNFLLTAKLFFLLTARAKRSGSGVKQTLNFDLLKLAGDVESNPGPTSMDWIWRILFLVGAATGAHSFEQVQLKESGPELEKPGASVKISCKASGYSFTAYSMNWVKQNNGMSLEWIGSIDPYYGDTKYAQKFKGKATLTVDKASSTAYLQLKSLTSEDSAVYYCARRMITTGDWYFDVWGAGTTVTVSSTREDLKNVFPPEVAVFEPSEAEISHTQKATLVCLATGFYPDHVELSWWVNGKEVHSGVCTDPQPLKEQPALNDSRYCLSSRLRVSATFWQNPRNHFRCQVQFYGLSENDEWTQDRAKPVTQIVSAEAWGRADDVIKIHWQEKKSNTILGSQEGNTMKTNDTYMKFSWLTVPEKSLDKEHRCIVRHENNKNGVDQEIIFPPIKTDVITMDPKDNCSKDANDTLLLQLTNTSAYYMYLLLLLKSVVYFAIITCCLLMAMVKRKDSRG

SEQ ID NO: 14561 - protein, 731 aa, synthetic construct; identical to SEQ ID NO: 14560

SEQ ID NO: 14562 - protein, 731 aa, synthetic construct
MALPVTALLLPLALLLHAARPDEIVLTQSPATLSLSPGERATLSCRASQSVSSYLAWYQQKPGQAPRLLIYDASNRATGIPARFSGSGSGTDFTLTISSLEPEDFAVYYCQQRSNWPITFGQGTRLEIKLEIQNPDPAVYQLRDSKSSDKSVCLFTDFDSQTNVSQSKDSDVYITDKCVLDMRSMDFKSNSAVAWSNKSDFACANAFNNSIIPEDTFFPSPESSDSTDHVKPKETENTKQPSKSCHKPKAIVHTEKVNMMSLTVLGLRMLFAKTVAVNFLLTAKLFFLLTARAKRSGSGVKQTLNFDLLKLAGDVESNPGPTSMDWIWRILFLVGAATGAHSFEEVQLVESGGGLVQPGRSLRLSCAASGFTFNDYAMHWVRQAPGKGLEWVSTISWNSGSIGYADSVKGRFTISRDNAKKSLYLQMNSLRAEDTALYYCAKDIQYGNYYYGMDVWGQGTTVTVSSTREDLKNVFPPEVAVFEPSEAEISHTQKATLVCLATGFYPDHVELSWWVNGKEVHSGVCTDPQPLKEQPALNDSRYCLSSRLRVSATFWQNPRNHFRCQVQFYGLSENDEWTQDRAKPVTQIVSAEAWGRADDVIKIHWQEKKSNTILGSQEGNTMKTNDTYMKFSWLTVPEKSLDKEHRCIVRHENNKNGVDQEIIFPPIKTDVITMDPKDNCSKDANDTLLLQLTNTSAYYMYLLLLLKSVVYFAIITCCLLMAMVKRKDSRG

SEQ ID NO: 14563 - protein, 733 aa, synthetic construct
MALPVTALLLPLALLLHAARPDIVMTQTPLSLPVTPGEPASISCRSSKSLLHSNGITYLYWYLQKPGQSPQLLIYQMSNLVSGVPDRFSGSGSGTDFTLKISRVEAEDVGVYYCAQNLELPYTFGGGTKVEIKRLEIQNPDPAVYQLRDSKSSDKSVCLFTDFDSQTNVSQSKDSDVYITDKCVLDMRSMDFKSNSAVAWSNKSDFACANAFNNSIIPEDTFFPSPESSDSTDHVKPKETENTKQPSKSCHKPKAIVHTEKVNMMSLTVLGLRMLFAKTVAVNFLLTAKLFFLLTARAKRSGSGVKQTLNFDLLKLAGDVESNPGPTSMDWIWRILFLVGAATGAHSFEQVQLVQSGAEVKKPGSSVKVSCKASGYAFSYSWINWVRQAPGQGLEWMGRIFPGDGDTDYNGKFKGRVTITADKSTSTAYMELSSLRSEDTAVYYCARNVFDGYWLVYWGQGTLVTVSSTREDLKNVFPPEVAVFEPSEAEISHTQKATLVCLATGFYPDHVELSWWVNGKEVHSGVCTDPQPLKEQPALNDSRYCLSSRLRVSATFWQNPRNHFRCQVQFYGLSENDEWTQDRAKPVTQIVSAEAWGRADDVIKIHWQEKKSNTILGSQEGNTMKTNDTYMKFSWLTVPEKSLDKEHRCIVRHENNKNGVDQEIIFPPIKTDVITMDPKDNCSKDANDTLLLQLTNTSAYYMYLLLLLKSVVYFAIITCCLLMAMVKRKDSRG

SEQ ID NO: 14564 - protein, 734 aa, synthetic construct
MALPVTALLLPLALLLHAARPDIQMTQSPSSLSASVGDRVTITCRSSQSIVHSVGNTFLEWYQQKPGKAPKLLIYKVSNRFSGVPSRFSGSGSGTDFTLTISSLQPEDFATYYCFQGSQFPYTFGQGTKVEIKRLEIQNPDPAVYQLRDSKSSDKSVCLFTDFDSQTNVSQSKDSDVYITDKCVLDMRSMDFKSNSAVAWSNKSDFACANAFNNSIIPEDTFFPSPESSDSTDHVKPKETENTKQPSKSCHKPKAIVHTEKVNMMSLTVLGLRMLFAKTVAVNFLLTAKLFFLLTARAKRSGSGVKQTLNFDLLKLAGDVESNPGPTSMDWIWRILFLVGAATGAHSFEEVQLVESGGGLVQPGGSLRLSCAASGYEFSRSWMNWVRQAPGKGLEWVGRIYPGDGDTNYSGKFKGRFTISADTSKNTAYLQMNSLRAEDTAVYYCARDGSSWDWYFDVWGQGTLVTVSSTREDLKNVFPPEVAVFEPSEAEISHTQKATLVCLATGFYPDHVELSWWVNGKEVHSGVCTDPQPLKEQPALNDSRYCLSSRLRVSATFWQNPRNHFRCQVQFYGLSENDEWTQDRAKPVTQIVSAEAWGRADDVIKIHWQEKKSNTILGSQEGNTMKTNDTYMKFSWLTVPEKSLDKEHRCIVRHENNKNGVDQEIIFPPIKTDVITMDPKDNCSKDANDTLLLQLTNTSAYYMYLLLLLKSVVYFAIITCCLLMAMVKRKDSRG

SEQ ID NO: 14565 - protein, 732 aa, synthetic construct
MALPVTALLLPLALLLHAARPDIQMTQSPSSLSASVGDRVTITCRASQTIWSYLNWYQQRPGKAPNLLIYAASSLQSGVPSRFSGRGSGTDFTLTISSLQAEDFATYYCQQSYSIPQIFGQGTKLEIKLEIQNPDPAVYQLRDSKSSDKSVCLFTDFDSQTNVSQSKDSDVYITDKCVLDMRSMDFKSNSAVAWSNKSDFACANAFNNSIIPEDTFFPSPESSDSTDHVKPKETENTKQPSKSCHKPKAIVHTEKVNMMSLTVLGLRMLFAKTVAVNFLLTAKLFFLLTARAKRSGSGVKQTLNFDLLKLAGDVESNPGPTSMDWIWRILFLVGAATGAHSFEQVQLQQSGPGLVKPSQTLSLTCAISGDSVSSNSAAWNWIRQSPSRGLEWLGRTYYRSKWYNDYAVSVKSRITINPDTSKNQFSLQLNSVTPEDTAVYYCAREVTGDLEDAFDIWGQGTMVTVSSTREDLKNVFPPEVAVFEPSEAEISHTQKATLVCLATGFYPDHVELSWWVNGKEVHSGVCTDPQPLKEQPALNDSRYCLSSRLRVSATFWQNPRNHFRCQVQFYGLSENDEWTQDRAKPVTQIVSAEAWGRADDVIKIHWQEKKSNTILGSQEGNTMKTNDTYMKFSWLTVPEKSLDKEHRCIVRHENNKNGVDQEIIFPPIKTDVITMDPKDNCSKDANDTLLLQLTNTSAYYMYLLLLLKSVVYFAIITCCLLMAMVKRKDSRG

SEQ ID NO: 14566 - protein, 725 aa, synthetic construct
MALPVTALLLPLALLLHAARPDIQMTQSPATIENTSLSASVGDRVTITCRASQGISSWLTWYQQKPEKAPKSLIYAASSLQSGVPSRFSGSGSGTDFTLTISSLQPEDFATYYCQQYDSYPITFGQGTRLEIKLEIQNPDPAVYQLRDSKSSDKSVCLFTDFDSQTNVSQSKDSDVYITDKCVLDMRSMDFKSNSAVAWSNKSDFACANAFNNSIIPEDTFFPSPESSDSTDHVKPKETENTKQPSKSCHKPKAIVHTEKVNMMSLTVLGLRMLFAKTVAVNFLLTAKLFFLLTARAKRSGSGVKQTLNFDLLKLAGDVESNPGPTSMDWIWRILFLVGAATGAHSFEQVQLQQWGAGLLKPSETLSLTCAVYGGSFSAYYWSWIRQPPGKGLEWIGDINHGGGTNYNPSLKSRVTISVDTSKNQFSLKLNSVTAADTAVYYCASLTAYWGQGSLVTVSSTREDLKNVFPPEVAVFEPSEAEISHTQKATLVCLATGFYPDHVELSWWVNGKEVHSGVCTDPQPLKEQPALNDSRYCLSSRLRVSATFWQNPRNHFRCQVQFYGLSENDEWTQDRAKPVTQIVSAEAWGRADDVIKIHWQEKKSNTILGSQEGNTMKTNDTYMKFSWLTVPEKSLDKEHRCIVRHENNKNGVDQEIIFPPIKTDVITMDPKDNCSKDANDTLLLQLTNTSAYYMYLLLLLKSVVYFAIITCCLLMAMVKRKDSRG

SEQ ID NO: 14567 - protein, 730 aa, synthetic construct
MALPVTALLLPLALLLHAARPDEIVLTQSPDSLAVSLGERATINCKASQSVDFDGDSYLNWYQQKPGQPPKVLIYAASTLQSGVPSRFSGSGSGTDFTLTINSLEAEDAATYYCQQSNEDPWTFGGGTKVEIKLEIQNPDPAVYQLRDSKSSDKSVCLFTDFDSQTNVSQSKDSDVYITDKCVLDMRSMDFKSNSAVAWSNKSDFACANAFNNSIIPEDTFFPSPESSDSTDHVKPKETENTKQPSKSCHKPKAIVHTEKVNMMSLTVLGLRMLFAKTVAVNFLLTAKLFFLLTARAKRSGSGVKQTLNFDLLKLAGDVESNPGPTSMDWIWRILFLVGAATGAHSFEQVQLVQSGAEVKKPGASVKVSCKVSGYTFTDYYITWVRQAPGQALEWMGWIYPGSGNTKYSQKFQGRFVFSVDTSASTAYLQLSSLKAEDTAVYYCANYGNYWFAYWGQGTLVTVSSTREDLKNVFPPEVAVFEPSEAEISHTQKATLVCLATGFYPDHVELSWWVNGKEVHSGVCTDPQPLKEQPALNDSRYCLSSRLRVSATFWQNPRNHFRCQVQFYGLSENDEWTQDRAKPVTQIVSAEAWGRADDVIKIHWQEKKSNTILGSQEGNTMKTNDTYMKFSWLTVPEKSLDKEHRCIVRHENNKNGVDQEIIFPPIKTDVITMDPKDNCSKDANDTLLLQLTNTSAYYMYLLLLLKSVVYFAIITCCLLMAMVKRKDSRG

SEQ ID NO: 14568 - protein, 727 aa, synthetic construct
MALPVTALLLPLALLLHAARPDIQMTQSPSSLSASVGDRVTITCRASQGISSWLAWYQQKPEKAPKSLIYAASSLQSGVPSRFSGSGSGTDFTLTISSLQPEDFATYYCQQYNSYPPTFGGGTKVEIKLEIQNPDPAVYQLRDSKSSDKSVCLFTDFDSQTNVSQSKDSDVYITDKCVLDMRSMDFKSNSAVAWSNKSDFACANAFNNSIIPEDTFFPSPESSDSTDHVKPKETENTKQPSKSCHKPKAIVHTEKVNMMSLTVLGLRMLFAKTVAVNFLLTAKLFFLLTARAKRSGSGVKQTLNFDLLKLAGDVESNPGPTSMDWIWRILFLVGAATGAHSFEEVQLVQSGGGLVHPGGSLRLSCAGSGFAFSSSTMHWIRQAPGKGLEWISLIGSGGGIYYGDSVKGRFTISRDNAKNSLYLQMNSLRAEDMAVYYCVRGYFDWVDYFDYWGQGTLVTVSSTREDLKNVFPPEVAVFEPSEAEISHTQKATLVCLATGFYPDHVELSWWVNGKEVHSGVCTDPQPLKEQPALNDSRYCLSSRLRVSATFWQNPRNHFRCQVQFYGLSENDEWTQDRAKPVTQIVSAEAWGRADDVIKIHWQEKKSNTILGSQEGNTMKTNDTYMKFSWLTVPEKSLDKEHRCIVRHENNKNGVDQEIIFPPIKTDVITMDPKDNCSKDANDTLLLQLTNTSAYYMYLLLLLKSVVYFAIITCCLLMAMVKRKDSRG

SEQ ID NO: 14569 - protein, 737 aa, synthetic construct
MALPVTALLLPLALLLHAARPDDIVMTQSPDSLTVSLGERTTINCKSSQSVLDSSKNKNSLAWYQQKPGQPPKLLLSWASTRESGIPDRFSGSGSGTDFTLTIDSLQPEDSATYYCQQSAHFPITFGQGTRLEIKLEIQNPDPAVYQLRDSKSSDKSVCLFTDFDSQTNVSQSKDSDVYITDKCVLDMRSMDFKSNSAVAWSNKSDFACANAFNNSIIPEDTFFPSPESSDSTDHVKPKETENTKQPSKSCHKPKAIVHTEKVNMMSLTVLGLRMLFAKTVAVNFLLTAKLFFLLTARAKRSGSGVKQTLNFDLLKLAGDVESNPGPTSMDWIWRILFLVGAATGAHSFEQVQLVQSGAEVKKPGASVKVSCKASGYTFTNYGMNWVKQAPGQGLKWMGWINTYTGEPTYADDFKGRVTMTSDTSTSTAYLELHNLRSDDTAVYYCARWSWSDGYYVYFDYWGQGTTVTVSSTREDLKNVFPPEVAVFEPSEAEISHTQKATLVCLATGFYPDHVELSWWVNGKEVHSGVCTDPQPLKEQPALNDSRYCLSSRLRVSATFWQNPRNHFRCQVQFYGLSENDEWTQDRAKPVTQIVSAEAWGRADDVIKIHWQEKKSNTILGSQEGNTMKTNDTYMKFSWLTVPEKSLDKEHRCIVRHENNKNGVDQEIIFPPIKTDVITMDPKDNCSKDANDTLLLQLTNTSAYYMYLLLLLKSVVYFAIITCCLLMAMVKRKDSRG

SEQ ID NO: 14570 - protein, 733 aa, synthetic construct
MALPVTALLLPLALLLHAARPDEIVLTQSPGSLAVSPGERVTMSCKSSQSVFFSSSQKNYLAWYQQIPGQSPRLLIYWASTRESGVPDRFTGSGSGTDFTLTISSVQPEDLAIYYCHQYLSSRTFGQGTKLEIKRLEIQNPDPAVYQLRDSKSSDKSVCLFTDFDSQTNVSQSKDSDVYITDKCVLDMRSMDFKSNSAVAWSNKSDFACANAFNNSIIPEDTFFPSPESSDSTDHVKPKETENTKQPSKSCHKPKAIVHTEKVNMMSLTVLGLRMLFAKTVAVNFLLTAKLFFLLTARAKRSGSGVKQTLNFDLLKLAGDVESNPGPTSMDWIWRILFLVGAATGAHSFEQVQLQQPGAEVVKPGASVKMSCKASGYTFTSYYIHWIKQTPGQGLEWVGVIYPGNDDISYNQKFQGKATLTADKSSTTAYMQLSSLTSEDSAVYYCAREVRLRYFDVWGQGTTVTVSSTREDLKNVFPPEVAVFEPSEAEISHTQKATLVCLATGFYPDHVELSWWVNGKEVHSGVCTDPQPLKEQPALNDSRYCLSSRLRVSATFWQNPRNHFRCQVQFYGLSENDEWTQDRAKPVTQIVSAEAWGRADDVIKIHWQEKKSNTILGSQEGNTMKTNDTYMKFSWLTVPEKSLDKEHRCIVRHENNKNGVDQEIIFPPIKTDVITMDPKDNCSKDANDTLLLQLTNTSAYYMYLLLLLKSVVYFAIITCCLLMAMVKRKDSRG

SEQ ID NO: 14571 - protein, 737 aa, synthetic construct
MALPVTALLLPLALLLHAARPDVLLTQSPLSLPVTLGQPASISCRSSQTIVHSNGNTYLEWFQQRPGQSPRLLIYQVSNRFSGVPDRFSGSGSGTDFTLKISRVEAEDVGVYYCFQGSHVPRTFGGGTKVEIKRALEIQNPDPAVYQLRDSKSSDKSVCLFTDFDSQTNVSQSKDSDVYITDKCVLDMRSMDFKSNSAVAWSNKSDFACANAFNNSIIPEDTFFPSPESSDSTDHVKPKETENTKQPSKSCHKPKAIVHTEKVNMMSLTVLGLRMLFAKTVAVNFLLTAKLFFLLTARAKRSGSGVKQTLNFDLLKLAGDVESNPGPTSMDWIWRILFLVGAATGAHSFEQIQLVQSGSELKKPGASVKVSCKASGYTFTNYGMNWVRQAPGQGLKWMGWINTNTGEPKYAEEFKGRFALSLDTSVSTAYLQINSLKAEDTAVYFCARGYGNYARGAWLAYWGQGTLVTVSSTREDLKNVFPPEVAVFEPSEAEISHTQKATLVCLATGFYPDHVELSWWVNGKEVHSGVCTDPQPLKEQPALNDSRYCLSSRLRVSATFWQNPRNHFRCQVQFYGLSENDEWTQDRAKPVTQIVSAEAWGRADDVIKIHWQEKKSNTILGSQEGNTMKTNDTYMKFSWLTVPEKSLDKEHRCIVRHENNKNGVDQEIIFPPIKTDVITMDPKDNCSKDANDTLLLQLTNTSAYYMYLLLLLKSVVYFAIITCCLLMAMVKRKDSRG

SEQ ID NO: 14572 - protein, 722 aa, synthetic construct
MALPVTALLLPLALLLHAARPDEIVLTQSPATLSLSPGERATLSCSASSSINYIYWLQQKPGQAPRILIYLTSNLASGVPARFSGSGSGTDFTLTISSLEPEDFAVYYCLQWSSNPLTFGGGTKVEIKLEIQNPDPAVYQLRDSKSSDKSVCLFTDFDSQTNVSQSKDSDVYITDKCVLDMRSMDFKSNSAVAWSNKSDFACANAFNNSIIPEDTFFPSPESSDSTDHVKPKETENTKQPSKSCHKPKAIVHTEKVNMMSLTVLGLRMLFAKTVAVNFLLTAKLFFLLTARAKRSGSGVKQTLNFDLLKLAGDVESNPGPTSMDWIWRILFLVGAATGAHSFEEVQLVESGGGLVKPGGSLRLSCAASGFTFSSYDMSWVRQAPGKGLEWVSTISSGGSYTYYLDSIKGRFTISRDNAKNSLYLQMNSLRAEDTAVYYCARQGLDYWGRGTLVTVSSTREDLKNVFPPEVAVFEPSEAEISHTQKATLVCLATGFYPDHVELSWWVNGKEVHSGVCTDPQPLKEQPALNDSRYCLSSRLRVSATFWQNPRNHFRCQVQFYGLSENDEWTQDRAKPVTQIVSAEAWGRADDVIKIHWQEKKSNTILGSQEGNTMKTNDTYMKFSWLTVPEKSLDKEHRCIVRHENNKNGVDQEIIFPPIKTDVITMDPKDNCSKDANDTLLLQLTNTSAYYMYLLLLLKSVVYFAIITCCLLMAMVKRKDSRG

SEQ ID NO: 14573 - protein, 731 aa, synthetic construct
MALPVTALLLPLALLLHAARPDIVMTQSPDSLAVSLGERATINCRASKSVSTSGYSFMHWYQQKPGQPPKLLIYLASNLESGVPDRFSGSGSGTDFTLTISSLQAEDVAVYYCQHSREVPWTFGQGTKVEIKRLEIQNPDPAVYQLRDSKSSDKSVCLFTDFDSQTNVSQSKDSDVYITDKCVLDMRSMDFKSNSAVAWSNKSDFACANAFNNSIIPEDTFFPSPESSDSTDHVKPKETENTKQPSKSCHKPKAIVHTEKVNMMSLTVLGLRMLFAKTVAVNFLLTAKLFFLLTARAKRSGSGVKQTLNFDLLKLAGDVESNPGPTSMDWIWRILFLVGAATGAHSFEQVQLVQSGAEVKKPGASVKVSCKASGYTFTNYGMNWVRQAPGQGLEWMGWINTYTGEPTYADAFKGRFAFSLDTSTSTAYLQINSLRSDDTAVYYCARDYGDYGMDYWGQGTTVTVSSTREDLKNVFPPEVAVFEPSEAEISHTQKATLVCLATGFYPDHVELSWWVNGKEVHSGVCTDPQPLKEQPALNDSRYCLSSRLRVSATFWQNPRNHFRCQVQFYGLSENDEWTQDRAKPVTQIVSAEAWGRADDVIKIHWQEKKSNTILGSQEGNTMKTNDTYMKFSWLTVPEKSLDKEHRCIVRHENNKNGVDQEIIFPPIKTDVITMDPKDNCSKDANDTLLLQLTNTSAYYMYLLLLLKSVVYFAIITCCLLMAMVKRKDSRG

SEQ ID NO: 14574 - protein, 727 aa, synthetic construct
MALPVTALLLPLALLLHAARPDIVMTQTPLTLSVTIGQPASISCKSSQSLLDSDGKTYLNWLLQRPGQSPERLIYLVSKLDSGVPDRFTGSGSGTDFTLKISRVEAEDLGVYCCWQGTHFPYTFGGGTKVEIKGLEIQNPDPAVYQLRDSKSSDKSVCLFTDFDSQTNVSQSKDSDVYITDKCVLDMRSMDFKSNSAVAWSNKSDFACANAFNNSIIPEDTFFPSPESSDSTDHVKPKETENTKQPSKSCHKPKAIVHTEKVNMMSLTVLGLRMLFAKTVAVNFLLTAKLFFLLTARAKRSGSGVKQTLNFDLLKLAGDVESNPGPTSMDWIWRILFLVGAATGAHSFEQVQLQQPGAELVRPGASVKLSCKASGYTFTSYWMNWVKQRPGQGLEWIGMIDPSDSETHYNHIFKDKATLTVDKSSSTAYLQLSSLTSEDSAVYYCARNLYLWGQGTSVTVSSTREDLKNVFPPEVAVFEPSEAEISHTQKATLVCLATGFYPDHVELSWWVNGKEVHSGVCTDPQPLKEQPALNDSRYCLSSRLRVSATFWQNPRNHFRCQVQFYGLSENDEWTQDRAKPVTQIVSAEAWGRADDVIKIHWQEKKSNTILGSQEGNTMKTNDTYMKFSWLTVPEKSLDKEHRCIVRHENNKNGVDQEIIFPPIKTDVITMDPKDNCSKDANDTLLLQLTNTSAYYMYLLLLLKSVVYFAIITCCLLMAMVKRKDSRG

SEQ ID NO: 14575 - protein, 735 aa, synthetic construct
MALPVTALLLPLALLLHAARPDIVMTQSPDSLAVSLGERATINCESSQSLLNSGNQKNYLTWYQQKPGQPPKPLIYWASTRESGVPDRFSGSGSGTDFTLTISSLQAEDVAVYYCQNDYSYPYTFGQGTKLEIKRLEIQNPDPAVYQLRDSKSSDKSVCLFTDFDSQTNVSQSKDSDVYITDKCVLDMRSMDFKSNSAVAWSNKSDFACANAFNNSIIPEDTFFPSPESSDSTDHVKPKETENTKQPSKSCHKPKAIVHTEKVNMMSLTVLGLRMLFAKTVAVNFLLTAKLFFLLTARAKRSGSGVKQTLNFDLLKLAGDVESNPGPTSMDWIWRILFLVGAATGAHSFEEVQLVQSGAEVKKPGESLKISCKGSGYSFTDYYMKWARQMPGKGLEWMGDIIPSNGATFYNQKFKGQVTISADKSISTTYLQWSSLKASDTAMYYCARSHLLRASWFAYWGQGTMVTVSSTREDLKNVFPPEVAVFEPSEAEISHTQKATLVCLATGFYPDHVELSWWVNGKEVHSGVCTDPQPLKEQPALNDSRYCLSSRLRVSATFWQNPRNHFRCQVQFYGLSENDEWTQDRAKPVTQIVSAEAWGRADDVIKIHWQEKKSNTILGSQEGNTMKTNDTYMKFSWLTVPEKSLDKEHRCIVRHENNKNGVDQEIIFPPIKTDVITMDPKDNCSKDANDTLLLQLTNTSAYYMYLLLLLKSVVYFAIITCCLLMAMVKRKDSRG

SEQ ID NO: 14576 - protein, 730 aa, synthetic construct
MALPVTALLLPLALLLHAARPDIQMTQSTSSLSASLGDRVTISCSASQGINNYLNWYQQKPDGTVELLIYYTSTLQSGVPSRFSGSGSGTDYSLTISNLEPEDIGTYYCQQYSKLPRTFGGGTKLEIKLEIQNPDPAVYQLRDSKSSDKSVCLFTDFDSQTNVSQSKDSDVYITDKCVLDMRSMDFKSNSAVAWSNKSDFACANAFNNSIIPEDTFFPSPESSDSTDHVKPKETENTKQPSKSCHKPKAIVHTEKVNMMSLTVLGLRMLFAKTVAVNFLLTAKLFFLLTARAKRSGSGVKQTLNFDLLKLAGDVESNPGPTSMDWIWRILFLVGAATGAHSFEQVQLQQSGSELMMPGASVKISCKATGYTFSNYWIEWVKQRPGHGLEWIGEILPGTGRTIYNEKFKGKATFTADISSNTVQMQLSSLTSEDSAVYYCARRDYYGNFYYAMDYWGQGTSVTVSSTREDLKNVFPPEVAVFEPSEAEISHTQKATLVCLATGFYPDHVELSWWVNGKEVHSGVCTDPQPLKEQPALNDSRYCLSSRLRVSATFWQNPRNHFRCQVQFYGLSENDEWTQDRAKPVTQIVSAEAWGRADDVIKIHWQEKKSNTILGSQEGNTMKTNDTYMKFSWLTVPEKSLDKEHRCIVRHENNKNGVDQEIIFPPIKTDVITMDPKDNCSKDANDTLLLQLTNTSAYYMYLLLLLKSVVYFAIITCCLLMAMVKRKDSRG

SEQ ID NO: 14577 - protein, 725 aa, synthetic construct
MALPVTALLLPLALLLHAARPDIQMTQSPASLSVSVGETVTITCRASENIYSNLAWYQQKQGKSPQLLVYAATNLADGVPSRFSGSGSGTQYSLKINSLQSEDFGSYYCQHFWGTWTFGGGTTLEIKLEIQNPDPAVYQLRDSKSSDKSVCLFTDFDSQTNVSQSKDSDVYITDKCVLDMRSMDFKSNSAVAWSNKSDFACANAFNNSIIPEDTFFPSPESSDSTDHVKPKETENTKQPSKSCHKPKAIVHTEKVNMMSLTVLGLRMLFAKTVAVNFLLTAKLFFLLTARAKRSGSGVKQTLNFDLLKLAGDVESNPGPTSMDWIWRILFLVGAATGAHSFEEVQLQQSGPELVKPGASVKMSCKASGYTFTDYYMKWMKQSHGKSLEWIGDINPNNGGTTYNQKFKGKATLTVDKSSSTAYMQLNSLTSEDSAVYYCARDYGYGYFDYWGQGTTLTVSSTREDLKNVFPPEVAVFEPSEAEISHTQKATLVCLATGFYPDHVELSWWVNGKEVHSGVCTDPQPLKEQPALNDSRYCLSSRLRVSATFWQNPRNHFRCQVQFYGLSENDEWTQDRAKPVTQIVSAEAWGRADDVIKIHWQEKKSNTILGSQEGNTMKTNDTYMKFSWLTVPEKSLDKEHRCIVRHENNKNGVDQEIIFPPIKTDVITMDPKDNCSKDANDTLLLQLTNTSAYYMYLLLLLKSVVYFAIITCCLLMAMVKRKDSRG

SEQ ID NO: 14578 - protein, 728 aa, synthetic construct
MALPVTALLLPLALLLHAARPEIVLTQSPGTLSLSPGERATLSCRASQSVGGYLAWYQQKPGQAPRLLIYDASNRATGIPARFSGSGSGTDFTLTISSLEPEDFAVYYCQQRNNWPPMYTFGQGTKLEIKRLEIQNPDPAVYQLRDSKSSDKSVCLFTDFDSQTNVSQSKDSDVYITDKCVLDMRSMDFKSNSAVAWSNKSDFACANAFNNSIIPEDTFFPSPESSDSTDHVKPKETENTKQPSKSCHKPKAIVHTEKVNMMSLTVLGLRMLFAKTVAVNFLLTAKLFFLLTARAKRSGSGVKQTLNFDLLKLAGDVESNPGPTSMDWIWRILFLVGAATGAHSFEQVQLVQSGAEVKKPGSSVKVSCKASGGTFSSYAISWVRQAPGQGLEWMGGIIPILGTANYAQKFQGRVTITADESTSTAYMELSSLRSEDTAVYYCARWGGGAFDIWGQGTMVTVSSTREDLKNVFPPEVAVFEPSEAEISHTQKATLVCLATGFYPDHVELSWWVNGKEVHSGVCTDPQPLKEQPALNDSRYCLSSRLRVSATFWQNPRNHFRCQVQFYGLSENDEWTQDRAKPVTQIVSAEAWGRADDVIKIHWQEKKSNTILGSQEGNTMKTNDTYMKFSWLTVPEKSLDKEHRCIVRHENNKNGVDQEIIFPPIKTDVITMDPKDNCSKDANDTLLLQLTNTSAYYMYLLLLLKSVVYFAIITCCLLMAMVKRKDSRG

SEQ ID NO: 14579 - protein, 723 aa, synthetic construct
MALPVTALLLPLALLLHAARPQIVLTQSPALMSASPGEKVTMTCSASSSVRYMYWYQQKPRSSPKPWIHLTSNLASGVPARFSGSGSGTSYSLTISSMEAEDAATYYCQQWSSHPFTFGSGTKLEIKLEIQNPDPAVYQLRDSKSSDKSVCLFTDFDSQTNVSQSKDSDVYITDKCVLDMRSMDFKSNSAVAWSNKSDFACANAFNNSIIPEDTFFPSPESSDSTDHVKPKETENTKQPSKSCHKPKAIVHTEKVNMMSLTVLGLRMLFAKTVAVNFLLTAKLFFLLTARAKRSGSGVKQTLNFDLLKLAGDVESNPGPTSMDWIWRILFLVGAATGAHSFEDVQLQESGPGLVKPSQSLSLTCTVTGFSITSDYSWNWIRQFPGNKLEWMGYISYSGHTSYNPSLESRISITRDTSKNQFFLQLNSVTTEDTATYYCTRGNWDVVYWGQGTLVTVSATREDLKNVFPPEVAVFEPSEAEISHTQKATLVCLATGFYPDHVELSWWVNGKEVHSGVCTDPQPLKEQPALNDSRYCLSSRLRVSATFWQNPRNHFRCQVQFYGLSENDEWTQDRAKPVTQIVSAEAWGRADDVIKIHWQEKKSNTILGSQEGNTMKTNDTYMKFSWLTVPEKSLDKEHRCIVRHENNKNGVDQEIIFPPIKTDVITMDPKDNCSKDANDTLLLQLTNTSAYYMYLLLLLKSVVYFAIITCCLLMAMVKRKDSRG

SEQ ID NO: 14580 - protein, 733 aa, synthetic construct
MALPVTALLLPLALLLHAARPDVVMTQSPLSLPVTLGQPASISCRSSQSIVHSDGNTYLEWYQQRPGQSPRRLIYKVSNRFSGVPDRFSGSGSGTDFTLKISRVEAEDVGVYYCFQGSHAPWTFGGGTKVEIKLEIQNPDPAVYQLRDSKSSDKSVCLFTDFDSQTNVSQSKDSDVYITDKCVLDMRSMDFKSNSAVAWSNKSDFACANAFNNSIIPEDTFFPSPESSDSTDHVKPKETENTKQPSKSCHKPKAIVHTEKVNMMSLTVLGLRMLFAKTVAVNFLLTAKLFFLLTARAKRSGSGVKQTLNFDLLKLAGDVESNPGPTSMDWIWRILFLVGAATGAHSFEEVQLVESGGGLVQPGGSLRLSCAASGFTFSSYGMHWVRQAPGKGLEWVAYITTRSSTIYYADSVKGRFTISRDNAKNSLYLQMNSLRAEDTAVYYCTREPLTGYYAMDYWGQGTSVTVSSTREDLKNVFPPEVAVFEPSEAEISHTQKATLVCLATGFYPDHVELSWWVNGKEVHSGVCTDPQPLKEQPALNDSRYCLSSRLRVSATFWQNPRNHFRCQVQFYGLSENDEWTQDRAKPVTQIVSAEAWGRADDVIKIHWQEKKSNTILGSQEGNTMKTNDTYMKFSWLTVPEKSLDKEHRCIVRHENNKNGVDQEIIFPPIKTDVITMDPKDNCSKDANDTLLLQLTNTSAYYMYLLLLLKSVVYFAIITCCLLMAMVKRKDSRG

SEQ ID NO: 14581 - protein, 725 aa, synthetic construct
MALPVTALLLPLALLLHAARPDIQMTQSPSSLSASVGDRVTITCRASQSISLWLNWYQQKPGKAPKLLIYAASTLQSGVPSRFSGSGSGTDFTLTISSLQPEDFATYYCQQYYTSPYTFGQGTKVEIKRLEIQNPDPAVYQLRDSKSSDKSVCLFTDFDSQTNVSQSKDSDVYITDKCVLDMRSMDFKSNSAVAWSNKSDFACANAFNNSIIPEDTFFPSPESSDSTDHVKPKETENTKQPSKSCHKPKAIVHTEKVNMMSLTVLGLRMLFAKTVAVNFLLTAKLFFLLTARAKRSGSGVKQTLNFDLLKLAGDVESNPGPTSMDWIWRILFLVGAATGAHSFEQVQLLESGGGLVQPGGSLRLSCAASGFTFSSYAMSWVRQAPGKGLEWVSVIRSSGSSTYYADSVKGRFTISRDNSKNTLYLQMNSLRAEDTAVYYCARGGGYFDYWGQGTLVTVSSTREDLKNVFPPEVAVFEPSEAEISHTQKATLVCLATGFYPDHVELSWWVNGKEVHSGVCTDPQPLKEQPALNDSRYCLSSRLRVSATFWQNPRNHFRCQVQFYGLSENDEWTQDRAKPVTQIVSAEAWGRADDVIKIHWQEKKSNTILGSQEGNTMKTNDTYMKFSWLTVPEKSLDKEHRCIVRHENNKNGVDQEIIFPPIKTDVITMDPKDNCSKDANDTLLLQLTNTSAYYMYLLLLLKSVVYFAIITCCLLMAMVKRKDSRG

SEQ ID NO: 14582 - protein, 728 aa, synthetic construct
MALPVTALLLPLALLLHAARPDIQMTQSPSSLSASVGDRVTITCRASQSISSYLNWYQQKPGKAPKLLIYAVSTLQSGVPSRFSGSGSGTDFTLTISSLQPEDFATYYCQQSGTFPPTTFGQGTKVEIKRLEIQNPDPAVYQLRDSKSSDKSVCLFTDFDSQTNVSQSKDSDVYITDKCVLDMRSMDFKSNSAVAWSNKSDFACANAFNNSIIPEDTFFPSPESSDSTDHVKPKETENTKQPSKSCHKPKAIVHTEKVNMMSLTVLGLRMLFAKTVAVNFLLTAKLFFLLTARAKRSGSGVKQTLNFDLLKLAGDVESNPGPTSMDWIWRILFLVGAATGAHSFEQVQLLESGGGLVQPGGSLRLSCAASGFTFSSHGMHWVRQAPGKGLEWVSVISGSGSNTGYADSVKGRFTISRDNSKNTLYLQMNSLRAEDTAVYYCARQWGSYAFDSWGQGTLVTVSSTREDLKNVFPPEVAVFEPSEAEISHTQKATLVCLATGFYPDHVELSWWVNGKEVHSGVCTDPQPLKEQPALNDSRYCLSSRLRVSATFWQNPRNHFRCQVQFYGLSENDEWTQDRAKPVTQIVSAEAWGRADDVIKIHWQEKKSNTILGSQEGNTMKTNDTYMKFSWLTVPEKSLDKEHRCIVRHENNKNGVDQEIIFPPIKTDVITMDPKDNCSKDANDTLLLQLTNTSAYYMYLLLLLKSVVYFAIITCCLLMAMVKRKDSRG

SEQ ID NO: 14583 - protein, 738 aa, synthetic construct
MALPVTALLLPLALLLHAARPDIVMSQSPSSLAVSVGEKVTMSCKSSQSLLHSSNQKNYLAWYQQKPGQSPKVLIYWASTRESGVPDRFTGSGSGTDFTLTITSVKSEDLAVYYCQQYYSYPWTFGGGTRLEIKRLEIQNPDPAVYQLRDSKSSDKSVCLFTDFDSQTNVSQSKDSDVYITDKCVLDMRSMDFKSNSAVAWSNKSDFACANAFNNSIIPEDTFFPSPESSDSTDHVKPKETENTKQPSKSCHKPKAIVHTEKVNMMSLTVLGLRMLFAKTVAVNFLLTAKLFFLLTARAKRSGSGVKQTLNFDLLKLAGDVESNPGPTSMDWIWRILFLVGAATGAHSFEEVQLQQSVAELVKPGASVKMSCKVSGYTLTDHTIHWMKQRPEQGLEWIGYIYPRDGITGYNEKFKGKATLTADTSSSTAYMQLNSLTSEDSAVYFCARWGYSYRNYAYYYDYWGQGTTLTVSSTREDLKNVFPPEVAVFEPSEAEISHTQKATLVCLATGFYPDHVELSWWVNGKEVHSGVCTDPQPLKEQPALNDSRYCLSSRLRVSATFWQNPRNHFRCQVQFYGLSENDEWTQDRAKPVTQIVSAEAWGRADDVIKIHWQEKKSNTILGSQEGNTMKTNDTYMKFSWLTVPEKSLDKEHRCIVRHENNKNGVDQEIIFPPIKTDVITMDPKDNCSKDANDTLLLQLTNTSAYYMYLLLLLKSVVYFAIITCCLLMAMVKRKDSRG

SEQ ID NO: 14584 - protein, 735 aa, synthetic construct
MALPVTALLLPLALLLHAARPEIVLTQSPGTLSLSPGERATLSCRASQSVSSSYLAWYQQKPGQAPRLLIYGTSSRATGIPDRFSGSGSGTDFTLTISRLEPEDFAVYYCQQYGSSPFTFGGGTKVEIKRLEIQNPDPAVYQLRDSKSSDKSVCLFTDFDSQTNVSQSKDSDVYITDKCVLDMRSMDFKSNSAVAWSNKSDFACANAFNNSIIPEDTFFPSPESSDSTDHVKPKETENTKQPSKSCHKPKAIVHTEKVNMMSLTVLGLRMLFAKTVAVNFLLTAKLFFLLTARAKRSGSGVKQTLNFDLLKLAGDVESNPGPTSMDWIWRILFLVGAATGAHSFEQVQLQESGPGLAKPSETLSLTCTVSGDSITSYYWSWIRQPPGKGLEWIGYIYYSGSTNYNPSLKSRVTISVDTSKNQFSLKLSSVTAADTAVYYCARDQRRIAAAGTHFYGMDVWGQGTTVTVSSTREDLKNVFPPEVAVFEPSEAEISHTQKATLVCLATGFYPDHVELSWWVNGKEVHSGVCTDPQPLKEQPALNDSRYCLSSRLRVSATFWQNPRNHFRCQVQFYGLSENDEWTQDRAKPVTQIVSAEAWGRADDVIKIHWQEKKSNTILGSQEGNTMKTNDTYMKFSWLTVPEKSLDKEHRCIVRHENNKNGVDQEIIFPPIKTDVITMDPKDNCSKDANDTLLLQLTNTSAYYMYLLLLLKSVVYFAIITCCLLMAMVKRKDSRG

SEQ ID NO: 14585 - protein, 727 aa, synthetic construct
MALPVTALLLPLALLLHAARPDILLTQSPVILSVSPGERVSFSCRASQSIGTNIHWYQQRTNGSPRLLIKYASESISGIPSRFSGSGSGTDFTLSINSVESEDIADYYCQQNNNWPTTFGAGTKLELKLEIQNPDPAVYQLRDSKSSDKSVCLFTDFDSQTNVSQSKDSDVYITDKCVLDMRSMDFKSNSAVAWSNKSDFACANAFNNSIIPEDTFFPSPESSDSTDHVKPKETENTKQPSKSCHKPKAIVHTEKVNMMSLTVLGLRMLFAKTVAVNFLLTAKLFFLLTARAKRSGSGVKQTLNFDLLKLAGDVESNPGPTSMDWIWRILFLVGAATGAHSFEQVQLKQSGPGLVQPSQSLSITCTVSGFSLTNYGVHWVRQSPGKGLEWLGVIWSGGNTDYNTPFTSRLSINKDNSKSQVFFKMNSLQSNDTAIYYCARALTYYDYEFAYWGQGTLVTVSATREDLKNVFPPEVAVFEPSEAEISHTQKATLVCLATGFYPDHVELSWWVNGKEVHSGVCTDPQPLKEQPALNDSRYCLSSRLRVSATFWQNPRNHFRCQVQFYGLSENDEWTQDRAKPVTQIVSAEAWGRADDVIKIHWQEKKSNTILGSQEGNTMKTNDTYMKFSWLTVPEKSLDKEHRCIVRHENNKNGVDQEIIFPPIKTDVITMDPKDNCSKDANDTLLLQLTNTSAYYMYLLLLLKSVVYFAIITCCLLMAMVKRKDSRG

SEQ ID NO: 14586 - protein, 720 aa, synthetic construct
MALPVTALLLPLALLLHAARPMTQSPKFLLVSAGDRVTLTCKASQSVNNDVYWYQQEPGQSPKLLIYWASTRESGVPDRFTGSGSGTDFTLTISSVQAEDLAVYYCKQSYNLYTFGGGTKLEIKRLEIQNPDPAVYQLRDSKSSDKSVCLFTDFDSQTNVSQSKDSDVYITDKCVLDMRSMDFKSNSAVAWSNKSDFACANAFNNSIIPEDTFFPSPESSDSTDHVKPKETENTKQPSKSCHKPKAIVHTEKVNMMSLTVLGLRMLFAKTVAVNFLLTAKLFFLLTARAKRSGSGVKQTLNFDLLKLAGDVESNPGPTSMDWIWRILFLVGAATGAHSFEESGRGLVQPGGSRKLSCAASGFTFSTSGMHWVRQAPEKGLEWVAYISSGSTTIYHADTVKGRFTISRDNPKNTLFLQMTSLRSEDTAMYYCCARSGQFGNYFDYWGQGTTLTVSSTREDLKNVFPPEVAVFEPSEAEISHTQKATLVCLATGFYPDHVELSWWVNGKEVHSGVCTDPQPLKEQPALNDSRYCLSSRLRVSATFWQNPRNHFRCQVQFYGLSENDEWTQDRAKPVTQIVSAEAWGRADDVIKIHWQEKKSNTILGSQEGNTMKTNDTYMKFSWLTVPEKSLDKEHRCIVRHENNKNGVDQEIIFPPIKTDVITMDPKDNCSKDANDTLLLQLTNTSAYYMYLLLLLKSVVYFAIITCCLLMAMVKRKDSRG

SEQ ID NO: 14587 - protein, 725 aa, synthetic construct
MALPVTALLLPLALLLHAARPQSPSSLAVSAGEKVTMSCKSSQSLLNSRTRKNYLAWYQQKPGQSPKLLIYWASTRESGVPDRFTGSGSGTDFTLTISSVQAEDLAVYYCKQSNLYTFGGGTKLEIKLEIQNPDPAVYQLRDSKSSDKSVCLFTDFDSQTNVSQSKDSDVYITDKCVLDMRSMDFKSNSAVAWSNKSDFACANAFNNSIIPEDTFFPSPESSDSTDHVKPKETENTKQPSKSCHKPKAIVHTEKVNMMSLTVLGLRMLFAKTVAVNFLLTAKLFFLLTARAKRSGSGVKQTLNFDLLKLAGDVESNPGPTSMDWIWRILFLVGAATGAHSFEQVQLEESGPELVKPGASVKLSCKASGYTFTEYIIHWVKQRSGQGLEWIGWFYPGSGSIKYNEKFKDKATLTADKSSSTVYMELSGLTSEDSAVYFCARHDGYSYFDYWGQGTTLTVSSTREDLKNVFPPEVAVFEPSEAEISHTQKATLVCLATGFYPDHVELSWWVNGKEVHSGVCTDPQPLKEQPALNDSRYCLSSRLRVSATFWQNPRNHFRCQVQFYGLSENDEWTQDRAKPVTQIVSAEAWGRADDVIKIHWQEKKSNTILGSQEGNTMKTNDTYMKFSWLTVPEKSLDKEHRCIVRHENNKNGVDQEIIFPPIKTDVITMDPKDNCSKDANDTLLLQLTNTSAYYMYLLLLLKSVVYFAIITCCLLMAMVKRKDSRG

SEQ ID NO: 14588 - protein, 728 aa, synthetic construct
MALPVTALLLPLALLLHAARPDIQMTQSPSSLSASLGERVSLTCRATQELSGYLSWLQQKPDGTIKRLIYAASTLDSGVPKRFSGNRSGSDYSLTISSLESEDFADYYCLQYAIYPYTFGGGTKLEIKLEIQNPDPAVYQLRDSKSSDKSVCLFTDFDSQTNVSQSKDSDVYITDKCVLDMRSMDFKSNSAVAWSNKSDFACANAFNNSIIPEDTFFPSPESSDSTDHVKPKETENTKQPSKSCHKPKAIVHTEKVNMMSLTVLGLRMLFAKTVAVNFLLTAKLFFLLTARAKRSGSGVKQTLNFDLLKLAGDVESNPGPTSMDWIWRILFLVGAATGAHSFEEVQLQQSGPELVKPGASVKMSCKASGYTFTSYFIHWVKQKPGQGLEWIGFINPYNDGSKYNEKFKGKATLTSDKSSSTAYMELSSLTSEDSAVYYCTRDDGYYGYAMDYWGQGTSVTVSSTREDLKNVFPPEVAVFEPSEAEISHTQKATLVCLATGFYPDHVELSWWVNGKEVHSGVCTDPQPLKEQPALNDSRYCLSSRLRVSATFWQNPRNHFRCQVQFYGLSENDEWTQDRAKPVTQIVSAEAWGRADDVIKIHWQEKKSNTILGSQEGNTMKTNDTYMKFSWLTVPEKSLDKEHRCIVRHENNKNGVDQEIIFPPIKTDVITMDPKDNCSKDANDTLLLQLTNTSAYYMYLLLLLKSVVYFAIITCCLLMAMVKRKDSRG

SEQ ID NO: 14589 - protein, 733 aa, synthetic construct
MALPVTALLLPLALLLHAARPDTIVLTQSPASLAVSLGQRATISCRASESVDSYGNSFMHWYQQKPGQPPKLLIYLASNLESGVPARFSGSGSRTDFTLTIDPVEADDAATYYCQQNNYDPWTFGGGTKLEIKLEIQNPDPAVYQLRDSKSSDKSVCLFTDFDSQTNVSQSKDSDVYITDKCVLDMRSMDFKSNSAVAWSNKSDFACANAFNNSIIPEDTFFPSPESSDSTDHVKPKETENTKQPSKSCHKPKAIVHTEKVNMMSLTVLGLRMLFAKTVAVNFLLTAKLFFLLTARAKRSGSGVKQTLNFDLLKLAGDVESNPGPTSMDWIWRILFLVGAATGAHSFEEVQLQQSGPELVKPGASVKMSCKASGYTFTSYVMHWVKQKPGQGLEWIGYINPYNDGTKYNEKFKGKATLTSDTSSSTAYMELNSLTSEDSAVYFCARPIYFDNDYFDYWGQGTTLKVSSTREDLKNVFPPEVAVFEPSEAEISHTQKATLVCLATGFYPDHVELSWWVNGKEVHSGVCTDPQPLKEQPALNDSRYCLSSRLRVSATFWQNPRNHFRCQVQFYGLSENDEWTQDRAKPVTQIVSAEAWGRADDVIKIHWQEKKSNTILGSQEGNTMKTNDTYMKFSWLTVPEKSLDKEHRCIVRHENNKNGVDQEIIFPPIKTDVITMDPKDNCSKDANDTLLLQLTNTSAYYMYLLLLLKSVVYFAIITCCLLMAMVKRKDSRG

SEQ ID NO: 14590 - protein, 728 aa, synthetic construct
MALPVTALLLPLALLLHAARPDIQMTQSPSSLSASVGDRVTITCKASQDVGIAVAWYQQKPGKVPKLLIYWASTRHTGVPDRFSGSGSGTDFTLTISSLQPEDVATYYCQQYSSYPYTFGQGTKVEIKRLEIQNPDPAVYQLRDSKSSDKSVCLFTDFDSQTNVSQSKDSDVYITDKCVLDMRSMDFKSNSAVAWSNKSDFACANAFNNSIIPEDTFFPSPESSDSTDHVKPKETENTKQPSKSCHKPKAIVHTEKVNMMSLTVLGLRMLFAKTVAVNFLLTAKLFFLLTARAKRSGSGVKQTLNFDLLKLAGDVESNPGPTSMDWIWRILFLVGAATGAHSFEEVQLVESGGGLVQPGGSLRLSCAASGFDFSRYWMSWVRQAPGKGLEWIGEINPDSSTINYAPSLKDKFIISRDNAKNSLYLQMNSLRAEDTAVYYCARPDGNYWYFDVWGQGTLVTVSSTREDLKNVFPPEVAVFEPSEAEISHTQKATLVCLATGFYPDHVELSWWVNGKEVHSGVCTDPQPLKEQPALNDSRYCLSSRLRVSATFWQNPRNHFRCQVQFYGLSENDEWTQDRAKPVTQIVSAEAWGRADDVIKIHWQEKKSNTILGSQEGNTMKTNDTYMKFSWLTVPEKSLDKEHRCIVRHENNKNGVDQEIIFPPIKTDVITMDPKDNCSKDANDTLLLQLTNTSAYYMYLLLLLKSVVYFAIITCCLLMAMVKRKDSRG

SEQ ID NO: 14591 - protein, 728 aa, synthetic construct
MALPVTALLLPLALLLHAARPDIVMTQSQKSMSTSVGDRVSITCKASQDVITGVAWYQQKPGQSPKLLIYSASYRYTGVPDRFTGSGSGTDFTFTISNVQAEDLAVYYCQQHYSTPLTFGAGTKLELKLEIQNPDPAVYQLRDSKSSDKSVCLFTDFDSQTNVSQSKDSDVYITDKCVLDMRSMDFKSNSAVAWSNKSDFACANAFNNSIIPEDTFFPSPESSDSTDHVKPKETENTKQPSKSCHKPKAIVHTEKVNMMSLTVLGLRMLFAKTVAVNFLLTAKLFFLLTARAKRSGSGVKQTLNFDLLKLAGDVESNPGPTSMDWIWRILFLVGAATGAHSFEQVQLQQPGAELVRPGASVKLSCKASGYSFTTYWMNWVKQRPGQGLEWIGMIHPSDSETRLNQKFKDKATLTVDKSSSTAYMQLSSPTSEDSAVYYCARSTMIATRAMDYWGQGTSVTVSSTREDLKNVFPPEVAVFEPSEAEISHTQKATLVCLATGFYPDHVELSWWVNGKEVHSGVCTDPQPLKEQPALNDSRYCLSSRLRVSATFWQNPRNHFRCQVQFYGLSENDEWTQDRAKPVTQIVSAEAWGRADDVIKIHWQEKKSNTILGSQEGNTMKTNDTYMKFSWLTVPEKSLDKEHRCIVRHENNKNGVDQEIIFPPIKTDVITMDPKDNCSKDANDTLLLQLTNTSAYYMYLLLLLKSVVYFAIITCCLLMAMVKRKDSRG

SEQ ID NO: 14592 - protein, 734 aa, synthetic construct
MALPVTALLLPLALLLHAARPQSVLTQPPSVSGAPGQRVTISCTGSGSNIGAPYDVSWYQQLPGTAPKLLIYHNNKRPSGVPDRFSGSKSGTSASLAITGLQAEDEADYYCATVEAGLSGSVFGGGTKLTVLGALEIQNPDPAVYQLRDSKSSDKSVCLFTDFDSQTNVSQSKDSDVYITDKCVLDMRSMDFKSNSAVAWSNKSDFACANAFNNSIIPEDTFFPSPESSDSTDHVKPKETENTKQPSKSCHKPKAIVHTEKVNMMSLTVLGLRMLFAKTVAVNFLLTAKLFFLLTARAKRSGSGVKQTLNFDLLKLAGDVESNPGPTSMDWIWRILFLVGAATGAHSFEQVQLVQSGAEVKKPGASVKVSCKVSGYTLTELSIHWVRQAPGKGLEWMGGFDPEENEIVYAQRFQGRVTMTEDTSTDTAYMELSSLRSEDTAVYYCAIVGSFSPLTLGLWGQGTMVTVSSTREDLKNVFPPEVAVFEPSEAEISHTQKATLVCLATGFYPDHVELSWWVNGKEVHSGVCTDPQPLKEQPALNDSRYCLSSRLRVSATFWQNPRNHFRCQVQFYGLSENDEWTQDRAKPVTQIVSAEAWGRADDVIKIHWQEKKSNTILGSQEGNTMKTNDTYMKFSWLTVPEKSLDKEHRCIVRHENNKNGVDQEIIFPPIKTDVITMDPKDNCSKDANDTLLLQLTNTSAYYMYLLLLLKSVVYFAIITCCLLMAMVKRKDSRG

SEQ ID NO: 14593 - protein, 734 aa, synthetic construct
MALPVTALLLPLALLLHAARPQSVLTQPPSVSGAPGQRVTISCTGSGSNIGAPYDVSWYQQLPGTAPKLLIYHNNKRPSGVPDRFSGSKSGTSASLAITGLQAEDEADYYCQSYDSSSISTIFGGGTKLTVLGALEIQNPDPAVYQLRDSKSSDKSVCLFTDFDSQTNVSQSKDSDVYITDKCVLDMRSMDFKSNSAVAWSNKSDFACANAFNNSIIPEDTFFPSPESSDSTDHVKPKETENTKQPSKSCHKPKAIVHTEKVNMMSLTVLGLRMLFAKTVAVNFLLTAKLFFLLTARAKRSGSGVKQTLNFDLLKLAGDVESNPGPTSMDWIWRILFLVGAATGAHSFEQVQLVQSGAEVKKPGASVKVSCKVSGYTLTELSIHWVRQAPGKGLEWMGGFDPEENEIVYAQRFQGRVTMTEDTSTDTAYMELSSLRSEDTAVYYCAIVGSFSGIAYRPWGQGTMVTVSSTREDLKNVFPPEVAVFEPSEAEISHTQKATLVCLATGFYPDHVELSWWVNGKEVHSGVCTDPQPLKEQPALNDSRYCLSSRLRVSATFWQNPRNHFRCQVQFYGLSENDEWTQDRAKPVTQIVSAEAWGRADDVIKIHWQEKKSNTILGSQEGNTMKTNDTYMKFSWLTVPEKSLDKEHRCIVRHENNKNGVDQEIIFPPIKTDVITMDPKDNCSKDANDTLLLQLTNTSAYYMYLLLLLKSVVYFAIITCCLLMAMVKRKDSRG

SEQ ID NO: 14594 - protein, 722 aa, synthetic construct
MALPVTALLLPLALLLHAARPDIQMTQSPSSLSASVGDRVTITCRASQGIRNNLAWYQQKPGKAPKRLIYAASNLQSGVPSRFTGSGSGTEFTLIVSSLQPEDFATYYCLQHHSYPLTSGGGTKVELEIQNPDPAVYQLRDSKSSDKSVCLFTDFDSQTNVSQSKDSDVYITDKCVLDMRSMDFKSNSAVAWSNKSDFACANAFNNSIIPEDTFFPSPESSDSTDHVKPKETENTKQPSKSCHKPKAIVHTEKVNMMSLTVLGLRMLFAKTVAVNFLLTAKLFFLLTARAKRSGSGVKQTLNFDLLKLAGDVESNPGPTSMDWIWRILFLVGAATGAHSFEEVQVLESGGGLVQPGGSLRLSCAASGFTFSSYAMSWVRQAPGKGLEWVSAISGSGGSTNYADSVKGRFTISRDNSKNTLYLQMNSLRAEDTAVYYCAGSSGWSEYWGQGTLVTVSSTREDLKNVFPPEVAVFEPSEAEISHTQKATLVCLATGFYPDHVELSWWVNGKEVHSGVCTDPQPLKEQPALNDSRYCLSSRLRVSATFWQNPRNHFRCQVQFYGLSENDEWTQDRAKPVTQIVSAEAWGRADDVIKIHWQEKKSNTILGSQEGNTMKTNDTYMKFSWLTVPEKSLDKEHRCIVRHENNKNGVDQEIIFPPIKTDVITMDPKDNCSKDANDTLLLQLTNTSAYYMYLLLLLKSVVYFAIITCCLLMAMVKRKDSRG

SEQ ID NO: 14595 - protein, 728 aa, synthetic construct
MALPVTALLLPLALLLHAARPDEIQLVQSGAEVKKPGESLRISCKGSGFNIEDYYIHWVRQMPGKGLEWMGRIDPENDETKYGPIFQGHVTISADTSINTVYLQWSSLKASDTAMYYCAFRGGVYWGQGTTVTVSSLEIQNPDPAVYQLRDSKSSDKSVCLFTDFDSQTNVSQSKDSDVYITDKCVLDMRSMDFKSNSAVAWSNKSDFACANAFNNSIIPEDTFFPSPESSDSTDHVKPKETENTKQPSKSCHKPKAIVHTEKVNMMSLTVLGLRMLFAKTVAVNFLLTAKLFFLLTARAKRSGSGVKQTLNFDLLKLAGDVESNPGPTSMDWIWRILFLVGAATGAHSFEDVVMTQSPDSLAVSLGERATINCKSSQSLLDSDGKTYLNWLQQKPGQPPKRLISLVSKLDSGVPDRFSGSGSGTDFTLTISSLQAEDVAVYYCWQGTHFPGTFGGGTKVEIKTREDLKNVFPPEVAVFEPSEAEISHTQKATLVCLATGFYPDHVELSWWVNGKEVHSGVCTDPQPLKEQPALNDSRYCLSSRLRVSATFWQNPRNHFRCQVQFYGLSENDEWTQDRAKPVTQIVSAEAWGRADDVIKIHWQEKKSNTILGSQEGNTMKTNDTYMKFSWLTVPEKSLDKEHRCIVRHENNKNGVDQEIIFPPIKTDVITMDPKDNCSKDANDTLLLQLTNTSAYYMYLLLLLKSVVYFAIITCCLLMAMVKRKDSRG

SEQ ID NO: 14596 - protein, 735 aa, synthetic construct
MALPVTALLLPLALLLHAARPDELVMTQSPSSLTVTAGEKVTMSCKSSQSLLNSGNQKNYLTWYQQKPGQPPKLLIYWASTRESGVPDRFTGSGSGTDFTLTISSVQAEDLAVYYCQNDYSYPLTFGAGTKLEIKLEIQNPDPAVYQLRDSKSSDKSVCLFTDFDSQTNVSQSKDSDVYITDKCVLDMRSMDFKSNSAVAWSNKSDFACANAFNNSIIPEDTFFPSPESSDSTDHVKPKETENTKQPSKSCHKPKAIVHTEKVNMMSLTVLGLRMLFAKTVAVNFLLTAKLFFLLTARAKRSGSGVKQTLNFDLLKLAGDVESNPGPTSMDWIWRILFLVGAATGAHSFEEVQLLEQSGAELVRPGTSVKISCKASGYAFTNYWLGWVKQRPGHGLEWIGDIFPGSGNIHYNEKFKGKATLTADKSSSTAYMQLSSLTFEDSAVYFCARLRNWDEPMDYWGQGTTVTVSSTREDLKNVFPPEVAVFEPSEAEISHTQKATLVCLATGFYPDHVELSWWVNGKEVHSGVCTDPQPLKEQPALNDSRYCLSSRLRVSATFWQNPRNHFRCQVQFYGLSENDEWTQDRAKPVTQIVSAEAWGRADDVIKIHWQEKKSNTILGSQEGNTMKTNDTYMKFSWLTVPEKSLDKEHRCIVRHENNKNGVDQEIIFPPIKTDVITMDPKDNCSKDANDTLLLQLTNTSAYYMYLLLLLKSVVYFAIITCCLLMAMVKRKDSRG

SEQ ID NO: 14597 - protein, 736 aa, synthetic construct
MALPVTALLLPLALLLHAARPDELQMTQSPSSLSASVGDRVTITCRASQSISSYLNWYQQKPGQPPKLLIYWASTRESGVPDRFSGSESGTNYTLTISSLQPEDFATYFCQQSDSLPITFGQGTRLDIQLEIQNPDPAVYQLRDSKSSDKSVCLFTDFDSQTNVSQSKDSDVYITDKCVLDMRSMDFKSNSAVAWSNKSDFACANAFNNSIIPEDTFFPSPESSDSTDHVKPKETENTKQPSKSCHKPKAIVHTEKVNMMSLTVLGLRMLFAKTVAVNFLLTAKLFFLLTARAKRSGSGVKQTLNFDLLKLAGDVESNPGPTSMDWIWRILFLVGAATGAHSFEEVQLLESGGGVVQPGRSLRLSCAASGFTFSSYGMHWVRQAPGKGLEWVAVISYDGSNKYYADSVKGRFTISRDNSKNTLYLQMNSLRAEDTAVYYCAKDMGWGSGWRPYYYYGMDVWGQGTTVTVSSTREDLKNVFPPEVAVFEPSEAEISHTQKATLVCLATGFYPDHVELSWWVNGKEVHSGVCTDPQPLKEQPALNDSRYCLSSRLRVSATFWQNPRNHFRCQVQFYGLSENDEWTQDRAKPVTQIVSAEAWGRADDVIKIHWQEKKSNTILGSQEGNTMKTNDTYMKFSWLTVPEKSLDKEHRCIVRHENNKNGVDQEIIFPPIKTDVITMDPKDNCSKDANDTLLLQLTNTSAYYMYLLLLLKSVVYFAIITCCLLMAMVKRKDSRG

SEQ ID NO: 14598 - protein, 733 aa, synthetic construct
MALPVTALLLPLALLLHAARPDDIQMTQSPSSLSASVGDRVTITCRASQSISSYLNWYQQKPGKAPKLLIYAASSLQSGVPSRFSGSGSGTDFTLTISSLQPEDLATYYCQQSYSTPFTFGPGTKVDIKLEIQNPDPAVYQLRDSKSSDKSVCLFTDFDSQTNVSQSKDSDVYITDKCVLDMRSMDFKSNSAVAWSNKSDFACANAFNNSIIPEDTFFPSPESSDSTDHVKPKETENTKQPSKSCHKPKAIVHTEKVNMMSLTVLGLRMLFAKTVAVNFLLTAKLFFLLTARAKRSGSGVKQTLNFDLLKLAGDVESNPGPTSMDWIWRILFLVGAATGAHSFEVHEVQLVQSGAEVKKPGSSVKVSCKASGGTFSSYAISWVRQAPGQGLEWMGGIIPIFGTANYAQKFQGRVTITADKSTSTAYMELSSLRSEDTAVYYCATFALFGFREQAFDIWGQGTTVTVSSTREDLKNVFPPEVAVFEPSEAEISHTQKATLVCLATGFYPDHVELSWWVNGKEVHSGVCTDPQPLKEQPALNDSRYCLSSRLRVSATFWQNPRNHFRCQVQFYGLSENDEWTQDRAKPVTQIVSAEAWGRADDVIKIHWQEKKSNTILGSQEGNTMKTNDTYMKFSWLTVPEKSLDKEHRCIVRHENNKNGVDQEIIFPPIKTDVITMDPKDNCSKDANDTLLLQLTNTSAYYMYLLLLLKSVVYFAIITCCLLMAMVKRKDSRG

SEQ ID NO: 14599 - protein, 731 aa, synthetic construct
MALPVTALLLPLALLLHAARPDIVLTQSPLSLAVSLGQPAIISCKASQSVSFAGTSLMHWYHQKPGQQPRLLIYRASNLEAGVPDRFSGSGSKTDFTLTISPVEAEDAATYYCQQSREYPYTFGGGTKLEIKRLEIQNPDPAVYQLRDSKSSDKSVCLFTDFDSQTNVSQSKDSDVYITDKCVLDMRSMDFKSNSAVAWSNKSDFACANAFNNSIIPEDTFFPSPESSDSTDHVKPKETENTKQPSKSCHKPKAIVHTEKVNMMSLTVLGLRMLFAKTVAVNFLLTAKLFFLLTARAKRSGSGVKQTLNFDLLKLAGDVESNPGPTSMDWIWRILFLVGAATGAHSFEQVQLVQSGAEVVKPGASVKISCKASGYTFTGYFMNWVKQSPGQSLEWIGRIHPYDGDTFYNQKFQGKATLTVDKSSNTAHMELLSLTSEDFAVYYCTRYDGSRAMDYWGQGTTVTVSSTREDLKNVFPPEVAVFEPSEAEISHTQKATLVCLATGFYPDHVELSWWVNGKEVHSGVCTDPQPLKEQPALNDSRYCLSSRLRVSATFWQNPRNHFRCQVQFYGLSENDEWTQDRAKPVTQIVSAEAWGRADDVIKIHWQEKKSNTILGSQEGNTMKTNDTYMKFSWLTVPEKSLDKEHRCIVRHENNKNGVDQEIIFPPIKTDVITMDPKDNCSKDANDTLLLQLTNTSAYYMYLLLLLKSVVYFAIITCCLLMAMVKRKDSRG

SEQ ID NO: 14600 - protein, 728 aa, synthetic construct
MALPVTALLLPLALLLHAARPDDVVMTQTPLSLPVTPGEPASISCRSSQSLVHRNGNTYLHWYLQKPGQSPKLLIHKVSNRFSGVPDRFSGSGSGTDFTLKISRVEAEDLGVYFCSQSTHVPPLTFGAGTKLELKLEIQNPDPAVYQLRDSKSSDKSVCLFTDFDSQTNVSQSKDSDVYITDKCVLDMRSMDFKSNSAVAWSNKSDFACANAFNNSIIPEDTFFPSPESSDSTDHVKPKETENTKQPSKSCHKPKAIVHTEKVNMMSLTVLGLRMLFAKTVAVNFLLTAKLFFLLTARAKRSGSGVKQTLNFDLLKLAGDVESNPGPTSMDWIWRILFLVGAATGAHSFEEVQLVQSGAEVEKPGASVKISCKASGSSFTGYNMNWVRQNIGKSLEWIGAIDPYYGGTSYNQKFKGRATLTVDKSTSTAYMHLKSLRSEDTAVYYCVSGMEYWGQGTSVTVSSTREDLKNVFPPEVAVFEPSEAEISHTQKATLVCLATGFYPDHVELSWWVNGKEVHSGVCTDPQPLKEQPALNDSRYCLSSRLRVSATFWQNPRNHFRCQVQFYGLSENDEWTQDRAKPVTQIVSAEAWGRADDVIKIHWQEKKSNTILGSQEGNTMKTNDTYMKFSWLTVPEKSLDKEHRCIVRHENNKNGVDQEIIFPPIKTDVITMDPKDNCSKDANDTLLLQLTNTSAYYMYLLLLLKSVVYFAIITCCLLMAMVKRKDSRG

SEQ ID NO: 14601 - protein, 726 aa, synthetic construct
MALPVTALLLPLALLLHAARPDEIVMTQTPATLSVSAGERVTITCKASQSVSNDVTWYQQKPGQAPRLLIYSASNRYSGVPARFSGSGYGTEFTFTISSVQSEDFAVYFCQQDYSSFGQGTKLEIKRLEIQNPDPAVYQLRDSKSSDKSVCLFTDFDSQTNVSQSKDSDVYITDKCVLDMRSMDFKSNSAVAWSNKSDFACANAFNNSIIPEDTFFPSPESSDSTDHVKPKETENTKQPSKSCHKPKAIVHTEKVNMMSLTVLGLRMLFAKTVAVNFLLTAKLFFLLTARAKRSGSGVKQTLNFDLLKLAGDVESNPGPTSMDWIWRILFLVGAATGAHSFEQVQLVESGPGVVQPGRSLRISCAVSGFSVTNYGVHWVRQPPGKGLEWLGVIWAGGITNYNSAFMSRLTISKDNSKNTVYLQMNSLRAEDTAMYYCASRGGHYGYALDYWGQGTLVTVSSTREDLKNVFPPEVAVFEPSEAEISHTQKATLVCLATGFYPDHVELSWWVNGKEVHSGVCTDPQPLKEQPALNDSRYCLSSRLRVSATFWQNPRNHFRCQVQFYGLSENDEWTQDRAKPVTQIVSAEAWGRADDVIKIHWQEKKSNTILGSQEGNTMKTNDTYMKFSWLTVPEKSLDKEHRCIVRHENNKNGVDQEIIFPPIKTDVITMDPKDNCSKDANDTLLLQLTNTSAYYMYLLLLLKSVVYFAIITCCLLMAMVKRKDSRG

SEQ ID NO: 14602 - protein, 728 aa, synthetic construct
MALPVTALLLPLALLLHAARPDIQMTQTASSLPASLGDRVTISCSASQDISNYLNWYQQKPDGTVKLLIFYSSNLHSGVPSRFSGGGSGTDYSLTISNLEPEDIATYFCHQYSKLPWTFGGGTKLEIKRLEIQNPDPAVYQLRDSKSSDKSVCLFTDFDSQTNVSQSKDSDVYITDKCVLDMRSMDFKSNSAVAWSNKSDFACANAFNNSIIPEDTFFPSPESSDSTDHVKPKETENTKQPSKSCHKPKAIVHTEKVNMMSLTVLGLRMLFAKTVAVNFLLTAKLFFLLTARAKRSGSGVKQTLNFDLLKLAGDVESNPGPTSMDWIWRILFLVGAATGAHSFEEVTLVESGGDFVKPGGSLKVSCAASGFAFSHYAMSWVRQTPAKRLEWVAYISSGGSGTYYSDSVKGRFTISRDNAKNTLYLQMRSLRSEDSAMYFCTRVKLGTYYFDSWGQGTTLTVSSTREDLKNVFPPEVAVFEPSEAEISHTQKATLVCLATGFYPDHVELSWWVNGKEVHSGVCTDPQPLKEQPALNDSRYCLSSRLRVSATFWQNPRNHFRCQVQFYGLSENDEWTQDRAKPVTQIVSAEAWGRADDVIKIHWQEKKSNTILGSQEGNTMKTNDTYMKFSWLTVPEKSLDKEHRCIVRHENNKNGVDQEIIFPPIKTDVITMDPKDNCSKDANDTLLLQLTNTSAYYMYLLLLLKSVVYFAIITCCLLMAMVKRKDSRG

SEQ ID NO: 14603 - protein, 730 aa, synthetic construct
MALPVTALLLPLALLLHAARPQFVLTQSPSASAALGASAKLTCTLSSAHKTYTIDWYQQQKGKAPRYLIQVKSDGTYTKATGVPDRFSGSSSGADRYLIIPSVQADDEADYYCGTDYTGGYVFGGGTQLTVTLEIQNPDPAVYQLRDSKSSDKSVCLFTDFDSQTNVSQSKDSDVYITDKCVLDMRSMDFKSNSAVAWSNKSDFACANAFNNSIIPEDTFFPSPESSDSTDHVKPKETENTKQPSKSCHKPKAIVHTEKVNMMSLTVLGLRMLFAKTVAVNFLLTAKLFFLLTARAKRSGSGVKQTLNFDLLKLAGDVESNPGPTSMDWIWRILFLVGAATGAHSFEEQLKESGGGLFKPTDTLTLTCTVSGFSLSYYGVNWVRQAPGNGLEWIGTIGGSGDTYYASWAKSRSTIIRNTNENTVTLKMTSLTAADTATYFCVRYANIGYEYFNVWGPGTLVTVSSTREDLKNVFPPEVAVFEPSEAEISHTQKATLVCLATGFYPDHVELSWWVNGKEVHSGVCTDPQPLKEQPALNDSRYCLSSRLRVSATFWQNPRNHFRCQVQFYGLSENDEWTQDRAKPVTQIVSAEAWGRADDVIKIHWQEKKSNTILGSQEGNTMKTNDTYMKFSWLTVPEKSLDKEHRCIVRHENNKNGVDQEIIFPPIKTDVITMDPKDNCSKDANDTLLLQLTNTSAYYMYLLLLLKSVVYFAIITCCLLMAMVKRKDSRG

SEQ ID NO: 14604 - protein, 735 aa, synthetic construct
MALPVTALLLPLALLLHAARPQFVLTQSPSVSAALGASAKLTCTLSSAHKTYTIDWYQQQQGEAPRYLMQVKSDGSYTKGTGVPDRFSGSSSGADRYLIIPSVQADDEAGYVCGADDNGGYVFGGGTQLTVTLEIQNPDPAVYQLRDSKSSDKSVCLFTDFDSQTNVSQSKDSDVYITDKCVLDMRSMDFKSNSAVAWSNKSDFACANAFNNSIIPEDTFFPSPESSDSTDHVKPKETENTKQPSKSCHKPKAIVHTEKVNMMSLTVLGLRMLFAKTVAVNFLLTAKLFFLLTARAKRSGSGVKQTLNFDLLKLAGDVESNPGPTSMDWIWRILFLVGAATGAHSFEQSVKESEGGLFKPTDTLTLTCTVSGFSLSRHALTWVRQAPGNGLEWIGAIDNAGTTYYASWAKSRSTITRNTDLHTVTLKMTSLTASDTATYFCARVFYDINSGYYLDGMDLWGPGTLVTVSSTREDLKNVFPPEVAVFEPSEAEISHTQKATLVCLATGFYPDHVELSWWVNGKEVHSGVCTDPQPLKEQPALNDSRYCLSSRLRVSATFWQNPRNHFRCQVQFYGLSENDEWTQDRAKPVTQIVSAEAWGRADDVIKIHWQEKKSNTILGSQEGNTMKTNDTYMKFSWLTVPEKSLDKEHRCIVRHENNKNGVDQEIIFPPIKTDVITMDPKDNCSKDANDTLLLQLTNTSAYYMYLLLLLKSVVYFAIITCCLLMAMVKRKDSRG

SEQ ID NO: 14605 - protein, 729 aa, synthetic construct
MALPVTALLLPLALLLHAARPDIQMTQSPSSLSASVGDRVTITCRASQGISSWLAWYQQKPEKAPKSLIYAASSLQSGVPSRFSGSGSGTDFTLTISSLQPEDFATYYCQQYNSYPPTFGGGTKVEIKLEIQNPDPAVYQLRDSKSSDKSVCLFTDFDSQTNVSQSKDSDVYITDKCVLDMRSMDFKSNSAVAWSNKSDFACANAFNNSIIPEDTFFPSPESSDSTDHVKPKETENTKQPSKSCHKPKAIVHTEKVNMMSLTVLGLRMLFAKTVAVNFLLTAKLFFLLTARAKRSGSGVKQTLNFDLLKLAGDVESNPGPTSMDWIWRILFLVGAATGAHSFEEVQLVESGGGLVQPGESLRLSCVASGFTFSRYKMNWVRQAPGKGLEWVSYISRSGRDIYYADSVKGRFTISRDNAKNSLYLQMNSLRDEDTAVYYCAGTVTTYYYFGMDVWGHGTTVTVSSTREDLKNVFPPEVAVFEPSEAEISHTQKATLVCLATGFYPDHVELSWWVNGKEVHSGVCTDPQPLKEQPALNDSRYCLSSRLRVSATFWQNPRNHFRCQVQFYGLSENDEWTQDRAKPVTQIVSAEAWGRADDVIKIHWQEKKSNTILGSQEGNTMKTNDTYMKFSWLTVPEKSLDKEHRCIVRHENNKNGVDQEIIFPPIKTDVITMDPKDNCSKDANDTLLLQLTNTSAYYMYLLLLLKSVVYFAIITCCLLMAMVKRKDSRG

SEQ ID NO: 14606 - protein, 730 aa, synthetic construct
MALPVTALLLPLALLLHAARPDIQMTQSPSSLSASVGDRVTITCRASQGISSWLAWYQQKPEKAPKSLIYAASSLQSGVPSRFSGSGSGTDFTLTISSLQPEDFATYYCQQYNSYPPTFGGGTKVEIKLEIQNPDPAVYQLRDSKSSDKSVCLFTDFDSQTNVSQSKDSDVYITDKCVLDMRSMDFKSNSAVAWSNKSDFACANAFNNSIIPEDTFFPSPESSDSTDHVKPKETENTKQPSKSCHKPKAIVHTEKVNMMSLTVLGLRMLFAKTVAVNFLLTAKLFFLLTARAKRSGSGVKQTLNFDLLKLAGDVESNPGPTSMDWIWRILFLVGAATGAHSFEEVQLVESGGGSVQPGESLRLSCVASGFTFSRYKMNWVRQAPGKGLEWVSYISRSGRDIYYADSVKGRFTISRDNAKNSLYLQMNSLRDEDTAVYYCAGTVTTYYYDFGMDVWGQGTTVTVSSTREDLKNVFPPEVAVFEPSEAEISHTQKATLVCLATGFYPDHVELSWWVNGKEVHSGVCTDPQPLKEQPALNDSRYCLSSRLRVSATFWQNPRNHFRCQVQFYGLSENDEWTQDRAKPVTQIVSAEAWGRADDVIKIHWQEKKSNTILGSQEGNTMKTNDTYMKFSWLTVPEKSLDKEHRCIVRHENNKNGVDQEIIFPPIKTDVITMDPKDNCSKDANDTLLLQLTNTSAYYMYLLLLLKSVVYFAIITCCLLMAMVKRKDSRG

SEQ ID NO: 14607 - protein, 728 aa, synthetic construct
MALPVTALLLPLALLLHAARPQSVLTQPPSASGTPGQRVTISCSGSRSNVGGNYVFWYQQVPGATPKLLIYRSNQRPSGVPDRFAGSKSGSSASLAISGLRSEDEADYYCATWDDSLSGFVFGTGTKVTVLGLEIQNPDPAVYQLRDSKSSDKSVCLFTDFDSQTNVSQSKDSDVYITDKCVLDMRSMDFKSNSAVAWSNKSDFACANAFNNSIIPEDTFFPSPESSDSTDHVKPKETENTKQPSKSCHKPKAIVHTEKVNMMSLTVLGLRMLFAKTVAVNFLLTAKLFFLLTARAKRSGSGVKQTLNFDLLKLAGDVESNPGPTSMDWIWRILFLVGAATGAHSFEVQLVESGGGLVKPGGSLRLSCAASGFTFSDYYMSWIRQAPGKGLEWVSYISSSGSTIYYADSVKGRFTISRDNAKNSLYLQMNSLRAEDTAVYYCARGYGKAYDQWGQGTLVTVSSTREDLKNVFPPEVAVFEPSEAEISHTQKATLVCLATGFYPDHVELSWWVNGKEVHSGVCTDPQPLKEQPALNDSRYCLSSRLRVSATFWQNPRNHFRCQVQFYGLSENDEWTQDRAKPVTQIVSAEAWGRADDVIKIHWQEKKSNTILGSQEGNTMKTNDTYMKFSWLTVPEKSLDKEHRCIVRHENNKNGVDQEIIFPPIKTDVITMDPKDNCSKDANDTLLLQLTNTSAYYMYLLLLLKSVVYFAIITCCLLMAMVKRKDSRG

SEQ ID NO: 14608 - protein, 727 aa, synthetic construct
MALPVTALLLPLALLLHAARPQSVVTQPPSMSAAPGQQVTISCSGGNSNIERNYVSWYLQLPGTAPKLVIFDNDRRPSGIPDRFSGSKSGTSATLGITGLQTGDEADYYCGTWDSSLRGWVFGGGTKLTVLGLEIQNPDPAVYQLRDSKSSDKSVCLFTDFDSQTNVSQSKDSDVYITDKCVLDMRSMDFKSNSAVAWSNKSDFACANAFNNSIIPEDTFFPSPESSDSTDHVKPKETENTKQPSKSCHKPKAIVHTEKVNMMSLTVLGLRMLFAKTVAVNFLLTAKLFFLLTARAKRSGSGVKQTLNFDLLKLAGDVESNPGPTSMDWIWRILFLVGAATGAHSFEVQLVESGGGLIQPGGSLRLSCAASGFTFSNYAMNWVRQAPGKGLEWVSTINGRGSSTIYADSVKGRFTISRDNSKNTLYLQMNSLRAEDTATYYCARYISRGLGDSWGQGTLVTVTREDLKNVFPPEVAVFEPSEAEISHTQKATLVCLATGFYPDHVELSWWVNGKEVHSGVCTDPQPLKEQPALNDSRYCLSSRLRVSATFWQNPRNHFRCQVQFYGLSENDEWTQDRAKPVTQIVSAEAWGRADDVIKIHWQEKKSNTILGSQEGNTMKTNDTYMKFSWLTVPEKSLDKEHRCIVRHENNKNGVDQEIIFPPIKTDVITMDPKDNCSKDANDTLLLQLTNTSAYYMYLLLLLKSVVYFAIITCCLLMAMVKRKDSRG

SEQ ID NO: 14609 - protein, 728 aa, synthetic construct
MALPVTALLLPLALLLHAARPDVVMTQTPLSLPVSLGDQASISCRSSQSLVHSNGNTYLHWYLQKPGQSPKLLIYKVSNRFSGVPDRFSGSGSGTDFTLKISRVEAEDLGVYFCSQNTPVPPKFGSGTKLEIKLEIQNPDPAVYQLRDSKSSDKSVCLFTDFDSQTNVSQSKDSDVYITDKCVLDMRSMDFKSNSAVAWSNKSDFACANAFNNSIIPEDTFFPSPESSDSTDHVKPKETENTKQPSKSCHKPKAIVHTEKVNMMSLTVLGLRMLFAKTVAVNFLLTAKLFFLLTARAKRSGSGVKQTLNFDLLKLAGDVESNPGPTSMDWIWRILFLVGAATGAHSFEQVQLQQSGAELVRPGASVKLSCKASGYTFNDYEMHWVKQTPVHGLKWIGALEPKTGDTAYSQKFKGKATLTADKSSSTAYMELRSLTSEDSAVYYCTSCYYYTYSGQGTLVTVSATREDLKNVFPPEVAVFEPSEAEISHTQKATLVCLATGFYPDHVELSWWVNGKEVHSGVCTDPQPLKEQPALNDSRYCLSSRLRVSATFWQNPRNHFRCQVQFYGLSENDEWTQDRAKPVTQIVSAEAWGRADDVIKIHWQEKKSNTILGSQEGNTMKTNDTYMKFSWLTVPEKSLDKEHRCIVRHENNKNGVDQEIIFPPIKTDVITMDPKDNCSKDANDTLLLQLTNTSAYYMYLLLLLKSVVYFAIITCCLLMAMVKRKDSRG

SEQ ID NO: 14610 - protein, 727 aa, synthetic construct
MALPVTALLLPLALLLHAARPDIQLTQSPSSLSASVGDRVTITCRASQGIRNDLGWYQQKPGKAPKRLIYAASSLQNGVPSRFSGSGSGTEFTLTISSLQPEDFATYYCLQHNTYPAFGQGTKVEIKRLEIQNPDPAVYQLRDSKSSDKSVCLFTDFDSQTNVSQSKDSDVYITDKCVLDMRSMDFKSNSAVAWSNKSDFACANAFNNSIIPEDTFFPSPESSDSTDHVKPKETENTKQPSKSCHKPKAIVHTEKVNMMSLTVLGLRMLFAKTVAVNFLLTAKLFFLLTARAKRSGSGVKQTLNFDLLKLAGDVESNPGPTSMDWIWRILFLVGAATGAHSFEQVQLQESGPGLVKPSQTLSLTCTVSGGSISSFNYYWSWIRHHPGKGLEWIGYIYYSGSTYSNPSLKSRVTISVDTSKNQFSLTLSSVTAADTAVYYCARGYNWNYFDYWGQGTLVTVSSTREDLKNVFPPEVAVFEPSEAEISHTQKATLVCLATGFYPDHVELSWWVNGKEVHSGVCTDPQPLKEQPALNDSRYCLSSRLRVSATFWQNPRNHFRCQVQFYGLSENDEWTQDRAKPVTQIVSAEAWGRADDVIKIHWQEKKSNTILGSQEGNTMKTNDTYMKFSWLTVPEKSLDKEHRCIVRHENNKNGVDQEIIFPPIKTDVITMDPKDNCSKDANDTLLLQLTNTSAYYMYLLLLLKSVVYFAIITCCLLMAMVKRKDSRG

SEQ ID NO: 14611 - protein, 729 aa, synthetic construct
MALPVTALLLPLALLLHAARPDDIVLTQSPASLAVSLGQSVTISCRASESVEYYGTSLMQWYQQKPGQPPKLLIYATSNVESGVPARFSGSGSGTDFSLNIHPVEEDDIAMYFCQQSRKLPSTFGGGTKLEIKLEIQNPDPAVYQLRDSKSSDKSVCLFTDFDSQTNVSQSKDSDVYITDKCVLDMRSMDFKSNSAVAWSNKSDFACANAFNNSIIPEDTFFPSPESSDSTDHVKPKETENTKQPSKSCHKPKAIVHTEKVNMMSLTVLGLRMLFAKTVAVNFLLTAKLFFLLTARAKRSGSGVKQTLNFDLLKLAGDVESNPGPTSMDWIWRILFLVGAATGAHSFEDVRLQESGPGQVKPSQTVSLTCSVTGYSITNGNHWWNWIRQVSGSKLEWIGYISSSGSTDSNPSLKSRISITRDTSKNQLFLQLNSVTTEDIATYYCARGYYFDYWGQGTTLTVSSTREDLKNVFPPEVAVFEPSEAEISHTQKATLVCLATGFYPDHVELSWWVNGKEVHSGVCTDPQPLKEQPALNDSRYCLSSRLRVSATFWQNPRNHFRCQVQFYGLSENDEWTQDRAKPVTQIVSAEAWGRADDVIKIHWQEKKSNTILGSQEGNTMKTNDTYMKFSWLTVPEKSLDKEHRCIVRHENNKNGVDQEIIFPPIKTDVITMDPKDNCSKDANDTLLLQLTNTSAYYMYLLLLLKSVVYFAIITCCLLMAMVKRKDSRG

SEQ ID NO: 14612 - protein, 728 aa, synthetic construct
MALPVTALLLPLALLLHAARPDIQMTQSPSSLSASVGDRVTITCRASQDVNTAVAWYQQKPGKAPKLLIYSASFLESGVPSRFSGSRSGTDFTLTISSLQPEDFATYYCQQHYTTPPTFGQTKVEIKRLEIQNPDPAVYQLRDSKSSDKSVCLFTDFDSQTNVSQSKDSDVYITDKCVLDMRSMDFKSNSAVAWSNKSDFACANAFNNSIIPEDTFFPSPESSDSTDHVKPKETENTKQPSKSCHKPKAIVHTEKVNMMSLTVLGLRMLFAKTVAVNFLLTAKLFFLLTARAKRSGSGVKQTLNFDLLKLAGDVESNPGPTSMDWIWRILFLVGAATGAHSFEEVQLVESGGGLVQPGGSLRLSCAASGFNIKDTYIHWVRQAPGKGLEWVARIYPTNGYTRYADSVKGRFTISADTSKNTAYLQMNSLRAEDTAVYYCSRWGGDGFYAMDVWGQGTLVTVSSTREDLKNVFPPEVAVFEPSEAEISHTQKATLVCLATGFYPDHVELSWWVNGKEVHSGVCTDPQPLKEQPALNDSRYCLSSRLRVSATFWQNPRNHFRCQVQFYGLSENDEWTQDRAKPVTQIVSAEAWGRADDVIKIHWQEKKSNTILGSQEGNTMKTNDTYMKFSWLTVPEKSLDKEHRCIVRHENNKNGVDQEIIFPPIKTDVITMDPKDNCSKDANDTLLLQLTNTSAYYMYLLLLLKSVVYFAIITCCLLMAMVKRKDSRG

SEQ ID NO: 14613 - protein, 727 aa, synthetic construct
MALPVTALLLPLALLLHAARPDQSVLTQPPSVSVAPGKTARIPCEGNYIGSSNVHWYQQKPGQAPVLVIHFDSDRPSGIPDRFSGSNSGNMATLTISRVEAGDEADYYCQVWENHGWVFGGGTKLTVLSLEIQNPDPAVYQLRDSKSSDKSVCLFTDFDSQTNVSQSKDSDVYITDKCVLDMRSMDFKSNSAVAWSNKSDFACANAFNNSIIPEDTFFPSPESSDSTDHVKPKETENTKQPSKSCHKPKAIVHTEKVNMMSLTVLGLRMLFAKTVAVNFLLTAKLFFLLTARAKRSGSGVKQTLNFDLLKLAGDVESNPGPTSMDWIWRILFLVGAATGAHSFEEVQLVETGGGLVQPGESLRLSCAASGFTFSDYEMNWVRQAPGKGLEWVSYISSSGSTIYYADSVKGRFTIYRDNAKNSLYLQMNSLRAEDTALYYCARAWGVGPPDYWGQGTLVTVSSTREDLKNVFPPEVAVFEPSEAEISHTQKATLVCLATGFYPDHVELSWWVNGKEVHSGVCTDPQPLKEQPALNDSRYCLSSRLRVSATFWQNPRNHFRCQVQFYGLSENDEWTQDRAKPVTQIVSAEAWGRADDVIKIHWQEKKSNTILGSQEGNTMKTNDTYMKFSWLTVPEKSLDKEHRCIVRHENNKNGVDQEIIFPPIKTDVITMDPKDNCSKDANDTLLLQLTNTSAYYMYLLLLLKSVVYFAIITCCLLMAMVKRKDSRG

SEQ ID NO: 14614 - protein, 735 aa, synthetic construct
MALPVTALLLPLALLLHAARPDIQMTQSPSSLSASVGDTVTITCQANGYLNWYQQRRGKAPKLLIYDGSKLERGVPSRFSGRRWGQEYNLTINNLQPEDIATYFCQVYEFVVPGTRLDLKRTVAAPLEIQNPDPAVYQLRDSKSSDKSVCLFTDFDSQTNVSQSKDSDVYITDKCVLDMRSMDFKSNSAVAWSNKSDFACANAFNNSIIPEDTFFPSPESSDSTDHVKPKETENTKQPSKSCHKPKAIVHTEKVNMMSLTVLGLRMLFAKTVAVNFLLTAKLFFLLTARAKRSGSGVKQTLNFDLLKLAGDVESNPGPTSMDWIWRILFLVGAATGAHSFEQVQLLQSGAAVTKPGASVRVSCEASGYNIRDYFIHWWRQAPGQGLQWVGWINPKTGQPNNPRQFQGRVSLTRHASWDFDTFSFYMDLKALRSDDTAVYFCARQRSDYWDFDVWGSGTQVTVSSASTKGPTREDLKNVFPPEVAVFEPSEAEISHTQKATLVCLATGFYPDHVELSWWVNGKEVHSGVCTDPQPLKEQPALNDSRYCLSSRLRVSATFWQNPRNHFRCQVQFYGLSENDEWTQDRAKPVTQIVSAEAWGRADDVIKIHWQEKKSNTILGSQEGNTMKTNDTYMKFSWLTVPEKSLDKEHRCIVRHENNKNGVDQEIIFPPIKTDVITMDPKDNCSKDANDTLLLQLTNTSAYYMYLLLLLKSVVYFAIITCCLLMAMVKRKDSRG

SEQ ID NO: 14615 - protein, 741 aa, synthetic construct
MALPVTALLLPLALLLHAARPQSALTQPPSASGSPGQSITISCTGTSNNFVSWYQQHAGKAPKLVIYDVNKRPSGVPDRFSGSKSGNTASLTVSGLQTDDEAVYYCGSLVGNWDVIFGGGTKLTVLLEIQNPDPAVYQLRDSKSSDKSVCLFTDFDSQTNVSQSKDSDVYITDKCVLDMRSMDFKSNSAVAWSNKSDFACANAFNNSIIPEDTFFPSPESSDSTDHVKPKETENTKQPSKSCHKPKAIVHTEKVNMMSLTVLGLRMLFAKTVAVNFLLTAKLFFLLTARAKRSGSGVKQTLNFDLLKLAGDVESNPGPTSMDWIWRILFLVGAATGAHSFEQPQLQESGPTLVEASETLSLTCAVSGDSTAACNSFWGWVRQPPGKGLEWVGSLSHCASYWNRGWTYHNPSLKSRLTLALDTPKNLVFLKLNSVTAADTATYYCARFGGEVLRYTDWPKPAWVDLWGRGTLVTVSSTREDLKNVFPPEVAVFEPSEAEISHTQKATLVCLATGFYPDHVELSWWVNGKEVHSGVCTDPQPLKEQPALNDSRYCLSSRLRVSATFWQNPRNHFRCQVQFYGLSENDEWTQDRAKPVTQIVSAEAWGRADDVIKIHWQEKKSNTILGSQEGNTMKTNDTYMKFSWLTVPEKSLDKEHRCIVRHENNKNGVDQEIIFPPIKTDVITMDPKDNCSKDANDTLLLQLTNTSAYYMYLLLLLKSVVYFAIITCCLLMAMVKRKDSRG

SEQ ID NO: 14616 - protein, 726 aa, synthetic construct
MALPVTALLLPLALLLHAARPEIVLTQSPGTLSLSPGETAIISCRTSQYGSLAWYQQRPGQAPRLVIYSGSTRAAGIPDRFSGSRWGPDYNLTISNLESGDFGVYYCQQYEFFGQGTKVQVDIKRLEIQNPDPAVYQLRDSKSSDKSVCLFTDFDSQTNVSQSKDSDVYITDKCVLDMRSMDFKSNSAVAWSNKSDFACANAFNNSIIPEDTFFPSPESSDSTDHVKPKETENTKQPSKSCHKPKAIVHTEKVNMMSLTVLGLRMLFAKTVAVNFLLTAKLFFLLTARAKRSGSGVKQTLNFDLLKLAGDVESNPGPTSMDWIWRILFLVGAATGAHSFEQVQLVQSGGQMKKPGESMRISCRASGYEFIDCTLNWIRLAPGKRPEWMGWLKPRGGAVNYARPLQGRVTMTRDVYSDTAFLELRSLTVDDTAVYFCTRGKNCDYNWDFEHWGRGTPVIVSSTREDLKNVFPPEVAVFEPSEAEISHTQKATLVCLATGFYPDHVELSWWVNGKEVHSGVCTDPQPLKEQPALNDSRYCLSSRLRVSATFWQNPRNHFRCQVQFYGLSENDEWTQDRAKPVTQIVSAEAWGRADDVIKIHWQEKKSNTILGSQEGNTMKTNDTYMKFSWLTVPEKSLDKEHRCIVRHENNKNGVDQEIIFPPIKTDVITMDPKDNCSKDANDTLLLQLTNTSAYYMYLLLLLKSVVYFAIITCCLLMAMVKRKDSRG

SEQ ID NO: 14617 - protein, 736 aa, synthetic construct
MALPVTALLLPLALLLHAARPELVLTQSPGTLSLSAGERATLSCRASQSVSSGSLAWYQQKPGQAPRLLIYGASTRATGIPDRFSGSGSGTDFTLTIGRLEPEDLAVYYCQQYGTSPYTFGQGTKLEILEIQNPDPAVYQLRDSKSSDKSVCLFTDFDSQTNVSQSKDSDVYITDKCVLDMRSMDFKSNSAVAWSNKSDFACANAFNNSIIPEDTFFPSPESSDSTDHVKPKETENTKQPSKSCHKPKAIVHTEKVNMMSLTVLGLRMLFAKTVAVNFLLTAKLFFLLTARAKRSGSGVKQTLNFDLLKLAGDVESNPGPTSMDWIWRILFLVGAATGAHSFELEQSGAEVKKPGSSVQVSCKASGGTFSMYGFNWVRQAPGHGLEWMGGIIPIFGTSNYAQKFRGRVTFTADQATSTAYMELTNLRSDDTAVYYCARDFGPDWEDGDSYDGSGRGFFDFWGQGTLVTVSSTREDLKNVFPPEVAVFEPSEAEISHTQKATLVCLATGFYPDHVELSWWVNGKEVHSGVCTDPQPLKEQPALNDSRYCLSSRLRVSATFWQNPRNHFRCQVQFYGLSENDEWTQDRAKPVTQIVSAEAWGRADDVIKIHWQEKKSNTILGSQEGNTMKTNDTYMKFSWLTVPEKSLDKEHRCIVRHENNKNGVDQEIIFPPIKTDVITMDPKDNCSKDANDTLLLQLTNTSAYYMYLLLLLKSVVYFAIITCCLLMAMVKRKDSRG

SEQ ID NO: 14618 - protein, 716 aa, synthetic construct
MALPVTALLLPLALLLHAARPDIQMTQSPSSLSASVGDRVTITCQASQDINNYLNWYQQKPGKAPKLLIYDASNLQTGVPSRFSGSGSGTDFTFTIEDIATYYCQQYTFGPGTKVDIKLEIQNPDPAVYQLRDSKSSDKSVCLFTDFDSQTNVSQSKDSDVYITDKCVLDMRSMDFKSNSAVAWSNKSDFACANAFNNSIIPEDTFFPSPESSDSTDHVKPKETENTKQPSKSCHKPKAIVHTEKVNMMSLTVLGLRMLFAKTVAVNFLLTAKLFFLLTARAKRSGSGVKQTLNFDLLKLAGDVESNPGPTSMDWIWRILFLVGAATGAHSFEEVQLLESGGGLVQPGGSLRLSCAASGFTFSWYSMTWVRQAPGKGLEWVSSIVPWGDFTQYADSVKGRFTISRDNSKNTLYLQMNSLRAEDTAVYYCAKGPGWGSFDLWGRGTLVTVSSTREDLKNVFPPEVAVFEPSEAEISHTQKATLVCLATGFYPDHVELSWWVNGKEVHSGVCTDPQPLKEQPALNDSRYCLSSRLRVSATFWQNPRNHFRCQVQFYGLSENDEWTQDRAKPVTQIVSAEAWGRADDVIKIHWQEKKSNTILGSQEGNTMKTNDTYMKFSWLTVPEKSLDKEHRCIVRHENNKNGVDQEIIFPPIKTDVITMDPKDNCSKDANDTLLLQLTNTSAYYMYLLLLLKSVVYFAIITCCLLMAMVKRKDSRG

SEQ ID NO: 14619 - protein, 726 aa, synthetic construct
MALPVTALLLPLALLLHAARPDIQMTQSPSSLSASVGDRVTITCTASLSVSSTYLHWYQQKPGSSPKLWIYSTSNLASGVPSRFSGSGSGTSYTLTISSLQPEDFATYYCHQYHRSPLTFGGGTKVEIKRLEIQNPDPAVYQLRDSKSSDKSVCLFTDFDSQTNVSQSKDSDVYITDKCVLDMRSMDFKSNSAVAWSNKSDFACANAFNNSIIPEDTFFPSPESSDSTDHVKPKETENTKQPSKSCHKPKAIVHTEKVNMMSLTVLGLRMLFAKTVAVNFLLTAKLFFLLTARAKRSGSGVKQTLNFDLLKLAGDVESNPGPTSMDWIWRILFLVGAATGAHSFEEVQLVESGGGLVQPGGSLRLSCAASGFSLTKYGVHWVRQAPGKGLEWVGVKWAGGSTDYNSALMSRFTISKDNAKNSLYLQMNSLRAEDTAVYYCARDHRDAMDYWGQGTLVTVSSTREDLKNVFPPEVAVFEPSEAEISHTQKATLVCLATGFYPDHVELSWWVNGKEVHSGVCTDPQPLKEQPALNDSRYCLSSRLRVSATFWQNPRNHFRCQVQFYGLSENDEWTQDRAKPVTQIVSAEAWGRADDVIKIHWQEKKSNTILGSQEGNTMKTNDTYMKFSWLTVPEKSLDKEHRCIVRHENNKNGVDQEIIFPPIKTDVITMDPKDNCSKDANDTLLLQLTNTSAYYMYLLLLLKSVVYFAIITCCLLMAMVKRKDSRG

SEQ ID NO: 14620 - protein, 730 aa, synthetic construct
MALPVTALLLPLALLLHAARPDIQMTQSPSSLSASVGDRVTITCKASQDVGTAVAWYQQKPGKAPKLLIYSASYRSTGVPSRFSGSGSGTDFTLTISSLQPEDFATYYCQHHYSAPWTFGGGTKVEIKLEIQNPDPAVYQLRDSKSSDKSVCLFTDFDSQTNVSQSKDSDVYITDKCVLDMRSMDFKSNSAVAWSNKSDFACANAFNNSIIPEDTFFPSPESSDSTDHVKPKETENTKQPSKSCHKPKAIVHTEKVNMMSLTVLGLRMLFAKTVAVNFLLTAKLFFLLTARAKRSGSGVKQTLNFDLLKLAGDVESNPGPTSMDWIWRILFLVGAATGAHSFEEVQLVESGGGLVQPGGSLRLSCAASGFTFSRNGMSWVRQAPGKGLEWVATVSSGGSYIYYADSVKGRFTISRDNAKNSLYLQMNSLRAEDTAVYYCARQGTTALATRFFDVWGQGTLVTVSSTREDLKNVFPPEVAVFEPSEAEISHTQKATLVCLATGFYPDHVELSWWVNGKEVHSGVCTDPQPLKEQPALNDSRYCLSSRLRVSATFWQNPRNHFRCQVQFYGLSENDEWTQDRAKPVTQIVSAEAWGRADDVIKIHWQEKKSNTILGSQEGNTMKTNDTYMKFSWLTVPEKSLDKEHRCIVRHENNKNGVDQEIIFPPIKTDVITMDPKDNCSKDANDTLLLQLTNTSAYYMYLLLLLKSVVYFAIITCCLLMAMVKRKDSRG

SEQ ID NO: 14621 - protein, 726 aa, synthetic construct
MALPVTALLLPLALLLHAARPDIQMTQSPPSLSASVGGKVTITCKASQDIDRYMAWYQDKPGKGPKLLIHDTSTLQPGIPSRFSGSGSGRDYSFSISNLEPEDIATYYCLQYDNLWTFGGGTKLEIKRLEIQNPDPAVYQLRDSKSSDKSVCLFTDFDSQTNVSQSKDSDVYITDKCVLDMRSMDFKSNSAVAWSNKSDFACANAFNNSIIPEDTFFPSPESSDSTDHVKPKETENTKQPSKSCHKPKAIVHTEKVNMMSLTVLGLRMLFAKTVAVNFLLTAKLFFLLTARAKRSGSGVKQTLNFDLLKLAGDVESNPGPTSMDWIWRILFLVGAATGAHSFEQVQLVQSGAELVKPGASVKMSCKASGYIFTNYNIHWVKKSPGQGLEWIGAIYPGNGDAPYSQKFQDRATLTADTSSSTTYMELSSLTSEDSAVYYCVRANWDVAFAYWGQGTLVSVSSTREDLKNVFPPEVAVFEPSEAEISHTQKATLVCLATGFYPDHVELSWWVNGKEVHSGVCTDPQPLKEQPALNDSRYCLSSRLRVSATFWQNPRNHFRCQVQFYGLSENDEWTQDRAKPVTQIVSAEAWGRADDVIKIHWQEKKSNTILGSQEGNTMKTNDTYMKFSWLTVPEKSLDKEHRCIVRHENNKNGVDQEIIFPPIKTDVITMDPKDNCSKDANDTLLLQLTNTSAYYMYLLLLLKSVVYFAIITCCLLMAMVKRKDSRG

SEQ ID NO: 14622 - protein, 727 aa, synthetic construct
MALPVTALLLPLALLLHAARPDIQMTQSPASLSASVGETVTITCRVSGNIHNYLAWYQQKQGKSPQLLVYNAKTLADGVPSRFSGSGSGTQYSLKINSLQPEDFGSYYCQHFWSNPYTFGGGTKLEIKLEIQNPDPAVYQLRDSKSSDKSVCLFTDFDSQTNVSQSKDSDVYITDKCVLDMRSMDFKSNSAVAWSNKSDFACANAFNNSIIPEDTFFPSPESSDSTDHVKPKETENTKQPSKSCHKPKAIVHTEKVNMMSLTVLGLRMLFAKTVAVNFLLTAKLFFLLTARAKRSGSGVKQTLNFDLLKLAGDVESNPGPTSMDWIWRILFLVGAATGAHSFEQVQLQQSGASVKVSCKASELVRPGTGYAFTNYLIEWVKQRPGQGLEWIGVINPGSGGTNYNEKFKGKATLTADKSSSTAYMQLSSLTSDDSAVYFCARYRSYDWYFDVWGAGTTVTVSSTREDLKNVFPPEVAVFEPSEAEISHTQKATLVCLATGFYPDHVELSWWVNGKEVHSGVCTDPQPLKEQPALNDSRYCLSSRLRVSATFWQNPRNHFRCQVQFYGLSENDEWTQDRAKPVTQIVSAEAWGRADDVIKIHWQEKKSNTILGSQEGNTMKTNDTYMKFSWLTVPEKSLDKEHRCIVRHENNKNGVDQEIIFPPIKTDVITMDPKDNCSKDANDTLLLQLTNTSAYYMYLLLLLKSVVYFAIITCCLLMAMVKRKDSRG

SEQ ID NO: 14623 - protein, 726 aa, synthetic construct
MALPVTALLLPLALLLHAARPDIQMTQSFSSLSASVGDRVTITCRASQDISNYLNWYQQKPGKAPKLLIYYTSRLHSGVPSRFSGSGSGTDYTLTISSLQPEDFATYFCQQGNTLPWTFGGGTKLEIKRLEIQNPDPAVYQLRDSKSSDKSVCLFTDFDSQTNVSQSKDSDVYITDKCVLDMRSMDFKSNSAVAWSNKSDFACANAFNNSIIPEDTFFPSPESSDSTDHVKPKETENTKQPSKSCHKPKAIVHTEKVNMMSLTVLGLRMLFAKTVAVNFLLTAKLFFLLTARAKRSGSGVKQTLNFDLLKLAGDVESNPGPTSMDWIWRILFLVGAATGAHSFEEVQLVQSGGGLVQSGGSLRLSCRASGYTFTRYWMLWVRQRPGKGLEWVAEINPRNDRTNYNEKFKTRFTISVDRSKNTLYLQMDSLRAEDTAVYFCALGGGYAMDYWGQGTLVTVSSTREDLKNVFPPEVAVFEPSEAEISHTQKATLVCLATGFYPDHVELSWWVNGKEVHSGVCTDPQPLKEQPALNDSRYCLSSRLRVSATFWQNPRNHFRCQVQFYGLSENDEWTQDRAKPVTQIVSAEAWGRADDVIKIHWQEKKSNTILGSQEGNTMKTNDTYMKFSWLTVPEKSLDKEHRCIVRHENNKNGVDQEIIFPPIKTDVITMDPKDNCSKDANDTLLLQLTNTSAYYMYLLLLLKSVVYFAIITCCLLMAMVKRKDSRG

SEQ ID NO: 14624 - protein, 727 aa, synthetic construct
MALPVTALLLPLALLLHAARPDIQMTQSPASLSASVGETVTIICRASVNIYSYLAWYQQKQGKSPQLLVYNAKILAEGVPSRFSGSGSGTQFSLKINSLQPEDFGSYYCQHHYGTFTFGSGTKLEIKRLEIQNPDPAVYQLRDSKSSDKSVCLFTDFDSQTNVSQSKDSDVYITDKCVLDMRSMDFKSNSAVAWSNKSDFACANAFNNSIIPEDTFFPSPESSDSTDHVKPKETENTKQPSKSCHKPKAIVHTEKVNMMSLTVLGLRMLFAKTVAVNFLLTAKLFFLLTARAKRSGSGVKQTLNFDLLKLAGDVESNPGPTSMDWIWRILFLVGAATGAHSFEQVQLKESGPGLVAPSQSLSITCTISGFSLTSYGVHWVRQPPGKGLEWLVVIWSDGSTTYNSALKSRLSISKDNSKSQVFLKMNSLQTDDTAIYYCASHYGSTLAFASWGHGTLVTVSAATREDLKNVFPPEVAVFEPSEAEISHTQKATLVCLATGFYPDHVELSWWVNGKEVHSGVCTDPQPLKEQPALNDSRYCLSSRLRVSATFWQNPRNHFRCQVQFYGLSENDEWTQDRAKPVTQIVSAEAWGRADDVIKIHWQEKKSNTILGSQEGNTMKTNDTYMKFSWLTVPEKSLDKEHRCIVRHENNKNGVDQEIIFPPIKTDVITMDPKDNCSKDANDTLLLQLTNTSAYYMYLLLLLKSVVYFAIITCCLLMAMVKRKDSRG

SEQ ID NO: 14625 - protein, 735 aa, synthetic construct
MALPVTALLLPLALLLHAARPDIVMTQSHKFMSTSVGDRVSVTCKASQNVGNNVAWYQQKPGQSPKVLIYSASYRYSGVPDRFTGSGSGTDFTLTISNVQSEDLAEYFCQQYNTYPFTFGSGTKLEIKLEIQNPDPAVYQLRDSKSSDKSVCLFTDFDSQTNVSQSKDSDVYITDKCVLDMRSMDFKSNSAVAWSNKSDFACANAFNNSIIPEDTFFPSPESSDSTDHVKPKETENTKQPSKSCHKPKAIVHTEKVNMMSLTVLGLRMLFAKTVAVNFLLTAKLFFLLTARAKRSGSGVKQTLNFDLLKLAGDVESNPGPTSMDWIWRILFLVGAATGAHSFEEVQLEESGGGLVQPGGSMKLSCVASGFTFSNYWMNWVRQSPEKGLEWVAEIRFKSHNYATHFAESVKGRFTISRDDSKSSVYLQMNNLRAEDTGIYYCTRRIGNSDYDWWYFDVWGAGTSVTVSSASTREDLKNVFPPEVAVFEPSEAEISHTQKATLVCLATGFYPDHVELSWWVNGKEVHSGVCTDPQPLKEQPALNDSRYCLSSRLRVSATFWQNPRNHFRCQVQFYGLSENDEWTQDRAKPVTQIVSAEAWGRADDVIKIHWQEKKSNTILGSQEGNTMKTNDTYMKFSWLTVPEKSLDKEHRCIVRHENNKNGVDQEIIFPPIKTDVITMDPKDNCSKDANDTLLLQLTNTSAYYMYLLLLLKSVVYFAIITCCLLMAMVKRKDSRG

SEQ ID NO: 14626 - protein, 728 aa, synthetic construct
MALPVTALLLPLALLLHAARPDQIVLTQSPAIMSASPGEKVTISCSASSSVSYMYWYQQKPGSSPKPWIYRTSNLASGVPARFSGSGSGTSYSLTISNMEAEDAAAYYCQQYHSYPTTFGGGTKLEVKLEIQNPDPAVYQLRDSKSSDKSVCLFTDFDSQTNVSQSKDSDVYITDKCVLDMRSMDFKSNSAVAWSNKSDFACANAFNNSIIPEDTFFPSPESSDSTDHVKPKETENTKQPSKSCHKPKAIVHTEKVNMMSLTVLGLRMLFAKTVAVNFLLTAKLFFLLTARAKRSGSGVKQTLNFDLLKLAGDVESNPGPTSMDWIWRILFLVGAATGAHSFEEVQLVESGGGLVQPKGSLKLSCAASGFSFNTYAMNWVRQAPGKGLEWIAHIRSKSNNFATYYADSVKDRFSISRDASENILFLQMNNLKTEDTAMYYCVRQGGDFPMDYWGQGTSVTVSSTREDLKNVFPPEVAVFEPSEAEISHTQKATLVCLATGFYPDHVELSWWVNGKEVHSGVCTDPQPLKEQPALNDSRYCLSSRLRVSATFWQNPRNHFRCQVQFYGLSENDEWTQDRAKPVTQIVSAEAWGRADDVIKIHWQEKKSNTILGSQEGNTMKTNDTYMKFSWLTVPEKSLDKEHRCIVRHENNKNGVDQEIIFPPIKTDVITMDPKDNCSKDANDTLLLQLTNTSAYYMYLLLLLKSVVYFAIITCCLLMAMVKRKDSRG

SEQ ID NO: 14627 - protein, 727 aa, synthetic construct
MALPVTALLLPLALLLHAARPDDIQMTQSSSSFSVSLGDRVTITCMASEDIYIRLAWYQQKPGNAPRLLISAATSLETGVPSRFSGSGSGKDYTLSITSLQTEDVGTYYCQQYWSSPWTFGGGTKLEINLEIQNPDPAVYQLRDSKSSDKSVCLFTDFDSQTNVSQSKDSDVYITDKCVLDMRSMDFKSNSAVAWSNKSDFACANAFNNSIIPEDTFFPSPESSDSTDHVKPKETENTKQPSKSCHKPKAIVHTEKVNMMSLTVLGLRMLFAKTVAVNFLLTAKLFFLLTARAKRSGSGVKQTLNFDLLKLAGDVESNPGPTSMDWIWRILFLVGAATGAHSFEDVQLQESGPGLVKPSQSLSLTCTVTGYSITSDYTWNWIRQFPGNKLEWMGYITYSGSTSYNPSLKSRNSITRDTSKNQFFLQLNSVTTEDTATYYCARLGRRYTMDYWGQGTSVTVSSTREDLKNVFPPEVAVFEPSEAEISHTQKATLVCLATGFYPDHVELSWWVNGKEVHSGVCTDPQPLKEQPALNDSRYCLSSRLRVSATFWQNPRNHFRCQVQFYGLSENDEWTQDRAKPVTQIVSAEAWGRADDVIKIHWQEKKSNTILGSQEGNTMKTNDTYMKFSWLTVPEKSLDKEHRCIVRHENNKNGVDQEIIFPPIKTDVITMDPKDNCSKDANDTLLLQLTNTSAYYMYLLLLLKSVVYFAIITCCLLMAMVKRKDSRG

SEQ ID NO: 14628 - protein, 730 aa, synthetic construct
MALPVTALLLPLALLLHAARPDDIQMTQSPSSLSASVGDRVTITCRASQSISSYLNWYQQKPGKAPKLLIYDASNLETGVPSRFSGSGSGTDFTFTISSLQPEDIATYYCQQYDNLPLTFGGGTKVDIKRLEIQNPDPAVYQLRDSKSSDKSVCLFTDFDSQTNVSQSKDSDVYITDKCVLDMRSMDFKSNSAVAWSNKSDFACANAFNNSIIPEDTFFPSPESSDSTDHVKPKETENTKQPSKSCHKPKAIVHTEKVNMMSLTVLGLRMLFAKTVAVNFLLTAKLFFLLTARAKRSGSGVKQTLNFDLLKLAGDVESNPGPTSMDWIWRILFLVGAATGAHSFEQVQLVESGGGVVQPGRSLRLSCAASGFTFSSYAMHWVRQAPGKGLEWVAVISYDGSNKYYADSVKGRFTISRDNSKNTLYLQMNSLRAEDTAVYYCARAHNSSSWSFDYWGQGTLVTVSSTREDLKNVFPPEVAVFEPSEAEISHTQKATLVCLATGFYPDHVELSWWVNGKEVHSGVCTDPQPLKEQPALNDSRYCLSSRLRVSATFWQNPRNHFRCQVQFYGLSENDEWTQDRAKPVTQIVSAEAWGRADDVIKIHWQEKKSNTILGSQEGNTMKTNDTYMKFSWLTVPEKSLDKEHRCIVRHENNKNGVDQEIIFPPIKTDVITMDPKDNCSKDANDTLLLQLTNTSAYYMYLLLLLKSVVYFAIITCCLLMAMVKRKDSRG

SEQ ID NO: 14629 - protein, 739 aa, synthetic construct
MALPVTALLLPLALLLHAARPDDVVMTQSPLSLPVSLGDQASISCRSSQRLVHSNGNTYLHWYLQKPGQSPKLLIYRVSNRFPGVPDRFSGSGSGTDFTLKISRVEAEDLGIYFCSQSTHVPYTFGGGTKLEIKRLEIQNPDPAVYQLRDSKSSDKSVCLFTDFDSQTNVSQSKDSDVYITDKCVLDMRSMDFKSNSAVAWSNKSDFACANAFNNSIIPEDTFFPSPESSDSTDHVKPKETENTKQPSKSCHKPKAIVHTEKVNMMSLTVLGLRMLFAKTVAVNFLLTAKLFFLLTARAKRSGSGVKQTLNFDLLKLAGDVESNPGPTSMDWIWRILFLVGAATGAHSFEEVRLQQSGPDLIKPGASVKMSCKASGYTFTGYVMHWVKQRPGQGLEWIGFINPYNDDIQSNERFRGKATLTSDKSSTTAYMELSSLTSEDSAVYYCARGAGYNFDGAYRFFDFWGQGTTLTVSSTREDLKNVFPPEVAVFEPSEAEISHTQKATLVCLATGFYPDHVELSWWVNGKEVHSGVCTDPQPLKEQPALNDSRYCLSSRLRVSATFWQNPRNHFRCQVQFYGLSENDEWTQDRAKPVTQIVSAEAWGRADDVIKIHWQEKKSNTILGSQEGNTMKTNDTYMKFSWLTVPEKSLDKEHRCIVRHENNKNGVDQEIIFPPIKTDVITMDPKDNCSKDANDTLLLQLTNTSAYYMYLLLLLKSVVYFAIITCCLLMAMVKRKDSRG

SEQ ID NO: 14630 - protein, 730 aa, synthetic construct
MALPVTALLLPLALLLHAARPDSYELTQPPSVSVSPGQTATISCSGDQLGGKYGHWYQKKPGQSPVLVLYQDRKRPAGIPERFSGSSSGNTITLTISGTQAVDEADYYCQAWDTNLGGVFGGGTKVTVLGQLEIQNPDPAVYQLRDSKSSDKSVCLFTDFDSQTNVSQSKDSDVYITDKCVLDMRSMDFKSNSAVAWSNKSDFACANAFNNSIIPEDTFFPSPESSDSTDHVKPKETENTKQPSKSCHKPKAIVHTEKVNMMSLTVLGLRMLFAKTVAVNFLLTAKLFFLLTARAKRSGSGVKQTLNFDLLKLAGDVESNPGPTSMDWIWRILFLVGAATGAHSFEQVQLVESGAEVKKPGASVKVSCKASGYTFTGYYMHWVRQAPGQGLEWMGRINPNSGGTNYAQKFQGRVTMTRDTSISTAYMELSRLRSDDTAVYYCASPRGRGSAFDIWGQGTLVTVSSTREDLKNVFPPEVAVFEPSEAEISHTQKATLVCLATGFYPDHVELSWWVNGKEVHSGVCTDPQPLKEQPALNDSRYCLSSRLRVSATFWQNPRNHFRCQVQFYGLSENDEWTQDRAKPVTQIVSAEAWGRADDVIKIHWQEKKSNTILGSQEGNTMKTNDTYMKFSWLTVPEKSLDKEHRCIVRHENNKNGVDQEIIFPPIKTDVITMDPKDNCSKDANDTLLLQLTNTSAYYMYLLLLLKSVVYFAIITCCLLMAMVKRKDSRG

SEQ ID NO: 14631 - protein, 733 aa, synthetic construct
MALPVTALLLPLALLLHAARPDNFMLTQPHSVSESPGKTVTISCTRSSGSIASKYVQWYQQRPGSSPTTVIYEDNQRPSGVPDRFSGSIDTSSNSASLTISGLRTEDEADYYCHSYDSNNHSVFGGGTKVTVLGQLEIQNPDPAVYQLRDSKSSDKSVCLFTDFDSQTNVSQSKDSDVYITDKCVLDMRSMDFKSNSAVAWSNKSDFACANAFNNSIIPEDTFFPSPESSDSTDHVKPKETENTKQPSKSCHKPKAIVHTEKVNMMSLTVLGLRMLFAKTVAVNFLLTAKLFFLLTARAKRSGSGVKQTLNFDLLKLAGDVESNPGPTSMDWIWRILFLVGAATGAHSFEEVQLVESGGGVVQPGGSLRLSCAASGFTFSSYAMSWVRQAPGKGLEWVSAISGSGGSTYYADSVKGRFSISRDNSKNTLYLQMNSLRAEDTAVYYCARTRSSGAFDIWGQGTLVTVSSTREDLKNVFPPEVAVFEPSEAEISHTQKATLVCLATGFYPDHVELSWWVNGKEVHSGVCTDPQPLKEQPALNDSRYCLSSRLRVSATFWQNPRNHFRCQVQFYGLSENDEWTQDRAKPVTQIVSAEAWGRADDVIKIHWQEKKSNTILGSQEGNTMKTNDTYMKFSWLTVPEKSLDKEHRCIVRHENNKNGVDQEIIFPPIKTDVITMDPKDNCSKDANDTLLLQLTNTSAYYMYLLLLLKSVVYFAIITCCLLMAMVKRKDSRG

SEQ ID NO: 14632 - protein, 728 aa, synthetic construct
MALPVTALLLPLALLLHAARPDIQMNQSPSSLSASLGDTITITCHASQNINVWLSWYQQKPGNIPKLLIYKASNLHTGVPSRFSGSGSGTGFTITISSLQPEDIATYYCQQGQSYPWTFGGGTKLEIKRLEIQNPDPAVYQLRDSKSSDKSVCLFTDFDSQTNVSQSKDSDVYITDKCVLDMRSMDFKSNSAVAWSNKSDFACANAFNNSIIPEDTFFPSPESSDSTDHVKPKETENTKQPSKSCHKPKAIVHTEKVNMMSLTVLGLRMLFAKTVAVNFLLTAKLFFLLTARAKRSGSGVKQTLNFDLLKLAGDVESNPGPTSMDWIWRILFLVGAATGAHSFEEVQLQQSGPELVKPGASVKISCKASGYSFTGYFMNWVKQSHGKSLEYIGRFNPYNGETLYNQKFKGKATLTVDKSSSTVHMELLSVTSEDSAVYYCGRSGNDDAMDYWGQGTSVTVSSATREDLKNVFPPEVAVFEPSEAEISHTQKATLVCLATGFYPDHVELSWWVNGKEVHSGVCTDPQPLKEQPALNDSRYCLSSRLRVSATFWQNPRNHFRCQVQFYGLSENDEWTQDRAKPVTQIVSAEAWGRADDVIKIHWQEKKSNTILGSQEGNTMKTNDTYMKFSWLTVPEKSLDKEHRCIVRHENNKNGVDQEIIFPPIKTDVITMDPKDNCSKDANDTLLLQLTNTSAYYMYLLLLLKSVVYFAIITCCLLMAMVKRKDSRG

SEQ ID NO: 14633 - protein, 729 aa, synthetic construct
MALPVTALLLPLALLLHAARPEIVLTQSPATLSLSPGERATLSCRASQSVRSYLAWYQQKPGQAPRLLIYDASNRATGIPARFSGSGSGTDFTLTISSLEPEDFAVYYCQQRSNWPPTFGQGTKVEIKLEIQNPDPAVYQLRDSKSSDKSVCLFTDFDSQTNVSQSKDSDVYITDKCVLDMRSMDFKSNSAVAWSNKSDFACANAFNNSIIPEDTFFPSPESSDSTDHVKPKETENTKQPSKSCHKPKAIVHTEKVNMMSLTVLGLRMLFAKTVAVNFLLTAKLFFLLTARAKRSGSGVKQTLNFDLLKLAGDVESNPGPTSMDWIWRILFLVGAATGAHSFEQLQVQESGPGLVKPSETLSLTCTVSGGSISNSYFSWGWIRQPPGKGLEWIGSFYYGEKTYYNPSLKSRATISIDTSKSQFSLKLSSVTAADTAVYYCPRGPTMIRGVIDSWGQGTLVTVSSTREDLKNVFPPEVAVFEPSEAEISHTQKATLVCLATGFYPDHVELSWWVNGKEVHSGVCTDPQPLKEQPALNDSRYCLSSRLRVSATFWQNPRNHFRCQVQFYGLSENDEWTQDRAKPVTQIVSAEAWGRADDVIKIHWQEKKSNTILGSQEGNTMKTNDTYMKFSWLTVPEKSLDKEHRCIVRHENNKNGVDQEIIFPPIKTDVITMDPKDNCSKDANDTLLLQLTNTSAYYMYLLLLLKSVVYFAIITCCLLMAMVKRKDSRG

SEQ ID NO: 14634 - protein, 738 aa, synthetic construct
MALPVTALLLPLALLLHAARPDIVMTQTPLSLPVTPGEPASISCRSSRSLLDSDDGNTYLDWYLQKPGQSPQLLIYTLSYRASGVPDRFSGSGSGTDFTLKISRVEAEDVGVYYCMQRVEFPITFGQGTRLEIKRLEIQNPDPAVYQLRDSKSSDKSVCLFTDFDSQTNVSQSKDSDVYITDKCVLDMRSMDFKSNSAVAWSNKSDFACANAFNNSIIPEDTFFPSPESSDSTDHVKPKETENTKQPSKSCHKPKAIVHTEKVNMMSLTVLGLRMLFAKTVAVNFLLTAKLFFLLTARAKRSGSGVKQTLNFDLLKLAGDVESNPGPTSMDWIWRILFLVGAATGAHSFEQVQLVESGGGVVQPGRSLRLSCAASGFIFSRYGMHWVRQAPGKGLKWVAVIWYDGSNKLYADSVKGRFTISRDNSKNTLYLQMNSLRAEDTAVYYCARDYYDNSRHHWGFDYWGQGTLVTVSSTREDLKNVFPPEVAVFEPSEAEISHTQKATLVCLATGFYPDHVELSWWVNGKEVHSGVCTDPQPLKEQPALNDSRYCLSSRLRVSATFWQNPRNHFRCQVQFYGLSENDEWTQDRAKPVTQIVSAEAWGRADDVIKIHWQEKKSNTILGSQEGNTMKTNDTYMKFSWLTVPEKSLDKEHRCIVRHENNKNGVDQEIIFPPIKTDVITMDPKDNCSKDANDTLLLQLTNTSAYYMYLLLLLKSVVYFAIITCCLLMAMVKRKDSRG

SEQ ID NO: 14635 - protein, 728 aa, synthetic construct
MALPVTALLLPLALLLHAARPEIQMTQSPSSMSASLGDTITITCQATQDIFKNLNWYQQKPGKPPSLLIYYATELAEGVPSRFSGSGSGSDYSLTISNLESEDFAAYYCLQFFEFPFTFGSGTKLEMKLEIQNPDPAVYQLRDSKSSDKSVCLFTDFDSQTNVSQSKDSDVYITDKCVLDMRSMDFKSNSAVAWSNKSDFACANAFNNSIIPEDTFFPSPESSDSTDHVKPKETENTKQPSKSCHKPKAIVHTEKVNMMSLTVLGLRMLFAKTVAVNFLLTAKLFFLLTARAKRSGSGVKQTLNFDLLKLAGDVESNPGPTSMDWIWRILFLVGAATGAHSFEQVQLQQSGAELVRPGTSVKVSCKASGYVFTNYWIEWIKQRPGQGLEWIGVMNPGSGETTYNEKFKGKATLTADKSSSTAYMQLSSLTSVDSAVYFCARDHDRDYYAMDYWGQGTSVTVSSTREDLKNVFPPEVAVFEPSEAEISHTQKATLVCLATGFYPDHVELSWWVNGKEVHSGVCTDPQPLKEQPALNDSRYCLSSRLRVSATFWQNPRNHFRCQVQFYGLSENDEWTQDRAKPVTQIVSAEAWGRADDVIKIHWQEKKSNTILGSQEGNTMKTNDTYMKFSWLTVPEKSLDKEHRCIVRHENNKNGVDQEIIFPPIKTDVITMDPKDNCSKDANDTLLLQLTNTSAYYMYLLLLLKSVVYFAIITCCLLMAMVKRKDSRG

SEQ ID NO: 14636 - protein, 725 aa, synthetic construct
MALPVTALLLPLALLLHAARPDILLTQSPAILSVSPGERVSFSCRASQNIGTSIHWYQQRTNGSPRLLIKYASESVSGIPSRFSGSGSGTDFTLSINSVESEDIADYYCQHTNSWPTTFGGGTKLEIKRLEIQNPDPAVYQLRDSKSSDKSVCLFTDFDSQTNVSQSKDSDVYITDKCVLDMRSMDFKSNSAVAWSNKSDFACANAFNNSIIPEDTFFPSPESSDSTDHVKPKETENTKQPSKSCHKPKAIVHTEKVNMMSLTVLGLRMLFAKTVAVNFLLTAKLFFLLTARAKRSGSGVKQTLNFDLLKLAGDVESNPGPTSMDWIWRILFLVGAATGAHSFEQVQLQQSDAELVKPGASVKISCKASGYTFTDHAIHWVKQKPEQGLEWIGYFSPGNGDIKYNEKFKGKATLTADKSSSTAYMQLNSLTSEDSAVYFCKRSYGNYDYWGQGTTLTVSSTREDLKNVFPPEVAVFEPSEAEISHTQKATLVCLATGFYPDHVELSWWVNGKEVHSGVCTDPQPLKEQPALNDSRYCLSSRLRVSATFWQNPRNHFRCQVQFYGLSENDEWTQDRAKPVTQIVSAEAWGRADDVIKIHWQEKKSNTILGSQEGNTMKTNDTYMKFSWLTVPEKSLDKEHRCIVRHENNKNGVDQEIIFPPIKTDVITMDPKDNCSKDANDTLLLQLTNTSAYYMYLLLLLKSVVYFAIITCCLLMAMVKRKDSRG

SEQ ID NO: 14637 - protein, 730 aa, synthetic construct
MALPVTALLLPLALLLHAARPDIVMTQSPDSLAVSLGERATINCKSSQSLLNSGDQKNYLTWYQQKPGQPPKLLIYWASTRESGVPDRFSGSGSGTDFTLTISSLQAEDVAVYYCQNDYSYPLTFGQGTKVEIKLEIQNPDPAVYQLRDSKSSDKSVCLFTDFDSQTNVSQSKDSDVYITDKCVLDMRSMDFKSNSAVAWSNKSDFACANAFNNSIIPEDTFFPSPESSDSTDHVKPKETENTKQPSKSCHKPKAIVHTEKVNMMSLTVLGLRMLFAKTVAVNFLLTAKLFFLLTARAKRSGSGVKQTLNFDLLKLAGDVESNPGPTSMDWIWRILFLVGAATGAHSFEQVQLVQSGAEVKKTGSSVKVSCKASGYTFTDHAIHVWRQAPGQALEWMGHFSPGNTDIKYNDKFKGRVTLTVDRSMSTAYMELSSLRSEDTAMYYCKTSTFFFDYWGQGTMVTVSSTREDLKNVFPPEVAVFEPSEAEISHTQKATLVCLATGFYPDHVELSWWVNGKEVHSGVCTDPQPLKEQPALNDSRYCLSSRLRVSATFWQNPRNHFRCQVQFYGLSENDEWTQDRAKPVTQIVSAEAWGRADDVIKIHWQEKKSNTILGSQEGNTMKTNDTYMKFSWLTVPEKSLDKEHRCIVRHENNKNGVDQEIIFPPIKTDVITMDPKDNCSKDANDTLLLQLTNTSAYYMYLLLLLKSVVYFAIITCCLLMAMVKRKDSRG

SEQ ID NO: 14638 - protein, 729 aa, synthetic construct
MALPVTALLLPLALLLHAARPDIQMTQSPSSLSASVGDRVTITCKASQDVSIAVAWYQQKPGKAPKVLIYSASYRYTGVPDRFSGSGSGTDFTFTISSLQPEDIAVYYCQQHYITPLTFGGGTKVEIKLEIQNPDPAVYQLRDSKSSDKSVCLFTDFDSQTNVSQSKDSDVYITDKCVLDMRSMDFKSNSAVAWSNKSDFACANAFNNSIIPEDTFFPSPESSDSTDHVKPKETENTKQPSKSCHKPKAIVHTEKVNMMSLTVLGLRMLFAKTVAVNFLLTAKLFFLLTARAKRSGSGVKQTLNFDLLKLAGDVESNPGPTSMDWIWRILFLVGAATGAHSFEQIQLVQSGHEVKKPGASVKVSCKASGYTFTNYGMNWVRQAPGQGLEWMGWINTKTGEPTYAEEFKGRFVFSLETSASTAYLQISSLKAEDTAMYFCGRGGYGSSYWYFDVWGQGTTVTVSSTREDLKNVFPPEVAVFEPSEAEISHTQKATLVCLATGFYPDHVELSWWVNGKEVHSGVCTDPQPLKEQPALNDSRYCLSSRLRVSATFWQNPRNHFRCQVQFYGLSENDEWTQDRAKPVTQIVSAEAWGRADDVIKIHWQEKKSNTILGSQEGNTMKTNDTYMKFSWLTVPEKSLDKEHRCIVRHENNKNGVDQEIIFPPIKTDVITMDPKDNCSKDANDTLLLQLTNTSAYYMYLLLLLKSVVYFAIITCCLLMAMVKRKDSRG

SEQ ID NO: 14639 - protein, 731 aa, synthetic construct
MALPVTALLLPLALLLHAARPDIVMTQSPDSLAVSLGERATINCRASKSVSTSGYSYMHWYQQKPGQPPKLLIYLASNLESGVPDRFSGSGSGTDFTLTISSLQAEDVAVYYCQHSRELPYTFGQGTKLEIKLEIQNPDPAVYQLRDSKSSDKSVCLFTDFDSQTNVSQSKDSDVYITDKCVLDMRSMDFKSNSAVAWSNKSDFACANAFNNSIIPEDTFFPSPESSDSTDHVKPKETENTKQPSKSCHKPKAIVHTEKVNMMSLTVLGLRMLFAKTVAVNFLLTAKLFFLLTARAKRSGSGVKQTLNFDLLKLAGDVESNPGPTSMDWIWRILFLVGAATGAHSFEQVQLQESGPGLVKPSETLSLTCTVSGGSISSYGVHWIRQPPGKGLEWIGVIWTSGVTDYNSALMGRVTISVDTSKNQFSLKLSSVTAADTAVYYCARDGDYDRYTMDYWGQGTLVTVSSTREDLKNVFPPEVAVFEPSEAEISHTQKATLVCLATGFYPDHVELSWWVNGKEVHSGVCTDPQPLKEQPALNDSRYCLSSRLRVSATFWQNPRNHFRCQVQFYGLSENDEWTQDRAKPVTQIVSAEAWGRADDVIKIHWQEKKSNTILGSQEGNTMKTNDTYMKFSWLTVPEKSLDKEHRCIVRHENNKNGVDQEIIFPPIKTDVITMDPKDNCSKDANDTLLLQLTNTSAYYMYLLLLLKSVVYFAIITCCLLMAMVKRKDSRG

SEQ ID NO: 14640 - protein, 731 aa, synthetic construct
MALPVTALLLPLALLLHAARPDIQMTQSPSSLSASVGDRVTITCRASQSIGTSLHWYQQKPGKAPKLLIKFASRLQSGVPSRFSGSGSGTDFTLTISSLQPEDFATYYCQQSPGFPPTFGQGTKLEIKRLEIQNPDPAVYQLRDSKSSDKSVCLFTDFDSQTNVSQSKDSDVYITDKCVLDMRSMDFKSNSAVAWSNKSDFACANAFNNSIIPEDTFFPSPESSDSTDHVKPKETENTKQPSKSCHKPKAIVHTEKVNMMSLTVLGLRMLFAKTVAVNFLLTAKLFFLLTARAKRSGSGVKQTLNFDLLKLAGDVESNPGPTSMDWIWRILFLVGAATGAHSFEQVQLVESGGGLVKPGGSLRLSCAASGFSITTSGYYWTWIRQFPGKGLEWMGYIGYNSKTYYNPALKSRITISRDNAKNSLYLQMNSLRAEDTAVYYCARSLYGGYKDAFDSWGQGTLVTVSSTREDLKNVFPPEVAVFEPSEAEISHTQKATLVCLATGFYPDHVELSWWVNGKEVHSGVCTDPQPLKEQPALNDSRYCLSSRLRVSATFWQNPRNHFRCQVQFYGLSENDEWTQDRAKPVTQIVSAEAWGRADDVIKIHWQEKKSNTILGSQEGNTMKTNDTYMKFSWLTVPEKSLDKEHRCIVRHENNKNGVDQEIIFPPIKTDVITMDPKDNCSKDANDTLLLQLTNTSAYYMYLLLLLKSVVYFAIITCCLLMAMVKRKDSRG

SEQ ID NO: 14641 - protein, 736 aa, synthetic construct
MALPVTALLLPLALLLHAARPDEIVLTQSPLSLPVTPGEPASISCRSSQSLLHSIGYNYLDWYLQKPGQSPQLLIYLGSNRASGVPDRFSGSGSGTDFTLKISRVEAEDVGVYYCMQALQTPLTFGGGTKVEIKRLEIQNPDPAVYQLRDSKSSDKSVCLFTDFDSQTNVSQSKDSDVYITDKCVLDMRSMDFKSNSAVAWSNKSDFACANAFNNSIIPEDTFFPSPESSDSTDHVKPKETENTKQPSKSCHKPKAIVHTEKVNMMSLTVLGLRMLFAKTVAVNFLLTAKLFFLLTARAKRSGSGVKQTLNFDLLKLAGDVESNPGPTSMDWIWRILFLVGAATGAHSFEEVQLVESGGGVVQPGRSLRLSCAASGFTFRSYGMHWVRQAPGKGLEWVAVISYDGSNKYYTDSVNGRFTISRDNSKNTLYLQMNSLRAEDTAVYYCARGGGYYETSGPDYWGQGTLVTVSSTREDLKNVFPPEVAVFEPSEAEISHTQKATLVCLATGFYPDHVELSWWVNGKEVHSGVCTDPQPLKEQPALNDSRYCLSSRLRVSATFWQNPRNHFRCQVQFYGLSENDEWTQDRAKPVTQIVSAEAWGRADDVIKIHWQEKKSNTILGSQEGNTMKTNDTYMKFSWLTVPEKSLDKEHRCIVRHENNKNGVDQEIIFPPIKTDVITMDPKDNCSKDANDTLLLQLTNTSAYYMYLLLLLKSVVYFAIITCCLLMAMVKRKDSRG

SEQ ID NO: 14642 - protein, 734 aa, synthetic construct
MALPVTALLLPLALLLHAARPDDVVMTQSPLSLPVTPGEPASISCRSSQSLLHSIGYNYLHWFLQKPGQSPQLLIYLGSNRASGVPDRFSGSGSGTDFTLKISRVEAEDVGVYYCMQALQTPPTFGQGTRLEIKRLEIQNPDPAVYQLRDSKSSDKSVCLFTDFDSQTNVSQSKDSDVYITDKCVLDMRSMDFKSNSAVAWSNKSDFACANAFNNSIIPEDTFFPSPESSDSTDHVKPKETENTKQPSKSCHKPKAIVHTEKVNMMSLTVLGLRMLFAKTVAVNFLLTAKLFFLLTARAKRSGSGVKQTLNFDLLKLAGDVESNPGPTSMDWIWRILFLVGAATGAHSFEQLQLQESGPGLVKPSGTLSLTCAVSGGSISSSNWWSWVRQPPGKGLEWIGEIYHSGSTNYNPSLKSRVTISVDKSKNQFSLKLSSVTAADTAVYYCVGSPYGDYVLDYWGQGTLVTVSSTREDLKNVFPPEVAVFEPSEAEISHTQKATLVCLATGFYPDHVELSWWVNGKEVHSGVCTDPQPLKEQPALNDSRYCLSSRLRVSATFWQNPRNHFRCQVQFYGLSENDEWTQDRAKPVTQIVSAEAWGRADDVIKIHWQEKKSNTILGSQEGNTMKTNDTYMKFSWLTVPEKSLDKEHRCIVRHENNKNGVDQEIIFPPIKTDVITMDPKDNCSKDANDTLLLQLTNTSAYYMYLLLLLKSVVYFAIITCCLLMAMVKRKDSRG

SEQ ID NO: 14643 - protein, 732 aa, synthetic construct
MALPVTALLLPLALLLHAARPDEIVLTQSPGTLSLSLGERATLSCRASQSISSSFLAWYQQKPGQAPKLLIYAASTRATGIPDRFSGSGSGTDFTLTISRLEPEDFAVYYCQQYGRSLSFGGGTKVEVKLEIQNPDPAVYQLRDSKSSDKSVCLFTDFDSQTNVSQSKDSDVYITDKCVLDMRSMDFKSNSAVAWSNKSDFACANAFNNSIIPEDTFFPSPESSDSTDHVKPKETENTKQPSKSCHKPKAIVHTEKVNMMSLTVLGLRMLFAKTVAVNFLLTAKLFFLLTARAKRSGSGVKQTLNFDLLKLAGDVESNPGPTSMDWIWRILFLVGAATGAHSFEQVQLQQSGPGLVKPSQTLSLTCAISGDSVSGNSATWNWIRQSPSRGLEWLGRTYYRSKWNHDYAESVKSRITINPDTSKNQFSLQLNSVTPEDTAVYYCARGDSSSWYAFDYWGQGTLVTVSSTREDLKNVFPPEVAVFEPSEAEISHTQKATLVCLATGFYPDHVELSWWVNGKEVHSGVCTDPQPLKEQPALNDSRYCLSSRLRVSATFWQNPRNHFRCQVQFYGLSENDEWTQDRAKPVTQIVSAEAWGRADDVIKIHWQEKKSNTILGSQEGNTMKTNDTYMKFSWLTVPEKSLDKEHRCIVRHENNKNGVDQEIIFPPIKTDVITMDPKDNCSKDANDTLLLQLTNTSAYYMYLLLLLKSVVYFAIITCCLLMAMVKRKDSRG

SEQ ID NO: 14644 - protein, 731 aa, synthetic construct
MALPVTALLLPLALLLHAARPDQSVVTQPPSVSVAPGKTARITCGRNNIGSKSVHWYQQKPGQAPVLVVYDDSDRPSGIPERFSGSNSGNTATLTISRVEAGDEADYYCQVWDSSSDHVVFGGGTKLTVLGLEIQNPDPAVYQLRDSKSSDKSVCLFTDFDSQTNVSQSKDSDVYITDKCVLDMRSMDFKSNSAVAWSNKSDFACANAFNNSIIPEDTFFPSPESSDSTDHVKPKETENTKQPSKSCHKPKAIVHTEKVNMMSLTVLGLRMLFAKTVAVNFLLTAKLFFLLTARAKRSGSGVKQTLNFDLLKLAGDVESNPGPTSMDWIWRILFLVGAATGAHSFEVQLVQSGGGVMRPGGSLRLSCAASGFTFDDYGMSWVRQAPGKGLEWVSGINWNGGSTGYADSVRGRFTISRDNAKNSLYLQMNSLRAEDTALYYCARERGYGYHDPHDYWGQGTLVTVSSTREDLKNVFPPEVAVFEPSEAEISHTQKATLVCLATGFYPDHVELSWWVNGKEVHSGVCTDPQPLKEQPALNDSRYCLSSRLRVSATFWQNPRNHFRCQVQFYGLSENDEWTQDRAKPVTQIVSAEAWGRADDVIKIHWQEKKSNTILGSQEGNTMKTNDTYMKFSWLTVPEKSLDKEHRCIVRHENNKNGVDQEIIFPPIKTDVITMDPKDNCSKDANDTLLLQLTNTSAYYMYLLLLLKSVVYFAIITCCLLMAMVKRKDSRG

SEQ ID NO: 14645 - protein, 744 aa, synthetic construct
MALPVTALLLPLALLLHAARPEQKLISEEDLEFQAVVTQPPSASGTPGQRVTISCSGSSSNIGSNTVNWYQQVPGTAPKLLIYSNNQRPSGVPDRFSGSKSGTSASLAISGLQSEDEADYYCAAWDDSLNGWVFGGGTKLTVLLEIQNPDPAVYQLRDSKSSDKSVCLFTDFDSQTNVSQSKDSDVYITDKCVLDMRSMDFKSNSAVAWSNKSDFACANAFNNSIIPEDTFFPSPESSDSTDHVKPKETENTKQPSKSCHKPKAIVHTEKVNMMSLTVLGLRMLFAKTVAVNFLLTAKLFFLLTARAKRSGSGVKQTLNFDLLKLAGDVESNPGPTSMDWIWRILFLVGAATGAHSFEQMQLVQSGAEVKEPGESLRISCKGSGYSFTNFWISWVRQMPGKGLEWMGRVDPGYSYSTYSPSFQGHVTISADKSTSTAYLQWNSLKASDTAMYYCARVQYSGYYDWFDPWGQGTLVTVSSTREDLKNVFPPEVAVFEPSEAEISHTQKATLVCLATGFYPDHVELSWWVNGKEVHSGVCTDPQPLKEQPALNDSRYCLSSRLRVSATFWQNPRNHFRCQVQFYGLSENDEWTQDRAKPVTQIVSAEAWGRADDVIKIHWQEKKSNTILGSQEGNTMKTNDTYMKFSWLTVPEKSLDKEHRCIVRHENNKNGVDQEIIFPPIKTDVITMDPKDNCSKDANDTLLLQLTNTSAYYMYLLLLLKSVVYFAIITCCLLMAMVKRKDSRG

SEQ ID NO: 14646 - protein, 738 aa, synthetic construct
MALPVTALLLPLALLLHAARPEQKLISEEDLEFDIQMTQSPSTLSASVGDRVTITCRASQNINKWLAWYQQRPGKAPQLLIYKASSLESGVPSRFSGSGSGTEYTLTISSLQPDDFATYYCQQYNSYATFGQGTKVEIKRLEIQNPDPAVYQLRDSKSSDKSVCLFTDFDSQTNVSQSKDSDVYITDKCVLDMRSMDFKSNSAVAWSNKSDFACANAFNNSIIPEDTFFPSPESSDSTDHVKPKETENTKQPSKSCHKPKAIVHTEKVNMMSLTVLGLRMLFAKTVAVNFLLTAKLFFLLTARAKRSGSGVKQTLNFDLLKLAGDVESNPGPTSMDWIWRILFLVGAATGAHSFEQVQLVQSGAEVKKPGESLKISCKGSGYNFSNKWIGWVRQLPGRGLEWIAIIYPGYSDITYSPSFQGRVTISADTSINTAYLHWHSLKASDTAMYYCVRHTALAGFDYWGLGTLVTVSSTREDLKNVFPPEVAVFEPSEAEISHTQKATLVCLATGFYPDHVELSWWVNGKEVHSGVCTDPQPLKEQPALNDSRYCLSSRLRVSATFWQNPRNHFRCQVQFYGLSENDEWTQDRAKPVTQIVSAEAWGRADDVIKIHWQEKKSNTILGSQEGNTMKTNDTYMKFSWLTVPEKSLDKEHRCIVRHENNKNGVDQEIIFPPIKTDVITMDPKDNCSKDANDTLLLQLTNTSAYYMYLLLLLKSVVYFAIITCCLLMAMVKRKDSRG

SEQ ID NO: 14647 - protein, 730 aa, synthetic construct
MALPVTALLLPLALLLHAARPDIVLTQSPASLAVSLGQRATISCRASESVDNYGNTFMHWYQQKPGQPPKLLIYRASNLESGIPARFSGSGSRTDFTLTINPVEADDVATYYCQQSNEDPPTFGAGTKLELKLEIQNPDPAVYQLRDSKSSDKSVCLFTDFDSQTNVSQSKDSDVYITDKCVLDMRSMDFKSNSAVAWSNKSDFACANAFNNSIIPEDTFFPSPESSDSTDHVKPKETENTKQPSKSCHKPKAIVHTEKVNMMSLTVLGLRMLFAKTVAVNFLLTAKLFFLLTARAKRSGSGVKQTLNFDLLKLAGDVESNPGPTSMDWIWRILFLVGAATGAHSFEQIQLVQSGPELKKPGETVKISCKASGYIFTNYGMNWVKQAPGKSFKWMGWINTYTGESTYSADFKGRFAFSLETSASTAYLHINDLKNEDTATYFCARSGGYDPMDYWGQGTSVTVSSTREDLKNVFPPEVAVFEPSEAEISHTQKATLVCLATGFYPDHVELSWWVNGKEVHSGVCTDPQPLKEQPALNDSRYCLSSRLRVSATFWQNPRNHFRCQVQFYGLSENDEWTQDRAKPVTQIVSAEAWGRADDVIKIHWQEKKSNTILGSQEGNTMKTNDTYMKFSWLTVPEKSLDKEHRCIVRHENNKNGVDQEIIFPPIKTDVITMDPKDNCSKDANDTLLLQLTNTSAYYMYLLLLLKSVVYFAIITCCLLMAMVKRKDSRG

SEQ ID NO: 14648 - protein, 729 aa, synthetic construct
MALPVTALLLPLALLLHAARPDEIVLTQSPGTLSLSPGERATLSCRASQSVSNTYLAWYHQRPGQAPRLLIYGASSRATGIPDRFSGSGSGTDFALTISSLEPEDFAVYYCQQYSNSWTFGQGTKVEIKRLEIQNPDPAVYQLRDSKSSDKSVCLFTDFDSQTNVSQSKDSDVYITDKCVLDMRSMDFKSNSAVAWSNKSDFACANAFNNSIIPEDTFFPSPESSDSTDHVKPKETENTKQPSKSCHKPKAIVHTEKVNMMSLTVLGLRMLFAKTVAVNFLLTAKLFFLLTARAKRSGSGVKQTLNFDLLKLAGDVESNPGPTSMDWIWRILFLVGAATGAHSFEQVQLVESGGGVVQPGRSLRLSCAASGFTFSSYDMHWVRQAPGKGLEWVAVISYDGTNEYYADSVKGRFTISRDTSKNTLYLQMNSLRAEDTAVYYCARERYFDWSFDYWGQGTLVSVSSTREDLKNVFPPEVAVFEPSEAEISHTQKATLVCLATGFYPDHVELSWWVNGKEVHSGVCTDPQPLKEQPALNDSRYCLSSRLRVSATFWQNPRNHFRCQVQFYGLSENDEWTQDRAKPVTQIVSAEAWGRADDVIKIHWQEKKSNTILGSQEGNTMKTNDTYMKFSWLTVPEKSLDKEHRCIVRHENNKNGVDQEIIFPPIKTDVITMDPKDNCSKDANDTLLLQLTNTSAYYMYLLLLLKSVVYFAIITCCLLMAMVKRKDSRG

SEQ ID NO: 14649 - protein, 728 aa, synthetic construct
MALPVTALLLPLALLLHAARPDELTQDPAVSVALGQTVRITCQGDSLRSNYANWYQQKPGQAPVLVIYGQNNRPSGIPDRFSGSSSGNTASLTITGAQAADEADYYCDSRVSTGNHVVFGGGTKLTVLGQLEIQNPDPAVYQLRDSKSSDKSVCLFTDFDSQTNVSQSKDSDVYITDKCVLDMRSMDFKSNSAVAWSNKSDFACANAFNNSIIPEDTFFPSPESSDSTDHVKPKETENTKQPSKSCHKPKAIVHTEKVNMMSLTVLGLRMLFAKTVAVNFLLTAKLFFLLTARAKRSGSGVKQTLNFDLLKLAGDVESNPGPTSMDWIWRILFLVGAATGAHSFEEVQLVQSGAEVKKPGASVKVSCKASGYTFTSYAMHWVRQAPGQRLEWMGWINAGNGNTKYSQKFQGRVTITRDTSASTAYMELSSLRSEDTAVYYCARDISYGSFDYWGQGTLVTVSSTREDLKNVFPPEVAVFEPSEAEISHTQKATLVCLATGFYPDHVELSWWVNGKEVHSGVCTDPQPLKEQPALNDSRYCLSSRLRVSATFWQNPRNHFRCQVQFYGLSENDEWTQDRAKPVTQIVSAEAWGRADDVIKIHWQEKKSNTILGSQEGNTMKTNDTYMKFSWLTVPEKSLDKEHRCIVRHENNKNGVDQEIIFPPIKTDVITMDPKDNCSKDANDTLLLQLTNTSAYYMYLLLLLKSVVYFAIITCCLLMAMVKRKDSRG

SEQ ID NO: 14650 - protein, 730 aa, synthetic construct
MALPVTALLLPLALLLHAARPDDIVLTQTPATLSVTPGDSVSLSCRASQSISNNLHWYQQKSHESPRLLIKNASQSISGIPSKFSGSGSGTDFTLRINSVETEDFGMYFCQQSNSWPYTFGSGTKLEIKLEIQNPDPAVYQLRDSKSSDKSVCLFTDFDSQTNVSQSKDSDVYITDKCVLDMRSMDFKSNSAVAWSNKSDFACANAFNNSIIPEDTFFPSPESSDSTDHVKPKETENTKQPSKSCHKPKAIVHTEKVNMMSLTVLGLRMLFAKTVAVNFLLTAKLFFLLTARAKRSGSGVKQTLNFDLLKLAGDVESNPGPTSMDWIWRILFLVGAATGAHSFEQVKLQQSGPELVKPGASVKISCKASGYSFTGYYMHWVKQSHGNILDWIGYIYPYNGVSSYNQKFKGKATLTVDKSSSTAYMELRSLTSEDSAVYYCARERGLYQLRAMDYWGQGTSVTVSSTREDLKNVFPPEVAVFEPSEAEISHTQKATLVCLATGFYPDHVELSWWVNGKEVHSGVCTDPQPLKEQPALNDSRYCLSSRLRVSATFWQNPRNHFRCQVQFYGLSENDEWTQDRAKPVTQIVSAEAWGRADDVIKIHWQEKKSNTILGSQEGNTMKTNDTYMKFSWLTVPEKSLDKEHRCIVRHENNKNGVDQEIIFPPIKTDVITMDPKDNCSKDANDTLLLQLTNTSAYYMYLLLLLKSVVYFAIITCCLLMAMVKRKDSRG

SEQ ID NO: 14651 - protein, 721 aa, synthetic construct
MALPVTALLLPLALLLHAARPDDIVMTQTPAIMSASPGQKVTITCSASSSVNYMHWYQQKLGSSPKLWIYDTSKLAPGVPARFSGSGSGTSYSLTISSMEAEDAASYFCHQWSSYPYTFGSGTKLEIKLEIQNPDPAVYQLRDSKSSDKSVCLFTDFDSQTNVSQSKDSDVYITDKCVLDMRSMDFKSNSAVAWSNKSDFACANAFNNSIIPEDTFFPSPESSDSTDHVKPKETENTKQPSKSCHKPKAIVHTEKVNMMSLTVLGLRMLFAKTVAVNFLLTAKLFFLLTARAKRSGSGVKQTLNFDLLKLAGDVESNPGPTSMDWIWRILFLVGAATGAHSFEEVQLQESGPDLVKPSQSLSLTCTVTGYSITSGYGWHWIRQFPGNKLEWMGYIHYSGSTTYNPSLKSRISISRDTSKNQFFLQLNSVTTEDTATYYCARSLRYWGQGTTLTVSSTREDLKNVFPPEVAVFEPSEAEISHTQKATLVCLATGFYPDHVELSWWVNGKEVHSGVCTDPQPLKEQPALNDSRYCLSSRLRVSATFWQNPRNHFRCQVQFYGLSENDEWTQDRAKPVTQIVSAEAWGRADDVIKIHWQEKKSNTILGSQEGNTMKTNDTYMKFSWLTVPEKSLDKEHRCIVRHENNKNGVDQEIIFPPIKTDVITMDPKDNCSKDANDTLLLQLTNTSAYYMYLLLLLKSVVYFAIITCCLLMAMVKRKDSRG

SEQ ID NO: 14652 - protein, 724 aa, synthetic construct
MALPVTALLLPLALLLHAARPDDIQMTQSPSSLSASVGDRVTITCSATSSISYMHWYQQKPGKAPKGWIYDTSKLAHGVPSRFSGSGSGTDFTLTISSLQPEDFATYYCHQRRSYPFTFGQGTKVEIKLEIQNPDPAVYQLRDSKSSDKSVCLFTDFDSQTNVSQSKDSDVYITDKCVLDMRSMDFKSNSAVAWSNKSDFACANAFNNSIIPEDTFFPSPESSDSTDHVKPKETENTKQPSKSCHKPKAIVHTEKVNMMSLTVLGLRMLFAKTVAVNFLLTAKLFFLLTARAKRSGSGVKQTLNFDLLKLAGDVESNPGPTSMDWIWRILFLVGAATGAHSFEEVQLVQSGAEVKKPGASVKVSCKASGYTFTNFWIHWVRQAPGQGLEWIGEIDPSDSYTNYNQKFKGRVTITRDTSTSTAYLELSSLRSEDTAVYYCAREITTVDYWGQGTLVTVSSTREDLKNVFPPEVAVFEPSEAEISHTQKATLVCLATGFYPDHVELSWWVNGKEVHSGVCTDPQPLKEQPALNDSRYCLSSRLRVSATFWQNPRNHFRCQVQFYGLSENDEWTQDRAKPVTQIVSAEAWGRADDVIKIHWQEKKSNTILGSQEGNTMKTNDTYMKFSWLTVPEKSLDKEHRCIVRHENNKNGVDQEIIFPPIKTDVITMDPKDNCSKDANDTLLLQLTNTSAYYMYLLLLLKSVVYFAIITCCLLMAMVKRKDSRG

SEQ ID NO: 14653 - protein, 731 aa, synthetic construct
MALPVTALLLPLALLLHAARPDDIQMTQSPSSLSASVGDRVTITCKASQGFNKYVAWYQQKPGKAPKLLIYYTSTLQPGVPSRFSGSGSGRDYTLTISSLQPEDFATYYCLQYGNLLYAFGQGTKVEIKRLEIQNPDPAVYQLRDSKSSDKSVCLFTDFDSQTNVSQSKDSDVYITDKCVLDMRSMDFKSNSAVAWSNKSDFACANAFNNSIIPEDTFFPSPESSDSTDHVKPKETENTKQPSKSCHKPKAIVHTEKVNMMSLTVLGLRMLFAKTVAVNFLLTAKLFFLLTARAKRSGSGVKQTLNFDLLKLAGDVESNPGPTSMDWIWRILFLVGAATGAHSFEEVQLVQSGAEVKKPGASVKVSCKASGYTFTSYWIGWVRQAPGQGLEWIGDIYPGGGYTNYNEKFKGRVTITRDTSTSTAYLELSSLRSEDTAVYYCARLDGSSYRGAMDSWGQGTLVTVSSTREDLKNVFPPEVAVFEPSEAEISHTQKATLVCLATGFYPDHVELSWWVNGKEVHSGVCTDPQPLKEQPALNDSRYCLSSRLRVSATFWQNPRNHFRCQVQFYGLSENDEWTQDRAKPVTQIVSAEAWGRADDVIKIHWQEKKSNTILGSQEGNTMKTNDTYMKFSWLTVPEKSLDKEHRCIVRHENNKNGVDQEIIFPPIKTDVITMDPKDNCSKDANDTLLLQLTNTSAYYMYLLLLLKSVVYFAIITCCLLMAMVKRKDSRG

SEQ ID NO: 14654 - protein, 727 aa, synthetic construct
MALPVTALLLPLALLLHAARPDDIQMTQSPSSLSASVGDRVTITCRASQDIRYYLNWYQQKPGKAPKLLIYVASSLQSGVPSRFSGSGSGTEFTLTVSSLQPEDFATYYCLQVYSTPRTFGQGTKVEIKLEIQNPDPAVYQLRDSKSSDKSVCLFTDFDSQTNVSQSKDSDVYITDKCVLDMRSMDFKSNSAVAWSNKSDFACANAFNNSIIPEDTFFPSPESSDSTDHVKPKETENTKQPSKSCHKPKAIVHTEKVNMMSLTVLGLRMLFAKTVAVNFLLTAKLFFLLTARAKRSGSGVKQTLNFDLLKLAGDVESNPGPTSMDWIWRILFLVGAATGAHSFEEVQLVESGGGLAKPGGSLRLSCAASGFRFTFNNYYMDWVRQAPGQGLEWVSRISSSGDPTWYADSVKGRFTISRENAKNTLFLQMNSLRAEDTAVYYCASLTTGSDSWGQGVLVTVSSTREDLKNVFPPEVAVFEPSEAEISHTQKATLVCLATGFYPDHVELSWWVNGKEVHSGVCTDPQPLKEQPALNDSRYCLSSRLRVSATFWQNPRNHFRCQVQFYGLSENDEWTQDRAKPVTQIVSAEAWGRADDVIKIHWQEKKSNTILGSQEGNTMKTNDTYMKFSWLTVPEKSLDKEHRCIVRHENNKNGVDQEIIFPPIKTDVITMDPKDNCSKDANDTLLLQLTNTSAYYMYLLLLLKSVVYFAIITCCLLMAMVKRKDSRG

SEQ ID NO: 14655 - protein, 727 aa, synthetic construct
MALPVTALLLPLALLLHAARPEIVMTQSPATLSVSPGERATLSCRASQSVSRNLAWYQQKPGQAPRLLIYGASTRATGIPARFSGSGSGTEFTLTIGSLQSEDFAVYYCQQYKTWPRTFGQGTNVEIKLEIQNPDPAVYQLRDSKSSDKSVCLFTDFDSQTNVSQSKDSDVYITDKCVLDMRSMDFKSNSAVAWSNKSDFACANAFNNSIIPEDTFFPSPESSDSTDHVKPKETENTKQPSKSCHKPKAIVHTEKVNMMSLTVLGLRMLFAKTVAVNFLLTAKLFFLLTARAKRSGSGVKQTLNFDLLKLAGDVESNPGPTSMDWIWRILFLVGAATGAHSFEQVQLQQWGAGLLKPSETLSLTCAVFGGSFSGYYWSWIRQPPGKGLEWIGEINHRGNTNDNPSLKSRVTISVDTSKNQFALKLSSVTAADTAVYYCARERGYTYGNFDHWGQGTLVTVSSTREDLKNVFPPEVAVFEPSEAEISHTQKATLVCLATGFYPDHVELSWWVNGKEVHSGVCTDPQPLKEQPALNDSRYCLSSRLRVSATFWQNPRNHFRCQVQFYGLSENDEWTQDRAKPVTQIVSAEAWGRADDVIKIHWQEKKSNTILGSQEGNTMKTNDTYMKFSWLTVPEKSLDKEHRCIVRHENNKNGVDQEIIFPPIKTDVITMDPKDNCSKDANDTLLLQLTNTSAYYMYLLLLLKSVVYFAIITCCLLMAMVKRKDSRG

SEQ ID NO: 14656 - protein, 728 aa, synthetic construct
MALPVTALLLPLALLLHAARPEIVMTPSSATLSVSPGERATLSCRASQSVSRNLAWYQQKPGQAPRLLIYGASTRATGIPARFSGSGSGTEFTLTISSLQSEDFAVYYCHQYSNWMCSFGQGTKLEIKLEIQNPDPAVYQLRDSKSSDKSVCLFTDFDSQTNVSQSKDSDVYITDKCVLDMRSMDFKSNSAVAWSNKSDFACANAFNNSIIPEDTFFPSPESSDSTDHVKPKETENTKQPSKSCHKPKAIVHTEKVNMMSLTVLGLRMLFAKTVAVNFLLTAKLFFLLTARAKRSGSGVKQTLNFDLLKLAGDVESNPGPTSMDWIWRILFLVGAATGAHSFEEVQLLESGGGLVQPGGSLRLSCAASGFTFSRYAMNWVRQAPGKGLEWVSGISGSGGRTYYADSVKGRFTISRDNSKNTLYLQMNSLRAEDTAVYYCAKDRDFWSGPFDYWGQGTLVTVSSTREDLKNVFPPEVAVFEPSEAEISHTQKATLVCLATGFYPDHVELSWWVNGKEVHSGVCTDPQPLKEQPALNDSRYCLSSRLRVSATFWQNPRNHFRCQVQFYGLSENDEWTQDRAKPVTQIVSAEAWGRADDVIKIHWQEKKSNTILGSQEGNTMKTNDTYMKFSWLTVPEKSLDKEHRCIVRHENNKNGVDQEIIFPPIKTDVITMDPKDNCSKDANDTLLLQLTNTSAYYMYLLLLLKSVVYFAIITCCLLMAMVKRKDSRG

SEQ ID NO: 14657 - protein, 733 aa, synthetic construct
MALPVTALLLPLALLLHAARPDIQMTQSPSSLSASVGDRVTITCKASKNIRSYLAWYQQKPGKAPKLLIYSGSTLHSGVPSRFSGSGSGTDFTLTISSLQPEDFATYYCQQHHEYPLTFGQGTKVEIKRLEIQNPDPAVYQLRDSKSSDKSVCLFTDFDSQTNVSQSKDSDVYITDKCVLDMRSMDFKSNSAVAWSNKSDFACANAFNNSIIPEDTFFPSPESSDSTDHVKPKETENTKQPSKSCHKPKAIVHTEKVNMMSLTVLGLRMLFAKTVAVNFLLTAKLFFLLTARAKRSGSGVKQTLNFDLLKLAGDVESNPGPTSMDWIWRILFLVGAATGAHSFEQVQLQESGPGLVKPSETLSLTCTVSGYTITSGYDWSWIRQPPGKGLEWIGYINYGGSTNYKPSLGSRVTISVDTSKNQFSLKLSSVTAADTAVYYCARYNEYKSYIYDWYFDFWGQGTLVTVSSTREDLKNVFPPEVAVFEPSEAEISHTQKATLVCLATGFYPDHVELSWWVNGKEVHSGVCTDPQPLKEQPALNDSRYCLSSRLRVSATFWQNPRNHFRCQVQFYGLSENDEWTQDRAKPVTQIVSAEAWGRADDVIKIHWQEKKSNTILGSQEGNTMKTNDTYMKFSWLTVPEKSLDKEHRCIVRHENNKNGVDQEIIFPPIKTDVITMDPKDNCSKDANDTLLLQLTNTSAYYMYLLLLLKSVVYFAIITCCLLMAMVKRKDSRG

SEQ ID NO: 14658 - protein, 735 aa, synthetic construct
MALPVTALLLPLALLLHAARPQSVVTQPPSVSAAPGQKVTISCSGSSSNIGNNYVSWYQQLPGTAPKLLIYDNNKRPSGIPDRFSGSKSGTSATLGITGLQTGDEADYYCGTWDGSLYTMLFGGGTKLTVLLEIQNPDPAVYQLRDSKSSDKSVCLFTDFDSQTNVSQSKDSDVYITDKCVLDMRSMDFKSNSAVAWSNKSDFACANAFNNSIIPEDTFFPSPESSDSTDHVKPKETENTKQPSKSCHKPKAIVHTEKVNMMSLTVLGLRMLFAKTVAVNFLLTAKLFFLLTARAKRSGSGVKQTLNFDLLKLAGDVESNPGPTSMDWIWRILFLVGAATGAHSFEEVQLVESGGGLVKPGGSLRLSCAASGFTFSNAWMSWVRQAPGKGLEWVGFIRSKAYGGTTEYAASVKGRFTISRDDSKSIAYLQMNNLKTEDTAVYYCARDGLYSSSWYDSDYWGQGTLVTVSSTREDLKNVFPPEVAVFEPSEAEISHTQKATLVCLATGFYPDHVELSWWVNGKEVHSGVCTDPQPLKEQPALNDSRYCLSSRLRVSATFWQNPRNHFRCQVQFYGLSENDEWTQDRAKPVTQIVSAEAWGRADDVIKIHWQEKKSNTILGSQEGNTMKTNDTYMKFSWLTVPEKSLDKEHRCIVRHENNKNGVDQEIIFPPIKTDVITMDPKDNCSKDANDTLLLQLTNTSAYYMYLLLLLKSVVYFAIITCCLLMAMVKRKDSRG

SEQ ID NO: 14659 - protein, 740 aa, synthetic construct
MALPVTALLLPLALLLHAARPQSVLTQPPSVSGAPGQRVTISCTGSSSNIGAGYDVHWYQQLPGTAPKLLIFGNSNRPSGVPDRFSGFKSGTSASLAITGLQAEDEADYFCQSYDSSLSGSGVFGTGTKVTVLGLEIQNPDPAVYQLRDSKSSDKSVCLFTDFDSQTNVSQSKDSDVYITDKCVLDMRSMDFKSNSAVAWSNKSDFACANAFNNSIIPEDTFFPSPESSDSTDHVKPKETENTKQPSKSCHKPKAIVHTEKVNMMSLTVLGLRMLFAKTVAVNFLLTAKLFFLLTARAKRSGSGVKQTLNFDLLKLAGDVESNPGPTSMDWIWRILFLVGAATGAHSFEQMQLVQSGGGLVQPGRSLRLSCAASGFTFDDYAMHWVRQAPGKGLEWVSGISWNSGSIGYADSVKGRFTISRDNAKNSLYLQMNSLRAEDTALYYCAKDIHSGSYYGLLYYAMDVWGQGTTVTVSSTREDLKNVFPPEVAVFEPSEAEISHTQKATLVCLATGFYPDHVELSWWVNGKEVHSGVCTDPQPLKEQPALNDSRYCLSSRLRVSATFWQNPRNHFRCQVQFYGLSENDEWTQDRAKPVTQIVSAEAWGRADDVIKIHWQEKKSNTILGSQEGNTMKTNDTYMKFSWLTVPEKSLDKEHRCIVRHENNKNGVDQEIIFPPIKTDVITMDPKDNCSKDANDTLLLQLTNTSAYYMYLLLLLKSVVYFAIITCCLLMAMVKRKDSRG

SEQ ID NO: 14660 - protein, 740 aa, synthetic construct
MALPVTALLLPLALLLHAARPLPVLTQPPSASGTPGQRVTISCSGRSSNIGSNSVNWYRQLPGAAPKLLIYSNNQRPPGVPVRFSGSKSGTSASLAISGLQSEDEATYYCATWDDNLNVHYVFGTGTKVTVLGSRLEIQNPDPAVYQLRDSKSSDKSVCLFTDFDSQTNVSQSKDSDVYITDKCVLDMRSMDFKSNSAVAWSNKSDFACANAFNNSIIPEDTFFPSPESSDSTDHVKPKETENTKQPSKSCHKPKAIVHTEKVNMMSLTVLGLRMLFAKTVAVNFLLTAKLFFLLTARAKRSGSGVKQTLNFDLLKLAGDVESNPGPTSMDWIWRILFLVGAATGAHSFELEMAQVQLVQSGAEVKKPGSSVKVSCKASGGTFSSYAISWVRQAPGQGLEWMGRIIPILGIANYAQKFQGRVTITADKSTSTAYMELSSLRSEDTAVYYCARGGYYSHDMWSEDWGQGTLVTVSSTREDLKNVFPPEVAVFEPSEAEISHTQKATLVCLATGFYPDHVELSWWVNGKEVHSGVCTDPQPLKEQPALNDSRYCLSSRLRVSATFWQNPRNHFRCQVQFYGLSENDEWTQDRAKPVTQIVSAEAWGRADDVIKIHWQEKKSNTILGSQEGNTMKTNDTYMKFSWLTVPEKSLDKEHRCIVRHENNKNGVDQEIIFPPIKTDVITMDPKDNCSKDANDTLLLQLTNTSAYYMYLLLLLKSVVYFAIITCCLLMAMVKRKDSRG

SEQ ID NO: 14661 - protein, 734 aa, synthetic construct
MALPVTALLLPLALLLHAARPDFVMTQSPDSLAVSLGERVTMSCKSSQSLLNSGNQKNYLTWYQQKPGQPPKLLIYWASTRESGVPDRFSGSGSGTDFTLTISSLQAEDVAVYYCQNDYSYPYTFGQGTKLEIKLEIQNPDPAVYQLRDSKSSDKSVCLFTDFDSQTNVSQSKDSDVYITDKCVLDMRSMDFKSNSAVAWSNKSDFACANAFNNSIIPEDTFFPSPESSDSTDHVKPKETENTKQPSKSCHKPKAIVHTEKVNMMSLTVLGLRMLFAKTVAVNFLLTAKLFFLLTARAKRSGSGVKQTLNFDLLKLAGDVESNPGPTSMDWIWRILFLVGAATGAHSFEEVQLVQSGAELKKPGASVKVSCKASGYTFTDYYMKWVRQAPGQGLEWIGDIIPSNGATFYNQKFKGRVTITVDKSTSTAYMELSSLRSEDTAVYYCARSHLLRASWFAYWGQGTLVTVSSTREDLKNVFPPEVAVFEPSEAEISHTQKATLVCLATGFYPDHVELSWWVNGKEVHSGVCTDPQPLKEQPALNDSRYCLSSRLRVSATFWQNPRNHFRCQVQFYGLSENDEWTQDRAKPVTQIVSAEAWGRADDVIKIHWQEKKSNTILGSQEGNTMKTNDTYMKFSWLTVPEKSLDKEHRCIVRHENNKNGVDQEIIFPPIKTDVITMDPKDNCSKDANDTLLLQLTNTSAYYMYLLLLLKSVVYFAIITCCLLMAMVKRKDSRG

SEQ ID NO: 14662 - protein, 734 aa, synthetic construct
MALPVTALLLPLALLLHAARPDFVMTQSPDSLAVSLGERVTMSCKSSQSLLNSGNQKNYLTWYQQKPGQPPKLLIYWASTRESGVPDRFSGSGSGTDFTLTISSLQAEDVAVYYCQNDYSYPYTFGQGTKLEIKLEIQNPDPAVYQLRDSKSSDKSVCLFTDFDSQTNVSQSKDSDVYITDKCVLDMRSMDFKSNSAVAWSNKSDFACANAFNNSIIPEDTFFPSPESSDSTDHVKPKETENTKQPSKSCHKPKAIVHTEKVNMMSLTVLGLRMLFAKTVAVNFLLTAKLFFLLTARAKRSGSGVKQTLNFDLLKLAGDVESNPGPTSMDWIWRILFLVGAATGAHSFEQVQLVQSGAELKKPGASVKVSCKASGYTFTDYYMKWVRQAPGQGLEWIGDIIPSNGATFYNQKFKGRVTITVDKSTSTAYMELSSLRSEDTAVYYCARSHLLRASWFAYWGQGTLVTVSSTREDLKNVFPPEVAVFEPSEAEISHTQKATLVCLATGFYPDHVELSWWVNGKEVHSGVCTDPQPLKEQPALNDSRYCLSSRLRVSATFWQNPRNHFRCQVQFYGLSENDEWTQDRAKPVTQIVSAEAWGRADDVIKIHWQEKKSNTILGSQEGNTMKTNDTYMKFSWLTVPEKSLDKEHRCIVRHENNKNGVDQEIIFPPIKTDVITMDPKDNCSKDANDTLLLQLTNTSAYYMYLLLLLKSVVYFAIITCCLLMAMVKRKDSRG

SEQ ID NO: 14663 - protein, 724 aa, synthetic construct
MALPVTALLLPLALLLHAARPDVQITQSPSYLAASPGETITINCRASKSISKDLAWYQEKPGKTNKLLIYSGSTLQSGIPSRFSGSGSGTDFTLTISSLEPEDFAMYYCQQHNKYPYTFGGGTKLEIKRLEIQNPDPAVYQLRDSKSSDKSVCLFTDFDSQTNVSQSKDSDVYITDKCVLDMRSMDFKSNSAVAWSNKSDFACANAFNNSIIPEDTFFPSPESSDSTDHVKPKETENTKQPSKSCHKPKAIVHTEKVNMMSLTVLGLRMLFAKTVAVNFLLTAKLFFLLTARAKRSGSGVKQTLNFDLLKLAGDVESNPGPTSMDWIWRILFLVGAATGAHSFEQVQLQQPGAELVRPGASVKLSCKASGYTFTSYWMNWVKQRPDQGLEWIGRIDPYDSETHYNQKFKDKAILTVDKSSSTAYMQLSSLTSEDSAVYYCARGNWDDYWGQGTTLTVSSTREDLKNVFPPEVAVFEPSEAEISHTQKATLVCLATGFYPDHVELSWWVNGKEVHSGVCTDPQPLKEQPALNDSRYCLSSRLRVSATFWQNPRNHFRCQVQFYGLSENDEWTQDRAKPVTQIVSAEAWGRADDVIKIHWQEKKSNTILGSQEGNTMKTNDTYMKFSWLTVPEKSLDKEHRCIVRHENNKNGVDQEIIFPPIKTDVITMDPKDNCSKDANDTLLLQLTNTSAYYMYLLLLLKSVVYFAIITCCLLMAMVKRKDSRG

SEQ ID NO: 14664 - protein, 726 aa, synthetic construct
MALPVTALLLPLALLLHAARPEIVLTQSPTSMTASPGEQVTITCRASSSINYMHWYQQKPGASPRPWIYETSKLASGVPDRFSGSASGTSYSLTINNMEAEDAATYYCQQWNYPSWTFGGGTKLELKLEIQNPDPAVYQLRDSKSSDKSVCLFTDFDSQTNVSQSKDSDVYITDKCVLDMRSMDFKSNSAVAWSNKSDFACANAFNNSIIPEDTFFPSPESSDSTDHVKPKETENTKQPSKSCHKPKAIVHTEKVNMMSLTVLGLRMLFAKTVAVNFLLTAKLFFLLTARAKRSGSGVKQTLNFDLLKLAGDVESNPGPTSMDWIWRILFLVGAATGAHSFEEVQLVESGGGLVQPGRSLKLSCAASGFTFSDYNMAWVRQAPKKGLEWVATILYDGGRTYYRGSVKGRFTISRDNAKSTLYLRMDSLRSEDTATYYCATHSRGTDYFDYWGQGVMVTVSSTREDLKNVFPPEVAVFEPSEAEISHTQKATLVCLATGFYPDHVELSWWVNGKEVHSGVCTDPQPLKEQPALNDSRYCLSSRLRVSATFWQNPRNHFRCQVQFYGLSENDEWTQDRAKPVTQIVSAEAWGRADDVIKIHWQEKKSNTILGSQEGNTMKTNDTYMKFSWLTVPEKSLDKEHRCIVRHENNKNGVDQEIIFPPIKTDVITMDPKDNCSKDANDTLLLQLTNTSAYYMYLLLLLKSVVYFAIITCCLLMAMVKRKDSRG

SEQ ID NO: 14665 - protein, 735 aa, synthetic construct
MALPVTALLLPLALLLHAARPDIVMTQSPSSLAVSEGETVTINCKSSQSFLSSGDGKNYVAWYQYKPGQSPKLLIYWASTRQSGVPDRFIGSGSGTDFTLTISTVQAEDLAIYYCQQYYDTPLTFGSGTKLEIKLEIQNPDPAVYQLRDSKSSDKSVCLFTDFDSQTNVSQSKDSDVYITDKCVLDMRSMDFKSNSAVAWSNKSDFACANAFNNSIIPEDTFFPSPESSDSTDHVKPKETENTKQPSKSCHKPKAIVHTEKVNMMSLTVLGLRMLFAKTVAVNFLLTAKLFFLLTARAKRSGSGVKQTLNFDLLKLAGDVESNPGPTSMDWIWRILFLVGAATGAHSFEEVKLQESGPSLVQSSQTLSLTCTVSGFSLTSYHIHWVRQTPGKGLEWMGVMWSDGDTSYNSALKSRLSISRDTSQSQVFLKMNSLQTEDTATYYCARGYYSSYLYLWFAYWGQGTLVTVSSTREDLKNVFPPEVAVFEPSEAEISHTQKATLVCLATGFYPDHVELSWWVNGKEVHSGVCTDPQPLKEQPALNDSRYCLSSRLRVSATFWQNPRNHFRCQVQFYGLSENDEWTQDRAKPVTQIVSAEAWGRADDVIKIHWQEKKSNTILGSQEGNTMKTNDTYMKFSWLTVPEKSLDKEHRCIVRHENNKNGVDQEIIFPPIKTDVITMDPKDNCSKDANDTLLLQLTNTSAYYMYLLLLLKSVVYFAIITCCLLMAMVKRKDSRG

SEQ ID NO: 14666 - protein, 739 aa, synthetic construct
MALPVTALLLPLALLLHAARPDVLMTQTPVSLPVSLGGQVSISCRSSQSLVHSDGDTYLHWYLQKPGQSPQLLIYRVSNRFSGVPDRFSGSGSGTDFTLKISRVEPEDLGLYYCLQTTHFPPWTFGGGTKLEMKLEIQNPDPAVYQLRDSKSSDKSVCLFTDFDSQTNVSQSKDSDVYITDKCVLDMRSMDFKSNSAVAWSNKSDFACANAFNNSIIPEDTFFPSPESSDSTDHVKPKETENTKQPSKSCHKPKAIVHTEKVNMMSLTVLGLRMLFAKTVAVNFLLTAKLFFLLTARAKRSGSGVKQTLNFDLLKLAGDVESNPGPTSMDWIWRILFLVGAATGAHSFEQVQLQQSGPELRRPGSSVRLSCKASGYRIKDFLIHWIKNRPEHGLEWIGWIDPEDGETKYAQKFQTKATLTADTSSNTAYMQLSSLTSEDTATYFCARWGDVYYGLMRGHVMDAWGQGTSVTVSSTREDLKNVFPPEVAVFEPSEAEISHTQKATLVCLATGFYPDHVELSWWVNGKEVHSGVCTDPQPLKEQPALNDSRYCLSSRLRVSATFWQNPRNHFRCQVQFYGLSENDEWTQDRAKPVTQIVSAEAWGRADDVIKIHWQEKKSNTILGSQEGNTMKTNDTYMKFSWLTVPEKSLDKEHRCIVRHENNKNGVDQEIIFPPIKTDVITMDPKDNCSKDANDTLLLQLTNTSAYYMYLLLLLKSVVYFAIITCCLLMAMVKRKDSRG

SEQ ID NO: 14667 - protein, 734 aa, synthetic construct
MALPVTALLLPLALLLHAARPDIVMTQSPATLSLSPGERATLSCRSSKSLQNVNGNTYLYWFQQKPGQSPQLLIYRMSNLNSGVPDRFSGSGSGTEFTLTISSLEPEDFAVYYCMQHLEYPITFGAGTKLEIKLEIQNPDPAVYQLRDSKSSDKSVCLFTDFDSQTNVSQSKDSDVYITDKCVLDMRSMDFKSNSAVAWSNKSDFACANAFNNSIIPEDTFFPSPESSDSTDHVKPKETENTKQPSKSCHKPKAIVHTEKVNMMSLTVLGLRMLFAKTVAVNFLLTAKLFFLLTARAKRSGSGVKQTLNFDLLKLAGDVESNPGPTSMDWIWRILFLVGAATGAHSFEEVQLVESGGGLVKPGGSLKLSCAASGYTFTSYVMHWVRQAPGKGLEWIGYINPYNDGTKYNEKFQGRVTISSDKSISTAYMELSSLRSEDTAMYYCARGTYYYGTRVFDYWGQGTLVTVSSTREDLKNVFPPEVAVFEPSEAEISHTQKATLVCLATGFYPDHVELSWWVNGKEVHSGVCTDPQPLKEQPALNDSRYCLSSRLRVSATFWQNPRNHFRCQVQFYGLSENDEWTQDRAKPVTQIVSAEAWGRADDVIKIHWQEKKSNTILGSQEGNTMKTNDTYMKFSWLTVPEKSLDKEHRCIVRHENNKNGVDQEIIFPPIKTDVITMDPKDNCSKDANDTLLLQLTNTSAYYMYLLLLLKSVVYFAIITCCLLMAMVKRKDSRG

SEQ ID NO: 14668 - protein, 730 aa, synthetic construct
MALPVTALLLPLALLLHAARPDIQMTQSPSSLSASVGDRVTITCKASDHINNWLAWYQQKPGQAPKLLIYGATTLETGVPSRFSGSGSGTDYTLTISSLQPEDFATYYCQQSWNTPWTFGQGTKLEIKRLEIQNPDPAVYQLRDSKSSDKSVCLFTDFDSQTNVSQSKDSDVYITDKCVLDMRSMDFKSNSAVAWSNKSDFACANAFNNSIIPEDTFFPSPESSDSTDHVKPKETENTKQPSKSCHKPKAIVHTEKVNMMSLTVLGLRMLFAKTVAVNFLLTAKLFFLLTARAKRSGSGVKQTLNFDLLKLAGDVESNPGPTSMDWIWRILFLVGAATGAHSFEQVQLQQPGAELVKPGASVKMSCKASGYAFSSYWINWMKQKPGQGLEWIGQIYPGDGDTNYNGKFKGRATLTADTSSSTAYMQLSSLTSEDSAVYFCARSITTVVGCAMDYWGQGTSVTVSSTREDLKNVFPPEVAVFEPSEAEISHTQKATLVCLATGFYPDHVELSWWVNGKEVHSGVCTDPQPLKEQPALNDSRYCLSSRLRVSATFWQNPRNHFRCQVQFYGLSENDEWTQDRAKPVTQIVSAEAWGRADDVIKIHWQEKKSNTILGSQEGNTMKTNDTYMKFSWLTVPEKSLDKEHRCIVRHENNKNGVDQEIIFPPIKTDVITMDPKDNCSKDANDTLLLQLTNTSAYYMYLLLLLKSVVYFAIITCCLLMAMVKRKDSRG

SEQ ID NO: 14669 - protein, 732 aa, synthetic construct
MALPVTALLLPLALLLHAARPQIVLSQSPAILSASPGEKVTMTCRASSSVSYMHWYQQKPGSSPKPWIYATSNLASGVPARFSGSGSGTSYSFTISRVEAEDAATYYCQQWTFNPPTFGGGTRLEIKRTVAALEIQNPDPAVYQLRDSKSSDKSVCLFTDFDSQTNVSQSKDSDVYITDKCVLDMRSMDFKSNSAVAWSNKSDFACANAFNNSIIPEDTFFPSPESSDSTDHVKPKETENTKQPSKSCHKPKAIVHTEKVNMMSLTVLGLRMLFAKTVAVNFLLTAKLFFLLTARAKRSGSGVKQTLNFDLLKLAGDVESNPGPTSMDWIWRILFLVGAATGAHSFEQAYLQQSGAELVRPGASVKMSCKASGYTFTSYNMHWVKQTPRQGLEWIGGIYPGNGDTSYNQKFKGKATLTVGKSSSTAYMQLSSLTSEDSAVYFCARYDYNYAMDYWGQGTSVTVSSASTREDLKNVFPPEVAVFEPSEAEISHTQKATLVCLATGFYPDHVELSWWVNGKEVHSGVCTDPQPLKEQPALNDSRYCLSSRLRVSATFWQNPRNHFRCQVQFYGLSENDEWTQDRAKPVTQIVSAEAWGRADDVIKIHWQEKKSNTILGSQEGNTMKTNDTYMKFSWLTVPEKSLDKEHRCIVRHENNKNGVDQEIIFPPIKTDVITMDPKDNCSKDANDTLLLQLTNTSAYYMYLLLLLKSVVYFAIITCCLLMAMVKRKDSRG

SEQ ID NO: 14670 - protein, 730 aa, synthetic construct
MALPVTALLLPLALLLHAARPEIVLTQSPATLSLSPGERATLSCRASQSVSSYLAWYQQKPGQAPRLLIYDASNRATGIPARFSGSGSGTDFTLTISSLEPEDFAVYYCQQRSNWPITFGQGTRLEIKLEIQNPDPAVYQLRDSKSSDKSVCLFTDFDSQTNVSQSKDSDVYITDKCVLDMRSMDFKSNSAVAWSNKSDFACANAFNNSIIPEDTFFPSPESSDSTDHVKPKETENTKQPSKSCHKPKAIVHTEKVNMMSLTVLGLRMLFAKTVAVNFLLTAKLFFLLTARAKRSGSGVKQTLNFDLLKLAGDVESNPGPTSMDWIWRILFLVGAATGAHSFEEVQLVESGGGLVQPDRSLRLSCAASGFTFHDYAMHWVRQAPGKGLEWVSTISWNSGTIGYADSVKGRFTISRDNAKNSLYLQMNSLRAEDTALYYCAKDIQYGNYYYGMDVWGQGTTVTVSSTREDLKNVFPPEVAVFEPSEAEISHTQKATLVCLATGFYPDHVELSWWVNGKEVHSGVCTDPQPLKEQPALNDSRYCLSSRLRVSATFWQNPRNHFRCQVQFYGLSENDEWTQDRAKPVTQIVSAEAWGRADDVIKIHWQEKKSNTILGSQEGNTMKTNDTYMKFSWLTVPEKSLDKEHRCIVRHENNKNGVDQEIIFPPIKTDVITMDPKDNCSKDANDTLLLQLTNTSAYYMYLLLLLKSVVYFAIITCCLLMAMVKRKDSRG

SEQ ID NO: 14671 - protein, 725 aa, synthetic construct
MALPVTALLLPLALLLHAARPDIQMTQSPSSLSASVGDRVTINCKASQDINSYLSWFQQKPGKAPKTLIYRANRLVDGVPSRFSGSGSGQDYTLTISSLQPEDFATYYCLQYDEFPLTFGGGTKVEIKLEIQNPDPAVYQLRDSKSSDKSVCLFTDFDSQTNVSQSKDSDVYITDKCVLDMRSMDFKSNSAVAWSNKSDFACANAFNNSIIPEDTFFPSPESSDSTDHVKPKETENTKQPSKSCHKPKAIVHTEKVNMMSLTVLGLRMLFAKTVAVNFLLTAKLFFLLTARAKRSGSGVKQTLNFDLLKLAGDVESNPGPTSMDWIWRILFLVGAATGAHSFEQVQLVQSGAEVKKPGASVKVSCKASGYTFTNYDINWVRQAPGQGLEWIGWIYPGDGSTKYNEKFKAKATLTADTSTSTAYMELRSLRSDDTAVYYCASGYEDAMDYWGQGTTVTVSSTREDLKNVFPPEVAVFEPSEAEISHTQKATLVCLATGFYPDHVELSWWVNGKEVHSGVCTDPQPLKEQPALNDSRYCLSSRLRVSATFWQNPRNHFRCQVQFYGLSENDEWTQDRAKPVTQIVSAEAWGRADDVIKIHWQEKKSNTILGSQEGNTMKTNDTYMKFSWLTVPEKSLDKEHRCIVRHENNKNGVDQEIIFPPIKTDVITMDPKDNCSKDANDTLLLQLTNTSAYYMYLLLLLKSVVYFAIITCCLLMAMVKRKDSRG

SEQ ID NO: 14672 - protein, 727 aa, synthetic construct
MALPVTALLLPLALLLHAARPDIVMTQTPLSLSVTPGQPASISCKSSQSLLDGDGKTYLNWLLQKPGQSPQRLIYLVSKLDSGVPDRFSGSGSGTDFTLKISRVEAEDVGVYYCWQGTHFPRTFGQGTKLEIKLEIQNPDPAVYQLRDSKSSDKSVCLFTDFDSQTNVSQSKDSDVYITDKCVLDMRSMDFKSNSAVAWSNKSDFACANAFNNSIIPEDTFFPSPESSDSTDHVKPKETENTKQPSKSCHKPKAIVHTEKVNMMSLTVLGLRMLFAKTVAVNFLLTAKLFFLLTARAKRSGSGVKQTLNFDLLKLAGDVESNPGPTSMDWIWRILFLVGAATGAHSFEQVQLVQSGAEVKKPGASVKVSCKASGYTFKDTYIHWVRQAPGQGLEWMGRIDPANGNTKYDPKFQGRVTMTRDTSISTAYMELSRLRSDDTAVYYCARRGGVDWGQGTLVTVSSTREDLKNVFPPEVAVFEPSEAEISHTQKATLVCLATGFYPDHVELSWWVNGKEVHSGVCTDPQPLKEQPALNDSRYCLSSRLRVSATFWQNPRNHFRCQVQFYGLSENDEWTQDRAKPVTQIVSAEAWGRADDVIKIHWQEKKSNTILGSQEGNTMKTNDTYMKFSWLTVPEKSLDKEHRCIVRHENNKNGVDQEIIFPPIKTDVITMDPKDNCSKDANDTLLLQLTNTSAYYMYLLLLLKSVVYFAIITCCLLMAMVKRKDSRG

SEQ ID NO: 14673 - protein, 728 aa, synthetic construct
MALPVTALLLPLALLLHAARPDIQMTQSPSSLSASVGDRVTITCKASQDVSTAVAWFQQKPGKAPKLLIYSPSYRYTGVPSRFSGSGSGTDFTLTISSLQPEDFTYYCQQLYSTPYTFGQGTKVEIKLEIQNPDPAVYQLRDSKSSDKSVCLFTDFDSQTNVSQSKDSDVYITDKCVLDMRSMDFKSNSAVAWSNKSDFACANAFNNSIIPEDTFFPSPESSDSTDHVKPKETENTKQPSKSCHKPKAIVHTEKVNMMSLTVLGLRMLFAKTVAVNFLLTAKLFFLLTARAKRSGSGVKQTLNFDLLKLAGDVESNPGPTSMDWIWRILFLVGAATGAHSFEEVQLVQSGAEVKKPGASVKVSCKASGYTFTDYYLDVVVRQAPGQGLEWIGRVNPYNGGTIYNQKFKGRVTLTRDTSTSTAYLELSSLRSEDTAVYYCARDHYRYDPLLDYWGQGTLVTVSSTREDLKNVFPPEVAVFEPSEAEISHTQKATLVCLATGFYPDHVELSWWVNGKEVHSGVCTDPQPLKEQPALNDSRYCLSSRLRVSATFWQNPRNHFRCQVQFYGLSENDEWTQDRAKPVTQIVSAEAWGRADDVIKIHWQEKKSNTILGSQEGNTMKTNDTYMKFSWLTVPEKSLDKEHRCIVRHENNKNGVDQEIIFPPIKTDVITMDPKDNCSKDANDTLLLQLTNTSAYYMYLLLLLKSVVYFAIITCCLLMAMVKRKDSRG

SEQ ID NO: 14674 - protein, 734 aa, synthetic construct
MALPVTALLLPLALLLHAARPDIQMTQSPSSLSASVGDRVTITCRASQSVSTSSYNYMHWYQQKPGKPPKLLIKYASNLESGVPSRFSGSGSGTDFTLTISSLQPEDFATYYCQHSWEIPLTFGQGTKVEIKLEIQNPDPAVYQLRDSKSSDKSVCLFTDFDSQTNVSQSKDSDVYITDKCVLDMRSMDFKSNSAVAWSNKSDFACANAFNNSIIPEDTFFPSPESSDSTDHVKPKETENTKQPSKSCHKPKAIVHTEKVNMMSLTVLGLRMLFAKTVAVNFLLTAKLFFLLTARAKRSGSGVKQTLNFDLLKLAGDVESNPGPTSMDWIWRILFLVGAATGAHSFEEVQLVQSGAEVKKPGASVKVSCKASGYSFTDYYMHWVRQAPGQGLEWIGRINPYNGAAFYSQNFKDRVTLTVDTSTSTAYLELSSLRSEDTAVYYCAIERGADLEGYAMDYWGQGTLVTVSSTREDLKNVFPPEVAVFEPSEAEISHTQKATLVCLATGFYPDHVELSWWVNGKEVHSGVCTDPQPLKEQPALNDSRYCLSSRLRVSATFWQNPRNHFRCQVQFYGLSENDEWTQDRAKPVTQIVSAEAWGRADDVIKIHWQEKKSNTILGSQEGNTMKTNDTYMKFSWLTVPEKSLDKEHRCIVRHENNKNGVDQEIIFPPIKTDVITMDPKDNCSKDANDTLLLQLTNTSAYYMYLLLLLKSVVYFAIITCCLLMAMVKRKDSRG

SEQ ID NO: 14675 - protein, 732 aa, synthetic construct
MALPVTALLLPLALLLHAARPEIVLTQSPATLSASPGERVTLTCRASSNVISSYVHWYQQKPGSSPRLFLYSTSNLASGVPSRFSGSGSGTDFTFTISSLEAEDAATYYCQQYSGYPLTFGQGTRLEIKLEIQNPDPAVYQLRDSKSSDKSVCLFTDFDSQTNVSQSKDSDVYITDKCVLDMRSMDFKSNSAVAWSNKSDFACANAFNNSIIPEDTFFPSPESSDSTDHVKPKETENTKQPSKSCHKPKAIVHTEKVNMMSLTVLGLRMLFAKTVAVNFLLTAKLFFLLTARAKRSGSGVKQTLNFDLLKLAGDVESNPGPTSMDWIWRILFLVGAATGAHSFEQVQLQESGPGLVKPSETLSLTCAVSGYSITSAYYWNWIRQPPGKGLEWIGYISYDGRNNYNPSLKNRITINPDTSKNQFSLQLNSVTPEDTAVYYCAREGDYDVGNYYAMDYWGQGTLVTVSSTREDLKNVFPPEVAVFEPSEAEISHTQKATLVCLATGFYPDHVELSWWVNGKEVHSGVCTDPQPLKEQPALNDSRYCLSSRLRVSATFWQNPRNHFRCQVQFYGLSENDEWTQDRAKPVTQIVSAEAWGRADDVIKIHWQEKKSNTILGSQEGNTMKTNDTYMKFSWLTVPEKSLDKEHRCIVRHENNKNGVDQEIIFPPIKTDVITMDPKDNCSKDANDTLLLQLTNTSAYYMYLLLLLKSVVYFAIITCCLLMAMVKRKDSRG

SEQ ID NO: 14676 - protein, 732 aa, synthetic construct
MALPVTALLLPLALLLHAARPEIVLTQSPATLSLSPGERATLSCRASSNVISSYVHWYQQKPGQAPRLLIYSTSNLASGIPARFSGSGSGTDFTLTISSLEPEDFAVYYCQQYSGYPLTFGQGTRLEIKLEIQNPDPAVYQLRDSKSSDKSVCLFTDFDSQTNVSQSKDSDVYITDKCVLDMRSMDFKSNSAVAWSNKSDFACANAFNNSIIPEDTFFPSPESSDSTDHVKPKETENTKQPSKSCHKPKAIVHTEKVNMMSLTVLGLRMLFAKTVAVNFLLTAKLFFLLTARAKRSGSGVKQTLNFDLLKLAGDVESNPGPTSMDWIWRILFLVGAATGAHSFEEVQLVESGGGLVQPGRSLRLSCAASGYSITSAYYWNWVRQAPGKGLEWVSYISYDGRNNYNPSLKNRFTISRDNAKKSLYLQMNSLRAEDTALYYCAKEGDYDVGNYYAMDYWGQGTTVTVSSTREDLKNVFPPEVAVFEPSEAEISHTQKATLVCLATGFYPDHVELSWWVNGKEVHSGVCTDPQPLKEQPALNDSRYCLSSRLRVSATFWQNPRNHFRCQVQFYGLSENDEWTQDRAKPVTQIVSAEAWGRADDVIKIHWQEKKSNTILGSQEGNTMKTNDTYMKFSWLTVPEKSLDKEHRCIVRHENNKNGVDQEIIFPPIKTDVITMDPKDNCSKDANDTLLLQLTNTSAYYMYLLLLLKSVVYFAIITCCLLMAMVKRKDSRG

SEQ ID NO: 14677 - protein, 731 aa, synthetic construct
MALPVTALLLPLALLLHAARPDVVMTQTPLSLPVSLGDQASISCRSSQSLVHSNGNTYLRWYLQKPGQSPKVLIYKVSNRVSGVPDRFSGSGSGTDFTLKINRVEAEDLGVYFCSQSTHVPWTFGGGTKLEIKLEIQNPDPAVYQLRDSKSSDKSVCLFTDFDSQTNVSQSKDSDVYITDKCVLDMRSMDFKSNSAVAWSNKSDFACANAFNNSIIPEDTFFPSPESSDSTDHVKPKETENTKQPSKSCHKPKAIVHTEKVNMMSLTVLGLRMLFAKTVAVNFLLTAKLFFLLTARAKRSGSGVKQTLNFDLLKLAGDVESNPGPTSMDWIWRILFLVGAATGAHSFEGVKLDETGGGLVQPGGAMKLSCVTSGFTFGHYWMNWVRQSPEKGLEWVAQFRNKPYNYETYYSDSVKGRFTISRDDSKSSVYLQMNNLRVEDTGIYYCTGASYGMEYLGQGTSVTVSTTREDLKNVFPPEVAVFEPSEAEISHTQKATLVCLATGFYPDHVELSWWVNGKEVHSGVCTDPQPLKEQPALNDSRYCLSSRLRVSATFWQNPRNHFRCQVQFYGLSENDEWTQDRAKPVTQIVSAEAWGRADDVIKIHWQEKKSNTILGSQEGNTMKTNDTYMKFSWLTVPEKSLDKEHRCIVRHENNKNGVDQEIIFPPIKTDVITMDPKDNCSKDANDTLLLQLTNTSAYYMYLLLLLKSVVYFAIITCCLLMAMVKRKDSRG

SEQ ID NO: 14678 - protein, 737 aa, synthetic construct
MALPVTALLLPLALLLHAARPQVQLVESGGNLVQPGGSLRLSCAASGFTFGSFSMSWVRQAPGGGLEWVAGLSARSSLTHYADSVKGRFTISRDNAKNSVYLQMNSLRVEDTAVYYCARRSYDSSGYWGHFYSYMDVWGQGTLVTVSLEIQNPDPAVYQLRDSKSSDKSVCLFTDFDSQTNVSQSKDSDVYITDKCVLDMRSMDFKSNSAVAWSNKSDFACANAFNNSIIPEDTFFPSPESSDSTDHVKPKETENTKQPSKSCHKPKAIVHTEKVNMMSLTVLGLRMLFAKTVAVNFLLTAKLFFLLTARAKRSGSGVKQTLNFDLLKLAGDVESNPGPTSMDWIWRILFLVGAATGAHSFESVLTQPSSVSAAPGQKVTISCSGSTSNIGNNYVSWYQQHPGKAPKLMIYDVSKRPSGVPDRFSGSKSGNSASLDISGLQSEDEADYYCAAWDDSLSEFLFGTGTKLTVLGTREDLKNVFPPEVAVFEPSEAEISHTQKATLVCLATGFYPDHVELSWWVNGKEVHSGVCTDPQPLKEQPALNDSRYCLSSRLRVSATFWQNPRNHFRCQVQFYGLSENDEWTQDRAKPVTQIVSAEAWGRADDVIKIHWQEKKSNTILGSQEGNTMKTNDTYMKFSWLTVPEKSLDKEHRCIVRHENNKNGVDQEIIFPPIKTDVITMDPKDNCSKDANDTLLLQLTNTSAYYMYLLLLLKSVVYFAIITCCLLMAMVKRKDSRG

SEQ ID NO: 14679 - protein, 732 aa, synthetic construct
MALPVTALLLPLALLLHAARPDVVMTQSPSSLSASVGDRVTITCQSSLDISHYLNWYQQKPGKAPKLLIYDASNLETGVPSRFSGSGSGTHFTFTISSLQPEDFATYYCQQYDNLPLTFGGGTKLEIKRLEIQNPDPAVYQLRDSKSSDKSVCLFTDFDSQTNVSQSKDSDVYITDKCVLDMRSMDFKSNSAVAWSNKSDFACANAFNNSIIPEDTFFPSPESSDSTDHVKPKETENTKQPSKSCHKPKAIVHTEKVNMMSLTVLGLRMLFAKTVAVNFLLTAKLFFLLTARAKRSGSGVKQTLNFDLLKLAGDVESNPGPTSMDWIWRILFLVGAATGAHSFEQVQLVQSGGGVVQPGGSLRVSCAASGVTLSDYGMHWVRQAPGKGLEWVAFIRNDGSDKYYADSVKGRFTISRDNSEKTVSLQMSSLRAEDTAVYYCAKNGESGPLDYWYLDLWGRGTLVTVSSTREDLKNVFPPEVAVFEPSEAEISHTQKATLVCLATGFYPDHVELSWWVNGKEVHSGVCTDPQPLKEQPALNDSRYCLSSRLRVSATFWQNPRNHFRCQVQFYGLSENDEWTQDRAKPVTQIVSAEAWGRADDVIKIHWQEKKSNTILGSQEGNTMKTNDTYMKFSWLTVPEKSLDKEHRCIVRHENNKNGVDQEIIFPPIKTDVITMDPKDNCSKDANDTLLLQLTNTSAYYMYLLLLLKSVVYFAIITCCLLMAMVKRKDSRG

SEQ ID NO: 14680 - protein, 736 aa, synthetic construct
MALPVTALLLPLALLLHAARPSYELTQPPSVSGTPGQRVAISCSGSSSNIGTRMVTWYQHVPGTAPKLLIFNNNQRPSGVPDRFSASKSGTSASLAIIGLQSDDEADYYCATWDDNVKSYVFGTGTKVTVLGSRLEIQNPDPAVYQLRDSKSSDKSVCLFTDFDSQTNVSQSKDSDVYITDKCVLDMRSMDFKSNSAVAWSNKSDFACANAFNNSIIPEDTFFPSPESSDSTDHVKPKETENTKQPSKSCHKPKAIVHTEKVNMMSLTVLGLRMLFAKTVAVNFLLTAKLFFLLTARAKRSGSGVKQTLNFDLLKLAGDVESNPGPTSMDWIWRILFLVGAATGAHSFELEMAQVQLQQWGAGLLKPSETLSLTCAVYGGSFSGYYWSWIRQPPGKGLEWIGEINHSGSTNYNPSLKSRVTISVDTSKNQFSLKLSSVTAADTAVYYCARAPQSWYVGDVWGQGTLVTVSSTREDLKNVFPPEVAVFEPSEAEISHTQKATLVCLATGFYPDHVELSWWVNGKEVHSGVCTDPQPLKEQPALNDSRYCLSSRLRVSATFWQNPRNHFRCQVQFYGLSENDEWTQDRAKPVTQIVSAEAWGRADDVIKIHWQEKKSNTILGSQEGNTMKTNDTYMKFSWLTVPEKSLDKEHRCIVRHENNKNGVDQEIIFPPIKTDVITMDPKDNCSKDANDTLLLQLTNTSAYYMYLLLLLKSVVYFAIITCCLLMAMVKRKDSRG

SEQ ID NO: 14681 - protein, 733 aa, synthetic construct
MALPVTALLLPLALLLHAARPQSVLTQPPSLSVAPGKTASITCGGNNIGMKSVHWYQQRPGQAPVLVIYYDSDRPSGIPGRFSGSNSGNTATLTISRVEAGDEADYYCQVWDTTGDHPGYVFGTGTKVTVLLEIQNPDPAVYQLRDSKSSDKSVCLFTDFDSQTNVSQSKDSDVYITDKCVLDMRSMDFKSNSAVAWSNKSDFACANAFNNSIIPEDTFFPSPESSDSTDHVKPKETENTKQPSKSCHKPKAIVHTEKVNMMSLTVLGLRMLFAKTVAVNFLLTAKLFFLLTARAKRSGSGVKQTLNFDLLKLAGDVESNPGPTSMDWIWRILFLVGAATGAHSFEQVQLVQSGAEVKKPGSSVKVSCKASGGTFSSYAISWVRQAPGQGLEWMGGIIPIFGTANYAQKFQGRVTITADESTSTAYMELSSLRSEDTAVYYCARGVYGYSGSAPYDEWGQGTLVTVSSTREDLKNVFPPEVAVFEPSEAEISHTQKATLVCLATGFYPDHVELSWWVNGKEVHSGVCTDPQPLKEQPALNDSRYCLSSRLRVSATFWQNPRNHFRCQVQFYGLSENDEWTQDRAKPVTQIVSAEAWGRADDVIKIHWQEKKSNTILGSQEGNTMKTNDTYMKFSWLTVPEKSLDKEHRCIVRHENNKNGVDQEIIFPPIKTDVITMDPKDNCSKDANDTLLLQLTNTSAYYMYLLLLLKSVVYFAIITCCLLMAMVKRKDSRG

SEQ ID NO: 14682 - protein, 731 aa, synthetic construct
MALPVTALLLPLALLLHAARPEVQLVESGGGLVQPGRSLRLSCAASGFTFDDYAMHWVRQAPGKGLEWVSGISWNSGSIGYADSVKGRFTISRDNAKNSLYLQMNSLRAEDTALYYCAKDKGGGYYDFWSGSDYWGQGTLVTVSSLEIQNPDPAVYQLRDSKSSDKSVCLFTDFDSQTNVSQSKDSDVYITDKCVLDMRSMDFKSNSAVAWSNKSDFACANAFNNSIIPEDTFFPSPESSDSTDHVKPKETENTKQPSKSCHKPKAIVHTEKVNMMSLTVLGLRMLFAKTVAVNFLLTAKLFFLLTARAKRSGSGVKQTLNFDLLKLAGDVESNPGPTSMDWIWRILFLVGAATGAHSFESSELTQDPAVSVALGQTVRITCQGDSLRSYYASWYQQKPGQAPVLVIYGKNNRPSGIPDRFSGSSSGNTASLTITGAQAEDEADYYCNSRDSSGWVFGGGTKLTVLTREDLKNVFPPEVAVFEPSEAEISHTQKATLVCLATGFYPDHVELSWWVNGKEVHSGVCTDPQPLKEQPALNDSRYCLSSRLRVSATFWQNPRNHFRCQVQFYGLSENDEWTQDRAKPVTQIVSAEAWGRADDVIKIHWQEKKSNTILGSQEGNTMKTNDTYMKFSWLTVPEKSLDKEHRCIVRHENNKNGVDQEIIFPPIKTDVITMDPKDNCSKDANDTLLLQLTNTSAYYMYLLLLLKSVVYFAIITCCLLMAMVKRKDSRG

SEQ ID NO: 14683 - protein, 740 aa, synthetic construct
MALPVTALLLPLALLLHAARPEVQLQQSGPGLVKPSQTLSLTCAISGDSVLSNSDTWNWIRQSPSRGLEWLGRTYHRSTWYDDYASSVRGRVSINVDTSKNQYSLQLNAVTPEDTGVYYCARDRLQDGNSWSDAFDVWGQGTMVTVSSLEIQNPDPAVYQLRDSKSSDKSVCLFTDFDSQTNVSQSKDSDVYITDKCVLDMRSMDFKSNSAVAWSNKSDFACANAFNNSIIPEDTFFPSPESSDSTDHVKPKETENTKQPSKSCHKPKAIVHTEKVNMMSLTVLGLRMLFAKTVAVNFLLTAKLFFLLTARAKRSGSGVKQTLNFDLLKLAGDVESNPGPTSMDWIWRILFLVGAATGAHSFEQSALTQPASVSGSPGQSITISCTGTSSDVGGYNYVSWYQQHPGKAPKLMIYDVSNRPSGVSNRFSGSKSGNTASLTISGLQAEDEADYYCSSYTSSSTLVYVFGTGTKVTVLTREDLKNVFPPEVAVFEPSEAEISHTQKATLVCLATGFYPDHVELSWWVNGKEVHSGVCTDPQPLKEQPALNDSRYCLSSRLRVSATFWQNPRNHFRCQVQFYGLSENDEWTQDRAKPVTQIVSAEAWGRADDVIKIHWQEKKSNTILGSQEGNTMKTNDTYMKFSWLTVPEKSLDKEHRCIVRHENNKNGVDQEIIFPPIKTDVITMDPKDNCSKDANDTLLLQLTNTSAYYMYLLLLLKSVVYFAIITCCLLMAMVKRKDSRG

SEQ ID NO: 14684 - protein, 718 aa, synthetic construct
MALPVTALLLPLALLLHAARPQVQLVQSGAEVKKPGASVKVSCKASGYTFTSYDINWVRQATGQGLEWMGWMNPNSGNTGYAQKFQGRVTMTRNTSISTAYMELSSLRSEDTAVYYCARGDSTKVEIKLEIQNPDPAVYQLRDSKSSDKSVCLFTDFDSQTNVSQSKDSDVYITDKCVLDMRSMDFKSNSAVAWSNKSDFACANAFNNSIIPEDTFFPSPESSDSTDHVKPKETENTKQPSKSCHKPKAIVHTEKVNMMSLTVLGLRMLFAKTVAVNFLLTAKLFFLLTARAKRSGSGVKQTLNFDLLKLAGDVESNPGPTSMDWIWRILFLVGAATGAHSFEQSVLTQPRSVSGSPGQSVTISCTGTSSDVGGYNYVSWYQQHPGEAPKLIIYDADKRPSGISNRFSSGKSGNTASLTISGLQVEDEADYYCCSYAGGSTWVFGGGTKVTVLTREDLKNVFPPEVAVFEPSEAEISHTQKATLVCLATGFYPDHVELSWWVNGKEVHSGVCTDPQPLKEQPALNDSRYCLSSRLRVSATFWQNPRNHFRCQVQFYGLSENDEWTQDRAKPVTQIVSAEAWGRADDVIKIHWQEKKSNTILGSQEGNTMKTNDTYMKFSWLTVPEKSLDKEHRCIVRHENNKNGVDQEIIFPPIKTDVITMDPKDNCSKDANDTLLLQLTNTSAYYMYLLLLLKSVVYFAIITCCLLMAMVKRKDSRG

SEQ ID NO: 14685 - protein, 740 aa, synthetic construct
MALPVTALLLPLALLLHAARPEVQLQQSGPGLVKPSQTLSLTCAISGDSVSSNSAAWNWIRQSPSRGLEWLGRTYYRSKWYSDYAVSVKSRITINPDTSKNQFSLQLNSVTPEDTAVYYCARDPYDFWSGYPDAFDIWGQGTMVTVSSLEIQNPDPAVYQLRDSKSSDKSVCLFTDFDSQTNVSQSKDSDVYITDKCVLDMRSMDFKSNSAVAWSNKSDFACANAFNNSIIPEDTFFPSPESSDSTDHVKPKETENTKQPSKSCHKPKAIVHTEKVNMMSLTVLGLRMLFAKTVAVNFLLTAKLFFLLTARAKRSGSGVKQTLNFDLLKLAGDVESNPGPTSMDWIWRILFLVGAATGAHSFEQSALTQPASVSGSPGQSITISCTGTSSDVGGYNYVSWYQQHPGKAPKVIISEVNNRPSGVSHRFSGSKSGNTASLTISGLQAEDEADYFCSSYTSGRTLYVFGTGSKVTVLGTREDLKNVFPPEVAVFEPSEAEISHTQKATLVCLATGFYPDHVELSWWVNGKEVHSGVCTDPQPLKEQPALNDSRYCLSSRLRVSATFWQNPRNHFRCQVQFYGLSENDEWTQDRAKPVTQIVSAEAWGRADDVIKIHWQEKKSNTILGSQEGNTMKTNDTYMKFSWLTVPEKSLDKEHRCIVRHENNKNGVDQEIIFPPIKTDVITMDPKDNCSKDANDTLLLQLTNTSAYYMYLLLLLKSVVYFAIITCCLLMAMVKRKDSRG

SEQ ID NO: 14686 - protein, 739 aa, synthetic construct
MALPVTALLLPLALLLHAARPQSALTQPASASGSPGQSVTISCTGTSSDVGGYNYVSWYQQHPGKAPKLMIYDVSNRPSGVSNRFSGSKSGNTASLTISGLQAEDEADYYCSSYTSSSTLYVFGTGTQLTVLLEIQNPDPAVYQLRDSKSSDKSVCLFTDFDSQTNVSQSKDSDVYITDKCVLDMRSMDFKSNSAVAWSNKSDFACANAFNNSIIPEDTFFPSPESSDSTDHVKPKETENTKQPSKSCHKPKAIVHTEKVNMMSLTVLGLRMLFAKTVAVNFLLTAKLFFLLTARAKRSGSGVKQTLNFDLLKLAGDVESNPGPTSMDWIWRILFLVGAATGAHSFEEVQLQQSGPGLVKPSQTLSLTCAISGDSMLSNSDTWNWIRQSPSRGLEWLGRTYHRSTWYDDYASSVRGRVSINVDTSKNQYSLQLNAVTPEDTGVYYCARVRLQDGNSWSDAFDVWGQGTMVTVSSTREDLKNVFPPEVAVFEPSEAEISHTQKATLVCLATGFYPDHVELSWWVNGKEVHSGVCTDPQPLKEQPALNDSRYCLSSRLRVSATFWQNPRNHFRCQVQFYGLSENDEWTQDRAKPVTQIVSAEAWGRADDVIKIHWQEKKSNTILGSQEGNTMKTNDTYMKFSWLTVPEKSLDKEHRCIVRHENNKNGVDQEIIFPPIKTDVITMDPKDNCSKDANDTLLLQLTNTSAYYMYLLLLLKSVVYFAIITCCLLMAMVKRKDSRG

SEQ ID NO: 14687 - protein, 739 aa, synthetic construct
MALPVTALLLPLALLLHAARPDVMLTQTPLSLPVSLGDQASISCRSSQSILHSTGDTYLEWYLQKPGQSPKLLINKVSNRLSGVPDRFSGSGSGTDFTLKISRVEAEDLGVYYCFQGSHVPWTFGGGTKLEIKRADAAPTVSIFPLEIQNPDPAVYQLRDSKSSDKSVCLFTDFDSQTNVSQSKDSDVYITDKCVLDMRSMDFKSNSAVAWSNKSDFACANAFNNSIIPEDTFFPSPESSDSTDHVKPKETENTKQPSKSCHKPKAIVHTEKVNMMSLTVLGLRMLFAKTVAVNFLLTAKLFFLLTARAKRSGSGVKQTLNFDLLKLAGDVESNPGPTSMDWIWRILFLVGAATGAHSFEQVKLQQSGPSLVKPGASVKMSCKASGYTFTDFYMKWVKQSHGKSLEWIGDINPNIGDTFYNQKFKGKATLTVDKSSSTAYMQLNSLTSEDSAVYFCSVGYFDVWGAGTTVTVSSTREDLKNVFPPEVAVFEPSEAEISHTQKATLVCLATGFYPDHVELSWWVNGKEVHSGVCTDPQPLKEQPALNDSRYCLSSRLRVSATFWQNPRNHFRCQVQFYGLSENDEWTQDRAKPVTQIVSAEAWGRADDVIKIHWQEKKSNTILGSQEGNTMKTNDTYMKFSWLTVPEKSLDKEHRCIVRHENNKNGVDQEIIFPPIKTDVITMDPKDNCSKDANDTLLLQLTNTSAYYMYLLLLLKSVVYFAIITCCLLMAMVKRKDSRG

SEQ ID NO: 14688 - protein, 735 aa, synthetic construct
MALPVTALLLPLALLLHAARPEIVLTQSPATLSLSPGERATLSCRASQSVSIYLAWYQQKPGQAPRLLIYDASNRATGIPARFSGSGSGTDFTLTISSLEPEDFAVYYCQQRSNWPPFTFGPGTKVDIKLEIQNPDPAVYQLRDSKSSDKSVCLFTDFDSQTNVSQSKDSDVYITDKCVLDMRSMDFKSNSAVAWSNKSDFACANAFNNSIIPEDTFFPSPESSDSTDHVKPKETENTKQPSKSCHKPKAIVHTEKVNMMSLTVLGLRMLFAKTVAVNFLLTAKLFFLLTARAKRSGSGVKQTLNFDLLKLAGDVESNPGPTSMDWIWRILFLVGAATGAHSFEQVQLVESGGGVVQPGRSLRLSCAASGFTFSSYGMHWVRQAPGKGLEWVAVIWDDGSNKYYVDSVKGRFTISRDNSKNTLYLQMNSLRAEDTAVYYCARDDYYGSGSFNSYYGTDVWGQGTTVTVSSTREDLKNVFPPEVAVFEPSEAEISHTQKATLVCLATGFYPDHVELSWWVNGKEVHSGVCTDPQPLKEQPALNDSRYCLSSRLRVSATFWQNPRNHFRCQVQFYGLSENDEWTQDRAKPVTQIVSAEAWGRADDVIKIHWQEKKSNTILGSQEGNTMKTNDTYMKFSWLTVPEKSLDKEHRCIVRHENNKNGVDQEIIFPPIKTDVITMDPKDNCSKDANDTLLLQLTNTSAYYMYLLLLLKSVVYFAIITCCLLMAMVKRKDSRG

SEQ ID NO: 14689 - protein, 720 aa, synthetic construct
MALPVTALLLPLALLLHAARPDIQMTQSPSSLSASVGDRVTITCRASQGISSWLAWYQQKPEKAPKSLIYAASSLQSGVPSRFSGSGSGTDFTLTISSLQPEDFATYYCQQYNSYPYTFGQGTKLEIKLEIQNPDPAVYQLRDSKSSDKSVCLFTDFDSQTNVSQSKDSDVYITDKCVLDMRSMDFKSNSAVAWSNKSDFACANAFNNSIIPEDTFFPSPESSDSTDHVKPKETENTKQPSKSCHKPKAIVHTEKVNMMSLTVLGLRMLFAKTVAVNFLLTAKLFFLLTARAKRSGSGVKQTLNFDLLKLAGDVESNPGPTSMDWIWRILFLVGAATGAHSFEEVQLVQSGGGLVHPGGSLRLSCAGSGFTFSTYLMYWVRQAPGKTLEWVSAIGSGGDTYYADSVKGRFTISRDNAKNSLYLQMNSLRAEDMAVYYCARGLGYWGQGTLVTVSSTREDLKNVFPPEVAVFEPSEAEISHTQKATLVCLATGFYPDHVELSWWVNGKEVHSGVCTDPQPLKEQPALNDSRYCLSSRLRVSATFWQNPRNHFRCQVQFYGLSENDEWTQDRAKPVTQIVSAEAWGRADDVIKIHWQEKKSNTILGSQEGNTMKTNDTYMKFSWLTVPEKSLDKEHRCIVRHENNKNGVDQEIIFPPIKTDVITMDPKDNCSKDANDTLLLQLTNTSAYYMYLLLLLKSVVYFAIITCCLLMAMVKRKDSRG

SEQ ID NO: 14690 - protein, 739 aa, synthetic construct
MALPVTALLLPLALLLHAARPLPVLTQPPSVSVAPGKTARITCGGNNIGSKSVHWYQQKPGQAPVLVVYDDSDRPSGIPERFSGSNSGNTATLTISRVEAGDEADYYCQVWDSSSDYVVFGGGTKLTVLLEIQNPDPAVYQLRDSKSSDKSVCLFTDFDSQTNVSQSKDSDVYITDKCVLDMRSMDFKSNSAVAWSNKSDFACANAFNNSIIPEDTFFPSPESSDSTDHVKPKETENTKQPSKSCHKPKAIVHTEKVNMMSLTVLGLRMLFAKTVAVNFLLTAKLFFLLTARAKRSGSGVKQTLNFDLLKLAGDVESNPGPTSMDWIWRILFLVGAATGAHSFEEVQLVQSGAEVKKPGESLKISCKGSGYSFTSYWIGWVRQMPGKGLEWMGIIYPGDSDTRYSPSFQGQVTISADKSISTAYLQWSSLKASDTAMYYCARQVWGWQGGMYPRSNWWYNLDSWGQGTLVTVSSTREDLKNVFPPEVAVFEPSEAEISHTQKATLVCLATGFYPDHVELSWWVNGKEVHSGVCTDPQPLKEQPALNDSRYCLSSRLRVSATFWQNPRNHFRCQVQFYGLSENDEWTQDRAKPVTQIVSAEAWGRADDVIKIHWQEKKSNTILGSQEGNTMKTNDTYMKFSWLTVPEKSLDKEHRCIVRHENNKNGVDQEIIFPPIKTDVITMDPKDNCSKDANDTLLLQLTNTSAYYMYLLLLLKSVVYFAIITCCLLMAMVKRKDSRG

SEQ ID NO: 14691 - protein, 732 aa, synthetic construct
MALPVTALLLPLALLLHAARPELVMTQSPASLAVSLGQRATISCRASESVDSYGKSFMHWYQLKPGQPPKLLIYRASNLESGVPARFSGSGSRTDFTLTIDPVEADDAATYYCQQNNEDPWTFGGGTKLEIKLEIQNPDPAVYQLRDSKSSDKSVCLFTDFDSQTNVSQSKDSDVYITDKCVLDMRSMDFKSNSAVAWSNKSDFACANAFNNSIIPEDTFFPSPESSDSTDHVKPKETENTKQPSKSCHKPKAIVHTEKVNMMSLTVLGLRMLFAKTVAVNFLLTAKLFFLLTARAKRSGSGVKQTLNFDLLKLAGDVESNPGPTSMDWIWRILFLVGAATGAHSFEEVQLEQSGPELVKPGASVKMSCKASGYTFTNYYMKWVKQSHGKSLEWIGDLNPNNGDTFYNQKFKGKATLTVDKSSNTAYMQLNSLTSEDSAVYYCARTGRYEENAMDYWGQGTSVTVSSTREDLKNVFPPEVAVFEPSEAEISHTQKATLVCLATGFYPDHVELSWWVNGKEVHSGVCTDPQPLKEQPALNDSRYCLSSRLRVSATFWQNPRNHFRCQVQFYGLSENDEWTQDRAKPVTQIVSAEAWGRADDVIKIHWQEKKSNTILGSQEGNTMKTNDTYMKFSWLTVPEKSLDKEHRCIVRHENNKNGVDQEIIFPPIKTDVITMDPKDNCSKDANDTLLLQLTNTSAYYMYLLLLLKSVVYFAIITCCLLMAMVKRKDSRG

SEQ ID NO: 14692 - protein, 726 aa, synthetic construct
MALPVTALLLPLALLLHAARPDVVMTQSPSSLSASVGDRVTITCMASEDIYIRLAWYQQKPGNAPKLLIYAATSLETGVPSRFSGSGSGTDFTLTISSLQPEDFATYYCQQYWSSPWTFGGGTKVEIKLEIQNPDPAVYQLRDSKSSDKSVCLFTDFDSQTNVSQSKDSDVYITDKCVLDMRSMDFKSNSAVAWSNKSDFACANAFNNSIIPEDTFFPSPESSDSTDHVKPKETENTKQPSKSCHKPKAIVHTEKVNMMSLTVLGLRMLFAKTVAVNFLLTAKLFFLLTARAKRSGSGVKQTLNFDLLKLAGDVESNPGPTSMDWIWRILFLVGAATGAHSFEQVQLQESGPGLVKPSQTLSLTCTVSGYSITSDYTWNWIRQPPGNGLEWIGYITYSGSTSYNPSLKSRVLISVDTSKNQVSLKLSSVTAADTAVYYCARLGRRYTMDYWGQGTTVTVSSTREDLKNVFPPEVAVFEPSEAEISHTQKATLVCLATGFYPDHVELSWWVNGKEVHSGVCTDPQPLKEQPALNDSRYCLSSRLRVSATFWQNPRNHFRCQVQFYGLSENDEWTQDRAKPVTQIVSAEAWGRADDVIKIHWQEKKSNTILGSQEGNTMKTNDTYMKFSWLTVPEKSLDKEHRCIVRHENNKNGVDQEIIFPPIKTDVITMDPKDNCSKDANDTLLLQLTNTSAYYMYLLLLLKSVVYFAIITCCLLMAMVKRKDSRG

SEQ ID NO: 14693 - protein, 730 aa, synthetic construct; identical to SEQ ID NO: 14556

SEQ ID NO: 14694 - protein, 730 aa, synthetic construct
MALPVTALLLPLALLLHAARPDIVLTQSPATLSLSPGDRATLSCRASESVTILGSHLIYWYQQKPGQAPRLLIQLASNVQTGIPARFSGSGSRTDFTLTISSLEPEDFAVYYCLQSRTIPRTFGQGTKLEIKRLEIQNPDPAVYQLRDSKSSDKSVCLFTDFDSQTNVSQSKDSDVYITDKCVLDMRSMDFKSNSAVAWSNKSDFACANAFNNSIIPEDTFFPSPESSDSTDHVKPKETENTKQPSKSCHKPKAIVHTEKVNMMSLTVLGLRMLFAKTVAVNFLLTAKLFFLLTARAKRSGSGVKQTLNFDLLKLAGDVESNPGPTSMDWIWRILFLVGAATGAHSFEQVQLVQSGSELKKPGESVKISCKASGYTFTHYSMNWVRQAPGQGLEWMGRINTETGEPLYADDFKGRFVFSLDTSASTAYLQISSLKAEDTAVYYCSNDYLYSLDYWGQGTLVTVSSTREDLKNVFPPEVAVFEPSEAEISHTQKATLVCLATGFYPDHVELSWWVNGKEVHSGVCTDPQPLKEQPALNDSRYCLSSRLRVSATFWQNPRNHFRCQVQFYGLSENDEWTQDRAKPVTQIVSAEAWGRADDVIKIHWQEKKSNTILGSQEGNTMKTNDTYMKFSWLTVPEKSLDKEHRCIVRHENNKNGVDQEIIFPPIKTDVITMDPKDNCSKDANDTLLLQLTNTSAYYMYLLLLLKSVVYFAIITCCLLMAMVKRKDSRG

SEQ ID NO: 14695 - protein, 731 aa, synthetic construct
MALPVTALLLPLALLLHAARPDIQLTQSPSFLSASVGDRVTITCRASQGISTDLNWYQQKPGKAPKLLIYAASNLESGVPSRFSGSGSGTEFTLTISSLQPEDFATYYCQQSYNWPYTFGGGTKVEIKRLEIQNPDPAVYQLRDSKSSDKSVCLFTDFDSQTNVSQSKDSDVYITDKCVLDMRSMDFKSNSAVAWSNKSDFACANAFNNSIIPEDTFFPSPESSDSTDHVKPKETENTKQPSKSCHKPKAIVHTEKVNMMSLTVLGLRMLFAKTVAVNFLLTAKLFFLLTARAKRSGSGVKQTLNFDLLKLAGDVESNPGPTSMDWIWRILFLVGAATGAHSFEEVQLVESGGGLVKPGGSLRLSCAASGFTFSNFEMNWVRQAPGKGLEWVSGISSNGRYINYADSVKGRFTISRDNAKNSLYLQMNSLRAEDTAVYYCARVVDFDQDYNGFDYWGQGTLVTVSSTREDLKNVFPPEVAVFEPSEAEISHTQKATLVCLATGFYPDHVELSWWVNGKEVHSGVCTDPQPLKEQPALNDSRYCLSSRLRVSATFWQNPRNHFRCQVQFYGLSENDEWTQDRAKPVTQIVSAEAWGRADDVIKIHWQEKKSNTILGSQEGNTMKTNDTYMKFSWLTVPEKSLDKEHRCIVRHENNKNGVDQEIIFPPIKTDVITMDPKDNCSKDANDTLLLQLTNTSAYYMYLLLLLKSVVYFAIITCCLLMAMVKRKDSRG

SEQ ID NO: 14696 - protein, 729 aa, synthetic construct
MALPVTALLLPLALLLHAARPDIQLTQSPSFLSASVGDRVTITCSLSLGISTWRDWFPPRLGRGLEPLTYAASTLQSGVPSRFSGSGSGTEFTLTISSLQPEDFATYYCQQLNSYPLTFGGGTKVEIKRLEIQNPDPAVYQLRDSKSSDKSVCLFTDFDSQTNVSQSKDSDVYITDKCVLDMRSMDFKSNSAVAWSNKSDFACANAFNNSIIPEDTFFPSPESSDSTDHVKPKETENTKQPSKSCHKPKAIVHTEKVNMMSLTVLGLRMLFAKTVAVNFLLTAKLFFLLTARAKRSGSGVKQTLNFDLLKLAGDVESNPGPTSMDWIWRILFLVGAATGAHSFEEVQLVESGGGLVKPGGSLRLSCAASGFTFSTYGMSWVRQAPGKGLEWVAYINNGSGYIYYADSVKGRFTISRDNAKNSLYLQMNSLRAEDTAVYYCARGQWWSGGDFDYWGQGTLVTVSSTREDLKNVFPPEVAVFEPSEAEISHTQKATLVCLATGFYPDHVELSWWVNGKEVHSGVCTDPQPLKEQPALNDSRYCLSSRLRVSATFWQNPRNHFRCQVQFYGLSENDEWTQDRAKPVTQIVSAEAWGRADDVIKIHWQEKKSNTILGSQEGNTMKTNDTYMKFSWLTVPEKSLDKEHRCIVRHENNKNGVDQEIIFPPIKTDVITMDPKDNCSKDANDTLLLQLTNTSAYYMYLLLLLKSVVYFAIITCCLLMAMVKRKDSRG

SEQ ID NO: 14697 - protein, 730 aa, synthetic construct
MALPVTALLLPLALLLHAARPEIVLTQSPATLSLSPGERATLSCSASSSVSYMYWYQQKPGQAPRLLIYRTSNLASGIPARFSGSGSGTDFTLTISSLEPEDFAVYYCQQYHSYPTTFGQGTKVEIKRTVLEIQNPDPAVYQLRDSKSSDKSVCLFTDFDSQTNVSQSKDSDVYITDKCVLDMRSMDFKSNSAVAWSNKSDFACANAFNNSIIPEDTFFPSPESSDSTDHVKPKETENTKQPSKSCHKPKAIVHTEKVNMMSLTVLGLRMLFAKTVAVNFLLTAKLFFLLTARAKRSGSGVKQTLNFDLLKLAGDVESNPGPTSMDWIWRILFLVGAATGAHSFEEVQLVESGGGLVQPGGSLRLSCAASGFSFNTYAMNWVRQAPGKGLEWVSHIRSKSNNFATYYADSVKDRFTISRDNAKNSLYLQMNSLRAEDTAVYYCARQGGDFPMDYWGQGTLVTVSSTREDLKNVFPPEVAVFEPSEAEISHTQKATLVCLATGFYPDHVELSWWVNGKEVHSGVCTDPQPLKEQPALNDSRYCLSSRLRVSATFWQNPRNHFRCQVQFYGLSENDEWTQDRAKPVTQIVSAEAWGRADDVIKIHWQEKKSNTILGSQEGNTMKTNDTYMKFSWLTVPEKSLDKEHRCIVRHENNKNGVDQEIIFPPIKTDVITMDPKDNCSKDANDTLLLQLTNTSAYYMYLLLLLKSVVYFAIITCCLLMAMVKRKDSRG

SEQ ID NO: 14698 - protein, 726 aa, synthetic construct
MALPVTALLLPLALLLHAARPDVVMTQSPSSLSASVGDRVTITCKASEDIYIRLAWYQQKPGKAPKLLIYAATSLETGVPSRFSGSGSGTDFTLTISSLQPEDFATYYCQQYWTTPWTFGGGTKVEIKLEIQNPDPAVYQLRDSKSSDKSVCLFTDFDSQTNVSQSKDSDVYITDKCVLDMRSMDFKSNSAVAWSNKSDFACANAFNNSIIPEDTFFPSPESSDSTDHVKPKETENTKQPSKSCHKPKAIVHTEKVNMMSLTVLGLRMLFAKTVAVNFLLTAKLFFLLTARAKRSGSGVKQTLNFDLLKLAGDVESNPGPTSMDWIWRILFLVGAATGAHSFEQVQLQESGPGLVKPSQTLSLTCTVSGYSITIDYTWNWIRQPPGKGLEWIGYITYSGSTDYNPSLKSRVLISVDTSKNQVSLKLSSVTAADTAVYYCARLGRRYALDYWGQGTTVTVSSTREDLKNVFPPEVAVFEPSEAEISHTQKATLVCLATGFYPDHVELSWWVNGKEVHSGVCTDPQPLKEQPALNDSRYCLSSRLRVSATFWQNPRNHFRCQVQFYGLSENDEWTQDRAKPVTQIVSAEAWGRADDVIKIHWQEKKSNTILGSQEGNTMKTNDTYMKFSWLTVPEKSLDKEHRCIVRHENNKNGVDQEIIFPPIKTDVITMDPKDNCSKDANDTLLLQLTNTSAYYMYLLLLLKSVVYFAIITCCLLMAMVKRKDSRG

SEQ ID NO: 14699 - protein, 730 aa, synthetic construct
MALPVTALLLPLALLLHAARPDIQMTQTTSSLSASLGDRVTISCRASQDISNYLNWYQQKPDGTVKLLIYYTSILHSGVPSRFSGSGSGTDYSLTISNLEQEDFATYFCQQGNTLPWTFGGGTKLEIKALEIQNPDPAVYQLRDSKSSDKSVCLFTDFDSQTNVSQSKDSDVYITDKCVLDMRSMDFKSNSAVAWSNKSDFACANAFNNSIIPEDTFFPSPESSDSTDHVKPKETENTKQPSKSCHKPKAIVHTEKVNMMSLTVLGLRMLFAKTVAVNFLLTAKLFFLLTARAKRSGSGVKQTLNFDLLKLAGDVESNPGPTSMDWIWRILFLVGAATGAHSFEVQLVESGGGLVKPGGSLKLSCAASGFAFSIYDMSWVRQTPEKRLEWVAYISSGGGTYYPDTVKGRFTISRDNAKNTLYLQMSSLKSEDTAMYYCARHSGYGTHWGVLFAYWGQGTLVTVSATREDLKNVFPPEVAVFEPSEAEISHTQKATLVCLATGFYPDHVELSWWVNGKEVHSGVCTDPQPLKEQPALNDSRYCLSSRLRVSATFWQNPRNHFRCQVQFYGLSENDEWTQDRAKPVTQIVSAEAWGRADDVIKIHWQEKKSNTILGSQEGNTMKTNDTYMKFSWLTVPEKSLDKEHRCIVRHENNKNGVDQEIIFPPIKTDVITMDPKDNCSKDANDTLLLQLTNTSAYYMYLLLLLKSVVYFAIITCCLLMAMVKRKDSRG

SEQ ID NO: 14700 - protein, 741 aa, synthetic construct
MALPVTALLLPLALLLHAARPDIVMTQSPDSLAVSLGERATINCKSSQSLLYRSNQKNYLAWYQQKPGQPPKLLIYWASTRESGVPDRFSGSGSGTDFTLTISSLQAEDVAVYYCQQYYNYPRTFGQGTKVEIKRTVLEIQNPDPAVYQLRDSKSSDKSVCLFTDFDSQTNVSQSKDSDVYITDKCVLDMRSMDFKSNSAVAWSNKSDFACANAFNNSIIPEDTFFPSPESSDSTDHVKPKETENTKQPSKSCHKPKAIVHTEKVNMMSLTVLGLRMLFAKTVAVNFLLTAKLFFLLTARAKRSGSGVKQTLNFDLLKLAGDVESNPGPTSMDWIWRILFLVGAATGAHSFEEVQLLESGGGLVQPGGSLRLSCAASGYSITSDYAWNWVRQAPGKGLEWVSYISNSGSTSYNPSLKSRFTISRDNSKNTLYLQMNSLRAEDTAVYYCAKERNYDYDDYYYAMDYWGQGTLVTVSSTREDLKNVFPPEVAVFEPSEAEISHTQKATLVCLATGFYPDHVELSWWVNGKEVHSGVCTDPQPLKEQPALNDSRYCLSSRLRVSATFWQNPRNHFRCQVQFYGLSENDEWTQDRAKPVTQIVSAEAWGRADDVIKIHWQEKKSNTILGSQEGNTMKTNDTYMKFSWLTVPEKSLDKEHRCIVRHENNKNGVDQEIIFPPIKTDVITMDPKDNCSKDANDTLLLQLTNTSAYYMYLLLLLKSVVYFAIITCCLLMAMVKRKDSRG

SEQ ID NO: 14701 - protein, 734 aa, synthetic construct
MALPVTALLLPLALLLHAARPDVVMTQSPLSLPVTLGQPASISCRSSQSLLHSSGNTYLEWYQQRPGQSPRPLIYKISTRFSGVPDRFSGSGSGTDFTLKISRVEAEDVGVYYCFQGSHVPYTFGGGTKVEIKRLEIQNPDPAVYQLRDSKSSDKSVCLFTDFDSQTNVSQSKDSDVYITDKCVLDMRSMDFKSNSAVAWSNKSDFACANAFNNSIIPEDTFFPSPESSDSTDHVKPKETENTKQPSKSCHKPKAIVHTEKVNMMSLTVLGLRMLFAKTVAVNFLLTAKLFFLLTARAKRSGSGVKQTLNFDLLKLAGDVESNPGPTSMDWIWRILFLVGAATGAHSFEQVQLVQSGAEVKKPGASVKVSCKASGLTIEDYYMHWVRQAPGQGLEWMGWIDPENGDTEYGPKFQGRVTMTRDTSINTAYMELSRLRSDDTAVYYCAVHNAHYGTWFAYWGQGTLVTVSSTREDLKNVFPPEVAVFEPSEAEISHTQKATLVCLATGFYPDHVELSWWVNGKEVHSGVCTDPQPLKEQPALNDSRYCLSSRLRVSATFWQNPRNHFRCQVQFYGLSENDEWTQDRAKPVTQIVSAEAWGRADDVIKIHWQEKKSNTILGSQEGNTMKTNDTYMKFSWLTVPEKSLDKEHRCIVRHENNKNGVDQEIIFPPIKTDVITMDPKDNCSKDANDTLLLQLTNTSAYYMYLLLLLKSVVYFAIITCCLLMAMVKRKDSRG

SEQ ID NO: 14702 - protein, 726 aa, synthetic construct
MALPVTALLLPLALLLHAARPDIQMTQSPSSLSASVGDRVTITCRASENIYSNLAWYQQKPGKAPKLLIYAATNLADGVPSRFSGSGSGTDFTLTISSLQPEDFATYYCQHFWGTPTFGQGTKVEIKRTVLEIQNPDPAVYQLRDSKSSDKSVCLFTDFDSQTNVSQSKDSDVYITDKCVLDMRSMDFKSNSAVAWSNKSDFACANAFNNSIIPEDTFFPSPESSDSTDHVKPKETENTKQPSKSCHKPKAIVHTEKVNMMSLTVLGLRMLFAKTVAVNFLLTAKLFFLLTARAKRSGSGVKQTLNFDLLKLAGDVESNPGPTSMDWIWRILFLVGAATGAHSFEEVQLVESGGGLVQPGGSLRLSCAASGFSLTNYGVHWVRQAPGKGLEWVSVIWSGGSTDYNAAFISRFTISADTSKNTAYLQMNSLRAEDTAVYYCARELIHAMDNWGQGTLVTVSSTREDLKNVFPPEVAVFEPSEAEISHTQKATLVCLATGFYPDHVELSWWVNGKEVHSGVCTDPQPLKEQPALNDSRYCLSSRLRVSATFWQNPRNHFRCQVQFYGLSENDEWTQDRAKPVTQIVSAEAWGRADDVIKIHWQEKKSNTILGSQEGNTMKTNDTYMKFSWLTVPEKSLDKEHRCIVRHENNKNGVDQEIIFPPIKTDVITMDPKDNCSKDANDTLLLQLTNTSAYYMYLLLLLKSVVYFAIITCCLLMAMVKRKDSRG

SEQ ID NO: 14703 - protein, 733 aa, synthetic construct
MALPVTALLLPLALLLHAARPDFVMTQSPLSLPVTPGEPASISCRSSQSIVHSNGNTYLEWYLQKPGQSPQLLIYKVSNRFSGVPDRFSGSGSGTDFTLKISRVEAEDVGVYYCFQGSHVPLTFGQGTKLEIKRLEIQNPDPAVYQLRDSKSSDKSVCLFTDFDSQTNVSQSKDSDVYITDKCVLDMRSMDFKSNSAVAWSNKSDFACANAFNNSIIPEDTFFPSPESSDSTDHVKPKETENTKQPSKSCHKPKAIVHTEKVNMMSLTVLGLRMLFAKTVAVNFLLTAKLFFLLTARAKRSGSGVKQTLNFDLLKLAGDVESNPGPTSMDWIWRILFLVGAATGAHSFEEVQLVESGAEVKKPGASVKVSCKASGYTFTSYWIHWVRQAPGQGLEWMGENDPSNGRTNYNEKFKNRVTLTVDTSISTAYMELSRLRSDDTAVYYCARGPNYFYSMDYWGQGTMVTVSSTREDLKNVFPPEVAVFEPSEAEISHTQKATLVCLATGFYPDHVELSWWVNGKEVHSGVCTDPQPLKEQPALNDSRYCLSSRLRVSATFWQNPRNHFRCQVQFYGLSENDEWTQDRAKPVTQIVSAEAWGRADDVIKIHWQEKKSNTILGSQEGNTMKTNDTYMKFSWLTVPEKSLDKEHRCIVRHENNKNGVDQEIIFPPIKTDVITMDPKDNCSKDANDTLLLQLTNTSAYYMYLLLLLKSVVYFAIITCCLLMAMVKRKDSRG

SEQ ID NO: 14704 - protein, 726 aa, synthetic construct
MALPVTALLLPLALLLHAARPDIQLTQSPSFLSASVGDRVTITCSARSSISFMYWYQQKPGKAPKLLIYDTSNLASGVPSRFSGSGSGTEFTLTISSLEAEDAATYYCQQWSSYPLTFGQGTKLEIKLEIQNPDPAVYQLRDSKSSDKSVCLFTDFDSQTNVSQSKDSDVYITDKCVLDMRSMDFKSNSAVAWSNKSDFACANAFNNSIIPEDTFFPSPESSDSTDHVKPKETENTKQPSKSCHKPKAIVHTEKVNMMSLTVLGLRMLFAKTVAVNFLLTAKLFFLLTARAKRSGSGVKQTLNFDLLKLAGDVESNPGPTSMDWIWRILFLVGAATGAHSFEQVQLVQSGAEVKKPGASVKVSCKASGYTFTGSWMNWVRQAPGQGLEWIGRIYPGDGETNYNGKFKDRVTITADKSTSTAYMELSSLRSEDTAVYYCARIYGNNVYFDVWGQGTTVTVSSTREDLKNVFPPEVAVFEPSEAEISHTQKATLVCLATGFYPDHVELSWWVNGKEVHSGVCTDPQPLKEQPALNDSRYCLSSRLRVSATFWQNPRNHFRCQVQFYGLSENDEWTQDRAKPVTQIVSAEAWGRADDVIKIHWQEKKSNTILGSQEGNTMKTNDTYMKFSWLTVPEKSLDKEHRCIVRHENNKNGVDQEIIFPPIKTDVITMDPKDNCSKDANDTLLLQLTNTSAYYMYLLLLLKSVVYFAIITCCLLMAMVKRKDSRG

SEQ ID NO: 14705 - protein, 734 aa, synthetic construct
MALPVTALLLPLALLLHAARPQLVLTQSPSASASLGSSVKLTCTLSSGHKTDTIDWYQQQPGKAPRYLMKLEGSGSYNKGSGVPDRFSGSSSGADWYLTISSLQSEDEADYYCGTDYPGNYLFGGGTQLTVLGLEIQNPDPAVYQLRDSKSSDKSVCLFTDFDSQTNVSQSKDSDVYITDKCVLDMRSMDFKSNSAVAWSNKSDFACANAFNNSIIPEDTFFPSPESSDSTDHVKPKETENTKQPSKSCHKPKAIVHTEKVNMMSLTVLGLRMLFAKTVAVNFLLTAKLFFLLTARAKRSGSGVKQTLNFDLLKLAGDVESNPGPTSMDWIWRILFLVGAATGAHSFEQEQLVESGGGLVQPGGSLRLSCAASGFTFSDYYMSWIRQAPGKGLEWVATIYPSSGKTYYADSAKGRLTISSDNAKDSLYLQMNSLRAEDTAVYYCTRDSYADDAALFDIWGQGTTVTVSSTREDLKNVFPPEVAVFEPSEAEISHTQKATLVCLATGFYPDHVELSWWVNGKEVHSGVCTDPQPLKEQPALNDSRYCLSSRLRVSATFWQNPRNHFRCQVQFYGLSENDEWTQDRAKPVTQIVSAEAWGRADDVIKIHWQEKKSNTILGSQEGNTMKTNDTYMKFSWLTVPEKSLDKEHRCIVRHENNKNGVDQEIIFPPIKTDVITMDPKDNCSKDANDTLLLQLTNTSAYYMYLLLLLKSVVYFAIITCCLLMAMVKRKDSRG

SEQ ID NO: 14706 - protein, 726 aa, synthetic construct; identical to SEQ ID NO: 14702

SEQ ID NO: 14707 - protein, 733 aa, synthetic construct; identical to SEQ ID NO: 14703

SEQ ID NO: 14708 - protein, 726 aa, synthetic construct; identical to SEQ ID NO: 14704

SEQ ID NO: 14709 - protein, 734 aa, synthetic construct; identical to SEQ ID NO: 14705

SEQ ID NO: 14710 - protein, 733 aa, synthetic construct
MALPVTALLLPLALLLHAARPDIQLTQSPSSLSASVGDRVSFTCQASQDINNFLNWYQQKPGKAPKLLIYDASNLETGVPSRFSGSGSGTDFTFTISSLQPEDIATYYCQQYGNLPFTFGGGTKVEIKRLEIQNPDPAVYQLRDSKSSDKSVCLFTDFDSQTNVSQSKDSDVYITDKCVLDMRSMDFKSNSAVAWSNKSDFACANAFNNSIIPEDTFFPSPESSDSTDHVKPKETENTKQPSKSCHKPKAIVHTEKVNMMSLTVLGLRMLFAKTVAVNFLLTAKLFFLLTARAKRSGSGVKQTLNFDLLKLAGDVESNPGPTSMDWIWRILFLVGAATGAHSFEQVQLQESGPGLVKPSQTLSLTCTVSGGSISSGGFYWSWIRQHPGKGLEWIGYIHHSGSTHYNPSLKSRVTISIDTSKNLFSLRLSSVTAADTAVYYCASLVYCGGDCYSGFDYWGQGTLVTVSSTREDLKNVFPPEVAVFEPSEAEISHTQKATLVCLATGFYPDHVELSWWVNGKEVHSGVCTDPQPLKEQPALNDSRYCLSSRLRVSATFWQNPRNHFRCQVQFYGLSENDEWTQDRAKPVTQIVSAEAWGRADDVIKIHWQEKKSNTILGSQEGNTMKTNDTYMKFSWLTVPEKSLDKEHRCIVRHENNKNGVDQEIIFPPIKTDVITMDPKDNCSKDANDTLLLQLTNTSAYYMYLLLLLKSVVYFAIITCCLLMAMVKRKDSRG

SEQ ID NO: 14711 - protein, 729 aa, synthetic construct
MALPVTALLLPLALLLHAARPDIQMTQSPSSLSASVGDRVTITCKSSQSVLYSSNQKNYLAWFQQKPGKAPKLLIYWASTRESGVPSRFSGSGSGTDFTLTISSLQPEDFATYFCHQYLSSYTFGQGTKVEIKRLEIQNPDPAVYQLRDSKSSDKSVCLFTDFDSQTNVSQSKDSDVYITDKCVLDMRSMDFKSNSAVAWSNKSDFACANAFNNSIIPEDTFFPSPESSDSTDHVKPKETENTKQPSKSCHKPKAIVHTEKVNMMSLTVLGLRMLFAKTVAVNFLLTAKLFFLLTARAKRSGSGVKQTLNFDLLKLAGDVESNPGPTSMDWIWRILFLVGAATGAHSFEEVQLVESGGGLVQPGGSLRLSCAASGYTFTTYWMHWVRQAPGKGLEWVGYIRPSTGYTEYNQKFKDRFTISADTSKNTAYLQMNSLRAEDTAVYYCARSRWLLDYWGQGTLVTVSTREDLKNVFPPEVAVFEPSEAEISHTQKATLVCLATGFYPDHVELSWWVNGKEVHSGVCTDPQPLKEQPALNDSRYCLSSRLRVSATFWQNPRNHFRCQVQFYGLSENDEWTQDRAKPVTQIVSAEAWGRADDVIKIHWQEKKSNTILGSQEGNTMKTNDTYMKFSWLTVPEKSLDKEHRCIVRHENNKNGVDQEIIFPPIKTDVITMDPKDNCSKDANDTLLLQLTNTSAYYMYLLLLLKSVVYFAIITCCLLMAMVKRKDSRG

SEQ ID NO: 14712 - protein, 726 aa, synthetic construct
MALPVTALLLPLALLLHAARPDIQMTQSPSSLSASVGDRVTITCRASQDISNYLNWYQQKPGKAPKLLIYYTSRLHSGVPSRFSGSGSGTDFTLTISSLQPEDFATYYCQQGNTLPYTFGQGTKVEIKRLEIQNPDPAVYQLRDSKSSDKSVCLFTDFDSQTNVSQSKDSDVYITDKCVLDMRSMDFKSNSAVAWSNKSDFACANAFNNSIIPEDTFFPSPESSDSTDHVKPKETENTKQPSKSCHKPKAIVHTEKVNMMSLTVLGLRMLFAKTVAVNFLLTAKLFFLLTARAKRSGSGVKQTLNFDLLKLAGDVESNPGPTSMDWIWRILFLVGAATGAHSFEEVQLVESGGGLVQPGGSLRLSCAASGFTFSDYFMSWVRQAPGKGLEWVATISNGGTYTYYPDSVKGRFTISRDNSKNTLYLQMNSLRAEDTAVYYCARFDGYIFDYWGQGTLVTVSSTREDLKNVFPPEVAVFEPSEAEISHTQKATLVCLATGFYPDHVELSWWVNGKEVHSGVCTDPQPLKEQPALNDSRYCLSSRLRVSATFWQNPRNHFRCQVQFYGLSENDEWTQDRAKPVTQIVSAEAWGRADDVIKIHWQEKKSNTILGSQEGNTMKTNDTYMKFSWLTVPEKSLDKEHRCIVRHENNKNGVDQEIIFPPIKTDVITMDPKDNCSKDANDTLLLQLTNTSAYYMYLLLLLKSVVYFAIITCCLLMAMVKRKDSRG

SEQ ID NO: 14713 - protein, 858 aa, synthetic construct
MALPVTALLLPLALLLHAARPEVQLVESGGGLVQPGGSLRLSCAASGFSFSDFWMSWVRQAPGKGLEWVATISQAGSEKDYVDSVKGRFTISRDNAKKSLYLQMNSLRAEDTAVYYCASGVYSFDYRGQGTLVTVSSGTGGGGSGGGGSGGGGSEFDIQMTQTTSSLSASLGDRVTISCRASQDISKYLNWYQQKPDGTVKLLIYHTSRLHSGVPSRFSGSGSGTDYSLTISNLEQEDIATYFCQQGNTLPYTFGGGTKLEITLEDLKNVFPPEVAVFEPSEAEISHTQKATLVCLATGFYPDHVELSWWVNGKEVHSGVCTDPQPLKEQPALNDSRYCLSSRLRVSATFWQNPRNHFRCQVQFYGLSENDEWTQDRAKPVTQIVSAEAWGRADDVIKIHWQEKKSNTILGSQEGNTMKTNDTYMKFSWLTVPEKSLDKEHRCIVRHENNKNGVDQEIIFPPIKTDVITMDPKDNCSKDANDTLLLQLTNTSAYYMYLLLLLKSVVYFAIITCCLLMAMVKRKDSRGRAKRSGSGATNFSLLKQAGDVEENPGPTSMDWIWRILFLVGAATGAHSFEVKLQESGPGLVAPSQSLSVTCTVSGVSLPDYGVSWIRQPPRKGLEWLGVIWGSETTYYNSALKSRLTIIKDNSKSQVFLKMNSLQTDDTAIYYCAKHYYYGGSYAMDYWGQGTSVTVSSTRIQNPDPAVYQLRDSKSSDKSVCLFTDFDSQTNVSQSKDSDVYITDKCVLDMRSMDFKSNSAVAWSNKSDFACANAFNNSIIPEDTFFPSPESSDSTDHVKPKETENTKQPSKSCHKPKAIVHTEKVNMMSLTVLGLRMLFAKTVAVNFLLTAKLFFLLTA

SEQ ID NO: 14714 - protein, 859 aa, synthetic construct
MALPVTALLLPLALLLHAARPEVQLVESGGGLVQPGGSLRLSCAASGFSFSDFWMSWVRQAPGKGLEWVATISQAGSEKDYVDSVKGRFTISRDNAKKSLYLQMNSLRAEDTAVYYCASGVYSFDYRGQGTLVTVSSGTGGGGSGGGGSGGGGSEFEIVMTQSPATLSLSPGERATLSCRASQDISKYLNWYQQKPGQAPRLLIYHTSRLHSGIPARFSGSGSGTDYTLTISSLQPEDFAVYFCQQGNTLPYTFGQGTKLEIKLEDLKNVFPPEVAVFEPSEAEISHTQKATLVCLATGFYPDHVELSWWVNGKEVHSGVCTDPQPLKEQPALNDSRYCLSSRLRVSATFWQNPRNHFRCQVQFYGLSENDEWTQDRAKPVTQIVSAEAWGRADDVIKIHWQEKKSNTILGSQEGNTMKTNDTYMKFSWLTVPEKSLDKEHRCIVRHENNKNGVDQEIIFPPIKTDVITMDPKDNCSKDANDTLLLQLTNTSAYYMYLLLLLKSVVYFAIITCCLLMAMVKRKDSRGRAKRSGSGATNFSLLKQAGDVEENPGPTSMDWIWRILFLVGAATGAHSFEQVQLQESGPGLVKPSETLSLTCTVSGVSLPDYGVSWIRQPPGKGLEWIGVIWGSETTYYNSSLKSRVTISKDNSKNQVSLKLSSVTAADTAVYYCAKHYYYGGSYAMDYWGQGTLVTVSSTRIQNPDPAVYQLRDSKSSDKSVCLFTDFDSQTNVSQSKDSDVYITDKCVLDMRSMDFKSNSAVAWSNKSDFACANAFNNSIIPEDTFFPSPESSDSTDHVKPKETENTKQPSKSCHKPKAIVHTEKVNMMSLTVLGLRMLFAKTVAVNFLLTAKLFFLLTA

SEQ ID NO: 14715 - protein, 860 aa, synthetic construct
MALPVTALLLPLALLLHAARPEVQLVESGGGLVQPGGSLRLSCAASGFSFSDFWMSWVRQAPGKGLEWVATISQAGSEKDYVDSVKGRFTISRDNAKKSLYLQMNSLRAEDTAVYYCASGVYSFDYRGQGTLVTVSSGTGGGGSGGGGSGGGGSEFDEIVLTQSPATLSLSPGERATLSCSASSSVSYMHWYQQKPGQAPRLLIYDTSKLASGIPARFSGSGSGTDFTLTISSLEPEDVAVYYCFQGSVYPFTFGQGTKLEIKRLEDLKNVFPPEVAVFEPSEAEISHTQKATLVCLATGFYPDHVELSWWVNGKEVHSGVCTDPQPLKEQPALNDSRYCLSSRLRVSATFWQNPRNHFRCQVQFYGLSENDEWTQDRAKPVTQIVSAEAWGRADDVIKIHWQEKKSNTILGSQEGNTMKTNDTYMKFSWLTVPEKSLDKEHRCIVRHENNKNGVDQEIIFPPIKTDVITMDPKDNCSKDANDTLLLQLTNTSAYYMYLLLLLKSVVYFAIITCCLLMAMVKRKDSRGRAKRSGSGATNFSLLKQAGDVEENPGPTSMDWIWRILFLVGAATGAHSFEQVQLQESGPGLVKPSQTLSLTCTVSGGSISTSGMGVGWIRQHPGKGLEWIGHIWWDDDKRYNPALKSRVTISVDTSKNQFSLKLSSVTAADTAVYYCARMELWSYYFDYWGQGTLVTVSSTRIQNPDPAVYQLRDSKSSDKSVCLFTDFDSQTNVSQSKDSDVYITDKCVLDMRSMDFKSNSAVAWSNKSDFACANAFNNSIIPEDTFFPSPESSDSTDHVKPKETENTKQPSKSCHKPKAIVHTEKVNMMSLTVLGLRMLFAKTVAVNFLLTAKLFFLLTA

SEQ ID NO: 14716 - protein, 858 aa, synthetic construct
MALPVTALLLPLALLLHAARPEVQLVESGGGLVQPGGSLRLSCAASGFSFSDFWMSWVRQAPGKGLEWVATISQAGSEKDYVDSVKGRFTISRDNAKKSLYLQMNSLRAEDTAVYYCASGVYSFDYRGQGTLVTVSSGTGGGGSGGGGSGGGGSEFDYIHVTQSPSSLSVSIGDRVTINCQTSQGVGSDLHWYQHKPGRAPKLLIHHASSVEDGVPSRFSGTGFHTSFNLTINDLQADDIGTYYCQVLQSFGRGSRLDTKLEDLKNVFPPEVAVFEPSEAEISHTQKATLVCLATGFYPDHVELSWWVNGKEVHSGVCTDPQPLKEQPALNDSRYCLSSRLRVSATFWQNPRNHFRCQVQFYGLSENDEWTQDRAKPVTQIVSAEAWGRADDVIKIHWQEKKSNTILGSQEGNTMKTNDTYMKFSWLTVPEKSLDKEHRCIVRHENNKNGVDQEIIFPPIKTDVITMDPKDNCSKDANDTLLLQLTNTSAYYMYLLLLLKSVVYFAIITCCLLMAMVKRKDSRGRAKRSGSGATNFSLLKQAGDVEENPGPTSMDWIWRILFLVGAATGAHSFERAHLVQSGTAMKKPGASVRVSCQTSGYTFTAHILFWFRQAPGRGLEWVGWIKPQYGAVNFGGGFRDRVTLTRDVYREIAYMDIRGLKPDDTAVYYCARDRSYGDSSWALDAWGQGTTVVVSATRIQNPDPAVYQLRDSKSSDKSVCLFTDFDSQTNVSQSKDSDVYITDKCVLDMRSMDFKSNSAVAWSNKSDFACANAFNNSIIPEDTFFPSPESSDSTDHVKPKETENTKQPSKSCHKPKAIVHTEKVNMMSLTVLGLRMLFAKTVAVNFLLTAKLFFLLTA

SEQ ID NO: 14717 - protein, 868 aa, synthetic construct
MALPVTALLLPLALLLHAARPEVQLVESGGGLVQPGGSLRLSCAASGFSFSDFWMSWVRQAPGKGLEWVATISQAGSEKDYVDSVKGRFTISRDNAKKSLYLQMNSLRAEDTAVYYCASGVYSFDYRGQGTLVTVSSGTGGGGSGGGGSGGGGSEFDVQMIQTPDSLAVSLGQRATISCRASESVDNYGISFMHWYQQKPGQSPKLLIYRASNLESGIPARFSGSGSRTDFTLTINPVETDDVATYYCQQNNKDPPTFGGGTKLEIKLEDLKNVFPPEVAVFEPSEAEISHTQKATLVCLATGFYPDHVELSWWVNGKEVHSGVCTDPQPLKEQPALNDSRYCLSSRLRVSATFWQNPRNHFRCQVQFYGLSENDEWTQDRAKPVTQIVSAEAWGRADDVIKIHWQEKKSNTILGSQEGNTMKTNDTYMKFSWLTVPEKSLDKEHRCIVRHENNKNGVDQEIIFPPIKTDVITMDPKDNCSKDANDTLLLQLTNTSAYYMYLLLLLKSVVYFAIITCCLLMAMVKRKDSRGRAKRSGSGATNFSLLKQAGDVEENPGPTSMDWIWRILFLVGAATGAHSFEGGGGSQVQLQQSGAELVKPGASVKISCKASGYAFSSYWMNWVKQRPGKGLEWIGQIYPGDGDTTYNGKFKGKATLTADKSSSTVYMQLNSLTSEDSAVYFCVRYYYGSSGYFDYWGQGTTLTVSSTRIQNPDPAVYQLRDSKSSDKSVCLFTDFDSQTNVSQSKDSDVYITDKCVLDMRSMDFKSNSAVAWSNKSDFACANAFNNSIIPEDTFFPSPESSDSTDHVKPKETENTKQPSKSCHKPKAIVHTEKVNMMSLTVLGLRMLFAKTVAVNFLLTAKLFFLLTA

SEQ ID NO: 14718 - protein, 859 aa, synthetic construct
MALPVTALLLPLALLLHAARPEVQLVESGGGLVQPGGSLRLSCAASGFSFSDFWMSWVRQAPGKGLEWVATISQAGSEKDYVDSVKGRFTISRDNAKKSLYLQMNSLRAEDTAVYYCASGVYSFDYRGQGTLVTVSSGTGGGGSGGGGSGGGGSEFDVQMIQTPSSLSASLGDRVTISCRASQDIGNYLNWYQQKPDGTVKLLIYYTSRLHSGVPSRFSGSGSGTEYSLTISNLEQEDIATYFCQQGSALPPTFGGGTKLEINLEDLKNVFPPEVAVFEPSEAEISHTQKATLVCLATGFYPDHVELSWWVNGKEVHSGVCTDPQPLKEQPALNDSRYCLSSRLRVSATFWQNPRNHFRCQVQFYGLSENDEWTQDRAKPVTQIVSAEAWGRADDVIKIHWQEKKSNTILGSQEGNTMKTNDTYMKFSWLTVPEKSLDKEHRCIVRHENNKNGVDQEIIFPPIKTDVITMDPKDNCSKDANDTLLLQLTNTSAYYMYLLLLLKSVVYFAIITCCLLMAMVKRKDSRGRAKRSGSGATNFSLLKQAGDVEENPGPTSMDWIWRILFLVGAATGAHSFEALQLQQSGAELVRPGASVTLSCKASGYTFTDYEMHWVKQTPVHGLEWIGAIDPETGGTAYNQKFEGKAILTADKSSSTAYMELRSLTSEDSPVYYCARRRYYGSSSFDYWGQGTTLTVSSTRIQNPDPAVYQLRDSKSSDKSVCLFTDFDSQTNVSQSKDSDVYITDKCVLDMRSMDFKSNSAVAWSNKSDFACANAFNNSIIPEDTFFPSPESSDSTDHVKPKETENTKQPSKSCHKPKAIVHTEKVNMMSLTVLGLRMLFAKTVAVNFLLTAKLFFLLTA

SEQ ID NO: 14719 - protein, 863 aa, synthetic construct
MALPVTALLLPLALLLHAARPEVQLVESGGGLVQPGGSLRLSCAASGFSFSDFWMSWVRQAPGKGLEWVATISQAGSEKDYVDSVKGRFTISRDNAKKSLYLQMNSLRAEDTAVYYCASGVYSFDYRGQGTLVTVSSGTGGGGSGGGGSGGGGSEFDIVLTQSPASLAVSLGQRATISCRASKSVSTSGYSYLHWYQQKPGQPPKLLIYLASNLESGVPARFSGSGSGTDFTLNIHPVEEEDAATYYCQHSRELPFTFGSGTKLEIKLEDLKNVFPPEVAVFEPSEAEISHTQKATLVCLATGFYPDHVELSWWVNGKEVHSGVCTDPQPLKEQPALNDSRYCLSSRLRVSATFWQNPRNHFRCQVQFYGLSENDEWTQDRAKPVTQIVSAEAWGRADDVIKIHWQEKKSNTILGSQEGNTMKTNDTYMKFSWLTVPEKSLDKEHRCIVRHENNKNGVDQEIIFPPIKTDVITMDPKDNCSKDANDTLLLQLTNTSAYYMYLLLLLKSVVYFAIITCCLLMAMVKRKDSRGRAKRSGSGATNFSLLKQAGDVEENPGPTSMDWIWRILFLVGAATGAHSFEQVQLVESGGGLVQPGGSLKLSCAASGFDFSRYWMSWVRQAPGKGLEWIGEINPTSSTINFTPSLKDKVFISRDNAKNTLYLQMSKVRSEDTALYYCARGNYYRYGDAMDYWGQGTSVTVSTRIQNPDPAVYQLRDSKSSDKSVCLFTDFDSQTNVSQSKDSDVYITDKCVLDMRSMDFKSNSAVAWSNKSDFACANAFNNSIIPEDTFFPSPESSDSTDHVKPKETENTKQPSKSCHKPKAIVHTEKVNMMSLTVLGLRMLFAKTVAVNFLLTAKLFFLLTA

SEQ ID NO: 14720 - protein, 861 aa, synthetic construct
MALPVTALLLPLALLLHAARPEVQLVESGGGLVQPGGSLRLSCAASGFSFSDFWMSWVRQAPGKGLEWVATISQAGSEKDYVDSVKGRFTISRDNAKKSLYLQMNSLRAEDTAVYYCASGVYSFDYRGQGTLVTVSSGTGGGGSGGGGSGGGGSEFDIQMTQSPSSLSASVGDRVTITCSASQDISNYLNWYQQKPGKAPKLLIYYTSNLHSGVPSRFSGSGSGTDFTLTISSLQPEDFATYYCQQYRKLPWTFGQGTKLEIKRLEDLKNVFPPEVAVFEPSEAEISHTQKATLVCLATGFYPDHVELSWWVNGKEVHSGVCTDPQPLKEQPALNDSRYCLSSRLRVSATFWQNPRNHFRCQVQFYGLSENDEWTQDRAKPVTQIVSAEAWGRADDVIKIHWQEKKSNTILGSQEGNTMKTNDTYMKFSWLTVPEKSLDKEHRCIVRHENNKNGVDQEIIFPPIKTDVITMDPKDNCSKDANDTLLLQLTNTSAYYMYLLLLLKSVVYFAIITCCLLMAMVKRKDSRGRAKRSGSGATNFSLLKQAGDVEENPGPTSMDWIWRILFLVGAATGAHSFEQVQLVQSGAEVKKPGSSVKVSCKASGGTFSNYWMHWVRQAPGQGLEWMGATYRGHSDTYYNQKFKGRVTITADKSTSTAYMELSSLRSEDTAVYYCARGAIYDGYDVLDNWGQGTLVTVSSTRIQNPDPAVYQLRDSKSSDKSVCLFTDFDSQTNVSQSKDSDVYITDKCVLDMRSMDFKSNSAVAWSNKSDFACANAFNNSIIPEDTFFPSPESSDSTDHVKPKETENTKQPSKSCHKPKAIVHTEKVNMMSLTVLGLRMLFAKTVAVNFLLTAKLFFLLTA

SEQ ID NO: 14721 - protein, 861 aa, synthetic construct
MALPVTALLLPLALLLHAARPEVQLVESGGGLVQPGGSLRLSCAASGFSFSDFWMSWVRQAPGKGLEWVATISQAGSEKDYVDSVKGRFTISRDNAKKSLYLQMNSLRAEDTAVYYCASGVYSFDYRGQGTLVTVSSGTGGGGSGGGGSGGGGSEFDIVLTQSPATLSLSPGDRATISCRASESVTILGSHLIYWYQQKPGQPPRLLIQLASNVQTGVPARFSGSGSRTDFTLTISSVEPEDFAVYYCLQSRTIPRTFGQGTKLEIKRLEDLKNVFPPEVAVFEPSEAEISHTQKATLVCLATGFYPDHVELSWWVNGKEVHSGVCTDPQPLKEQPALNDSRYCLSSRLRVSATFWQNPRNHFRCQVQFYGLSENDEWTQDRAKPVTQIVSAEAWGRADDVIKIHWQEKKSNTILGSQEGNTMKTNDTYMKFSWLTVPEKSLDKEHRCIVRHENNKNGVDQEIIFPPIKTDVITMDPKDNCSKDANDTLLLQLTNTSAYYMYLLLLLKSVVYFAIITCCLLMAMVKRKDSRGRAKRSGSGATNFSLLKQAGDVEENPGPTSMDWIWRILFLVGAATGAHSFEQVQLVQSGPEVKKPGESVKISCKASGYTFRHYSMNWVKQAPGQGLKWMGRINTESGVPIYADDFKGRFSFTVDTSASTAYLEISSLTSEDTAVYFCSNDYLYSLDFWGQGTTLTVSSTRIQNPDPAVYQLRDSKSSDKSVCLFTDFDSQTNVSQSKDSDVYITDKCVLDMRSMDFKSNSAVAWSNKSDFACANAFNNSIIPEDTFFPSPESSDSTDHVKPKETENTKQPSKSCHKPKAIVHTEKVNMMSLTVLGLRMLFAKTVAVNFLLTAKLFFLLTA

SEQ ID NO: 14722 - protein, 862 aa, synthetic construct
MALPVTALLLPLALLLHAARPEVQLVESGGGLVQPGGSLRLSCAASGFSFSDFWMSWVRQAPGKGLEWVATISQAGSEKDYVDSVKGRFTISRDNAKKSLYLQMNSLRAEDTAVYYCASGVYSFDYRGQGTLVTVSSGTGGGGSGGGGSGGGGSEFQSVLTQPPSVSGAPGQRVTISCTGSSSNIGAGFDVHWYQQLPGTAPKLLIYGNSNRPSGVPDRFSGSKSGTSASLAITGLQAEDEADYYCQSYDSSLSGYVFGTGTKVTVLGLEDLKNVFPPEVAVFEPSEAEISHTQKATLVCLATGFYPDHVELSWWVNGKEVHSGVCTDPQPLKEQPALNDSRYCLSSRLRVSATFWQNPRNHFRCQVQFYGLSENDEWTQDRAKPVTQIVSAEAWGRADDVIKIHWQEKKSNTILGSQEGNTMKTNDTYMKFSWLTVPEKSLDKEHRCIVRHENNKNGVDQEIIFPPIKTDVITMDPKDNCSKDANDTLLLQLTNTSAYYMYLLLLLKSVVYFAIITCCLLMAMVKRKDSRGRAKRSGSGATNFSLLKQAGDVEENPGPTSMDWIWRILFLVGAATGAHSFEQVQLVQSGAEVKKPGASVKVSCKASGYTFTDYYMHWVRQAPGQRLEWMGWINPNSGGTNYAQKFQDRITVTRDTSSNTGYMELTRLRSDDTAVYYCARSPYSGVLDKWGQGTLVTVSSTRIQNPDPAVYQLRDSKSSDKSVCLFTDFDSQTNVSQSKDSDVYITDKCVLDMRSMDFKSNSAVAWSNKSDFACANAFNNSIIPEDTFFPSPESSDSTDHVKPKETENTKQPSKSCHKPKAIVHTEKVNMMSLTVLGLRMLFAKTVAVNFLLTAKLFFLLTA

SEQ ID NO: 14723 - protein, 859 aa, synthetic construct
MALPVTALLLPLALLLHAARPEVQLVESGGGLVQPGGSLRLSCAASGFSFSDFWMSWVRQAPGKGLEWVATISQAGSEKDYVDSVKGRFTISRDNAKKSLYLQMNSLRAEDTAVYYCASGVYSFDYRGQGTLVTVSSGTGGGGSGGGGSGGGGSEFQAVLTQPPSASGTPGQRVTISCSGSSSNIGSYTVSWYQQLPGTAPKFLIYSNNQRPSGVPDRFSGSKSGTSASLAISGLQSEDEADYYCAAWDDSLNGYVFGTGTKVTVLGLEDLKNVFPPEVAVFEPSEAEISHTQKATLVCLATGFYPDHVELSWWVNGKEVHSGVCTDPQPLKEQPALNDSRYCLSSRLRVSATFWQNPRNHFRCQVQFYGLSENDEWTQDRAKPVTQIVSAEAWGRADDVIKIHWQEKKSNTILGSQEGNTMKTNDTYMKFSWLTVPEKSLDKEHRCIVRHENNKNGVDQEIIFPPIKTDVITMDPKDNCSKDANDTLLLQLTNTSAYYMYLLLLLKSVVYFAIITCCLLMAMVKRKDSRGRAKRSGSGATNFSLLKQAGDVEENPGPTSMDWIWRILFLVGAATGAHSFEVQLVQSGAEVKKPGESLKISCKGSGYDFTTYWIGWVRQMPGKGLEWMGIIYPGDSDTRYSPSVRGRVTISADKSINTAYLQWSSLEASDTAMYYCARMWTFSQDGWGQGTLVTVSSTRIQNPDPAVYQLRDSKSSDKSVCLFTDFDSQTNVSQSKDSDVYITDKCVLDMRSMDFKSNSAVAWSNKSDFACANAFNNSIIPEDTFFPSPESSDSTDHVKPKETENTKQPSKSCHKPKAIVHTEKVNMMSLTVLGLRMLFAKTVAVNFLLTAKLFFLLTA

SEQ ID NO: 14724 - protein, 862 aa, synthetic construct
MALPVTALLLPLALLLHAARPEVQLVESGGGLVQPGGSLRLSCAASGFSFSDFWMSWVRQAPGKGLEWVATISQAGSEKDYVDSVKGRFTISRDNAKKSLYLQMNSLRAEDTAVYYCASGVYSFDYRGQGTLVTVSSGTGGGGSGGGGSGGGGSEFDIVMTQSPDSLAVSLGERATINCKSSQSILYSSNQKNYLAWYQQKPGQSPKLLIYWASTRESGVPDRFSGSGSGTDFTLTISSLQAEDVAVYYCHQYISSYTFGQGTKLEIKLEDLKNVFPPEVAVFEPSEAEISHTQKATLVCLATGFYPDHVELSWWVNGKEVHSGVCTDPQPLKEQPALNDSRYCLSSRLRVSATFWQNPRNHFRCQVQFYGLSENDEWTQDRAKPVTQIVSAEAWGRADDVIKIHWQEKKSNTILGSQEGNTMKTNDTYMKFSWLTVPEKSLDKEHRCIVRHENNKNGVDQEIIFPPIKTDVITMDPKDNCSKDANDTLLLQLTNTSAYYMYLLLLLKSVVYFAIITCCLLMAMVKRKDSRGRAKRSGSGATNFSLLKQAGDVEENPGPTSMDWIWRILFLVGAATGAHSFEQVQLVQSGAEVKKPGASVKVSCKASGYTFASQWMHWMRQAPGQGLEWIGWINPGNVNTKYNEKFKGRATLTVDTSTNTAYMELSSLRSEDTAVYYCARSTWYRPLDYWGQGTLVTVSSTRIQNPDPAVYQLRDSKSSDKSVCLFTDFDSQTNVSQSKDSDVYITDKCVLDMRSMDFKSNSAVAWSNKSDFACANAFNNSIIPEDTFFPSPESSDSTDHVKPKETENTKQPSKSCHKPKAIVHTEKVNMMSLTVLGLRMLFAKTVAVNFLLTAKLFFLLTA

SEQ ID NO: 14725 - protein, 862 aa, synthetic construct
MALPVTALLLPLALLLHAARPEVQLVESGGGLVQPGGSLRLSCAASGFSFSDFWMSWVRQAPGKGLEWVATISQAGSEKDYVDSVKGRFTISRDNAKKSLYLQMNSLRAEDTAVYYCASGVYSFDYRGQGTLVTVSSGTGGGGSGGGGSGGGGSEFDHIVLTQSPSSLSASLGDRVTISCRASQDISTYLNWYQQKPDGTVKLLIFYTSRLHAGVPSRFSGSGSGTHHSLTISNLEQEDIATYFCQQGNSLPFTFGSGTKLEIKRLEDLKNVFPPEVAVFEPSEAEISHTQKATLVCLATGFYPDHVELSWWVNGKEVHSGVCTDPQPLKEQPALNDSRYCLSSRLRVSATFWQNPRNHFRCQVQFYGLSENDEWTQDRAKPVTQIVSAEAWGRADDVIKIHWQEKKSNTILGSQEGNTMKTNDTYMKFSWLTVPEKSLDKEHRCIVRHENNKNGVDQEIIFPPIKTDVITMDPKDNCSKDANDTLLLQLTNTSAYYMYLLLLLKSVVYFAIITCCLLMAMVKRKDSRGRAKRSGSGATNFSLLKQAGDVEENPGPTSMDWIWRILFLVGAATGAHSFEQVQLKESGPELEKPGASVKISCKASGYSFTAYSMNWVKQNNGMSLEWIGSIDPYYGDTKYAQKFKGKATLTVDKASSTAYLQLKSLTSEDSAVYYCARRMITTGDWYFDVWGAGTTVTVSSTRIQNPDPAVYQLRDSKSSDKSVCLFTDFDSQTNVSQSKDSDVYITDKCVLDMRSMDFKSNSAVAWSNKSDFACANAFNNSIIPEDTFFPSPESSDSTDHVKPKETENTKQPSKSCHKPKAIVHTEKVNMMSLTVLGLRMLFAKTVAVNFLLTAKLFFLLTA

SEQ ID NO: 14726 - protein, 862 aa, synthetic construct; identical to SEQ ID NO: 14725

SEQ ID NO: 14727 - protein, 862 aa, synthetic construct
MALPVTALLLPLALLLHAARPEVQLVESGGGLVQPGGSLRLSCAASGFSFSDFWMSWVRQAPGKGLEWVATISQAGSEKDYVDSVKGRFTISRDNAKKSLYLQMNSLRAEDTAVYYCASGVYSFDYRGQGTLVTVSSGTGGGGSGGGGSGGGGSEFDEIVLTQSPATLSLSPGERATLSCRASQSVSSYLAWYQQKPGQAPRLLIYDASNRATGIPARFSGSGSGTDFTLTISSLEPEDFAVYYCQQRSNWPITFGQGTRLEIKLEDLKNVFPPEVAVFEPSEAEISHTQKATLVCLATGFYPDHVELSWWVNGKEVHSGVCTDPQPLKEQPALNDSRYCLSSRLRVSATFWQNPRNHFRCQVQFYGLSENDEWTQDRAKPVTQIVSAEAWGRADDVIKIHWQEKKSNTILGSQEGNTMKTNDTYMKFSWLTVPEKSLDKEHRCIVRHENNKNGVDQEIIFPPIKTDVITMDPKDNCSKDANDTLLLQLTNTSAYYMYLLLLLKSVVYFAIITCCLLMAMVKRKDSRGRAKRSGSGATNFSLLKQAGDVEENPGPTSMDWIWRILFLVGAATGAHSFEEVQLVESGGGLVQPGRSLRLSCAASGFTFNDYAMHWVRQAPGKGLEWVSTISWNSGSIGYADSVKGRFTISRDNAKKSLYLQMNSLRAEDTALYYCAKDIQYGNYYYGMDVWGQGTTVTVSSTRIQNPDPAVYQLRDSKSSDKSVCLFTDFDSQTNVSQSKDSDVYITDKCVLDMRSMDFKSNSAVAWSNKSDFACANAFNNSIIPEDTFFPSPESSDSTDHVKPKETENTKQPSKSCHKPKAIVHTEKVNMMSLTVLGLRMLFAKTVAVNFLLTAKLFFLLTA

SEQ ID NO: 14728 - protein, 864 aa, synthetic construct
MALPVTALLLPLALLLHAARPEVQLVESGGGLVQPGGSLRLSCAASGFSFSDFWMSWVRQAPGKGLEWVATISQAGSEKDYVDSVKGRFTISRDNAKKSLYLQMNSLRAEDTAVYYCASGVYSFDYRGQGTLVTVSSGTGGGGSGGGGSGGGGSEFDIVMTQTPLSLPVTPGEPASISCRSSKSLLHSNGITYLYWYLQKPGQSPQLLIYQMSNLVSGVPDRFSGSGSGTDFTLKISRVEAEDVGVYYCAQNLELPYTFGGGTKVEIKRLEDLKNVFPPEVAVFEPSEAEISHTQKATLVCLATGFYPDHVELSWWVNGKEVHSGVCTDPQPLKEQPALNDSRYCLSSRLRVSATFWQNPRNHFRCQVQFYGLSENDEWTQDRAKPVTQIVSAEAWGRADDVIKIHWQEKKSNTILGSQEGNTMKTNDTYMKFSWLTVPEKSLDKEHRCIVRHENNKNGVDQEIIFPPIKTDVITMDPKDNCSKDANDTLLLQLTNTSAYYMYLLLLLKSVVYFAIITCCLLMAMVKRKDSRGRAKRSGSGATNFSLLKQAGDVEENPGPTSMDWIWRILFLVGAATGAHSFEQVQLVQSGAEVKKPGSSVKVSCKASGYAFSYSWINWVRQAPGQGLEWMGRIFPGDGDTDYNGKFKGRVTITADKSTSTAYMELSSLRSEDTAVYYCARNVFDGYWLVYWGQGTLVTVSSTRIQNPDPAVYQLRDSKSSDKSVCLFTDFDSQTNVSQSKDSDVYITDKCVLDMRSMDFKSNSAVAWSNKSDFACANAFNNSIIPEDTFFPSPESSDSTDHVKPKETENTKQPSKSCHKPKAIVHTEKVNMMSLTVLGLRMLFAKTVAVNFLLTAKLFFLLTA

SEQ ID NO: 14729 - protein, 865 aa, synthetic construct
MALPVTALLLPLALLLHAARPEVQLVESGGGLVQPGGSLRLSCAASGFSFSDFWMSWVRQAPGKGLEWVATISQAGSEKDYVDSVKGRFTISRDNAKKSLYLQMNSLRAEDTAVYYCASGVYSFDYRGQGTLVTVSSGTGGGGSGGGGSGGGGSEFDIQMTQSPSSLSASVGDRVTITCRSSQSIVHSVGNTFLEWYQQKPGKAPKLLIYKVSNRFSGVPSRFSGSGSGTDFTLTISSLQPEDFATYYCFQGSQFPYTFGQGTKVEIKRLEDLKNVFPPEVAVFEPSEAEISHTQKATLVCLATGFYPDHVELSWWVNGKEVHSGVCTDPQPLKEQPALNDSRYCLSSRLRVSATFWQNPRNHFRCQVQFYGLSENDEWTQDRAKPVTQIVSAEAWGRADDVIKIHWQEKKSNTILGSQEGNTMKTNDTYMKFSWLTVPEKSLDKEHRCIVRHENNKNGVDQEIIFPPIKTDVITMDPKDNCSKDANDTLLLQLTNTSAYYMYLLLLLKSVVYFAIITCCLLMAMVKRKDSRGRAKRSGSGATNFSLLKQAGDVEENPGPTSMDWIWRILFLVGAATGAHSFEEVQLVESGGGLVQPGGSLRLSCAASGYEFSRSWMNWVRQAPGKGLEWVGRIYPGDGDTNYSGKFKGRFTISADTSKNTAYLQMNSLRAEDTAVYYCARDGSSWDWYFDVWGQGTLVTVSSTRIQNPDPAVYQLRDSKSSDKSVCLFTDFDSQTNVSQSKDSDVYITDKCVLDMRSMDFKSNSAVAWSNKSDFACANAFNNSIIPEDTFFPSPESSDSTDHVKPKETENTKQPSKSCHKPKAIVHTEKVNMMSLTVLGLRMLFAKTVAVNFLLTAKLFFLLTA

SEQ ID NO: 14730 - protein, 863 aa, synthetic construct
MALPVTALLLPLALLLHAARPEVQLVESGGGLVQPGGSLRLSCAASGFSFSDFWMSWVRQAPGKGLEWVATISQAGSEKDYVDSVKGRFTISRDNAKKSLYLQMNSLRAEDTAVYYCASGVYSFDYRGQGTLVTVSSGTGGGGSGGGGSGGGGSEFDIQMTQSPSSLSASVGDRVTITCRASQTIWSYLNWYQQRPGKAPNLLIYAASSLQSGVPSRFSGRGSGTDFTLTISSLQAEDFATYYCQQSYSIPQIFGQGTKLEIKLEDLKNVFPPEVAVFEPSEAEISHTQKATLVCLATGFYPDHVELSWWVNGKEVHSGVCTDPQPLKEQPALNDSRYCLSSRLRVSATFWQNPRNHFRCQVQFYGLSENDEWTQDRAKPVTQIVSAEAWGRADDVIKIHWQEKKSNTILGSQEGNTMKTNDTYMKFSWLTVPEKSLDKEHRCIVRHENNKNGVDQEIIFPPIKTDVITMDPKDNCSKDANDTLLLQLTNTSAYYMYLLLLLKSVVYFAIITCCLLMAMVKRKDSRGRAKRSGSGATNFSLLKQAGDVEENPGPTSMDWIWRILFLVGAATGAHSFEQVQLQQSGPGLVKPSQTLSLTCAISGDSVSSNSAAWNWIRQSPSRGLEWLGRTYYRSKWYNDYAVSVKSRITINPDTSKNQFSLQLNSVTPEDTAVYYCAREVTGDLEDAFDIWGQGTMVTVSSTRIQNPDPAVYQLRDSKSSDKSVCLFTDFDSQTNVSQSKDSDVYITDKCVLDMRSMDFKSNSAVAWSNKSDFACANAFNNSIIPEDTFFPSPESSDSTDHVKPKETENTKQPSKSCHKPKAIVHTEKVNMMSLTVLGLRMLFAKTVAVNFLLTAKLFFLLTA

SEQ ID NO: 14731 - protein, 856 aa, synthetic construct
MALPVTALLLPLALLLHAARPEVQLVESGGGLVQPGGSLRLSCAASGFSFSDFWMSWVRQAPGKGLEWVATISQAGSEKDYVDSVKGRFTISRDNAKKSLYLQMNSLRAEDTAVYYCASGVYSFDYRGQGTLVTVSSGTGGGGSGGGGSGGGGSEFDIQMTQSPATIENTSLSASVGDRVTITCRASQGISSWLTWYQQKPEKAPKSLIYAASSLQSGVPSRFSGSGSGTDFTLTISSLQPEDFATYYCQQYDSYPITFGQGTRLEIKLEDLKNVFPPEVAVFEPSEAEISHTQKATLVCLATGFYPDHVELSWWVNGKEVHSGVCTDPQPLKEQPALNDSRYCLSSRLRVSATFWQNPRNHFRCQVQFYGLSENDEWTQDRAKPVTQIVSAEAWGRADDVIKIHWQEKKSNTILGSQEGNTMKTNDTYMKFSWLTVPEKSLDKEHRCIVRHENNKNGVDQEIIFPPIKTDVITMDPKDNCSKDANDTLLLQLTNTSAYYMYLLLLLKSVVYFAIITCCLLMAMVKRKDSRGRAKRSGSGATNFSLLKQAGDVEENPGPTSMDWIWRILFLVGAATGAHSFEQVQLQQWGAGLLKPSETLSLTCAVYGGSFSAYYWSWIRQPPGKGLEWIGDINHGGGTNYNPSLKSRVTISVDTSKNQFSLKLNSVTAADTAVYYCASLTAYWGQGSLVTVSSTRIQNPDPAVYQLRDSKSSDKSVCLFTDFDSQTNVSQSKDSDVYITDKCVLDMRSMDFKSNSAVAWSNKSDFACANAFNNSIIPEDTFFPSPESSDSTDHVKPKETENTKQPSKSCHKPKAIVHTEKVNMMSLTVLGLRMLFAKTVAVNFLLTAKLFFLLTA

SEQ ID NO: 14732 - protein, 861 aa, synthetic construct
MALPVTALLLPLALLLHAARPEVQLVESGGGLVQPGGSLRLSCAASGFSFSDFWMSWVRQAPGKGLEWVATISQAGSEKDYVDSVKGRFTISRDNAKKSLYLQMNSLRAEDTAVYYCASGVYSFDYRGQGTLVTVSSGTGGGGSGGGGSGGGGSEFDEIVLTQSPDSLAVSLGERATINCKASQSVDFDGDSYLNWYQQKPGQPPKVLIYAASTLQSGVPSRFSGSGSGTDFTLTINSLEAEDAATYYCQQSNEDPWTFGGGTKVEIKLEDLKNVFPPEVAVFEPSEAEISHTQKATLVCLATGFYPDHVELSWWVNGKEVHSGVCTDPQPLKEQPALNDSRYCLSSRLRVSATFWQNPRNHFRCQVQFYGLSENDEWTQDRAKPVTQIVSAEAWGRADDVIKIHWQEKKSNTILGSQEGNTMKTNDTYMKFSWLTVPEKSLDKEHRCIVRHENNKNGVDQEIIFPPIKTDVITMDPKDNCSKDANDTLLLQLTNTSAYYMYLLLLLKSVVYFAIITCCLLMAMVKRKDSRGRAKRSGSGATNFSLLKQAGDVEENPGPTSMDWIWRILFLVGAATGAHSFEQVQLVQSGAEVKKPGASVKVSCKVSGYTFTDYYITWVRQAPGQALEWMGWIYPGSGNTKYSQKFQGRFVFSVDTSASTAYLQLSSLKAEDTAVYYCANYGNYWFAYWGQGTLVTVSSTRIQNPDPAVYQLRDSKSSDKSVCLFTDFDSQTNVSQSKDSDVYITDKCVLDMRSMDFKSNSAVAWSNKSDFACANAFNNSIIPEDTFFPSPESSDSTDHVKPKETENTKQPSKSCHKPKAIVHTEKVNMMSLTVLGLRMLFAKTVAVNFLLTAKLFFLLTA

SEQ ID NO: 14733 - protein, 858 aa, synthetic construct
MALPVTALLLPLALLLHAARPEVQLVESGGGLVQPGGSLRLSCAASGFSFSDFWMSWVRQAPGKGLEWVATISQAGSEKDYVDSVKGRFTISRDNAKKSLYLQMNSLRAEDTAVYYCASGVYSFDYRGQGTLVTVSSGTGGGGSGGGGSGGGGSEFDIQMTQSPSSLSASVGDRVTITCRASQGISSWLAWYQQKPEKAPKSLIYAASSLQSGVPSRFSGSGSGTDFTLTISSLQPEDFATYYCQQYNSYPPTFGGGTKVEIKLEDLKNVFPPEVAVFEPSEAEISHTQKATLVCLATGFYPDHVELSWWVNGKEVHSGVCTDPQPLKEQPALNDSRYCLSSRLRVSATFWQNPRNHFRCQVQFYGLSENDEWTQDRAKPVTQIVSAEAWGRADDVIKIHWQEKKSNTILGSQEGNTMKTNDTYMKFSWLTVPEKSLDKEHRCIVRHENNKNGVDQEIIFPPIKTDVITMDPKDNCSKDANDTLLLQLTNTSAYYMYLLLLLKSVVYFAIITCCLLMAMVKRKDSRGRAKRSGSGATNFSLLKQAGDVEENPGPTSMDWIWRILFLVGAATGAHSFEEVQLVQSGGGLVHPGGSLRLSCAGSGFAFSSSTMHWIRQAPGKGLEWISLIGSGGGIYYGDSVKGRFTISRDNAKNSLYLQMNSLRAEDMAVYYCVRGYFDWVDYFDYWGQGTLVTVSSTRIQNPDPAVYQLRDSKSSDKSVCLFTDFDSQTNVSQSKDSDVYITDKCVLDMRSMDFKSNSAVAWSNKSDFACANAFNNSIIPEDTFFPSPESSDSTDHVKPKETENTKQPSKSCHKPKAIVHTEKVNMMSLTVLGLRMLFAKTVAVNFLLTAKLFFLLTA

SEQ ID NO: 14734 - protein, 868 aa, synthetic construct
MALPVTALLLPLALLLHAARPEVQLVESGGGLVQPGGSLRLSCAASGFSFSDFWMSWVRQAPGKGLEWVATISQAGSEKDYVDSVKGRFTISRDNAKKSLYLQMNSLRAEDTAVYYCASGVYSFDYRGQGTLVTVSSGTGGGGSGGGGSGGGGSEFDDIVMTQSPDSLTVSLGERTTINCKSSQSVLDSSKNKNSLAWYQQKPGQPPKLLLSWASTRESGIPDRFSGSGSGTDFTLTIDSLQPEDSATYYCQQSAHFPITFGQGTRLEIKLEDLKNVFPPEVAVFEPSEAEISHTQKATLVCLATGFYPDHVELSWWVNGKEVHSGVCTDPQPLKEQPALNDSRYCLSSRLRVSATFWQNPRNHFRCQVQFYGLSENDEWTQDRAKPVTQIVSAEAWGRADDVIKIHWQEKKSNTILGSQEGNTMKTNDTYMKFSWLTVPEKSLDKEHRCIVRHENNKNGVDQEIIFPPIKTDVITMDPKDNCSKDANDTLLLQLTNTSAYYMYLLLLLKSVVYFAIITCCLLMAMVKRKDSRGRAKRSGSGATNFSLLKQAGDVEENPGPTSMDWIWRILFLVGAATGAHSFEQVQLVQSGAEVKKPGASVKVSCKASGYTFTNYGMNWVKQAPGQGLKWMGWINTYTGEPTYADDFKGRVTMTSDTSTSTAYLELHNLRSDDTAVYYCARWSWSDGYYVYFDYWGQGTTVTVSSTRIQNPDPAVYQLRDSKSSDKSVCLFTDFDSQTNVSQSKDSDVYITDKCVLDMRSMDFKSNSAVAWSNKSDFACANAFNNSIIPEDTFFPSPESSDSTDHVKPKETENTKQPSKSCHKPKAIVHTEKVNMMSLTVLGLRMLFAKTVAVNFLLTAKLFFLLTA

SEQ ID NO: 14735 - protein, 864 aa, synthetic construct
MALPVTALLLPLALLLHAARPEVQLVESGGGLVQPGGSLRLSCAASGFSFSDFWMSWVRQAPGKGLEWVATISQAGSEKDYVDSVKGRFTISRDNAKKSLYLQMNSLRAEDTAVYYCASGVYSFDYRGQGTLVTVSSGTGGGGSGGGGSGGGGSEFDEIVLTQSPGSLAVSPGERVTMSCKSSQSVFFSSSQKNYLAWYQQIPGQSPRLLIYWASTRESGVPDRFTGSGSGTDFTLTISSVQPEDLAIYYCHQYLSSRTFGQGTKLEIKRLEDLKNVFPPEVAVFEPSEAEISHTQKATLVCLATGFYPDHVELSWWVNGKEVHSGVCTDPQPLKEQPALNDSRYCLSSRLRVSATFWQNPRNHFRCQVQFYGLSENDEWTQDRAKPVTQIVSAEAWGRADDVIKIHWQEKKSNTILGSQEGNTMKTNDTYMKFSWLTVPEKSLDKEHRCIVRHENNKNGVDQEIIFPPIKTDVITMDPKDNCSKDANDTLLLQLTNTSAYYMYLLLLLKSVVYFAIITCCLLMAMVKRKDSRGRAKRSGSGATNFSLLKQAGDVEENPGPTSMDWIWRILFLVGAATGAHSFEQVQLQQPGAEVVKPGASVKMSCKASGYTFTSYYIHWIKQTPGQGLEWVGVIYPGNDDISYNQKFQGKATLTADKSSTTAYMQLSSLTSEDSAVYYCAREVRLRYFDVWGQGTTVTVSSTRIQNPDPAVYQLRDSKSSDKSVCLFTDFDSQTNVSQSKDSDVYITDKCVLDMRSMDFKSNSAVAWSNKSDFACANAFNNSIIPEDTFFPSPESSDSTDHVKPKETENTKQPSKSCHKPKAIVHTEKVNMMSLTVLGLRMLFAKTVAVNFLLTAKLFFLLTA

SEQ ID NO: 14736 - protein, 868 aa, synthetic construct
MALPVTALLLPLALLLHAARPEVQLVESGGGLVQPGGSLRLSCAASGFSFSDFWMSWVRQAPGKGLEWVATISQAGSEKDYVDSVKGRFTISRDNAKKSLYLQMNSLRAEDTAVYYCASGVYSFDYRGQGTLVTVSSGTGGGGSGGGGSGGGGSEFDVLLTQSPLSLPVTLGQPASISCRSSQTIVHSNGNTYLEWFQQRPGQSPRLLIYQVSNRFSGVPDRFSGSGSGTDFTLKISRVEAEDVGVYYCFQGSHVPRTFGGGTKVEIKRALEDLKNVFPPEVAVFEPSEAEISHTQKATLVCLATGFYPDHVELSWWVNGKEVHSGVCTDPQPLKEQPALNDSRYCLSSRLRVSATFWQNPRNHFRCQVQFYGLSENDEWTQDRAKPVTQIVSAEAWGRADDVIKIHWQEKKSNTILGSQEGNTMKTNDTYMKFSWLTVPEKSLDKEHRCIVRHENNKNGVDQEIIFPPIKTDVITMDPKDNCSKDANDTLLLQLTNTSAYYMYLLLLLKSVVYFAIITCCLLMAMVKRKDSRGRAKRSGSGATNFSLLKQAGDVEENPGPTSMDWIWRILFLVGAATGAHSFEQIQLVQSGSELKKPGASVKVSCKASGYTFTNYGMNWVRQAPGQGLKWMGWINTNTGEPKYAEEFKGRFALSLDTSVSTAYLQINSLKAEDTAVYFCARGYGNYARGAWLAYWGQGTLVTVSSTRIQNPDPAVYQLRDSKSSDKSVCLFTDFDSQTNVSQSKDSDVYITDKCVLDMRSMDFKSNSAVAWSNKSDFACANAFNNSIIPEDTFFPSPESSDSTDHVKPKETENTKQPSKSCHKPKAIVHTEKVNMMSLTVLGLRMLFAKTVAVNFLLTAKLFFLLTA

SEQ ID NO: 14737 - protein, 853 aa, synthetic construct
MALPVTALLLPLALLLHAARPEVQLVESGGGLVQPGGSLRLSCAASGFSFSDFWMSWVRQAPGKGLEWVATISQAGSEKDYVDSVKGRFTISRDNAKKSLYLQMNSLRAEDTAVYYCASGVYSFDYRGQGTLVTVSSGTGGGGSGGGGSGGGGSEFDEIVLTQSPATLSLSPGERATLSCSASSSINYIYWLQQKPGQAPRILIYLTSNLASGVPARFSGSGSGTDFTLTISSLEPEDFAVYYCLQWSSNPLTFGGGTKVEIKLEDLKNVFPPEVAVFEPSEAEISHTQKATLVCLATGFYPDHVELSWWVNGKEVHSGVCTDPQPLKEQPALNDSRYCLSSRLRVSATFWQNPRNHFRCQVQFYGLSENDEWTQDRAKPVTQIVSAEAWGRADDVIKIHWQEKKSNTILGSQEGNTMKTNDTYMKFSWLTVPEKSLDKEHRCIVRHENNKNGVDQEIIFPPIKTDVITMDPKDNCSKDANDTLLLQLTNTSAYYMYLLLLLKSVVYFAIITCCLLMAMVKRKDSRGRAKRSGSGATNFSLLKQAGDVEENPGPTSMDWIWRILFLVGAATGAHSFEEVQLVESGGGLVKPGGSLRLSCAASGFTFSSYDMSWVRQAPGKGLEWVSTISSGGSYTYYLDSIKGRFTISRDNAKNSLYLQMNSLRAEDTAVYYCARQGLDYWGRGTLVTVSSTRIQNPDPAVYQLRDSKSSDKSVCLFTDFDSQTNVSQSKDSDVYITDKCVLDMRSMDFKSNSAVAWSNKSDFACANAFNNSIIPEDTFFPSPESSDSTDHVKPKETENTKQPSKSCHKPKAIVHTEKVNMMSLTVLGLRMLFAKTVAVNFLLTAKLFFLLTA

SEQ ID NO: 14738 - protein, 862 aa, synthetic construct
MALPVTALLLPLALLLHAARPEVQLVESGGGLVQPGGSLRLSCAASGFSFSDFWMSWVRQAPGKGLEWVATISQAGSEKDYVDSVKGRFTISRDNAKKSLYLQMNSLRAEDTAVYYCASGVYSFDYRGQGTLVTVSSGTGGGGSGGGGSGGGGSEFDIVMTQSPDSLAVSLGERATINCRASKSVSTSGYSFMHWYQQKPGQPPKLLIYLASNLESGVPDRFSGSGSGTDFTLTISSLQAEDVAVYYCQHSREVPWTFGQGTKVEIKRLEDLKNVFPPEVAVFEPSEAEISHTQKATLVCLATGFYPDHVELSWWVNGKEVHSGVCTDPQPLKEQPALNDSRYCLSSRLRVSATFWQNPRNHFRCQVQFYGLSENDEWTQDRAKPVTQIVSAEAWGRADDVIKIHWQEKKSNTILGSQEGNTMKTNDTYMKFSWLTVPEKSLDKEHRCIVRHENNKNGVDQEIIFPPIKTDVITMDPKDNCSKDANDTLLLQLTNTSAYYMYLLLLLKSVVYFAIITCCLLMAMVKRKDSRGRAKRSGSGATNFSLLKQAGDVEENPGPTSMDWIWRILFLVGAATGAHSFEQVQLVQSGAEVKKPGASVKVSCKASGYTFTNYGMNWVRQAPGQGLEWMGWINTYTGEPTYADAFKGRFAFSLDTSTSTAYLQINSLRSDDTAVYYCARDYGDYGMDYWGQGTTVTVSSTRIQNPDPAVYQLRDSKSSDKSVCLFTDFDSQTNVSQSKDSDVYITDKCVLDMRSMDFKSNSAVAWSNKSDFACANAFNNSIIPEDTFFPSPESSDSTDHVKPKETENTKQPSKSCHKPKAIVHTEKVNMMSLTVLGLRMLFAKTVAVNFLLTAKLFFLLTA

SEQ ID NO: 14739 - protein, 858 aa, synthetic construct
MALPVTALLLPLALLLHAARPEVQLVESGGGLVQPGGSLRLSCAASGFSFSDFWMSWVRQAPGKGLEWVATISQAGSEKDYVDSVKGRFTISRDNAKKSLYLQMNSLRAEDTAVYYCASGVYSFDYRGQGTLVTVSSGTGGGGSGGGGSGGGGSEFDIVMTQTPLTLSVTIGQPASISCKSSQSLLDSDGKTYLNWLLQRPGQSPERLIYLVSKLDSGVPDRFTGSGSGTDFTLKISRVEAEDLGVYCCWQGTHFPYTFGGGTKVEIKGLEDLKNVFPPEVAVFEPSEAEISHTQKATLVCLATGFYPDHVELSWWVNGKEVHSGVCTDPQPLKEQPALNDSRYCLSSRLRVSATFWQNPRNHFRCQVQFYGLSENDEWTQDRAKPVTQIVSAEAWGRADDVIKIHWQEKKSNTILGSQEGNTMKTNDTYMKFSWLTVPEKSLDKEHRCIVRHENNKNGVDQEIIFPPIKTDVITMDPKDNCSKDANDTLLLQLTNTSAYYMYLLLLLKSVVYFAIITCCLLMAMVKRKDSRGRAKRSGSGATNFSLLKQAGDVEENPGPTSMDWIWRILFLVGAATGAHSFEQVQLQQPGAELVRPGASVKLSCKASGYTFTSYWMNWVKQRPGQGLEWIGMIDPSDSETHYNHIFKDKATLTVDKSSSTAYLQLSSLTSEDSAVYYCARNLYLWGQGTSVTVSSTRIQNPDPAVYQLRDSKSSDKSVCLFTDFDSQTNVSQSKDSDVYITDKCVLDMRSMDFKSNSAVAWSNKSDFACANAFNNSIIPEDTFFPSPESSDSTDHVKPKETENTKQPSKSCHKPKAIVHTEKVNMMSLTVLGLRMLFAKTVAVNFLLTAKLFFLLTA

SEQ ID NO: 14740 - protein, 866 aa, synthetic construct
MALPVTALLLPLALLLHAARPEVQLVESGGGLVQPGGSLRLSCAASGFSFSDFWMSWVRQAPGKGLEWVATISQAGSEKDYVDSVKGRFTISRDNAKKSLYLQMNSLRAEDTAVYYCASGVYSFDYRGQGTLVTVSSGTGGGGSGGGGSGGGGSEFDIVMTQSPDSLAVSLGERATINCESSQSLLNSGNQKNYLTWYQQKPGQPPKPLIYWASTRESGVPDRFSGSGSGTDFTLTISSLQAEDVAVYYCQNDYSYPYTFGQGTKLEIKRLEDLKNVFPPEVAVFEPSEAEISHTQKATLVCLATGFYPDHVELSWWVNGKEVHSGVCTDPQPLKEQPALNDSRYCLSSRLRVSATFWQNPRNHFRCQVQFYGLSENDEWTQDRAKPVTQIVSAEAWGRADDVIKIHWQEKKSNTILGSQEGNTMKTNDTYMKFSWLTVPEKSLDKEHRCIVRHENNKNGVDQEIIFPPIKTDVITMDPKDNCSKDANDTLLLQLTNTSAYYMYLLLLLKSVVYFAIITCCLLMAMVKRKDSRGRAKRSGSGATNFSLLKQAGDVEENPGPTSMDWIWRILFLVGAATGAHSFEEVQLVQSGAEVKKPGESLKISCKGSGYSFTDYYMKWARQMPGKGLEWMGDIIPSNGATFYNQKFKGQVTISADKSISTTYLQWSSLKASDTAMYYCARSHLLRASWFAYWGQGTMVTVSSTRIQNPDPAVYQLRDSKSSDKSVCLFTDFDSQTNVSQSKDSDVYITDKCVLDMRSMDFKSNSAVAWSNKSDFACANAFNNSIIPEDTFFPSPESSDSTDHVKPKETENTKQPSKSCHKPKAIVHTEKVNMMSLTVLGLRMLFAKTVAVNFLLTAKLFFLLTA

SEQ ID NO: 14741 - protein, 861 aa, synthetic construct
MALPVTALLLPLALLLHAARPEVQLVESGGGLVQPGGSLRLSCAASGFSFSDFWMSWVRQAPGKGLEWVATISQAGSEKDYVDSVKGRFTISRDNAKKSLYLQMNSLRAEDTAVYYCASGVYSFDYRGQGTLVTVSSGTGGGGSGGGGSGGGGSEFDIQMTQSTSSLSASLGDRVTISCSASQGINNYLNWYQQKPDGTVELLIYYTSTLQSGVPSRFSGSGSGTDYSLTISNLEPEDIGTYYCQQYSKLPRTFGGGTKLEIKLEDLKNVFPPEVAVFEPSEAEISHTQKATLVCLATGFYPDHVELSWWVNGKEVHSGVCTDPQPLKEQPALNDSRYCLSSRLRVSATFWQNPRNHFRCQVQFYGLSENDEWTQDRAKPVTQIVSAEAWGRADDVIKIHWQEKKSNTILGSQEGNTMKTNDTYMKFSWLTVPEKSLDKEHRCIVRHENNKNGVDQEIIFPPIKTDVITMDPKDNCSKDANDTLLLQLTNTSAYYMYLLLLLKSVVYFAIITCCLLMAMVKRKDSRGRAKRSGSGATNFSLLKQAGDVEENPGPTSMDWIWRILFLVGAATGAHSFEQVQLQQSGSELMMPGASVKISCKATGYTFSNYWIEWVKQRPGHGLEWIGEILPGTGRTIYNEKFKGKATFTADISSNTVQMQLSSLTSEDSAVYYCARRDYYGNFYYAMDYWGQGTSVTVSSTRIQNPDPAVYQLRDSKSSDKSVCLFTDFDSQTNVSQSKDSDVYITDKCVLDMRSMDFKSNSAVAWSNKSDFACANAFNNSIIPEDTFFPSPESSDSTDHVKPKETENTKQPSKSCHKPKAIVHTEKVNMMSLTVLGLRMLFAKTVAVNFLLTAKLFFLLTA

SEQ ID NO: 14742 - protein, 856 aa, synthetic construct
MALPVTALLLPLALLLHAARPEVQLVESGGGLVQPGGSLRLSCAASGFSFSDFWMSWVRQAPGKGLEWVATISQAGSEKDYVDSVKGRFTISRDNAKKSLYLQMNSLRAEDTAVYYCASGVYSFDYRGQGTLVTVSSGTGGGGSGGGGSGGGGSEFDIQMTQSPASLSVSVGETVTITCRASENIYSNLAWYQQKQGKSPQLLVYAATNLADGVPSRFSGSGSGTQYSLKINSLQSEDFGSYYCQHFWGTWTFGGGTTLEIKLEDLKNVFPPEVAVFEPSEAEISHTQKATLVCLATGFYPDHVELSWWVNGKEVHSGVCTDPQPLKEQPALNDSRYCLSSRLRVSATFWQNPRNHFRCQVQFYGLSENDEWTQDRAKPVTQIVSAEAWGRADDVIKIHWQEKKSNTILGSQEGNTMKTNDTYMKFSWLTVPEKSLDKEHRCIVRHENNKNGVDQEIIFPPIKTDVITMDPKDNCSKDANDTLLLQLTNTSAYYMYLLLLLKSVVYFAIITCCLLMAMVKRKDSRGRAKRSGSGATNFSLLKQAGDVEENPGPTSMDWIWRILFLVGAATGAHSFEEVQLQQSGPELVKPGASVKMSCKASGYTFTDYYMKWMKQSHGKSLEWIGDINPNNGGTTYNQKFKGKATLTVDKSSSTAYMQLNSLTSEDSAVYYCARDYGYGYFDYWGQGTTLTVSSTRIQNPDPAVYQLRDSKSSDKSVCLFTDFDSQTNVSQSKDSDVYITDKCVLDMRSMDFKSNSAVAWSNKSDFACANAFNNSIIPEDTFFPSPESSDSTDHVKPKETENTKQPSKSCHKPKAIVHTEKVNMMSLTVLGLRMLFAKTVAVNFLLTAKLFFLLTA

SEQ ID NO: 14743 - protein, 859 aa, synthetic construct
MALPVTALLLPLALLLHAARPEVQLVESGGGLVQPGGSLRLSCAASGFSFSDFWMSWVRQAPGKGLEWVATISQAGSEKDYVDSVKGRFTISRDNAKKSLYLQMNSLRAEDTAVYYCASGVYSFDYRGQGTLVTVSSGTGGGGSGGGGSGGGGSEFEIVLTQSPGTLSLSPGERATLSCRASQSVGGYLAWYQQKPGQAPRLLIYDASNRATGIPARFSGSGSGTDFTLTISSLEPEDFAVYYCQQRNNWPPMYTFGQGTKLEIKRLEDLKNVFPPEVAVFEPSEAEISHTQKATLVCLATGFYPDHVELSWWVNGKEVHSGVCTDPQPLKEQPALNDSRYCLSSRLRVSATFWQNPRNHFRCQVQFYGLSENDEWTQDRAKPVTQIVSAEAWGRADDVIKIHWQEKKSNTILGSQEGNTMKTNDTYMKFSWLTVPEKSLDKEHRCIVRHENNKNGVDQEIIFPPIKTDVITMDPKDNCSKDANDTLLLQLTNTSAYYMYLLLLLKSVVYFAIITCCLLMAMVKRKDSRGRAKRSGSGATNFSLLKQAGDVEENPGPTSMDWIWRILFLVGAATGAHSFEQVQLVQSGAEVKKPGSSVKVSCKASGGTFSSYAISWVRQAPGQGLEWMGGIIPILGTANYAQKFQGRVTITADESTSTAYMELSSLRSEDTAVYYCARWGGGAFDIWGQGTMVTVSSTRIQNPDPAVYQLRDSKSSDKSVCLFTDFDSQTNVSQSKDSDVYITDKCVLDMRSMDFKSNSAVAWSNKSDFACANAFNNSIIPEDTFFPSPESSDSTDHVKPKETENTKQPSKSCHKPKAIVHTEKVNMMSLTVLGLRMLFAKTVAVNFLLTAKLFFLLTA

SEQ ID NO: 14744 - protein, 854 aa, synthetic construct
MALPVTALLLPLALLLHAARPEVQLVESGGGLVQPGGSLRLSCAASGFSFSDFWMSWVRQAPGKGLEWVATISQAGSEKDYVDSVKGRFTISRDNAKKSLYLQMNSLRAEDTAVYYCASGVYSFDYRGQGTLVTVSSGTGGGGSGGGGSGGGGSEFQIVLTQSPALMSASPGEKVTMTCSASSSVRYMYWYQQKPRSSPKPWIHLTSNLASGVPARFSGSGSGTSYSLTISSMEAEDAATYYCQQWSSHPFTFGSGTKLEIKLEDLKNVFPPEVAVFEPSEAEISHTQKATLVCLATGFYPDHVELSWWVNGKEVHSGVCTDPQPLKEQPALNDSRYCLSSRLRVSATFWQNPRNHFRCQVQFYGLSENDEWTQDRAKPVTQIVSAEAWGRADDVIKIHWQEKKSNTILGSQEGNTMKTNDTYMKFSWLTVPEKSLDKEHRCIVRHENNKNGVDQEIIFPPIKTDVITMDPKDNCSKDANDTLLLQLTNTSAYYMYLLLLLKSVVYFAIITCCLLMAMVKRKDSRGRAKRSGSGATNFSLLKQAGDVEENPGPTSMDWIWRILFLVGAATGAHSFEDVQLQESGPGLVKPSQSLSLTCTVTGFSITSDYSWNWIRQFPGNKLEWMGYISYSGHTSYNPSLESRISITRDTSKNQFFLQLNSVTTEDTATYYCTRGNWDVVYWGQGTLVTVSATRIQNPDPAVYQLRDSKSSDKSVCLFTDFDSQTNVSQSKDSDVYITDKCVLDMRSMDFKSNSAVAWSNKSDFACANAFNNSIIPEDTFFPSPESSDSTDHVKPKETENTKQPSKSCHKPKAIVHTEKVNMMSLTVLGLRMLFAKTVAVNFLLTAKLFFLLTA

SEQ ID NO: 14745 - protein, 864 aa, synthetic construct
MALPVTALLLPLALLLHAARPEVQLVESGGGLVQPGGSLRLSCAASGFSFSDFWMSWVRQAPGKGLEWVATISQAGSEKDYVDSVKGRFTISRDNAKKSLYLQMNSLRAEDTAVYYCASGVYSFDYRGQGTLVTVSSGTGGGGSGGGGSGGGGSEFDVVMTQSPLSLPVTLGQPASISCRSSQSIVHSDGNTYLEWYQQRPGQSPRRLIYKVSNRFSGVPDRFSGSGSGTDFTLKISRVEAEDVGVYYCFQGSHAPWTFGGGTKVEIKLEDLKNVFPPEVAVFEPSEAEISHTQKATLVCLATGFYPDHVELSWWVNGKEVHSGVCTDPQPLKEQPALNDSRYCLSSRLRVSATFWQNPRNHFRCQVQFYGLSENDEWTQDRAKPVTQIVSAEAWGRADDVIKIHWQEKKSNTILGSQEGNTMKTNDTYMKFSWLTVPEKSLDKEHRCIVRHENNKNGVDQEIIFPPIKTDVITMDPKDNCSKDANDTLLLQLTNTSAYYMYLLLLLKSVVYFAIITCCLLMAMVKRKDSRGRAKRSGSGATNFSLLKQAGDVEENPGPTSMDWIWRILFLVGAATGAHSFEEVQLVESGGGLVQPGGSLRLSCAASGFTFSSYGMHWVRQAPGKGLEWVAYITTRSSTIYYADSVKGRFTISRDNAKNSLYLQMNSLRAEDTAVYYCTREPLTGYYAMDYWGQGTSVTVSSTRIQNPDPAVYQLRDSKSSDKSVCLFTDFDSQTNVSQSKDSDVYITDKCVLDMRSMDFKSNSAVAWSNKSDFACANAFNNSIIPEDTFFPSPESSDSTDHVKPKETENTKQPSKSCHKPKAIVHTEKVNMMSLTVLGLRMLFAKTVAVNFLLTAKLFFLLTA

SEQ ID NO: 14746 - protein, 856 aa, synthetic construct
MALPVTALLLPLALLLHAARPEVQLVESGGGLVQPGGSLRLSCAASGFSFSDFWMSWVRQAPGKGLEWVATISQAGSEKDYVDSVKGRFTISRDNAKKSLYLQMNSLRAEDTAVYYCASGVYSFDYRGQGTLVTVSSGTGGGGSGGGGSGGGGSEFDIQMTQSPSSLSASVGDRVTITCRASQSISLWLNWYQQKPGKAPKLLIYAASTLQSGVPSRFSGSGSGTDFTLTISSLQPEDFATYYCQQYYTSPYTFGQGTKVEIKRLEDLKNVFPPEVAVFEPSEAEISHTQKATLVCLATGFYPDHVELSWWVNGKEVHSGVCTDPQPLKEQPALNDSRYCLSSRLRVSATFWQNPRNHFRCQVQFYGLSENDEWTQDRAKPVTQIVSAEAWGRADDVIKIHWQEKKSNTILGSQEGNTMKTNDTYMKFSWLTVPEKSLDKEHRCIVRHENNKNGVDQEIIFPPIKTDVITMDPKDNCSKDANDTLLLQLTNTSAYYMYLLLLLKSVVYFAIITCCLLMAMVKRKDSRGRAKRSGSGATNFSLLKQAGDVEENPGPTSMDWIWRILFLVGAATGAHSFEQVQLLESGGGLVQPGGSLRLSCAASGFTFSSYAMSWVRQAPGKGLEWVSVIRSSGSSTYYADSVKGRFTISRDNSKNTLYLQMNSLRAEDTAVYYCARGGGYFDYWGQGTLVTVSSTRIQNPDPAVYQLRDSKSSDKSVCLFTDFDSQTNVSQSKDSDVYITDKCVLDMRSMDFKSNSAVAWSNKSDFACANAFNNSIIPEDTFFPSPESSDSTDHVKPKETENTKQPSKSCHKPKAIVHTEKVNMMSLTVLGLRMLFAKTVAVNFLLTAKLFFLLTA

SEQ ID NO: 14747 - protein, 859 aa, synthetic construct
MALPVTALLLPLALLLHAARPEVQLVESGGGLVQPGGSLRLSCAASGFSFSDFWMSWVRQAPGKGLEWVATISQAGSEKDYVDSVKGRFTISRDNAKKSLYLQMNSLRAEDTAVYYCASGVYSFDYRGQGTLVTVSSGTGGGGSGGGGSGGGGSEFDIQMTQSPSSLSASVGDRVTITCRASQSISSYLNWYQQKPGKAPKLLIYAVSTLQSGVPSRFSGSGSGTDFTLTISSLQPEDFATYYCQQSGTFPPTTFGQGTKVEIKRLEDLKNVFPPEVAVFEPSEAEISHTQKATLVCLATGFYPDHVELSWWVNGKEVHSGVCTDPQPLKEQPALNDSRYCLSSRLRVSATFWQNPRNHFRCQVQFYGLSENDEWTQDRAKPVTQIVSAEAWGRADDVIKIHWQEKKSNTILGSQEGNTMKTNDTYMKFSWLTVPEKSLDKEHRCIVRHENNKNGVDQEIIFPPIKTDVITMDPKDNCSKDANDTLLLQLTNTSAYYMYLLLLLKSVVYFAIITCCLLMAMVKRKDSRGRAKRSGSGATNFSLLKQAGDVEENPGPTSMDWIWRILFLVGAATGAHSFEQVQLLESGGGLVQPGGSLRLSCAASGFTFSSHGMHWVRQAPGKGLEWVSVISGSGSNTGYADSVKGRFTISRDNSKNTLYLQMNSLRAEDTAVYYCARQWGSYAFDSWGQGTLVTVSSTRIQNPDPAVYQLRDSKSSDKSVCLFTDFDSQTNVSQSKDSDVYITDKCVLDMRSMDFKSNSAVAWSNKSDFACANAFNNSIIPEDTFFPSPESSDSTDHVKPKETENTKQPSKSCHKPKAIVHTEKVNMMSLTVLGLRMLFAKTVAVNFLLTAKLFFLLTA

SEQ ID NO: 14748 - protein, 869 aa, synthetic construct
MALPVTALLLPLALLLHAARPEVQLVESGGGLVQPGGSLRLSCAASGFSFSDFWMSWVRQAPGKGLEWVATISQAGSEKDYVDSVKGRFTISRDNAKKSLYLQMNSLRAEDTAVYYCASGVYSFDYRGQGTLVTVSSGTGGGGSGGGGSGGGGSEFDIVMSQSPSSLAVSVGEKVTMSCKSSQSLLHSSNQKNYLAWYQQKPGQSPKVLIYWASTRESGVPDRFTGSGSGTDFTLTITSVKSEDLAVYYCQQYYSYPWTFGGGTRLEIKRLEDLKNVFPPEVAVFEPSEAEISHTQKATLVCLATGFYPDHVELSWWVNGKEVHSGVCTDPQPLKEQPALNDSRYCLSSRLRVSATFWQNPRNHFRCQVQFYGLSENDEWTQDRAKPVTQIVSAEAWGRADDVIKIHWQEKKSNTILGSQEGNTMKTNDTYMKFSWLTVPEKSLDKEHRCIVRHENNKNGVDQEIIFPPIKTDVITMDPKDNCSKDANDTLLLQLTNTSAYYMYLLLLLKSVVYFAIITCCLLMAMVKRKDSRGRAKRSGSGATNFSLLKQAGDVEENPGPTSMDWIWRILFLVGAATGAHSFEEVQLQQSVAELVKPGASVKMSCKVSGYTLTDHTIHWMKQRPEQGLEWIGYIYPRDGITGYNEKFKGKATLTADTSSSTAYMQLNSLTSEDSAVYFCARWGYSYRNYAYYYDYWGQGTTLTVSSTRIQNPDPAVYQLRDSKSSDKSVCLFTDFDSQTNVSQSKDSDVYITDKCVLDMRSMDFKSNSAVAWSNKSDFACANAFNNSIIPEDTFFPSPESSDSTDHVKPKETENTKQPSKSCHKPKAIVHTEKVNMMSLTVLGLRMLFAKTVAVNFLLTAKLFFLLTA

SEQ ID NO: 14749 - protein, 866 aa, synthetic construct
MALPVTALLLPLALLLHAARPEVQLVESGGGLVQPGGSLRLSCAASGFSFSDFWMSWVRQAPGKGLEWVATISQAGSEKDYVDSVKGRFTISRDNAKKSLYLQMNSLRAEDTAVYYCASGVYSFDYRGQGTLVTVSSGTGGGGSGGGGSGGGGSEFEIVLTQSPGTLSLSPGERATLSCRASQSVSSSYLAWYQQKPGQAPRLLIYGTSSRATGIPDRFSGSGSGTDFTLTISRLEPEDFAVYYCQQYGSSPFTFGGGTKVEIKRLEDLKNVFPPEVAVFEPSEAEISHTQKATLVCLATGFYPDHVELSWWVNGKEVHSGVCTDPQPLKEQPALNDSRYCLSSRLRVSATFWQNPRNHFRCQVQFYGLSENDEWTQDRAKPVTQIVSAEAWGRADDVIKIHWQEKKSNTILGSQEGNTMKTNDTYMKFSWLTVPEKSLDKEHRCIVRHENNKNGVDQEIIFPPIKTDVITMDPKDNCSKDANDTLLLQLTNTSAYYMYLLLLLKSVVYFAIITCCLLMAMVKRKDSRGRAKRSGSGATNFSLLKQAGDVEENPGPTSMDWIWRILFLVGAATGAHSFEQVQLQESGPGLAKPSETLSLTCTVSGDSITSYYWSWIRQPPGKGLEWIGYIYYSGSTNYNPSLKSRVTISVDTSKNQFSLKLSSVTAADTAVYYCARDQRRIAAAGTHFYGMDVWGQGTTVTVSSTRIQNPDPAVYQLRDSKSSDKSVCLFTDFDSQTNVSQSKDSDVYITDKCVLDMRSMDFKSNSAVAWSNKSDFACANAFNNSIIPEDTFFPSPESSDSTDHVKPKETENTKQPSKSCHKPKAIVHTEKVNMMSLTVLGLRMLFAKTVAVNFLLTAKLFFLLTA

SEQ ID NO: 14750 - protein, 858 aa, synthetic construct
MALPVTALLLPLALLLHAARPEVQLVESGGGLVQPGGSLRLSCAASGFSFSDFWMSWVRQAPGKGLEWVATISQAGSEKDYVDSVKGRFTISRDNAKKSLYLQMNSLRAEDTAVYYCASGVYSFDYRGQGTLVTVSSGTGGGGSGGGGSGGGGSEFDILLTQSPVILSVSPGERVSFSCRASQSIGTNIHWYQQRTNGSPRLLIKYASESISGIPSRFSGSGSGTDFTLSINSVESEDIADYYCQQNNNWPTTFGAGTKLELKLEDLKNVFPPEVAVFEPSEAEISHTQKATLVCLATGFYPDHVELSWWVNGKEVHSGVCTDPQPLKEQPALNDSRYCLSSRLRVSATFWQNPRNHFRCQVQFYGLSENDEWTQDRAKPVTQIVSAEAWGRADDVIKIHWQEKKSNTILGSQEGNTMKTNDTYMKFSWLTVPEKSLDKEHRCIVRHENNKNGVDQEIIFPPIKTDVITMDPKDNCSKDANDTLLLQLTNTSAYYMYLLLLLKSVVYFAIITCCLLMAMVKRKDSRGRAKRSGSGATNFSLLKQAGDVEENPGPTSMDWIWRILFLVGAATGAHSFEQVQLKQSGPGLVQPSQSLSITCTVSGFSLTNYGVHWVRQSPGKGLEWLGVIWSGGNTDYNTPFTSRLSINKDNSKSQVFFKMNSLQSNDTAIYYCARALTYYDYEFAYWGQGTLVTVSATRIQNPDPAVYQLRDSKSSDKSVCLFTDFDSQTNVSQSKDSDVYITDKCVLDMRSMDFKSNSAVAWSNKSDFACANAFNNSIIPEDTFFPSPESSDSTDHVKPKETENTKQPSKSCHKPKAIVHTEKVNMMSLTVLGLRMLFAKTVAVNFLLTAKLFFLLTA

SEQ ID NO: 14751 - protein, 851 aa, synthetic construct
MALPVTALLLPLALLLHAARPEVQLVESGGGLVQPGGSLRLSCAASGFSFSDFWMSWVRQAPGKGLEWVATISQAGSEKDYVDSVKGRFTISRDNAKKSLYLQMNSLRAEDTAVYYCASGVYSFDYRGQGTLVTVSSGTGGGGSGGGGSGGGGSEFMTQSPKFLLVSAGDRVTLTCKASQSVNNDVYWYQQEPGQSPKLLIYWASTRESGVPDRFTGSGSGTDFTLTISSVQAEDLAVYYCKQSYNLYTFGGGTKLEIKRLEDLKNVFPPEVAVFEPSEAEISHTQKATLVCLATGFYPDHVELSWWVNGKEVHSGVCTDPQPLKEQPALNDSRYCLSSRLRVSATFWQNPRNHFRCQVQFYGLSENDEWTQDRAKPVTQIVSAEAWGRADDVIKIHWQEKKSNTILGSQEGNTMKTNDTYMKFSWLTVPEKSLDKEHRCIVRHENNKNGVDQEIIFPPIKTDVITMDPKDNCSKDANDTLLLQLTNTSAYYMYLLLLLKSVVYFAIITCCLLMAMVKRKDSRGRAKRSGSGATNFSLLKQAGDVEENPGPTSMDWIWRILFLVGAATGAHSFEESGRGLVQPGGSRKLSCAASGFTFSTSGMHWVRQAPEKGLEWVAYISSGSTTIYHADTVKGRFTISRDNPKNTLFLQMTSLRSEDTAMYYCCARSGQFGNYFDYWGQGTTLTVSSTRIQNPDPAVYQLRDSKSSDKSVCLFTDFDSQTNVSQSKDSDVYITDKCVLDMRSMDFKSNSAVAWSNKSDFACANAFNNSIIPEDTFFPSPESSDSTDHVKPKETENTKQPSKSCHKPKAIVHTEKVNMMSLTVLGLRMLFAKTVAVNFLLTAKLFFLLTA

SEQ ID NO: 14752 - protein, 856 aa, synthetic construct
MALPVTALLLPLALLLHAARPEVQLVESGGGLVQPGGSLRLSCAASGFSFSDFWMSWVRQAPGKGLEWVATISQAGSEKDYVDSVKGRFTISRDNAKKSLYLQMNSLRAEDTAVYYCASGVYSFDYRGQGTLVTVSSGTGGGGSGGGGSGGGGSEFQSPSSLAVSAGEKVTMSCKSSQSLLNSRTRKNYLAWYQQKPGQSPKLLIYWASTRESGVPDRFTGSGSGTDFTLTISSVQAEDLAVYYCKQSNLYTFGGGTKLEIKLEDLKNVFPPEVAVFEPSEAEISHTQKATLVCLATGFYPDHVELSWWVNGKEVHSGVCTDPQPLKEQPALNDSRYCLSSRLRVSATFWQNPRNHFRCQVQFYGLSENDEWTQDRAKPVTQIVSAEAWGRADDVIKIHWQEKKSNTILGSQEGNTMKTNDTYMKFSWLTVPEKSLDKEHRCIVRHENNKNGVDQEIIFPPIKTDVITMDPKDNCSKDANDTLLLQLTNTSAYYMYLLLLLKSVVYFAIITCCLLMAMVKRKDSRGRAKRSGSGATNFSLLKQAGDVEENPGPTSMDWIWRILFLVGAATGAHSFEQVQLEESGPELVKPGASVKLSCKASGYTFTEYIIHWVKQRSGQGLEWIGWFYPGSGSIKYNEKFKDKATLTADKSSSTVYMELSGLTSEDSAVYFCARHDGYSYFDYWGQGTTLTVSSTRIQNPDPAVYQLRDSKSSDKSVCLFTDFDSQTNVSQSKDSDVYITDKCVLDMRSMDFKSNSAVAWSNKSDFACANAFNNSIIPEDTFFPSPESSDSTDHVKPKETENTKQPSKSCHKPKAIVHTEKVNMMSLTVLGLRMLFAKTVAVNFLLTAKLFFLLTA

SEQ ID NO: 14753 - protein, 859 aa, synthetic construct
MALPVTALLLPLALLLHAARPEVQLVESGGGLVQPGGSLRLSCAASGFSFSDFWMSWVRQAPGKGLEWVATISQAGSEKDYVDSVKGRFTISRDNAKKSLYLQMNSLRAEDTAVYYCASGVYSFDYRGQGTLVTVSSGTGGGGSGGGGSGGGGSEFDIQMTQSPSSLSASLGERVSLTCRATQELSGYLSWLQQKPDGTIKRLIYAASTLDSGVPKRFSGNRSGSDYSLTISSLESEDFADYYCLQYAIYPYTFGGGTKLEIKLEDLKNVFPPEVAVFEPSEAEISHTQKATLVCLATGFYPDHVELSWWVNGKEVHSGVCTDPQPLKEQPALNDSRYCLSSRLRVSATFWQNPRNHFRCQVQFYGLSENDEWTQDRAKPVTQIVSAEAWGRADDVIKIHWQEKKSNTILGSQEGNTMKTNDTYMKFSWLTVPEKSLDKEHRCIVRHENNKNGVDQEIIFPPIKTDVITMDPKDNCSKDANDTLLLQLTNTSAYYMYLLLLLKSVVYFAIITCCLLMAMVKRKDSRGRAKRSGSGATNFSLLKQAGDVEENPGPTSMDWIWRILFLVGAATGAHSFEEVQLQQSGPELVKPGASVKMSCKASGYTFTSYFIHWVKQKPGQGLEWIGFINPYNDGSKYNEKFKGKATLTSDKSSSTAYMELSSLTSEDSAVYYCTRDDGYYGYAMDYWGQGTSVTVSSTRIQNPDPAVYQLRDSKSSDKSVCLFTDFDSQTNVSQSKDSDVYITDKCVLDMRSMDFKSNSAVAWSNKSDFACANAFNNSIIPEDTFFPSPESSDSTDHVKPKETENTKQPSKSCHKPKAIVHTEKVNMMSLTVLGLRMLFAKTVAVNFLLTAKLFFLLTA

SEQ ID NO: 14754 - protein, 864 aa, synthetic construct
MALPVTALLLPLALLLHAARPEVQLVESGGGLVQPGGSLRLSCAASGFSFSDFWMSWVRQAPGKGLEWVATISQAGSEKDYVDSVKGRFTISRDNAKKSLYLQMNSLRAEDTAVYYCASGVYSFDYRGQGTLVTVSSGTGGGGSGGGGSGGGGSEFDTIVLTQSPASLAVSLGQRATISCRASESVDSYGNSFMHWYQQKPGQPPKLLIYLASNLESGVPARFSGSGSRTDFTLTIDPVEADDAATYYCQQNNYDPWTFGGGTKLEIKLEDLKNVFPPEVAVFEPSEAEISHTQKATLVCLATGFYPDHVELSWWVNGKEVHSGVCTDPQPLKEQPALNDSRYCLSSRLRVSATFWQNPRNHFRCQVQFYGLSENDEWTQDRAKPVTQIVSAEAWGRADDVIKIHWQEKKSNTILGSQEGNTMKTNDTYMKFSWLTVPEKSLDKEHRCIVRHENNKNGVDQEIIFPPIKTDVITMDPKDNCSKDANDTLLLQLTNTSAYYMYLLLLLKSVVYFAIITCCLLMAMVKRKDSRGRAKRSGSGATNFSLLKQAGDVEENPGPTSMDWIWRILFLVGAATGAHSFEEVQLQQSGPELVKPGASVKMSCKASGYTFTSYVMHWVKQKPGQGLEWIGYINPYNDGTKYNEKFKGKATLTSDTSSSTAYMELNSLTSEDSAVYFCARPIYFDNDYFDYWGQGTTLKVSSTRIQNPDPAVYQLRDSKSSDKSVCLFTDFDSQTNVSQSKDSDVYITDKCVLDMRSMDFKSNSAVAWSNKSDFACANAFNNSIIPEDTFFPSPESSDSTDHVKPKETENTKQPSKSCHKPKAIVHTEKVNMMSLTVLGLRMLFAKTVAVNFLLTAKLFFLLTA

SEQ ID NO: 14755 - protein, 859 aa, synthetic construct
MALPVTALLLPLALLLHAARPEVQLVESGGGLVQPGGSLRLSCAASGFSFSDFWMSWVRQAPGKGLEWVATISQAGSEKDYVDSVKGRFTISRDNAKKSLYLQMNSLRAEDTAVYYCASGVYSFDYRGQGTLVTVSSGTGGGGSGGGGSGGGGSEFDIQMTQSPSSLSASVGDRVTITCKASQDVGIAVAWYQQKPGKVPKLLIYWASTRHTGVPDRFSGSGSGTDFTLTISSLQPEDVATYYCQQYSSYPYTFGQGTKVEIKRLEDLKNVFPPEVAVFEPSEAEISHTQKATLVCLATGFYPDHVELSWWVNGKEVHSGVCTDPQPLKEQPALNDSRYCLSSRLRVSATFWQNPRNHFRCQVQFYGLSENDEWTQDRAKPVTQIVSAEAWGRADDVIKIHWQEKKSNTILGSQEGNTMKTNDTYMKFSWLTVPEKSLDKEHRCIVRHENNKNGVDQEIIFPPIKTDVITMDPKDNCSKDANDTLLLQLTNTSAYYMYLLLLLKSVVYFAIITCCLLMAMVKRKDSRGRAKRSGSGATNFSLLKQAGDVEENPGPTSMDWIWRILFLVGAATGAHSFEEVQLVESGGGLVQPGGSLRLSCAASGFDFSRYWMSWVRQAPGKGLEWIGEINPDSSTINYAPSLKDKFIISRDNAKNSLYLQMNSLRAEDTAVYYCARPDGNYWYFDVWGQGTLVTVSSTRIQNPDPAVYQLRDSKSSDKSVCLFTDFDSQTNVSQSKDSDVYITDKCVLDMRSMDFKSNSAVAWSNKSDFACANAFNNSIIPEDTFFPSPESSDSTDHVKPKETENTKQPSKSCHKPKAIVHTEKVNMMSLTVLGLRMLFAKTVAVNFLLTAKLFFLLTA

SEQ ID NO: 14756 - protein, 859 aa, synthetic construct
MALPVTALLLPLALLLHAARPEVQLVESGGGLVQPGGSLRLSCAASGFSFSDFWMSWVRQAPGKGLEWVATISQAGSEKDYVDSVKGRFTISRDNAKKSLYLQMNSLRAEDTAVYYCASGVYSFDYRGQGTLVTVSSGTGGGGSGGGGSGGGGSEFDIVMTQSQKSMSTSVGDRVSITCKASQDVITGVAWYQQKPGQSPKLLIYSASYRYTGVPDRFTGSGSGTDFTFTISNVQAEDLAVYYCQQHYSTPLTFGAGTKLELKLEDLKNVFPPEVAVFEPSEAEISHTQKATLVCLATGFYPDHVELSWWVNGKEVHSGVCTDPQPLKEQPALNDSRYCLSSRLRVSATFWQNPRNHFRCQVQFYGLSENDEWTQDRAKPVTQIVSAEAWGRADDVIKIHWQEKKSNTILGSQEGNTMKTNDTYMKFSWLTVPEKSLDKEHRCIVRHENNKNGVDQEIIFPPIKTDVITMDPKDNCSKDANDTLLLQLTNTSAYYMYLLLLLKSVVYFAIITCCLLMAMVKRKDSRGRAKRSGSGATNFSLLKQAGDVEENPGPTSMDWIWRILFLVGAATGAHSFEQVQLQQPGAELVRPGASVKLSCKASGYSFTTYWMNWVKQRPGQGLEWIGMIHPSDSETRLNQKFKDKATLTVDKSSSTAYMQLSSPTSEDSAVYYCARSTMIATRAMDYWGQGTSVTVSSTRIQNPDPAVYQLRDSKSSDKSVCLFTDFDSQTNVSQSKDSDVYITDKCVLDMRSMDFKSNSAVAWSNKSDFACANAFNNSIIPEDTFFPSPESSDSTDHVKPKETENTKQPSKSCHKPKAIVHTEKVNMMSLTVLGLRMLFAKTVAVNFLLTAKLFFLLTA

SEQ ID NO: 14757 - protein, 865 aa, synthetic construct
MALPVTALLLPLALLLHAARPEVQLVESGGGLVQPGGSLRLSCAASGFSFSDFWMSWVRQAPGKGLEWVATISQAGSEKDYVDSVKGRFTISRDNAKKSLYLQMNSLRAEDTAVYYCASGVYSFDYRGQGTLVTVSSGTGGGGSGGGGSGGGGSEFQSVLTQPPSVSGAPGQRVTISCTGSGSNIGAPYDVSWYQQLPGTAPKLLIYHNNKRPSGVPDRFSGSKSGTSASLAITGLQAEDEADYYCATVEAGLSGSVFGGGTKLTVLGALEDLKNVFPPEVAVFEPSEAEISHTQKATLVCLATGFYPDHVELSWWVNGKEVHSGVCTDPQPLKEQPALNDSRYCLSSRLRVSATFWQNPRNHFRCQVQFYGLSENDEWTQDRAKPVTQIVSAEAWGRADDVIKIHWQEKKSNTILGSQEGNTMKTNDTYMKFSWLTVPEKSLDKEHRCIVRHENNKNGVDQEIIFPPIKTDVITMDPKDNCSKDANDTLLLQLTNTSAYYMYLLLLLKSVVYFAIITCCLLMAMVKRKDSRGRAKRSGSGATNFSLLKQAGDVEENPGPTSMDWIWRILFLVGAATGAHSFEQVQLVQSGAEVKKPGASVKVSCKVSGYTLTELSIHWVRQAPGKGLEWMGGFDPEENEIVYAQRFQGRVTMTEDTSTDTAYMELSSLRSEDTAVYYCAIVGSFSPLTLGLWGQGTMVTVSSTRIQNPDPAVYQLRDSKSSDKSVCLFTDFDSQTNVSQSKDSDVYITDKCVLDMRSMDFKSNSAVAWSNKSDFACANAFNNSIIPEDTFFPSPESSDSTDHVKPKETENTKQPSKSCHKPKAIVHTEKVNMMSLTVLGLRMLFAKTVAVNFLLTAKLFFLLTA

SEQ ID NO: 14758 - protein, 865 aa, synthetic construct
MALPVTALLLPLALLLHAARPEVQLVESGGGLVQPGGSLRLSCAASGFSFSDFWMSWVRQAPGKGLEWVATISQAGSEKDYVDSVKGRFTISRDNAKKSLYLQMNSLRAEDTAVYYCASGVYSFDYRGQGTLVTVSSGTGGGGSGGGGSGGGGSEFQSVLTQPPSVSGAPGQRVTISCTGSGSNIGAPYDVSWYQQLPGTAPKLLIYHNNKRPSGVPDRFSGSKSGTSASLAITGLQAEDEADYYCQSYDSSSISTIFGGGTKLTVLGALEDLKNVFPPEVAVFEPSEAEISHTQKATLVCLATGFYPDHVELSWWVNGKEVHSGVCTDPQPLKEQPALNDSRYCLSSRLRVSATFWQNPRNHFRCQVQFYGLSENDEWTQDRAKPVTQIVSAEAWGRADDVIKIHWQEKKSNTILGSQEGNTMKTNDTYMKFSWLTVPEKSLDKEHRCIVRHENNKNGVDQEIIFPPIKTDVITMDPKDNCSKDANDTLLLQLTNTSAYYMYLLLLLKSVVYFAIITCCLLMAMVKRKDSRGRAKRSGSGATNFSLLKQAGDVEENPGPTSMDWIWRILFLVGAATGAHSFEQVQLVQSGAEVKKPGASVKVSCKVSGYTLTELSIHWVRQAPGKGLEWMGGFDPEENEIVYAQRFQGRVTMTEDTSTDTAYMELSSLRSEDTAVYYCAIVGSFSGIAYRPWGQGTMVTVSSTRIQNPDPAVYQLRDSKSSDKSVCLFTDFDSQTNVSQSKDSDVYITDKCVLDMRSMDFKSNSAVAWSNKSDFACANAFNNSIIPEDTFFPSPESSDSTDHVKPKETENTKQPSKSCHKPKAIVHTEKVNMMSLTVLGLRMLFAKTVAVNFLLTAKLFFLLTA

SEQ ID NO: 14759 - protein, 853 aa, synthetic construct
MALPVTALLLPLALLLHAARPEVQLVESGGGLVQPGGSLRLSCAASGFSFSDFWMSWVRQAPGKGLEWVATISQAGSEKDYVDSVKGRFTISRDNAKKSLYLQMNSLRAEDTAVYYCASGVYSFDYRGQGTLVTVSSGTGGGGSGGGGSGGGGSEFDIQMTQSPSSLSASVGDRVTITCRASQGIRNNLAWYQQKPGKAPKRLIYAASNLQSGVPSRFTGSGSGTEFTLIVSSLQPEDFATYYCLQHHSYPLTSGGGTKVELEDLKNVFPPEVAVFEPSEAEISHTQKATLVCLATGFYPDHVELSWWVNGKEVHSGVCTDPQPLKEQPALNDSRYCLSSRLRVSATFWQNPRNHFRCQVQFYGLSENDEWTQDRAKPVTQIVSAEAWGRADDVIKIHWQEKKSNTILGSQEGNTMKTNDTYMKFSWLTVPEKSLDKEHRCIVRHENNKNGVDQEIIFPPIKTDVITMDPKDNCSKDANDTLLLQLTNTSAYYMYLLLLLKSVVYFAIITCCLLMAMVKRKDSRGRAKRSGSGATNFSLLKQAGDVEENPGPTSMDWIWRILFLVGAATGAHSFEEVQVLESGGGLVQPGGSLRLSCAASGFTFSSYAMSWVRQAPGKGLEWVSAISGSGGSTNYADSVKGRFTISRDNSKNTLYLQMNSLRAEDTAVYYCAGSSGWSEYWGQGTLVTVSSTRIQNPDPAVYQLRDSKSSDKSVCLFTDFDSQTNVSQSKDSDVYITDKCVLDMRSMDFKSNSAVAWSNKSDFACANAFNNSIIPEDTFFPSPESSDSTDHVKPKETENTKQPSKSCHKPKAIVHTEKVNMMSLTVLGLRMLFAKTVAVNFLLTAKLFFLLTA

SEQ ID NO: 14760 - protein, 859 aa, synthetic construct
MALPVTALLLPLALLLHAARPEVQLVESGGGLVQPGGSLRLSCAASGFSFSDFWMSWVRQAPGKGLEWVATISQAGSEKDYVDSVKGRFTISRDNAKKSLYLQMNSLRAEDTAVYYCASGVYSFDYRGQGTLVTVSSGTGGGGSGGGGSGGGGSEFDEIQLVQSGAEVKKPGESLRISCKGSGFNIEDYYIHWVRQMPGKGLEWMGRIDPENDETKYGPIFQGHVTISADTSINTVYLQWSSLKASDTAMYYCAFRGGVYWGQGTTVTVSSLEDLKNVFPPEVAVFEPSEAEISHTQKATLVCLATGFYPDHVELSWWVNGKEVHSGVCTDPQPLKEQPALNDSRYCLSSRLRVSATFWQNPRNHFRCQVQFYGLSENDEWTQDRAKPVTQIVSAEAWGRADDVIKIHWQEKKSNTILGSQEGNTMKTNDTYMKFSWLTVPEKSLDKEHRCIVRHENNKNGVDQEIIFPPIKTDVITMDPKDNCSKDANDTLLLQLTNTSAYYMYLLLLLKSVVYFAIITCCLLMAMVKRKDSRGRAKRSGSGATNFSLLKQAGDVEENPGPTSMDWIWRILFLVGAATGAHSFEDVVMTQSPDSLAVSLGERATINCKSSQSLLDSDGKTYLNWLQQKPGQPPKRLISLVSKLDSGVPDRFSGSGSGTDFTLTISSLQAEDVAVYYCWQGTHFPGTFGGGTKVEIKTRIQNPDPAVYQLRDSKSSDKSVCLFTDFDSQTNVSQSKDSDVYITDKCVLDMRSMDFKSNSAVAWSNKSDFACANAFNNSIIPEDTFFPSPESSDSTDHVKPKETENTKQPSKSCHKPKAIVHTEKVNMMSLTVLGLRMLFAKTVAVNFLLTAKLFFLLTA

SEQ ID NO: 14761 - protein, 866 aa, synthetic construct
MALPVTALLLPLALLLHAARPEVQLVESGGGLVQPGGSLRLSCAASGFSFSDFWMSWVRQAPGKGLEWVATISQAGSEKDYVDSVKGRFTISRDNAKKSLYLQMNSLRAEDTAVYYCASGVYSFDYRGQGTLVTVSSGTGGGGSGGGGSGGGGSEFDELVMTQSPSSLTVTAGEKVTMSCKSSQSLLNSGNQKNYLTWYQQKPGQPPKLLIYWASTRESGVPDRFTGSGSGTDFTLTISSVQAEDLAVYYCQNDYSYPLTFGAGTKLEIKLEDLKNVFPPEVAVFEPSEAEISHTQKATLVCLATGFYPDHVELSWWVNGKEVHSGVCTDPQPLKEQPALNDSRYCLSSRLRVSATFWQNPRNHFRCQVQFYGLSENDEWTQDRAKPVTQIVSAEAWGRADDVIKIHWQEKKSNTILGSQEGNTMKTNDTYMKFSWLTVPEKSLDKEHRCIVRHENNKNGVDQEIIFPPIKTDVITMDPKDNCSKDANDTLLLQLTNTSAYYMYLLLLLKSVVYFAIITCCLLMAMVKRKDSRGRAKRSGSGATNFSLLKQAGDVEENPGPTSMDWIWRILFLVGAATGAHSFEEVQLLEQSGAELVRPGTSVKISCKASGYAFTNYWLGWVKQRPGHGLEWIGDIFPGSGNIHYNEKFKGKATLTADKSSSTAYMQLSSLTFEDSAVYFCARLRNWDEPMDYWGQGTTVTVSSTRIQNPDPAVYQLRDSKSSDKSVCLFTDFDSQTNVSQSKDSDVYITDKCVLDMRSMDFKSNSAVAWSNKSDFACANAFNNSIIPEDTFFPSPESSDSTDHVKPKETENTKQPSKSCHKPKAIVHTEKVNMMSLTVLGLRMLFAKTVAVNFLLTAKLFFLLTA

SEQ ID NO: 14762 - protein, 867 aa, synthetic construct
MALPVTALLLPLALLLHAARPEVQLVESGGGLVQPGGSLRLSCAASGFSFSDFWMSWVRQAPGKGLEWVATISQAGSEKDYVDSVKGRFTISRDNAKKSLYLQMNSLRAEDTAVYYCASGVYSFDYRGQGTLVTVSSGTGGGGSGGGGSGGGGSEFDELQMTQSPSSLSASVGDRVTITCRASQSISSYLNWYQQKPGQPPKLLIYWASTRESGVPDRFSGSESGTNYTLTISSLQPEDFATYFCQQSDSLPITFGQGTRLDIQLEDLKNVFPPEVAVFEPSEAEISHTQKATLVCLATGFYPDHVELSWWVNGKEVHSGVCTDPQPLKEQPALNDSRYCLSSRLRVSATFWQNPRNHFRCQVQFYGLSENDEWTQDRAKPVTQIVSAEAWGRADDVIKIHWQEKKSNTILGSQEGNTMKTNDTYMKFSWLTVPEKSLDKEHRCIVRHENNKNGVDQEIIFPPIKTDVITMDPKDNCSKDANDTLLLQLTNTSAYYMYLLLLLKSVVYFAIITCCLLMAMVKRKDSRGRAKRSGSGATNFSLLKQAGDVEENPGPTSMDWIWRILFLVGAATGAHSFEEVQLLESGGGVVQPGRSLRLSCAASGFTFSSYGMHWVRQAPGKGLEWVAVISYDGSNKYYADSVKGRFTISRDNSKNTLYLQMNSLRAEDTAVYYCAKDMGWGSGWRPYYYYGMDVWGQGTTVTVSSTRIQNPDPAVYQLRDSKSSDKSVCLFTDFDSQTNVSQSKDSDVYITDKCVLDMRSMDFKSNSAVAWSNKSDFACANAFNNSIIPEDTFFPSPESSDSTDHVKPKETENTKQPSKSCHKPKAIVHTEKVNMMSLTVLGLRMLFAKTVAVNFLLTAKLFFLLTA

SEQ ID NO: 14763 - protein, 864 aa, synthetic construct
MALPVTALLLPLALLLHAARPEVQLVESGGGLVQPGGSLRLSCAASGFSFSDFWMSWVRQAPGKGLEWVATISQAGSEKDYVDSVKGRFTISRDNAKKSLYLQMNSLRAEDTAVYYCASGVYSFDYRGQGTLVTVSSGTGGGGSGGGGSGGGGSEFDDIQMTQSPSSLSASVGDRVTITCRASQSISSYLNWYQQKPGKAPKLLIYAASSLQSGVPSRFSGSGSGTDFTLTISSLQPEDLATYYCQQSYSTPFTFGPGTKVDIKLEDLKNVFPPEVAVFEPSEAEISHTQKATLVCLATGFYPDHVELSWWVNGKEVHSGVCTDPQPLKEQPALNDSRYCLSSRLRVSATFWQNPRNHFRCQVQFYGLSENDEWTQDRAKPVTQIVSAEAWGRADDVIKIHWQEKKSNTILGSQEGNTMKTNDTYMKFSWLTVPEKSLDKEHRCIVRHENNKNGVDQEIIFPPIKTDVITMDPKDNCSKDANDTLLLQLTNTSAYYMYLLLLLKSVVYFAIITCCLLMAMVKRKDSRGRAKRSGSGATNFSLLKQAGDVEENPGPTSMDWIWRILFLVGAATGAHSFEVHEVQLVQSGAEVKKPGSSVKVSCKASGGTFSSYAISWVRQAPGQGLEWMGGIIPIFGTANYAQKFQGRVTITADKSTSTAYMELSSLRSEDTAVYYCATFALFGFREQAFDIWGQGTTVTVSSTRIQNPDPAVYQLRDSKSSDKSVCLFTDFDSQTNVSQSKDSDVYITDKCVLDMRSMDFKSNSAVAWSNKSDFACANAFNNSIIPEDTFFPSPESSDSTDHVKPKETENTKQPSKSCHKPKAIVHTEKVNMMSLTVLGLRMLFAKTVAVNFLLTAKLFFLLTA

SEQ ID NO: 14764 - protein, 862 aa, synthetic construct
MALPVTALLLPLALLLHAARPEVQLVESGGGLVQPGGSLRLSCAASGFSFSDFWMSWVRQAPGKGLEWVATISQAGSEKDYVDSVKGRFTISRDNAKKSLYLQMNSLRAEDTAVYYCASGVYSFDYRGQGTLVTVSSGTGGGGSGGGGSGGGGSEFDIVLTQSPLSLAVSLGQPAIISCKASQSVSFAGTSLMHWYHQKPGQQPRLLIYRASNLEAGVPDRFSGSGSKTDFTLTISPVEAEDAATYYCQQSREYPYTFGGGTKLEIKRLEDLKNVFPPEVAVFEPSEAEISHTQKATLVCLATGFYPDHVELSWWVNGKEVHSGVCTDPQPLKEQPALNDSRYCLSSRLRVSATFWQNPRNHFRCQVQFYGLSENDEWTQDRAKPVTQIVSAEAWGRADDVIKIHWQEKKSNTILGSQEGNTMKTNDTYMKFSWLTVPEKSLDKEHRCIVRHENNKNGVDQEIIFPPIKTDVITMDPKDNCSKDANDTLLLQLTNTSAYYMYLLLLLKSVVYFAIITCCLLMAMVKRKDSRGRAKRSGSGATNFSLLKQAGDVEENPGPTSMDWIWRILFLVGAATGAHSFEQVQLVQSGAEVVKPGASVKISCKASGYTFTGYFMNWVKQSPGQSLEWIGRIHPYDGDTFYNQKFQGKATLTVDKSSNTAHMELLSLTSEDFAVYYCTRYDGSRAMDYWGQGTTVTVSSTRIQNPDPAVYQLRDSKSSDKSVCLFTDFDSQTNVSQSKDSDVYITDKCVLDMRSMDFKSNSAVAWSNKSDFACANAFNNSIIPEDTFFPSPESSDSTDHVKPKETENTKQPSKSCHKPKAIVHTEKVNMMSLTVLGLRMLFAKTVAVNFLLTAKLFFLLTA

SEQ ID NO: 14765 - protein, 859 aa, synthetic construct
MALPVTALLLPLALLLHAARPEVQLVESGGGLVQPGGSLRLSCAASGFSFSDFWMSWVRQAPGKGLEWVATISQAGSEKDYVDSVKGRFTISRDNAKKSLYLQMNSLRAEDTAVYYCASGVYSFDYRGQGTLVTVSSGTGGGGSGGGGSGGGGSEFDDVVMTQTPLSLPVTPGEPASISCRSSQSLVHRNGNTYLHWYLQKPGQSPKLLIHKVSNRFSGVPDRFSGSGSGTDFTLKISRVEAEDLGVYFCSQSTHVPPLTFGAGTKLELKLEDLKNVFPPEVAVFEPSEAEISHTQKATLVCLATGFYPDHVELSWWVNGKEVHSGVCTDPQPLKEQPALNDSRYCLSSRLRVSATFWQNPRNHFRCQVQFYGLSENDEWTQDRAKPVTQIVSAEAWGRADDVIKIHWQEKKSNTILGSQEGNTMKTNDTYMKFSWLTVPEKSLDKEHRCIVRHENNKNGVDQEIIFPPIKTDVITMDPKDNCSKDANDTLLLQLTNTSAYYMYLLLLLKSVVYFAIITCCLLMAMVKRKDSRGRAKRSGSGATNFSLLKQAGDVEENPGPTSMDWIWRILFLVGAATGAHSFEEVQLVQSGAEVEKPGASVKISCKASGSSFTGYNMNWVRQNIGKSLEWIGAIDPYYGGTSYNQKFKGRATLTVDKSTSTAYMHLKSLRSEDTAVYYCVSGMEYWGQGTSVTVSSTRIQNPDPAVYQLRDSKSSDKSVCLFTDFDSQTNVSQSKDSDVYITDKCVLDMRSMDFKSNSAVAWSNKSDFACANAFNNSIIPEDTFFPSPESSDSTDHVKPKETENTKQPSKSCHKPKAIVHTEKVNMMSLTVLGLRMLFAKTVAVNFLLTAKLFFLLTA

SEQ ID NO: 14766 - protein, 857 aa, synthetic construct
MALPVTALLLPLALLLHAARPEVQLVESGGGLVQPGGSLRLSCAASGFSFSDFWMSWVRQAPGKGLEWVATISQAGSEKDYVDSVKGRFTISRDNAKKSLYLQMNSLRAEDTAVYYCASGVYSFDYRGQGTLVTVSSGTGGGGSGGGGSGGGGSEFDEIVMTQTPATLSVSAGERVTITCKASQSVSNDVTWYQQKPGQAPRLLIYSASNRYSGVPARFSGSGYGTEFTFTISSVQSEDFAVYFCQQDYSSFGQGTKLEIKRLEDLKNVFPPEVAVFEPSEAEISHTQKATLVCLATGFYPDHVELSWWVNGKEVHSGVCTDPQPLKEQPALNDSRYCLSSRLRVSATFWQNPRNHFRCQVQFYGLSENDEWTQDRAKPVTQIVSAEAWGRADDVIKIHWQEKKSNTILGSQEGNTMKTNDTYMKFSWLTVPEKSLDKEHRCIVRHENNKNGVDQEIIFPPIKTDVITMDPKDNCSKDANDTLLLQLTNTSAYYMYLLLLLKSVVYFAIITCCLLMAMVKRKDSRGRAKRSGSGATNFSLLKQAGDVEENPGPTSMDWIWRILFLVGAATGAHSFEQVQLVESGPGVVQPGRSLRISCAVSGFSVTNYGVHWVRQPPGKGLEWLGVIWAGGITNYNSAFMSRLTISKDNSKNTVYLQMNSLRAEDTAMYYCASRGGHYGYALDYWGQGTLVTVSSTRIQNPDPAVYQLRDSKSSDKSVCLFTDFDSQTNVSQSKDSDVYITDKCVLDMRSMDFKSNSAVAWSNKSDFACANAFNNSIIPEDTFFPSPESSDSTDHVKPKETENTKQPSKSCHKPKAIVHTEKVNMMSLTVLGLRMLFAKTVAVNFLLTAKLFFLLTA

SEQ ID NO: 14767 - protein, 859 aa, synthetic construct
MALPVTALLLPLALLLHAARPEVQLVESGGGLVQPGGSLRLSCAASGFSFSDFWMSWVRQAPGKGLEWVATISQAGSEKDYVDSVKGRFTISRDNAKKSLYLQMNSLRAEDTAVYYCASGVYSFDYRGQGTLVTVSSGTGGGGSGGGGSGGGGSEFDIQMTQTASSLPASLGDRVTISCSASQDISNYLNWYQQKPDGTVKLLIFYSSNLHSGVPSRFSGGGSGTDYSLTISNLEPEDIATYFCHQYSKLPWTFGGGTKLEIKRLEDLKNVFPPEVAVFEPSEAEISHTQKATLVCLATGFYPDHVELSWWVNGKEVHSGVCTDPQPLKEQPALNDSRYCLSSRLRVSATFWQNPRNHFRCQVQFYGLSENDEWTQDRAKPVTQIVSAEAWGRADDVIKIHWQEKKSNTILGSQEGNTMKTNDTYMKFSWLTVPEKSLDKEHRCIVRHENNKNGVDQEIIFPPIKTDVITMDPKDNCSKDANDTLLLQLTNTSAYYMYLLLLLKSVVYFAIITCCLLMAMVKRKDSRGRAKRSGSGATNFSLLKQAGDVEENPGPTSMDWIWRILFLVGAATGAHSFEEVTLVESGGDFVKPGGSLKVSCAASGFAFSHYAMSWVRQTPAKRLEWVAYISSGGSGTYYSDSVKGRFTISRDNAKNTLYLQMRSLRSEDSAMYFCTRVKLGTYYFDSWGQGTTLTVSSTRIQNPDPAVYQLRDSKSSDKSVCLFTDFDSQTNVSQSKDSDVYITDKCVLDMRSMDFKSNSAVAWSNKSDFACANAFNNSIIPEDTFFPSPESSDSTDHVKPKETENTKQPSKSCHKPKAIVHTEKVNMMSLTVLGLRMLFAKTVAVNFLLTAKLFFLLTA

SEQ ID NO: 14768 - protein, 861 aa, synthetic construct
MALPVTALLLPLALLLHAARPEVQLVESGGGLVQPGGSLRLSCAASGFSFSDFWMSWVRQAPGKGLEWVATISQAGSEKDYVDSVKGRFTISRDNAKKSLYLQMNSLRAEDTAVYYCASGVYSFDYRGQGTLVTVSSGTGGGGSGGGGSGGGGSEFQFVLTQSPSASAALGASAKLTCTLSSAHKTYTIDWYQQQKGKAPRYLIQVKSDGTYTKATGVPDRFSGSSSGADRYLIIPSVQADDEADYYCGTDYTGGYVFGGGTQLTVTLEDLKNVFPPEVAVFEPSEAEISHTQKATLVCLATGFYPDHVELSWWVNGKEVHSGVCTDPQPLKEQPALNDSRYCLSSRLRVSATFWQNPRNHFRCQVQFYGLSENDEWTQDRAKPVTQIVSAEAWGRADDVIKIHWQEKKSNTILGSQEGNTMKTNDTYMKFSWLTVPEKSLDKEHRCIVRHENNKNGVDQEIIFPPIKTDVITMDPKDNCSKDANDTLLLQLTNTSAYYMYLLLLLKSVVYFAIITCCLLMAMVKRKDSRGRAKRSGSGATNFSLLKQAGDVEENPGPTSMDWIWRILFLVGAATGAHSFEEQLKESGGGLFKPTDTLTLTCTVSGFSLSYYGVNWVRQAPGNGLEWIGTIGGSGDTYYASWAKSRSTIIRNTNENTVTLKMTSLTAADTATYFCVRYANIGYEYFNVWGPGTLVTVSSTRIQNPDPAVYQLRDSKSSDKSVCLFTDFDSQTNVSQSKDSDVYITDKCVLDMRSMDFKSNSAVAWSNKSDFACANAFNNSIIPEDTFFPSPESSDSTDHVKPKETENTKQPSKSCHKPKAIVHTEKVNMMSLTVLGLRMLFAKTVAVNFLLTAKLFFLLTA

SEQ ID NO: 14769 - protein, 866 aa, synthetic construct
MALPVTALLLPLALLLHAARPEVQLVESGGGLVQPGGSLRLSCAASGFSFSDFWMSWVRQAPGKGLEWVATISQAGSEKDYVDSVKGRFTISRDNAKKSLYLQMNSLRAEDTAVYYCASGVYSFDYRGQGTLVTVSSGTGGGGSGGGGSGGGGSEFQFVLTQSPSVSAALGASAKLTCTLSSAHKTYTIDWYQQQQGEAPRYLMQVKSDGSYTKGTGVPDRFSGSSSGADRYLIIPSVQADDEAGYVCGADDNGGYVFGGGTQLTVTLEDLKNVFPPEVAVFEPSEAEISHTQKATLVCLATGFYPDHVELSWWVNGKEVHSGVCTDPQPLKEQPALNDSRYCLSSRLRVSATFWQNPRNHFRCQVQFYGLSENDEWTQDRAKPVTQIVSAEAWGRADDVIKIHWQEKKSNTILGSQEGNTMKTNDTYMKFSWLTVPEKSLDKEHRCIVRHENNKNGVDQEIIFPPIKTDVITMDPKDNCSKDANDTLLLQLTNTSAYYMYLLLLLKSVVYFAIITCCLLMAMVKRKDSRGRAKRSGSGATNFSLLKQAGDVEENPGPTSMDWIWRILFLVGAATGAHSFEQSVKESEGGLFKPTDTLTLTCTVSGFSLSRHALTWVRQAPGNGLEWIGAIDNAGTTYYASWAKSRSTITRNTDLHTVTLKMTSLTASDTATYFCARVFYDINSGYYLDGMDLWGPGTLVTVSSTRIQNPDPAVYQLRDSKSSDKSVCLFTDFDSQTNVSQSKDSDVYITDKCVLDMRSMDFKSNSAVAWSNKSDFACANAFNNSIIPEDTFFPSPESSDSTDHVKPKETENTKQPSKSCHKPKAIVHTEKVNMMSLTVLGLRMLFAKTVAVNFLLTAKLFFLLTA

SEQ ID NO: 14770 - protein, 860 aa, synthetic construct
MALPVTALLLPLALLLHAARPEVQLVESGGGLVQPGGSLRLSCAASGFSFSDFWMSWVRQAPGKGLEWVATISQAGSEKDYVDSVKGRFTISRDNAKKSLYLQMNSLRAEDTAVYYCASGVYSFDYRGQGTLVTVSSGTGGGGSGGGGSGGGGSEFDIQMTQSPSSLSASVGDRVTITCRASQGISSWLAWYQQKPEKAPKSLIYAASSLQSGVPSRFSGSGSGTDFTLTISSLQPEDFATYYCQQYNSYPPTFGGGTKVEIKLEDLKNVFPPEVAVFEPSEAEISHTQKATLVCLATGFYPDHVELSWWVNGKEVHSGVCTDPQPLKEQPALNDSRYCLSSRLRVSATFWQNPRNHFRCQVQFYGLSENDEWTQDRAKPVTQIVSAEAWGRADDVIKIHWQEKKSNTILGSQEGNTMKTNDTYMKFSWLTVPEKSLDKEHRCIVRHENNKNGVDQEIIFPPIKTDVITMDPKDNCSKDANDTLLLQLTNTSAYYMYLLLLLKSVVYFAIITCCLLMAMVKRKDSRGRAKRSGSGATNFSLLKQAGDVEENPGPTSMDWIWRILFLVGAATGAHSFEEVQLVESGGGLVQPGESLRLSCVASGFTFSRYKMNWVRQAPGKGLEWVSYISRSGRDIYYADSVKGRFTISRDNAKNSLYLQMNSLRDEDTAVYYCAGTVTTYYYFGMDVWGHGTTVTVSSTRIQNPDPAVYQLRDSKSSDKSVCLFTDFDSQTNVSQSKDSDVYITDKCVLDMRSMDFKSNSAVAWSNKSDFACANAFNNSIIPEDTFFPSPESSDSTDHVKPKETENTKQPSKSCHKPKAIVHTEKVNMMSLTVLGLRMLFAKTVAVNFLLTAKLFFLLTA

SEQ ID NO: 14771 - protein, 861 aa, synthetic construct
MALPVTALLLPLALLLHAARPEVQLVESGGGLVQPGGSLRLSCAASGFSFSDFWMSWVRQAPGKGLEWVATISQAGSEKDYVDSVKGRFTISRDNAKKSLYLQMNSLRAEDTAVYYCASGVYSFDYRGQGTLVTVSSGTGGGGSGGGGSGGGGSEFDIQMTQSPSSLSASVGDRVTITCRASQGISSWLAWYQQKPEKAPKSLIYAASSLQSGVPSRFSGSGSGTDFTLTISSLQPEDFATYYCQQYNSYPPTFGGGTKVEIKLEDLKNVFPPEVAVFEPSEAEISHTQKATLVCLATGFYPDHVELSWWVNGKEVHSGVCTDPQPLKEQPALNDSRYCLSSRLRVSATFWQNPRNHFRCQVQFYGLSENDEWTQDRAKPVTQIVSAEAWGRADDVIKIHWQEKKSNTILGSQEGNTMKTNDTYMKFSWLTVPEKSLDKEHRCIVRHENNKNGVDQEIIFPPIKTDVITMDPKDNCSKDANDTLLLQLTNTSAYYMYLLLLLKSVVYFAIITCCLLMAMVKRKDSRGRAKRSGSGATNFSLLKQAGDVEENPGPTSMDWIWRILFLVGAATGAHSFEEVQLVESGGGSVQPGESLRLSCVASGFTFSRYKMNWVRQAPGKGLEWVSYISRSGRDIYYADSVKGRFTISRDNAKNSLYLQMNSLRDEDTAVYYCAGTVTTYYYDFGMDVWGQGTTVTVSSTRIQNPDPAVYQLRDSKSSDKSVCLFTDFDSQTNVSQSKDSDVYITDKCVLDMRSMDFKSNSAVAWSNKSDFACANAFNNSIIPEDTFFPSPESSDSTDHVKPKETENTKQPSKSCHKPKAIVHTEKVNMMSLTVLGLRMLFAKTVAVNFLLTAKLFFLLTA

SEQ ID NO: 14772 - protein, 859 aa, synthetic construct
MALPVTALLLPLALLLHAARPEVQLVESGGGLVQPGGSLRLSCAASGFSFSDFWMSWVRQAPGKGLEWVATISQAGSEKDYVDSVKGRFTISRDNAKKSLYLQMNSLRAEDTAVYYCASGVYSFDYRGQGTLVTVSSGTGGGGSGGGGSGGGGSEFQSVLTQPPSASGTPGQRVTISCSGSRSNVGGNYVFWYQQVPGATPKLLIYRSNQRPSGVPDRFAGSKSGSSASLAISGLRSEDEADYYCATWDDSLSGFVFGTGTKVTVLGLEDLKNVFPPEVAVFEPSEAEISHTQKATLVCLATGFYPDHVELSWWVNGKEVHSGVCTDPQPLKEQPALNDSRYCLSSRLRVSATFWQNPRNHFRCQVQFYGLSENDEWTQDRAKPVTQIVSAEAWGRADDVIKIHWQEKKSNTILGSQEGNTMKTNDTYMKFSWLTVPEKSLDKEHRCIVRHENNKNGVDQEIIFPPIKTDVITMDPKDNCSKDANDTLLLQLTNTSAYYMYLLLLLKSVVYFAIITCCLLMAMVKRKDSRGRAKRSGSGATNFSLLKQAGDVEENPGPTSMDWIWRILFLVGAATGAHSFEVQLVESGGGLVKPGGSLRLSCAASGFTFSDYYMSWIRQAPGKGLEWVSYISSSGSTIYYADSVKGRFTISRDNAKNSLYLQMNSLRAEDTAVYYCARGYGKAYDQWGQGTLVTVSSTRIQNPDPAVYQLRDSKSSDKSVCLFTDFDSQTNVSQSKDSDVYITDKCVLDMRSMDFKSNSAVAWSNKSDFACANAFNNSIIPEDTFFPSPESSDSTDHVKPKETENTKQPSKSCHKPKAIVHTEKVNMMSLTVLGLRMLFAKTVAVNFLLTAKLFFLLTA

SEQ ID NO: 14773 - protein, 858 aa, synthetic construct
MALPVTALLLPLALLLHAARPEVQLVESGGGLVQPGGSLRLSCAASGFSFSDFWMSWVRQAPGKGLEWVATISQAGSEKDYVDSVKGRFTISRDNAKKSLYLQMNSLRAEDTAVYYCASGVYSFDYRGQGTLVTVSSGTGGGGSGGGGSGGGGSEFQSVVTQPPSMSAAPGQQVTISCSGGNSNIERNYVSWYLQLPGTAPKLVIFDNDRRPSGIPDRFSGSKSGTSATLGITGLQTGDEADYYCGTWDSSLRGWVFGGGTKLTVLGLEDLKNVFPPEVAVFEPSEAEISHTQKATLVCLATGFYPDHVELSWWVNGKEVHSGVCTDPQPLKEQPALNDSRYCLSSRLRVSATFWQNPRNHFRCQVQFYGLSENDEWTQDRAKPVTQIVSAEAWGRADDVIKIHWQEKKSNTILGSQEGNTMKTNDTYMKFSWLTVPEKSLDKEHRCIVRHENNKNGVDQEIIFPPIKTDVITMDPKDNCSKDANDTLLLQLTNTSAYYMYLLLLLKSVVYFAIITCCLLMAMVKRKDSRGRAKRSGSGATNFSLLKQAGDVEENPGPTSMDWIWRILFLVGAATGAHSFEVQLVESGGGLIQPGGSLRLSCAASGFTFSNYAMNWVRQAPGKGLEWVSTINGRGSSTIYADSVKGRFTISRDNSKNTLYLQMNSLRAEDTATYYCARYISRGLGDSWGQGTLVTVTRIQNPDPAVYQLRDSKSSDKSVCLFTDFDSQTNVSQSKDSDVYITDKCVLDMRSMDFKSNSAVAWSNKSDFACANAFNNSIIPEDTFFPSPESSDSTDHVKPKETENTKQPSKSCHKPKAIVHTEKVNMMSLTVLGLRMLFAKTVAVNFLLTAKLFFLLTA

SEQ ID NO: 14774 - protein, 859 aa, synthetic construct
MALPVTALLLPLALLLHAARPEVQLVESGGGLVQPGGSLRLSCAASGFSFSDFWMSWVRQAPGKGLEWVATISQAGSEKDYVDSVKGRFTISRDNAKKSLYLQMNSLRAEDTAVYYCASGVYSFDYRGQGTLVTVSSGTGGGGSGGGGSGGGGSEFDVVMTQTPLSLPVSLGDQASISCRSSQSLVHSNGNTYLHWYLQKPGQSPKLLIYKVSNRFSGVPDRFSGSGSGTDFTLKISRVEAEDLGVYFCSQNTPVPPKFGSGTKLEIKLEDLKNVFPPEVAVFEPSEAEISHTQKATLVCLATGFYPDHVELSWWVNGKEVHSGVCTDPQPLKEQPALNDSRYCLSSRLRVSATFWQNPRNHFRCQVQFYGLSENDEWTQDRAKPVTQIVSAEAWGRADDVIKIHWQEKKSNTILGSQEGNTMKTNDTYMKFSWLTVPEKSLDKEHRCIVRHENNKNGVDQEIIFPPIKTDVITMDPKDNCSKDANDTLLLQLTNTSAYYMYLLLLLKSVVYFAIITCCLLMAMVKRKDSRGRAKRSGSGATNFSLLKQAGDVEENPGPTSMDWIWRILFLVGAATGAHSFEQVQLQQSGAELVRPGASVKLSCKASGYTFNDYEMHWVKQTPVHGLKWIGALEPKTGDTAYSQKFKGKATLTADKSSSTAYMELRSLTSEDSAVYYCTSCYYYTYSGQGTLVTVSATRIQNPDPAVYQLRDSKSSDKSVCLFTDFDSQTNVSQSKDSDVYITDKCVLDMRSMDFKSNSAVAWSNKSDFACANAFNNSIIPEDTFFPSPESSDSTDHVKPKETENTKQPSKSCHKPKAIVHTEKVNMMSLTVLGLRMLFAKTVAVNFLLTAKLFFLLTA

SEQ ID NO: 14775 - protein, 858 aa, synthetic construct
MALPVTALLLPLALLLHAARPEVQLVESGGGLVQPGGSLRLSCAASGFSFSDFWMSWVRQAPGKGLEWVATISQAGSEKDYVDSVKGRFTISRDNAKKSLYLQMNSLRAEDTAVYYCASGVYSFDYRGQGTLVTVSSGTGGGGSGGGGSGGGGSEFDIQLTQSPSSLSASVGDRVTITCRASQGIRNDLGWYQQKPGKAPKRLIYAASSLQNGVPSRFSGSGSGTEFTLTISSLQPEDFATYYCLQHNTYPAFGQGTKVEIKRLEDLKNVFPPEVAVFEPSEAEISHTQKATLVCLATGFYPDHVELSWWVNGKEVHSGVCTDPQPLKEQPALNDSRYCLSSRLRVSATFWQNPRNHFRCQVQFYGLSENDEWTQDRAKPVTQIVSAEAWGRADDVIKIHWQEKKSNTILGSQEGNTMKTNDTYMKFSWLTVPEKSLDKEHRCIVRHENNKNGVDQEIIFPPIKTDVITMDPKDNCSKDANDTLLLQLTNTSAYYMYLLLLLKSVVYFAIITCCLLMAMVKRKDSRGRAKRSGSGATNFSLLKQAGDVEENPGPTSMDWIWRILFLVGAATGAHSFEQVQLQESGPGLVKPSQTLSLTCTVSGGSISSFNYYWSWIRHHPGKGLEWIGYIYYSGSTYSNPSLKSRVTISVDTSKNQFSLTLSSVTAADTAVYYCARGYNWNYFDYWGQGTLVTVSSTRIQNPDPAVYQLRDSKSSDKSVCLFTDFDSQTNVSQSKDSDVYITDKCVLDMRSMDFKSNSAVAWSNKSDFACANAFNNSIIPEDTFFPSPESSDSTDHVKPKETENTKQPSKSCHKPKAIVHTEKVNMMSLTVLGLRMLFAKTVAVNFLLTAKLFFLLTA

SEQ ID NO: 14776 - protein, 860 aa, synthetic construct
MALPVTALLLPLALLLHAARPEVQLVESGGGLVQPGGSLRLSCAASGFSFSDFWMSWVRQAPGKGLEWVATISQAGSEKDYVDSVKGRFTISRDNAKKSLYLQMNSLRAEDTAVYYCASGVYSFDYRGQGTLVTVSSGTGGGGSGGGGSGGGGSEFDDIVLTQSPASLAVSLGQSVTISCRASESVEYYGTSLMQWYQQKPGQPPKLLIYATSNVESGVPARFSGSGSGTDFSLNIHPVEEDDIAMYFCQQSRKLPSTFGGGTKLEIKLEDLKNVFPPEVAVFEPSEAEISHTQKATLVCLATGFYPDHVELSWWVNGKEVHSGVCTDPQPLKEQPALNDSRYCLSSRLRVSATFWQNPRNHFRCQVQFYGLSENDEWTQDRAKPVTQIVSAEAWGRADDVIKIHWQEKKSNTILGSQEGNTMKTNDTYMKFSWLTVPEKSLDKEHRCIVRHENNKNGVDQEIIFPPIKTDVITMDPKDNCSKDANDTLLLQLTNTSAYYMYLLLLLKSVVYFAIITCCLLMAMVKRKDSRGRAKRSGSGATNFSLLKQAGDVEENPGPTSMDWIWRILFLVGAATGAHSFEDVRLQESGPGQVKPSQTVSLTCSVTGYSITNGNHWWNWIRQVSGSKLEWIGYISSSGSTDSNPSLKSRISITRDTSKNQLFLQLNSVTTEDIATYYCARGYYFDYWGQGTTLTVSSTRIQNPDPAVYQLRDSKSSDKSVCLFTDFDSQTNVSQSKDSDVYITDKCVLDMRSMDFKSNSAVAWSNKSDFACANAFNNSIIPEDTFFPSPESSDSTDHVKPKETENTKQPSKSCHKPKAIVHTEKVNMMSLTVLGLRMLFAKTVAVNFLLTAKLFFLLTA

SEQ ID NO: 14777 - protein, 859 aa, synthetic construct
MALPVTALLLPLALLLHAARPEVQLVESGGGLVQPGGSLRLSCAASGFSFSDFWMSWVRQAPGKGLEWVATISQAGSEKDYVDSVKGRFTISRDNAKKSLYLQMNSLRAEDTAVYYCASGVYSFDYRGQGTLVTVSSGTGGGGSGGGGSGGGGSEFDIQMTQSPSSLSASVGDRVTITCRASQDVNTAVAWYQQKPGKAPKLLIYSASFLESGVPSRFSGSRSGTDFTLTISSLQPEDFATYYCQQHYTTPPTFGQTKVEIKRLEDLKNVFPPEVAVFEPSEAEISHTQKATLVCLATGFYPDHVELSWWVNGKEVHSGVCTDPQPLKEQPALNDSRYCLSSRLRVSATFWQNPRNHFRCQVQFYGLSENDEWTQDRAKPVTQIVSAEAWGRADDVIKIHWQEKKSNTILGSQEGNTMKTNDTYMKFSWLTVPEKSLDKEHRCIVRHENNKNGVDQEIIFPPIKTDVITMDPKDNCSKDANDTLLLQLTNTSAYYMYLLLLLKSVVYFAIITCCLLMAMVKRKDSRGRAKRSGSGATNFSLLKQAGDVEENPGPTSMDWIWRILFLVGAATGAHSFEEVQLVESGGGLVQPGGSLRLSCAASGFNIKDTYIHWVRQAPGKGLEWVARIYPTNGYTRYADSVKGRFTISADTSKNTAYLQMNSLRAEDTAVYYCSRWGGDGFYAMDVWGQGTLVTVSSTRIQNPDPAVYQLRDSKSSDKSVCLFTDFDSQTNVSQSKDSDVYITDKCVLDMRSMDFKSNSAVAWSNKSDFACANAFNNSIIPEDTFFPSPESSDSTDHVKPKETENTKQPSKSCHKPKAIVHTEKVNMMSLTVLGLRMLFAKTVAVNFLLTAKLFFLLTA

SEQ ID NO: 14778 - protein, 858 aa, synthetic construct
MALPVTALLLPLALLLHAARPEVQLVESGGGLVQPGGSLRLSCAASGFSFSDFWMSWVRQAPGKGLEWVATISQAGSEKDYVDSVKGRFTISRDNAKKSLYLQMNSLRAEDTAVYYCASGVYSFDYRGQGTLVTVSSGTGGGGSGGGGSGGGGSEFDQSVLTQPPSVSVAPGKTARIPCEGNYIGSSNVHWYQQKPGQAPVLVIHFDSDRPSGIPDRFSGSNSGNMATLTISRVEAGDEADYYCQVWENHGWVFGGGTKLTVLSLEDLKNVFPPEVAVFEPSEAEISHTQKATLVCLATGFYPDHVELSWWVNGKEVHSGVCTDPQPLKEQPALNDSRYCLSSRLRVSATFWQNPRNHFRCQVQFYGLSENDEWTQDRAKPVTQIVSAEAWGRADDVIKIHWQEKKSNTILGSQEGNTMKTNDTYMKFSWLTVPEKSLDKEHRCIVRHENNKNGVDQEIIFPPIKTDVITMDPKDNCSKDANDTLLLQLTNTSAYYMYLLLLLKSVVYFAIITCCLLMAMVKRKDSRGRAKRSGSGATNFSLLKQAGDVEENPGPTSMDWIWRILFLVGAATGAHSFEEVQLVETGGGLVQPGESLRLSCAASGFTFSDYEMNWVRQAPGKGLEWVSYISSSGSTIYYADSVKGRFTIYRDNAKNSLYLQMNSLRAEDTALYYCARAWGVGPPDYWGQGTLVTVSSTRIQNPDPAVYQLRDSKSSDKSVCLFTDFDSQTNVSQSKDSDVYITDKCVLDMRSMDFKSNSAVAWSNKSDFACANAFNNSIIPEDTFFPSPESSDSTDHVKPKETENTKQPSKSCHKPKAIVHTEKVNMMSLTVLGLRMLFAKTVAVNFLLTAKLFFLLTA

SEQ ID NO: 14779 - protein, 866 aa, synthetic construct
MALPVTALLLPLALLLHAARPEVQLVESGGGLVQPGGSLRLSCAASGFSFSDFWMSWVRQAPGKGLEWVATISQAGSEKDYVDSVKGRFTISRDNAKKSLYLQMNSLRAEDTAVYYCASGVYSFDYRGQGTLVTVSSGTGGGGSGGGGSGGGGSEFDIQMTQSPSSLSASVGDTVTITCQANGYLNWYQQRRGKAPKLLIYDGSKLERGVPSRFSGRRWGQEYNLTINNLQPEDIATYFCQVYEFVVPGTRLDLKRTVAAPLEDLKNVFPPEVAVFEPSEAEISHTQKATLVCLATGFYPDHVELSWWVNGKEVHSGVCTDPQPLKEQPALNDSRYCLSSRLRVSATFWQNPRNHFRCQVQFYGLSENDEWTQDRAKPVTQIVSAEAWGRADDVIKIHWQEKKSNTILGSQEGNTMKTNDTYMKFSWLTVPEKSLDKEHRCIVRHENNKNGVDQEIIFPPIKTDVITMDPKDNCSKDANDTLLLQLTNTSAYYMYLLLLLKSVVYFAIITCCLLMAMVKRKDSRGRAKRSGSGATNFSLLKQAGDVEENPGPTSMDWIWRILFLVGAATGAHSFEQVQLLQSGAAVTKPGASVRVSCEASGYNIRDYFIHWWRQAPGQGLQWVGWINPKTGQPNNPRQFQGRVSLTRHASWDFDTFSFYMDLKALRSDDTAVYFCARQRSDYWDFDVWGSGTQVTVSSASTKGPTRIQNPDPAVYQLRDSKSSDKSVCLFTDFDSQTNVSQSKDSDVYITDKCVLDMRSMDFKSNSAVAWSNKSDFACANAFNNSIIPEDTFFPSPESSDSTDHVKPKETENTKQPSKSCHKPKAIVHTEKVNMMSLTVLGLRMLFAKTVAVNFLLTAKLFFLLTA

SEQ ID NO: 14780 - protein, 872 aa, synthetic construct
MALPVTALLLPLALLLHAARPEVQLVESGGGLVQPGGSLRLSCAASGFSFSDFWMSWVRQAPGKGLEWVATISQAGSEKDYVDSVKGRFTISRDNAKKSLYLQMNSLRAEDTAVYYCASGVYSFDYRGQGTLVTVSSGTGGGGSGGGGSGGGGSEFQSALTQPPSASGSPGQSITISCTGTSNNFVSWYQQHAGKAPKLVIYDVNKRPSGVPDRFSGSKSGNTASLTVSGLQTDDEAVYYCGSLVGNWDVIFGGGTKLTVLLEDLKNVFPPEVAVFEPSEAEISHTQKATLVCLATGFYPDHVELSWWVNGKEVHSGVCTDPQPLKEQPALNDSRYCLSSRLRVSATFWQNPRNHFRCQVQFYGLSENDEWTQDRAKPVTQIVSAEAWGRADDVIKIHWQEKKSNTILGSQEGNTMKTNDTYMKFSWLTVPEKSLDKEHRCIVRHENNKNGVDQEIIFPPIKTDVITMDPKDNCSKDANDTLLLQLTNTSAYYMYLLLLLKSVVYFAIITCCLLMAMVKRKDSRGRAKRSGSGATNFSLLKQAGDVEENPGPTSMDWIWRILFLVGAATGAHSFEQPQLQESGPTLVEASETLSLTCAVSGDSTAACNSFWGWVRQPPGKGLEWVGSLSHCASYWNRGWTYHNPSLKSRLTLALDTPKNLVFLKLNSVTAADTATYYCARFGGEVLRYTDWPKPAWVDLWGRGTLVTVSSTRIQNPDPAVYQLRDSKSSDKSVCLFTDFDSQTNVSQSKDSDVYITDKCVLDMRSMDFKSNSAVAWSNKSDFACANAFNNSIIPEDTFFPSPESSDSTDHVKPKETENTKQPSKSCHKPKAIVHTEKVNMMSLTVLGLRMLFAKTVAVNFLLTAKLFFLLTA

SEQ ID NO: 14781 - protein, 857 aa, synthetic construct
MALPVTALLLPLALLLHAARPEVQLVESGGGLVQPGGSLRLSCAASGFSFSDFWMSWVRQAPGKGLEWVATISQAGSEKDYVDSVKGRFTISRDNAKKSLYLQMNSLRAEDTAVYYCASGVYSFDYRGQGTLVTVSSGTGGGGSGGGGSGGGGSEFEIVLTQSPGTLSLSPGETAIISCRTSQYGSLAWYQQRPGQAPRLVIYSGSTRAAGIPDRFSGSRWGPDYNLTISNLESGDFGVYYCQQYEFFGQGTKVQVDIKRLEDLKNVFPPEVAVFEPSEAEISHTQKATLVCLATGFYPDHVELSWWVNGKEVHSGVCTDPQPLKEQPALNDSRYCLSSRLRVSATFWQNPRNHFRCQVQFYGLSENDEWTQDRAKPVTQIVSAEAWGRADDVIKIHWQEKKSNTILGSQEGNTMKTNDTYMKFSWLTVPEKSLDKEHRCIVRHENNKNGVDQEIIFPPIKTDVITMDPKDNCSKDANDTLLLQLTNTSAYYMYLLLLLKSVVYFAIITCCLLMAMVKRKDSRGRAKRSGSGATNFSLLKQAGDVEENPGPTSMDWIWRILFLVGAATGAHSFEQVQLVQSGGQMKKPGESMRISCRASGYEFIDCTLNWIRLAPGKRPEWMGWLKPRGGAVNYARPLQGRVTMTRDVYSDTAFLELRSLTVDDTAVYFCTRGKNCDYNWDFEHWGRGTPVIVSSTRIQNPDPAVYQLRDSKSSDKSVCLFTDFDSQTNVSQSKDSDVYITDKCVLDMRSMDFKSNSAVAWSNKSDFACANAFNNSIIPEDTFFPSPESSDSTDHVKPKETENTKQPSKSCHKPKAIVHTEKVNMMSLTVLGLRMLFAKTVAVNFLLTAKLFFLLTA

SEQ ID NO: 14782 - protein, 867 aa, synthetic construct
MALPVTALLLPLALLLHAARPEVQLVESGGGLVQPGGSLRLSCAASGFSFSDFWMSWVRQAPGKGLEWVATISQAGSEKDYVDSVKGRFTISRDNAKKSLYLQMNSLRAEDTAVYYCASGVYSFDYRGQGTLVTVSSGTGGGGSGGGGSGGGGSEFELVLTQSPGTLSLSAGERATLSCRASQSVSSGSLAWYQQKPGQAPRLLIYGASTRATGIPDRFSGSGSGTDFTLTIGRLEPEDLAVYYCQQYGTSPYTFGQGTKLEILEDLKNVFPPEVAVFEPSEAEISHTQKATLVCLATGFYPDHVELSWWVNGKEVHSGVCTDPQPLKEQPALNDSRYCLSSRLRVSATFWQNPRNHFRCQVQFYGLSENDEWTQDRAKPVTQIVSAEAWGRADDVIKIHWQEKKSNTILGSQEGNTMKTNDTYMKFSWLTVPEKSLDKEHRCIVRHENNKNGVDQEIIFPPIKTDVITMDPKDNCSKDANDTLLLQLTNTSAYYMYLLLLLKSVVYFAIITCCLLMAMVKRKDSRGRAKRSGSGATNFSLLKQAGDVEENPGPTSMDWIWRILFLVGAATGAHSFELEQSGAEVKKPGSSVQVSCKASGGTFSMYGFNWVRQAPGHGLEWMGGIIPIFGTSNYAQKFRGRVTFTADQATSTAYMELTNLRSDDTAVYYCARDFGPDWEDGDSYDGSGRGFFDFWGQGTLVTVSSTRIQNPDPAVYQLRDSKSSDKSVCLFTDFDSQTNVSQSKDSDVYITDKCVLDMRSMDFKSNSAVAWSNKSDFACANAFNNSIIPEDTFFPSPESSDSTDHVKPKETENTKQPSKSCHKPKAIVHTEKVNMMSLTVLGLRMLFAKTVAVNFLLTAKLFFLLTA

SEQ ID NO: 14783 - protein, 847 aa, synthetic construct
MALPVTALLLPLALLLHAARPEVQLVESGGGLVQPGGSLRLSCAASGFSFSDFWMSWVRQAPGKGLEWVATISQAGSEKDYVDSVKGRFTISRDNAKKSLYLQMNSLRAEDTAVYYCASGVYSFDYRGQGTLVTVSSGTGGGGSGGGGSGGGGSEFDIQMTQSPSSLSASVGDRVTITCQASQDINNYLNWYQQKPGKAPKLLIYDASNLQTGVPSRFSGSGSGTDFTFTIEDIATYYCQQYTFGPGTKVDIKLEDLKNVFPPEVAVFEPSEAEISHTQKATLVCLATGFYPDHVELSWWVNGKEVHSGVCTDPQPLKEQPALNDSRYCLSSRLRVSATFWQNPRNHFRCQVQFYGLSENDEWTQDRAKPVTQIVSAEAWGRADDVIKIHWQEKKSNTILGSQEGNTMKTNDTYMKFSWLTVPEKSLDKEHRCIVRHENNKNGVDQEIIFPPIKTDVITMDPKDNCSKDANDTLLLQLTNTSAYYMYLLLLLKSVVYFAIITCCLLMAMVKRKDSRGRAKRSGSGATNFSLLKQAGDVEENPGPTSMDWIWRILFLVGAATGAHSFEEVQLLESGGGLVQPGGSLRLSCAASGFTFSWYSMTWVRQAPGKGLEWVSSIVPWGDFTQYADSVKGRFTISRDNSKNTLYLQMNSLRAEDTAVYYCAKGPGWGSFDLWGRGTLVTVSSTRIQNPDPAVYQLRDSKSSDKSVCLFTDFDSQTNVSQSKDSDVYITDKCVLDMRSMDFKSNSAVAWSNKSDFACANAFNNSIIPEDTFFPSPESSDSTDHVKPKETENTKQPSKSCHKPKAIVHTEKVNMMSLTVLGLRMLFAKTVAVNFLLTAKLFFLLTA

SEQ ID NO: 14784 - protein, 857 aa, synthetic construct
MALPVTALLLPLALLLHAARPEVQLVESGGGLVQPGGSLRLSCAASGFSFSDFWMSWVRQAPGKGLEWVATISQAGSEKDYVDSVKGRFTISRDNAKKSLYLQMNSLRAEDTAVYYCASGVYSFDYRGQGTLVTVSSGTGGGGSGGGGSGGGGSEFDIQMTQSPSSLSASVGDRVTITCTASLSVSSTYLHWYQQKPGSSPKLWIYSTSNLASGVPSRFSGSGSGTSYTLTISSLQPEDFATYYCHQYHRSPLTFGGGTKVEIKRLEDLKNVFPPEVAVFEPSEAEISHTQKATLVCLATGFYPDHVELSWWVNGKEVHSGVCTDPQPLKEQPALNDSRYCLSSRLRVSATFWQNPRNHFRCQVQFYGLSENDEWTQDRAKPVTQIVSAEAWGRADDVIKIHWQEKKSNTILGSQEGNTMKTNDTYMKFSWLTVPEKSLDKEHRCIVRHENNKNGVDQEIIFPPIKTDVITMDPKDNCSKDANDTLLLQLTNTSAYYMYLLLLLKSVVYFAIITCCLLMAMVKRKDSRGRAKRSGSGATNFSLLKQAGDVEENPGPTSMDWIWRILFLVGAATGAHSFEEVQLVESGGGLVQPGGSLRLSCAASGFSLTKYGVHWVRQAPGKGLEWVGVKWAGGSTDYNSALMSRFTISKDNAKNSLYLQMNSLRAEDTAVYYCARDHRDAMDYWGQGTLVTVSSTRIQNPDPAVYQLRDSKSSDKSVCLFTDFDSQTNVSQSKDSDVYITDKCVLDMRSMDFKSNSAVAWSNKSDFACANAFNNSIIPEDTFFPSPESSDSTDHVKPKETENTKQPSKSCHKPKAIVHTEKVNMMSLTVLGLRMLFAKTVAVNFLLTAKLFFLLTA

SEQ ID NO: 14785 - protein, 861 aa, synthetic construct
MALPVTALLLPLALLLHAARPEVQLVESGGGLVQPGGSLRLSCAASGFSFSDFWMSWVRQAPGKGLEWVATISQAGSEKDYVDSVKGRFTISRDNAKKSLYLQMNSLRAEDTAVYYCASGVYSFDYRGQGTLVTVSSGTGGGGSGGGGSGGGGSEFDIQMTQSPSSLSASVGDRVTITCKASQDVGTAVAWYQQKPGKAPKLLIYSASYRSTGVPSRFSGSGSGTDFTLTISSLQPEDFATYYCQHHYSAPWTFGGGTKVEIKLEDLKNVFPPEVAVFEPSEAEISHTQKATLVCLATGFYPDHVELSWWVNGKEVHSGVCTDPQPLKEQPALNDSRYCLSSRLRVSATFWQNPRNHFRCQVQFYGLSENDEWTQDRAKPVTQIVSAEAWGRADDVIKIHWQEKKSNTILGSQEGNTMKTNDTYMKFSWLTVPEKSLDKEHRCIVRHENNKNGVDQEIIFPPIKTDVITMDPKDNCSKDANDTLLLQLTNTSAYYMYLLLLLKSVVYFAIITCCLLMAMVKRKDSRGRAKRSGSGATNFSLLKQAGDVEENPGPTSMDWIWRILFLVGAATGAHSFEEVQLVESGGGLVQPGGSLRLSCAASGFTFSRNGMSWVRQAPGKGLEWVATVSSGGSYIYYADSVKGRFTISRDNAKNSLYLQMNSLRAEDTAVYYCARQGTTALATRFFDVWGQGTLVTVSSTRIQNPDPAVYQLRDSKSSDKSVCLFTDFDSQTNVSQSKDSDVYITDKCVLDMRSMDFKSNSAVAWSNKSDFACANAFNNSIIPEDTFFPSPESSDSTDHVKPKETENTKQPSKSCHKPKAIVHTEKVNMMSLTVLGLRMLFAKTVAVNFLLTAKLFFLLTA

SEQ ID NO: 14786 - protein, 857 aa, synthetic construct
MALPVTALLLPLALLLHAARPEVQLVESGGGLVQPGGSLRLSCAASGFSFSDFWMSWVRQAPGKGLEWVATISQAGSEKDYVDSVKGRFTISRDNAKKSLYLQMNSLRAEDTAVYYCASGVYSFDYRGQGTLVTVSSGTGGGGSGGGGSGGGGSEFDIQMTQSPPSLSASVGGKVTITCKASQDIDRYMAWYQDKPGKGPKLLIHDTSTLQPGIPSRFSGSGSGRDYSFSISNLEPEDIATYYCLQYDNLWTFGGGTKLEIKRLEDLKNVFPPEVAVFEPSEAEISHTQKATLVCLATGFYPDHVELSWWVNGKEVHSGVCTDPQPLKEQPALNDSRYCLSSRLRVSATFWQNPRNHFRCQVQFYGLSENDEWTQDRAKPVTQIVSAEAWGRADDVIKIHWQEKKSNTILGSQEGNTMKTNDTYMKFSWLTVPEKSLDKEHRCIVRHENNKNGVDQEIIFPPIKTDVITMDPKDNCSKDANDTLLLQLTNTSAYYMYLLLLLKSVVYFAIITCCLLMAMVKRKDSRGRAKRSGSGATNFSLLKQAGDVEENPGPTSMDWIWRILFLVGAATGAHSFEQVQLVQSGAELVKPGASVKMSCKASGYIFTNYNIHWVKKSPGQGLEWIGAIYPGNGDAPYSQKFQDRATLTADTSSSTTYMELSSLTSEDSAVYYCVRANWDVAFAYWGQGTLVSVSSTRIQNPDPAVYQLRDSKSSDKSVCLFTDFDSQTNVSQSKDSDVYITDKCVLDMRSMDFKSNSAVAWSNKSDFACANAFNNSIIPEDTFFPSPESSDSTDHVKPKETENTKQPSKSCHKPKAIVHTEKVNMMSLTVLGLRMLFAKTVAVNFLLTAKLFFLLTA

SEQ ID NO: 14787 - protein, 858 aa, synthetic construct
MALPVTALLLPLALLLHAARPEVQLVESGGGLVQPGGSLRLSCAASGFSFSDFWMSWVRQAPGKGLEWVATISQAGSEKDYVDSVKGRFTISRDNAKKSLYLQMNSLRAEDTAVYYCASGVYSFDYRGQGTLVTVSSGTGGGGSGGGGSGGGGSEFDIQMTQSPASLSASVGETVTITCRVSGNIHNYLAWYQQKQGKSPQLLVYNAKTLADGVPSRFSGSGSGTQYSLKINSLQPEDFGSYYCQHFWSNPYTFGGGTKLEIKLEDLKNVFPPEVAVFEPSEAEISHTQKATLVCLATGFYPDHVELSWWVNGKEVHSGVCTDPQPLKEQPALNDSRYCLSSRLRVSATFWQNPRNHFRCQVQFYGLSENDEWTQDRAKPVTQIVSAEAWGRADDVIKIHWQEKKSNTILGSQEGNTMKTNDTYMKFSWLTVPEKSLDKEHRCIVRHENNKNGVDQEIIFPPIKTDVITMDPKDNCSKDANDTLLLQLTNTSAYYMYLLLLLKSVVYFAIITCCLLMAMVKRKDSRGRAKRSGSGATNFSLLKQAGDVEENPGPTSMDWIWRILFLVGAATGAHSFEQVQLQQSGASVKVSCKASELVRPGTGYAFTNYLIEWVKQRPGQGLEWIGVINPGSGGTNYNEKFKGKATLTADKSSSTAYMQLSSLTSDDSAVYFCARYRSYDWYFDVWGAGTTVTVSSTRIQNPDPAVYQLRDSKSSDKSVCLFTDFDSQTNVSQSKDSDVYITDKCVLDMRSMDFKSNSAVAWSNKSDFACANAFNNSIIPEDTFFPSPESSDSTDHVKPKETENTKQPSKSCHKPKAIVHTEKVNMMSLTVLGLRMLFAKTVAVNFLLTAKLFFLLTA

SEQ ID NO: 14788 - protein, 857 aa, synthetic construct
MALPVTALLLPLALLLHAARPEVQLVESGGGLVQPGGSLRLSCAASGFSFSDFWMSWVRQAPGKGLEWVATISQAGSEKDYVDSVKGRFTISRDNAKKSLYLQMNSLRAEDTAVYYCASGVYSFDYRGQGTLVTVSSGTGGGGSGGGGSGGGGSEFDIQMTQSFSSLSASVGDRVTITCRASQDISNYLNWYQQKPGKAPKLLIYYTSRLHSGVPSRFSGSGSGTDYTLTISSLQPEDFATYFCQQGNTLPWTFGGGTKLEIKRLEDLKNVFPPEVAVFEPSEAEISHTQKATLVCLATGFYPDHVELSWWVNGKEVHSGVCTDPQPLKEQPALNDSRYCLSSRLRVSATFWQNPRNHFRCQVQFYGLSENDEWTQDRAKPVTQIVSAEAWGRADDVIKIHWQEKKSNTILGSQEGNTMKTNDTYMKFSWLTVPEKSLDKEHRCIVRHENNKNGVDQEIIFPPIKTDVITMDPKDNCSKDANDTLLLQLTNTSAYYMYLLLLLKSVVYFAIITCCLLMAMVKRKDSRGRAKRSGSGATNFSLLKQAGDVEENPGPTSMDWIWRILFLVGAATGAHSFEEVQLVQSGGGLVQSGGSLRLSCRASGYTFTRYWMLWVRQRPGKGLEWVAEINPRNDRTNYNEKFKTRFTISVDRSKNTLYLQMDSLRAEDTAVYFCALGGGYAMDYWGQGTLVTVSSTRIQNPDPAVYQLRDSKSSDKSVCLFTDFDSQTNVSQSKDSDVYITDKCVLDMRSMDFKSNSAVAWSNKSDFACANAFNNSIIPEDTFFPSPESSDSTDHVKPKETENTKQPSKSCHKPKAIVHTEKVNMMSLTVLGLRMLFAKTVAVNFLLTAKLFFLLTA

SEQ ID NO: 14789 - protein, 858 aa, synthetic construct
MALPVTALLLPLALLLHAARPEVQLVESGGGLVQPGGSLRLSCAASGFSFSDFWMSWVRQAPGKGLEWVATISQAGSEKDYVDSVKGRFTISRDNAKKSLYLQMNSLRAEDTAVYYCASGVYSFDYRGQGTLVTVSSGTGGGGSGGGGSGGGGSEFDIQMTQSPASLSASVGETVTIICRASVNIYSYLAWYQQKQGKSPQLLVYNAKILAEGVPSRFSGSGSGTQFSLKINSLQPEDFGSYYCQHHYGTFTFGSGTKLEIKRLEDLKNVFPPEVAVFEPSEAEISHTQKATLVCLATGFYPDHVELSWWVNGKEVHSGVCTDPQPLKEQPALNDSRYCLSSRLRVSATFWQNPRNHFRCQVQFYGLSENDEWTQDRAKPVTQIVSAEAWGRADDVIKIHWQEKKSNTILGSQEGNTMKTNDTYMKFSWLTVPEKSLDKEHRCIVRHENNKNGVDQEIIFPPIKTDVITMDPKDNCSKDANDTLLLQLTNTSAYYMYLLLLLKSVVYFAIITCCLLMAMVKRKDSRGRAKRSGSGATNFSLLKQAGDVEENPGPTSMDWIWRILFLVGAATGAHSFEQVQLKESGPGLVAPSQSLSITCTISGFSLTSYGVHWVRQPPGKGLEWLVVIWSDGSTTYNSALKSRLSISKDNSKSQVFLKMNSLQTDDTAIYYCASHYGSTLAFASWGHGTLVTVSAATRIQNPDPAVYQLRDSKSSDKSVCLFTDFDSQTNVSQSKDSDVYITDKCVLDMRSMDFKSNSAVAWSNKSDFACANAFNNSIIPEDTFFPSPESSDSTDHVKPKETENTKQPSKSCHKPKAIVHTEKVNMMSLTVLGLRMLFAKTVAVNFLLTAKLFFLLTA

SEQ ID NO: 14790 - protein, 866 aa, synthetic construct
MALPVTALLLPLALLLHAARPEVQLVESGGGLVQPGGSLRLSCAASGFSFSDFWMSWVRQAPGKGLEWVATISQAGSEKDYVDSVKGRFTISRDNAKKSLYLQMNSLRAEDTAVYYCASGVYSFDYRGQGTLVTVSSGTGGGGSGGGGSGGGGSEFDIVMTQSHKFMSTSVGDRVSVTCKASQNVGNNVAWYQQKPGQSPKVLIYSASYRYSGVPDRFTGSGSGTDFTLTISNVQSEDLAEYFCQQYNTYPFTFGSGTKLEIKLEDLKNVFPPEVAVFEPSEAEISHTQKATLVCLATGFYPDHVELSWWVNGKEVHSGVCTDPQPLKEQPALNDSRYCLSSRLRVSATFWQNPRNHFRCQVQFYGLSENDEWTQDRAKPVTQIVSAEAWGRADDVIKIHWQEKKSNTILGSQEGNTMKTNDTYMKFSWLTVPEKSLDKEHRCIVRHENNKNGVDQEIIFPPIKTDVITMDPKDNCSKDANDTLLLQLTNTSAYYMYLLLLLKSVVYFAIITCCLLMAMVKRKDSRGRAKRSGSGATNFSLLKQAGDVEENPGPTSMDWIWRILFLVGAATGAHSFEEVQLEESGGGLVQPGGSMKLSCVASGFTFSNYWMNWVRQSPEKGLEWVAEIRFKSHNYATHFAESVKGRFTISRDDSKSSVYLQMNNLRAEDTGIYYCTRRIGNSDYDWWYFDVWGAGTSVTVSSASTRIQNPDPAVYQLRDSKSSDKSVCLFTDFDSQTNVSQSKDSDVYITDKCVLDMRSMDFKSNSAVAWSNKSDFACANAFNNSIIPEDTFFPSPESSDSTDHVKPKETENTKQPSKSCHKPKAIVHTEKVNMMSLTVLGLRMLFAKTVAVNFLLTAKLFFLLTA

SEQ ID NO: 14791 - protein, 859 aa, synthetic construct
MALPVTALLLPLALLLHAARPEVQLVESGGGLVQPGGSLRLSCAASGFSFSDFWMSWVRQAPGKGLEWVATISQAGSEKDYVDSVKGRFTISRDNAKKSLYLQMNSLRAEDTAVYYCASGVYSFDYRGQGTLVTVSSGTGGGGSGGGGSGGGGSEFDQIVLTQSPAIMSASPGEKVTISCSASSSVSYMYWYQQKPGSSPKPWIYRTSNLASGVPARFSGSGSGTSYSLTISNMEAEDAAAYYCQQYHSYPTTFGGGTKLEVKLEDLKNVFPPEVAVFEPSEAEISHTQKATLVCLATGFYPDHVELSWWVNGKEVHSGVCTDPQPLKEQPALNDSRYCLSSRLRVSATFWQNPRNHFRCQVQFYGLSENDEWTQDRAKPVTQIVSAEAWGRADDVIKIHWQEKKSNTILGSQEGNTMKTNDTYMKFSWLTVPEKSLDKEHRCIVRHENNKNGVDQEIIFPPIKTDVITMDPKDNCSKDANDTLLLQLTNTSAYYMYLLLLLKSVVYFAIITCCLLMAMVKRKDSRGRAKRSGSGATNFSLLKQAGDVEENPGPTSMDWIWRILFLVGAATGAHSFEEVQLVESGGGLVQPKGSLKLSCAASGFSFNTYAMNWVRQAPGKGLEWIAHIRSKSNNFATYYADSVKDRFSISRDASENILFLQMNNLKTEDTAMYYCVRQGGDFPMDYWGQGTSVTVSSTRIQNPDPAVYQLRDSKSSDKSVCLFTDFDSQTNVSQSKDSDVYITDKCVLDMRSMDFKSNSAVAWSNKSDFACANAFNNSIIPEDTFFPSPESSDSTDHVKPKETENTKQPSKSCHKPKAIVHTEKVNMMSLTVLGLRMLFAKTVAVNFLLTAKLFFLLTA

SEQ ID NO: 14792 - protein, 858 aa, synthetic construct
MALPVTALLLPLALLLHAARPEVQLVESGGGLVQPGGSLRLSCAASGFSFSDFWMSWVRQAPGKGLEWVATISQAGSEKDYVDSVKGRFTISRDNAKKSLYLQMNSLRAEDTAVYYCASGVYSFDYRGQGTLVTVSSGTGGGGSGGGGSGGGGSEFDDIQMTQSSSSFSVSLGDRVTITCMASEDIYIRLAWYQQKPGNAPRLLISAATSLETGVPSRFSGSGSGKDYTLSITSLQTEDVGTYYCQQYWSSPWTFGGGTKLEINLEDLKNVFPPEVAVFEPSEAEISHTQKATLVCLATGFYPDHVELSWWVNGKEVHSGVCTDPQPLKEQPALNDSRYCLSSRLRVSATFWQNPRNHFRCQVQFYGLSENDEWTQDRAKPVTQIVSAEAWGRADDVIKIHWQEKKSNTILGSQEGNTMKTNDTYMKFSWLTVPEKSLDKEHRCIVRHENNKNGVDQEIIFPPIKTDVITMDPKDNCSKDANDTLLLQLTNTSAYYMYLLLLLKSVVYFAIITCCLLMAMVKRKDSRGRAKRSGSGATNFSLLKQAGDVEENPGPTSMDWIWRILFLVGAATGAHSFEDVQLQESGPGLVKPSQSLSLTCTVTGYSITSDYTWNWIRQFPGNKLEWMGYITYSGSTSYNPSLKSRNSITRDTSKNQFFLQLNSVTTEDTATYYCARLGRRYTMDYWGQGTSVTVSSTRIQNPDPAVYQLRDSKSSDKSVCLFTDFDSQTNVSQSKDSDVYITDKCVLDMRSMDFKSNSAVAWSNKSDFACANAFNNSIIPEDTFFPSPESSDSTDHVKPKETENTKQPSKSCHKPKAIVHTEKVNMMSLTVLGLRMLFAKTVAVNFLLTAKLFFLLTA

SEQ ID NO: 14793 - protein, 861 aa, synthetic construct
MALPVTALLLPLALLLHAARPEVQLVESGGGLVQPGGSLRLSCAASGFSFSDFWMSWVRQAPGKGLEWVATISQAGSEKDYVDSVKGRFTISRDNAKKSLYLQMNSLRAEDTAVYYCASGVYSFDYRGQGTLVTVSSGTGGGGSGGGGSGGGGSEFDDIQMTQSPSSLSASVGDRVTITCRASQSISSYLNWYQQKPGKAPKLLIYDASNLETGVPSRFSGSGSGTDFTFTISSLQPEDIATYYCQQYDNLPLTFGGGTKVDIKRLEDLKNVFPPEVAVFEPSEAEISHTQKATLVCLATGFYPDHVELSWWVNGKEVHSGVCTDPQPLKEQPALNDSRYCLSSRLRVSATFWQNPRNHFRCQVQFYGLSENDEWTQDRAKPVTQIVSAEAWGRADDVIKIHWQEKKSNTILGSQEGNTMKTNDTYMKFSWLTVPEKSLDKEHRCIVRHENNKNGVDQEIIFPPIKTDVITMDPKDNCSKDANDTLLLQLTNTSAYYMYLLLLLKSVVYFAIITCCLLMAMVKRKDSRGRAKRSGSGATNFSLLKQAGDVEENPGPTSMDWIWRILFLVGAATGAHSFEQVQLVESGGGVVQPGRSLRLSCAASGFTFSSYAMHWVRQAPGKGLEWVAVISYDGSNKYYADSVKGRFTISRDNSKNTLYLQMNSLRAEDTAVYYCARAHNSSSWSFDYWGQGTLVTVSSTRIQNPDPAVYQLRDSKSSDKSVCLFTDFDSQTNVSQSKDSDVYITDKCVLDMRSMDFKSNSAVAWSNKSDFACANAFNNSIIPEDTFFPSPESSDSTDHVKPKETENTKQPSKSCHKPKAIVHTEKVNMMSLTVLGLRMLFAKTVAVNFLLTAKLFFLLTA

SEQ ID NO: 14794 - protein, 870 aa, synthetic construct
MALPVTALLLPLALLLHAARPEVQLVESGGGLVQPGGSLRLSCAASGFSFSDFWMSWVRQAPGKGLEWVATISQAGSEKDYVDSVKGRFTISRDNAKKSLYLQMNSLRAEDTAVYYCASGVYSFDYRGQGTLVTVSSGTGGGGSGGGGSGGGGSEFDDVVMTQSPLSLPVSLGDQASISCRSSQRLVHSNGNTYLHWYLQKPGQSPKLLIYRVSNRFPGVPDRFSGSGSGTDFTLKISRVEAEDLGIYFCSQSTHVPYTFGGGTKLEIKRLEDLKNVFPPEVAVFEPSEAEISHTQKATLVCLATGFYPDHVELSWWVNGKEVHSGVCTDPQPLKEQPALNDSRYCLSSRLRVSATFWQNPRNHFRCQVQFYGLSENDEWTQDRAKPVTQIVSAEAWGRADDVIKIHWQEKKSNTILGSQEGNTMKTNDTYMKFSWLTVPEKSLDKEHRCIVRHENNKNGVDQEIIFPPIKTDVITMDPKDNCSKDANDTLLLQLTNTSAYYMYLLLLLKSVVYFAIITCCLLMAMVKRKDSRGRAKRSGSGATNFSLLKQAGDVEENPGPTSMDWIWRILFLVGAATGAHSFEEVRLQQSGPDLIKPGASVKMSCKASGYTFTGYVMHWVKQRPGQGLEWIGFINPYNDDIQSNERFRGKATLTSDKSSTTAYMELSSLTSEDSAVYYCARGAGYNFDGAYRFFDFWGQGTTLTVSSTRIQNPDPAVYQLRDSKSSDKSVCLFTDFDSQTNVSQSKDSDVYITDKCVLDMRSMDFKSNSAVAWSNKSDFACANAFNNSIIPEDTFFPSPESSDSTDHVKPKETENTKQPSKSCHKPKAIVHTEKVNMMSLTVLGLRMLFAKTVAVNFLLTAKLFFLLTA

SEQ ID NO: 14795 - protein, 861 aa, synthetic construct
MALPVTALLLPLALLLHAARPEVQLVESGGGLVQPGGSLRLSCAASGFSFSDFWMSWVRQAPGKGLEWVATISQAGSEKDYVDSVKGRFTISRDNAKKSLYLQMNSLRAEDTAVYYCASGVYSFDYRGQGTLVTVSSGTGGGGSGGGGSGGGGSEFDSYELTQPPSVSVSPGQTATISCSGDQLGGKYGHWYQKKPGQSPVLVLYQDRKRPAGIPERFSGSSSGNTITLTISGTQAVDEADYYCQAWDTNLGGVFGGGTKVTVLGQLEDLKNVFPPEVAVFEPSEAEISHTQKATLVCLATGFYPDHVELSWWVNGKEVHSGVCTDPQPLKEQPALNDSRYCLSSRLRVSATFWQNPRNHFRCQVQFYGLSENDEWTQDRAKPVTQIVSAEAWGRADDVIKIHWQEKKSNTILGSQEGNTMKTNDTYMKFSWLTVPEKSLDKEHRCIVRHENNKNGVDQEIIFPPIKTDVITMDPKDNCSKDANDTLLLQLTNTSAYYMYLLLLLKSVVYFAIITCCLLMAMVKRKDSRGRAKRSGSGATNFSLLKQAGDVEENPGPTSMDWIWRILFLVGAATGAHSFEQVQLVESGAEVKKPGASVKVSCKASGYTFTGYYMHWVRQAPGQGLEWMGRINPNSGGTNYAQKFQGRVTMTRDTSISTAYMELSRLRSDDTAVYYCASPRGRGSAFDIWGQGTLVTVSSTRIQNPDPAVYQLRDSKSSDKSVCLFTDFDSQTNVSQSKDSDVYITDKCVLDMRSMDFKSNSAVAWSNKSDFACANAFNNSIIPEDTFFPSPESSDSTDHVKPKETENTKQPSKSCHKPKAIVHTEKVNMMSLTVLGLRMLFAKTVAVNFLLTAKLFFLLTA

SEQ ID NO: 14796 - protein, 864 aa, synthetic construct
MALPVTALLLPLALLLHAARPEVQLVESGGGLVQPGGSLRLSCAASGFSFSDFWMSWVRQAPGKGLEWVATISQAGSEKDYVDSVKGRFTISRDNAKKSLYLQMNSLRAEDTAVYYCASGVYSFDYRGQGTLVTVSSGTGGGGSGGGGSGGGGSEFDNFMLTQPHSVSESPGKTVTISCTRSSGSIASKYVQWYQQRPGSSPTTVIYEDNQRPSGVPDRFSGSIDTSSNSASLTISGLRTEDEADYYCHSYDSNNHSVFGGGTKVTVLGQLEDLKNVFPPEVAVFEPSEAEISHTQKATLVCLATGFYPDHVELSWWVNGKEVHSGVCTDPQPLKEQPALNDSRYCLSSRLRVSATFWQNPRNHFRCQVQFYGLSENDEWTQDRAKPVTQIVSAEAWGRADDVIKIHWQEKKSNTILGSQEGNTMKTNDTYMKFSWLTVPEKSLDKEHRCIVRHENNKNGVDQEIIFPPIKTDVITMDPKDNCSKDANDTLLLQLTNTSAYYMYLLLLLKSVVYFAIITCCLLMAMVKRKDSRGRAKRSGSGATNFSLLKQAGDVEENPGPTSMDWIWRILFLVGAATGAHSFEEVQLVESGGGVVQPGGSLRLSCAASGFTFSSYAMSWVRQAPGKGLEWVSAISGSGGSTYYADSVKGRFSISRDNSKNTLYLQMNSLRAEDTAVYYCARTRSSGAFDIWGQGTLVTVSSTRIQNPDPAVYQLRDSKSSDKSVCLFTDFDSQTNVSQSKDSDVYITDKCVLDMRSMDFKSNSAVAWSNKSDFACANAFNNSIIPEDTFFPSPESSDSTDHVKPKETENTKQPSKSCHKPKAIVHTEKVNMMSLTVLGLRMLFAKTVAVNFLLTAKLFFLLTA

SEQ ID NO: 14797 - protein, 859 aa, synthetic construct
MALPVTALLLPLALLLHAARPEVQLVESGGGLVQPGGSLRLSCAASGFSFSDFWMSWVRQAPGKGLEWVATISQAGSEKDYVDSVKGRFTISRDNAKKSLYLQMNSLRAEDTAVYYCASGVYSFDYRGQGTLVTVSSGTGGGGSGGGGSGGGGSEFDIQMNQSPSSLSASLGDTITITCHASQNINVWLSWYQQKPGNIPKLLIYKASNLHTGVPSRFSGSGSGTGFTITISSLQPEDIATYYCQQGQSYPWTFGGGTKLEIKRLEDLKNVFPPEVAVFEPSEAEISHTQKATLVCLATGFYPDHVELSWWVNGKEVHSGVCTDPQPLKEQPALNDSRYCLSSRLRVSATFWQNPRNHFRCQVQFYGLSENDEWTQDRAKPVTQIVSAEAWGRADDVIKIHWQEKKSNTILGSQEGNTMKTNDTYMKFSWLTVPEKSLDKEHRCIVRHENNKNGVDQEIIFPPIKTDVITMDPKDNCSKDANDTLLLQLTNTSAYYMYLLLLLKSVVYFAIITCCLLMAMVKRKDSRGRAKRSGSGATNFSLLKQAGDVEENPGPTSMDWIWRILFLVGAATGAHSFEEVQLQQSGPELVKPGASVKISCKASGYSFTGYFMNWVKQSHGKSLEYIGRFNPYNGETLYNQKFKGKATLTVDKSSSTVHMELLSVTSEDSAVYYCGRSGNDDAMDYWGQGTSVTVSSATRIQNPDPAVYQLRDSKSSDKSVCLFTDFDSQTNVSQSKDSDVYITDKCVLDMRSMDFKSNSAVAWSNKSDFACANAFNNSIIPEDTFFPSPESSDSTDHVKPKETENTKQPSKSCHKPKAIVHTEKVNMMSLTVLGLRMLFAKTVAVNFLLTAKLFFLLTA

SEQ ID NO: 14798 - protein, 860 aa, synthetic construct
MALPVTALLLPLALLLHAARPEVQLVESGGGLVQPGGSLRLSCAASGFSFSDFWMSWVRQAPGKGLEWVATISQAGSEKDYVDSVKGRFTISRDNAKKSLYLQMNSLRAEDTAVYYCASGVYSFDYRGQGTLVTVSSGTGGGGSGGGGSGGGGSEFEIVLTQSPATLSLSPGERATLSCRASQSVRSYLAWYQQKPGQAPRLLIYDASNRATGIPARFSGSGSGTDFTLTISSLEPEDFAVYYCQQRSNWPPTFGQGTKVEIKLEDLKNVFPPEVAVFEPSEAEISHTQKATLVCLATGFYPDHVELSWWVNGKEVHSGVCTDPQPLKEQPALNDSRYCLSSRLRVSATFWQNPRNHFRCQVQFYGLSENDEWTQDRAKPVTQIVSAEAWGRADDVIKIHWQEKKSNTILGSQEGNTMKTNDTYMKFSWLTVPEKSLDKEHRCIVRHENNKNGVDQEIIFPPIKTDVITMDPKDNCSKDANDTLLLQLTNTSAYYMYLLLLLKSVVYFAIITCCLLMAMVKRKDSRGRAKRSGSGATNFSLLKQAGDVEENPGPTSMDWIWRILFLVGAATGAHSFEQLQVQESGPGLVKPSETLSLTCTVSGGSISNSYFSWGWIRQPPGKGLEWIGSFYYGEKTYYNPSLKSRATISIDTSKSQFSLKLSSVTAADTAVYYCPRGPTMIRGVIDSWGQGTLVTVSSTRIQNPDPAVYQLRDSKSSDKSVCLFTDFDSQTNVSQSKDSDVYITDKCVLDMRSMDFKSNSAVAWSNKSDFACANAFNNSIIPEDTFFPSPESSDSTDHVKPKETENTKQPSKSCHKPKAIVHTEKVNMMSLTVLGLRMLFAKTVAVNFLLTAKLFFLLTA

SEQ ID NO: 14799 - protein, 869 aa, synthetic construct
MALPVTALLLPLALLLHAARPEVQLVESGGGLVQPGGSLRLSCAASGFSFSDFWMSWVRQAPGKGLEWVATISQAGSEKDYVDSVKGRFTISRDNAKKSLYLQMNSLRAEDTAVYYCASGVYSFDYRGQGTLVTVSSGTGGGGSGGGGSGGGGSEFDIVMTQTPLSLPVTPGEPASISCRSSRSLLDSDDGNTYLDWYLQKPGQSPQLLIYTLSYRASGVPDRFSGSGSGTDFTLKISRVEAEDVGVYYCMQRVEFPITFGQGTRLEIKRLEDLKNVFPPEVAVFEPSEAEISHTQKATLVCLATGFYPDHVELSWWVNGKEVHSGVCTDPQPLKEQPALNDSRYCLSSRLRVSATFWQNPRNHFRCQVQFYGLSENDEWTQDRAKPVTQIVSAEAWGRADDVIKIHWQEKKSNTILGSQEGNTMKTNDTYMKFSWLTVPEKSLDKEHRCIVRHENNKNGVDQEIIFPPIKTDVITMDPKDNCSKDANDTLLLQLTNTSAYYMYLLLLLKSVVYFAIITCCLLMAMVKRKDSRGRAKRSGSGATNFSLLKQAGDVEENPGPTSMDWIWRILFLVGAATGAHSFEQVQLVESGGGVVQPGRSLRLSCAASGFIFSRYGMHWVRQAPGKGLKWVAVIWYDGSNKLYADSVKGRFTISRDNSKNTLYLQMNSLRAEDTAVYYCARDYYDNSRHHWGFDYWGQGTLVTVSSTRIQNPDPAVYQLRDSKSSDKSVCLFTDFDSQTNVSQSKDSDVYITDKCVLDMRSMDFKSNSAVAWSNKSDFACANAFNNSIIPEDTFFPSPESSDSTDHVKPKETENTKQPSKSCHKPKAIVHTEKVNMMSLTVLGLRMLFAKTVAVNFLLTAKLFFLLTA

SEQ ID NO: 14800 - protein, 859 aa, synthetic construct
MALPVTALLLPLALLLHAARPEVQLVESGGGLVQPGGSLRLSCAASGFSFSDFWMSWVRQAPGKGLEWVATISQAGSEKDYVDSVKGRFTISRDNAKKSLYLQMNSLRAEDTAVYYCASGVYSFDYRGQGTLVTVSSGTGGGGSGGGGSGGGGSEFEIQMTQSPSSMSASLGDTITITCQATQDIFKNLNWYQQKPGKPPSLLIYYATELAEGVPSRFSGSGSGSDYSLTISNLESEDFAAYYCLQFFEFPFTFGSGTKLEMKLEDLKNVFPPEVAVFEPSEAEISHTQKATLVCLATGFYPDHVELSWWVNGKEVHSGVCTDPQPLKEQPALNDSRYCLSSRLRVSATFWQNPRNHFRCQVQFYGLSENDEWTQDRAKPVTQIVSAEAWGRADDVIKIHWQEKKSNTILGSQEGNTMKTNDTYMKFSWLTVPEKSLDKEHRCIVRHENNKNGVDQEIIFPPIKTDVITMDPKDNCSKDANDTLLLQLTNTSAYYMYLLLLLKSVVYFAIITCCLLMAMVKRKDSRGRAKRSGSGATNFSLLKQAGDVEENPGPTSMDWIWRILFLVGAATGAHSFEQVQLQQSGAELVRPGTSVKVSCKASGYVFTNYWIEWIKQRPGQGLEWIGVMNPGSGETTYNEKFKGKATLTADKSSSTAYMQLSSLTSVDSAVYFCARDHDRDYYAMDYWGQGTSVTVSSTRIQNPDPAVYQLRDSKSSDKSVCLFTDFDSQTNVSQSKDSDVYITDKCVLDMRSMDFKSNSAVAWSNKSDFACANAFNNSIIPEDTFFPSPESSDSTDHVKPKETENTKQPSKSCHKPKAIVHTEKVNMMSLTVLGLRMLFAKTVAVNFLLTAKLFFLLTA

SEQ ID NO: 14801 - protein, 856 aa, synthetic construct
MALPVTALLLPLALLLHAARPEVQLVESGGGLVQPGGSLRLSCAASGFSFSDFWMSWVRQAPGKGLEWVATISQAGSEKDYVDSVKGRFTISRDNAKKSLYLQMNSLRAEDTAVYYCASGVYSFDYRGQGTLVTVSSGTGGGGSGGGGSGGGGSEFDILLTQSPAILSVSPGERVSFSCRASQNIGTSIHWYQQRTNGSPRLLIKYASESVSGIPSRFSGSGSGTDFTLSINSVESEDIADYYCQHTNSWPTTFGGGTKLEIKRLEDLKNVFPPEVAVFEPSEAEISHTQKATLVCLATGFYPDHVELSWWVNGKEVHSGVCTDPQPLKEQPALNDSRYCLSSRLRVSATFWQNPRNHFRCQVQFYGLSENDEWTQDRAKPVTQIVSAEAWGRADDVIKIHWQEKKSNTILGSQEGNTMKTNDTYMKFSWLTVPEKSLDKEHRCIVRHENNKNGVDQEIIFPPIKTDVITMDPKDNCSKDANDTLLLQLTNTSAYYMYLLLLLKSVVYFAIITCCLLMAMVKRKDSRGRAKRSGSGATNFSLLKQAGDVEENPGPTSMDWIWRILFLVGAATGAHSFEQVQLQQSDAELVKPGASVKISCKASGYTFTDHAIHWVKQKPEQGLEWIGYFSPGNGDIKYNEKFKGKATLTADKSSSTAYMQLNSLTSEDSAVYFCKRSYGNYDYWGQGTTLTVSSTRIQNPDPAVYQLRDSKSSDKSVCLFTDFDSQTNVSQSKDSDVYITDKCVLDMRSMDFKSNSAVAWSNKSDFACANAFNNSIIPEDTFFPSPESSDSTDHVKPKETENTKQPSKSCHKPKAIVHTEKVNMMSLTVLGLRMLFAKTVAVNFLLTAKLFFLLTA

SEQ ID NO: 14802 - protein, 861 aa, synthetic construct
MALPVTALLLPLALLLHAARPEVQLVESGGGLVQPGGSLRLSCAASGFSFSDFWMSWVRQAPGKGLEWVATISQAGSEKDYVDSVKGRFTISRDNAKKSLYLQMNSLRAEDTAVYYCASGVYSFDYRGQGTLVTVSSGTGGGGSGGGGSGGGGSEFDIVMTQSPDSLAVSLGERATINCKSSQSLLNSGDQKNYLTWYQQKPGQPPKLLIYWASTRESGVPDRFSGSGSGTDFTLTISSLQAEDVAVYYCQNDYSYPLTFGQGTKVEIKLEDLKNVFPPEVAVFEPSEAEISHTQKATLVCLATGFYPDHVELSWWVNGKEVHSGVCTDPQPLKEQPALNDSRYCLSSRLRVSATFWQNPRNHFRCQVQFYGLSENDEWTQDRAKPVTQIVSAEAWGRADDVIKIHWQEKKSNTILGSQEGNTMKTNDTYMKFSWLTVPEKSLDKEHRCIVRHENNKNGVDQEIIFPPIKTDVITMDPKDNCSKDANDTLLLQLTNTSAYYMYLLLLLKSVVYFAIITCCLLMAMVKRKDSRGRAKRSGSGATNFSLLKQAGDVEENPGPTSMDWIWRILFLVGAATGAHSFEQVQLVQSGAEVKKTGSSVKVSCKASGYTFTDHAIHVWRQAPGQALEWMGHFSPGNTDIKYNDKFKGRVTLTVDRSMSTAYMELSSLRSEDTAMYYCKTSTFFFDYWGQGTMVTVSSTRIQNPDPAVYQLRDSKSSDKSVCLFTDFDSQTNVSQSKDSDVYITDKCVLDMRSMDFKSNSAVAWSNKSDFACANAFNNSIIPEDTFFPSPESSDSTDHVKPKETENTKQPSKSCHKPKAIVHTEKVNMMSLTVLGLRMLFAKTVAVNFLLTAKLFFLLTA

SEQ ID NO: 14803 - protein, 860 aa, synthetic construct
MALPVTALLLPLALLLHAARPEVQLVESGGGLVQPGGSLRLSCAASGFSFSDFWMSWVRQAPGKGLEWVATISQAGSEKDYVDSVKGRFTISRDNAKKSLYLQMNSLRAEDTAVYYCASGVYSFDYRGQGTLVTVSSGTGGGGSGGGGSGGGGSEFDIQMTQSPSSLSASVGDRVTITCKASQDVSIAVAWYQQKPGKAPKVLIYSASYRYTGVPDRFSGSGSGTDFTFTISSLQPEDIAVYYCQQHYITPLTFGGGTKVEIKLEDLKNVFPPEVAVFEPSEAEISHTQKATLVCLATGFYPDHVELSWWVNGKEVHSGVCTDPQPLKEQPALNDSRYCLSSRLRVSATFWQNPRNHFRCQVQFYGLSENDEWTQDRAKPVTQIVSAEAWGRADDVIKIHWQEKKSNTILGSQEGNTMKTNDTYMKFSWLTVPEKSLDKEHRCIVRHENNKNGVDQEIIFPPIKTDVITMDPKDNCSKDANDTLLLQLTNTSAYYMYLLLLLKSVVYFAIITCCLLMAMVKRKDSRGRAKRSGSGATNFSLLKQAGDVEENPGPTSMDWIWRILFLVGAATGAHSFEQIQLVQSGHEVKKPGASVKVSCKASGYTFTNYGMNWVRQAPGQGLEWMGWINTKTGEPTYAEEFKGRFVFSLETSASTAYLQISSLKAEDTAMYFCGRGGYGSSYWYFDVWGQGTTVTVSSTRIQNPDPAVYQLRDSKSSDKSVCLFTDFDSQTNVSQSKDSDVYITDKCVLDMRSMDFKSNSAVAWSNKSDFACANAFNNSIIPEDTFFPSPESSDSTDHVKPKETENTKQPSKSCHKPKAIVHTEKVNMMSLTVLGLRMLFAKTVAVNFLLTAKLFFLLTA

SEQ ID NO: 14804 - protein, 862 aa, synthetic construct
MALPVTALLLPLALLLHAARPEVQLVESGGGLVQPGGSLRLSCAASGFSFSDFWMSWVRQAPGKGLEWVATISQAGSEKDYVDSVKGRFTISRDNAKKSLYLQMNSLRAEDTAVYYCASGVYSFDYRGQGTLVTVSSGTGGGGSGGGGSGGGGSEFDIVMTQSPDSLAVSLGERATINCRASKSVSTSGYSYMHWYQQKPGQPPKLLIYLASNLESGVPDRFSGSGSGTDFTLTISSLQAEDVAVYYCQHSRELPYTFGQGTKLEIKLEDLKNVFPPEVAVFEPSEAEISHTQKATLVCLATGFYPDHVELSWWVNGKEVHSGVCTDPQPLKEQPALNDSRYCLSSRLRVSATFWQNPRNHFRCQVQFYGLSENDEWTQDRAKPVTQIVSAEAWGRADDVIKIHWQEKKSNTILGSQEGNTMKTNDTYMKFSWLTVPEKSLDKEHRCIVRHENNKNGVDQEIIFPPIKTDVITMDPKDNCSKDANDTLLLQLTNTSAYYMYLLLLLKSVVYFAIITCCLLMAMVKRKDSRGRAKRSGSGATNFSLLKQAGDVEENPGPTSMDWIWRILFLVGAATGAHSFEQVQLQESGPGLVKPSETLSLTCTVSGGSISSYGVHWIRQPPGKGLEWIGVIWTSGVTDYNSALMGRVTISVDTSKNQFSLKLSSVTAADTAVYYCARDGDYDRYTMDYWGQGTLVTVSSTRIQNPDPAVYQLRDSKSSDKSVCLFTDFDSQTNVSQSKDSDVYITDKCVLDMRSMDFKSNSAVAWSNKSDFACANAFNNSIIPEDTFFPSPESSDSTDHVKPKETENTKQPSKSCHKPKAIVHTEKVNMMSLTVLGLRMLFAKTVAVNFLLTAKLFFLLTA

SEQ ID NO: 14805 - protein, 862 aa, synthetic construct
MALPVTALLLPLALLLHAARPEVQLVESGGGLVQPGGSLRLSCAASGFSFSDFWMSWVRQAPGKGLEWVATISQAGSEKDYVDSVKGRFTISRDNAKKSLYLQMNSLRAEDTAVYYCASGVYSFDYRGQGTLVTVSSGTGGGGSGGGGSGGGGSEFDIQMTQSPSSLSASVGDRVTITCRASQSIGTSLHWYQQKPGKAPKLLIKFASRLQSGVPSRFSGSGSGTDFTLTISSLQPEDFATYYCQQSPGFPPTFGQGTKLEIKRLEDLKNVFPPEVAVFEPSEAEISHTQKATLVCLATGFYPDHVELSWWVNGKEVHSGVCTDPQPLKEQPALNDSRYCLSSRLRVSATFWQNPRNHFRCQVQFYGLSENDEWTQDRAKPVTQIVSAEAWGRADDVIKIHWQEKKSNTILGSQEGNTMKTNDTYMKFSWLTVPEKSLDKEHRCIVRHENNKNGVDQEIIFPPIKTDVITMDPKDNCSKDANDTLLLQLTNTSAYYMYLLLLLKSVVYFAIITCCLLMAMVKRKDSRGRAKRSGSGATNFSLLKQAGDVEENPGPTSMDWIWRILFLVGAATGAHSFEQVQLVESGGGLVKPGGSLRLSCAASGFSITTSGYYWTWIRQFPGKGLEWMGYIGYNSKTYYNPALKSRITISRDNAKNSLYLQMNSLRAEDTAVYYCARSLYGGYKDAFDSWGQGTLVTVSSTRIQNPDPAVYQLRDSKSSDKSVCLFTDFDSQTNVSQSKDSDVYITDKCVLDMRSMDFKSNSAVAWSNKSDFACANAFNNSIIPEDTFFPSPESSDSTDHVKPKETENTKQPSKSCHKPKAIVHTEKVNMMSLTVLGLRMLFAKTVAVNFLLTAKLFFLLTA

SEQ ID NO: 14806 - protein, 867 aa, synthetic construct
MALPVTALLLPLALLLHAARPEVQLVESGGGLVQPGGSLRLSCAASGFSFSDFWMSWVRQAPGKGLEWVATISQAGSEKDYVDSVKGRFTISRDNAKKSLYLQMNSLRAEDTAVYYCASGVYSFDYRGQGTLVTVSSGTGGGGSGGGGSGGGGSEFDEIVLTQSPLSLPVTPGEPASISCRSSQSLLHSIGYNYLDWYLQKPGQSPQLLIYLGSNRASGVPDRFSGSGSGTDFTLKISRVEAEDVGVYYCMQALQTPLTFGGGTKVEIKRLEDLKNVFPPEVAVFEPSEAEISHTQKATLVCLATGFYPDHVELSWWVNGKEVHSGVCTDPQPLKEQPALNDSRYCLSSRLRVSATFWQNPRNHFRCQVQFYGLSENDEWTQDRAKPVTQIVSAEAWGRADDVIKIHWQEKKSNTILGSQEGNTMKTNDTYMKFSWLTVPEKSLDKEHRCIVRHENNKNGVDQEIIFPPIKTDVITMDPKDNCSKDANDTLLLQLTNTSAYYMYLLLLLKSVVYFAIITCCLLMAMVKRKDSRGRAKRSGSGATNFSLLKQAGDVEENPGPTSMDWIWRILFLVGAATGAHSFEEVQLVESGGGVVQPGRSLRLSCAASGFTFRSYGMHWVRQAPGKGLEWVAVISYDGSNKYYTDSVNGRFTISRDNSKNTLYLQMNSLRAEDTAVYYCARGGGYYETSGPDYWGQGTLVTVSSTRIQNPDPAVYQLRDSKSSDKSVCLFTDFDSQTNVSQSKDSDVYITDKCVLDMRSMDFKSNSAVAWSNKSDFACANAFNNSIIPEDTFFPSPESSDSTDHVKPKETENTKQPSKSCHKPKAIVHTEKVNMMSLTVLGLRMLFAKTVAVNFLLTAKLFFLLTA

SEQ ID NO: 14807 - protein, 865 aa, synthetic construct
MALPVTALLLPLALLLHAARPEVQLVESGGGLVQPGGSLRLSCAASGFSFSDFWMSWVRQAPGKGLEWVATISQAGSEKDYVDSVKGRFTISRDNAKKSLYLQMNSLRAEDTAVYYCASGVYSFDYRGQGTLVTVSSGTGGGGSGGGGSGGGGSEFDDVVMTQSPLSLPVTPGEPASISCRSSQSLLHSIGYNYLHWFLQKPGQSPQLLIYLGSNRASGVPDRFSGSGSGTDFTLKISRVEAEDVGVYYCMQALQTPPTFGQGTRLEIKRLEDLKNVFPPEVAVFEPSEAEISHTQKATLVCLATGFYPDHVELSWWVNGKEVHSGVCTDPQPLKEQPALNDSRYCLSSRLRVSATFWQNPRNHFRCQVQFYGLSENDEWTQDRAKPVTQIVSAEAWGRADDVIKIHWQEKKSNTILGSQEGNTMKTNDTYMKFSWLTVPEKSLDKEHRCIVRHENNKNGVDQEIIFPPIKTDVITMDPKDNCSKDANDTLLLQLTNTSAYYMYLLLLLKSVVYFAIITCCLLMAMVKRKDSRGRAKRSGSGATNFSLLKQAGDVEENPGPTSMDWIWRILFLVGAATGAHSFEQLQLQESGPGLVKPSGTLSLTCAVSGGSISSSNWWSWVRQPPGKGLEWIGEIYHSGSTNYNPSLKSRVTISVDKSKNQFSLKLSSVTAADTAVYYCVGSPYGDYVLDYWGQGTLVTVSSTRIQNPDPAVYQLRDSKSSDKSVCLFTDFDSQTNVSQSKDSDVYITDKCVLDMRSMDFKSNSAVAWSNKSDFACANAFNNSIIPEDTFFPSPESSDSTDHVKPKETENTKQPSKSCHKPKAIVHTEKVNMMSLTVLGLRMLFAKTVAVNFLLTAKLFFLLTA

SEQ ID NO: 14808 - protein, 863 aa, synthetic construct
MALPVTALLLPLALLLHAARPEVQLVESGGGLVQPGGSLRLSCAASGFSFSDFWMSWVRQAPGKGLEWVATISQAGSEKDYVDSVKGRFTISRDNAKKSLYLQMNSLRAEDTAVYYCASGVYSFDYRGQGTLVTVSSGTGGGGSGGGGSGGGGSEFDEIVLTQSPGTLSLSLGERATLSCRASQSISSSFLAWYQQKPGQAPKLLIYAASTRATGIPDRFSGSGSGTDFTLTISRLEPEDFAVYYCQQYGRSLSFGGGTKVEVKLEDLKNVFPPEVAVFEPSEAEISHTQKATLVCLATGFYPDHVELSWWVNGKEVHSGVCTDPQPLKEQPALNDSRYCLSSRLRVSATFWQNPRNHFRCQVQFYGLSENDEWTQDRAKPVTQIVSAEAWGRADDVIKIHWQEKKSNTILGSQEGNTMKTNDTYMKFSWLTVPEKSLDKEHRCIVRHENNKNGVDQEIIFPPIKTDVITMDPKDNCSKDANDTLLLQLTNTSAYYMYLLLLLKSVVYFAIITCCLLMAMVKRKDSRGRAKRSGSGATNFSLLKQAGDVEENPGPTSMDWIWRILFLVGAATGAHSFEQVQLQQSGPGLVKPSQTLSLTCAISGDSVSGNSATWNWIRQSPSRGLEWLGRTYYRSKWNHDYAESVKSRITINPDTSKNQFSLQLNSVTPEDTAVYYCARGDSSSWYAFDYWGQGTLVTVSSTRIQNPDPAVYQLRDSKSSDKSVCLFTDFDSQTNVSQSKDSDVYITDKCVLDMRSMDFKSNSAVAWSNKSDFACANAFNNSIIPEDTFFPSPESSDSTDHVKPKETENTKQPSKSCHKPKAIVHTEKVNMMSLTVLGLRMLFAKTVAVNFLLTAKLFFLLTA

SEQ ID NO: 14809 - protein, 862 aa, synthetic construct
MALPVTALLLPLALLLHAARPEVQLVESGGGLVQPGGSLRLSCAASGFSFSDFWMSWVRQAPGKGLEWVATISQAGSEKDYVDSVKGRFTISRDNAKKSLYLQMNSLRAEDTAVYYCASGVYSFDYRGQGTLVTVSSGTGGGGSGGGGSGGGGSEFDQSVVTQPPSVSVAPGKTARITCGRNNIGSKSVHWYQQKPGQAPVLVVYDDSDRPSGIPERFSGSNSGNTATLTISRVEAGDEADYYCQVWDSSSDHVVFGGGTKLTVLGLEDLKNVFPPEVAVFEPSEAEISHTQKATLVCLATGFYPDHVELSWWVNGKEVHSGVCTDPQPLKEQPALNDSRYCLSSRLRVSATFWQNPRNHFRCQVQFYGLSENDEWTQDRAKPVTQIVSAEAWGRADDVIKIHWQEKKSNTILGSQEGNTMKTNDTYMKFSWLTVPEKSLDKEHRCIVRHENNKNGVDQEIIFPPIKTDVITMDPKDNCSKDANDTLLLQLTNTSAYYMYLLLLLKSVVYFAIITCCLLMAMVKRKDSRGRAKRSGSGATNFSLLKQAGDVEENPGPTSMDWIWRILFLVGAATGAHSFEVQLVQSGGGVMRPGGSLRLSCAASGFTFDDYGMSWVRQAPGKGLEWVSGINWNGGSTGYADSVRGRFTISRDNAKNSLYLQMNSLRAEDTALYYCARERGYGYHDPHDYWGQGTLVTVSSTRIQNPDPAVYQLRDSKSSDKSVCLFTDFDSQTNVSQSKDSDVYITDKCVLDMRSMDFKSNSAVAWSNKSDFACANAFNNSIIPEDTFFPSPESSDSTDHVKPKETENTKQPSKSCHKPKAIVHTEKVNMMSLTVLGLRMLFAKTVAVNFLLTAKLFFLLTA

SEQ ID NO: 14810 - protein, 875 aa, synthetic construct
MALPVTALLLPLALLLHAARPEVQLVESGGGLVQPGGSLRLSCAASGFSFSDFWMSWVRQAPGKGLEWVATISQAGSEKDYVDSVKGRFTISRDNAKKSLYLQMNSLRAEDTAVYYCASGVYSFDYRGQGTLVTVSSGTGGGGSGGGGSGGGGSEFEQKLISEEDLEFQAVVTQPPSASGTPGQRVTISCSGSSSNIGSNTVNWYQQVPGTAPKLLIYSNNQRPSGVPDRFSGSKSGTSASLAISGLQSEDEADYYCAAWDDSLNGWVFGGGTKLTVLLEDLKNVFPPEVAVFEPSEAEISHTQKATLVCLATGFYPDHVELSWWVNGKEVHSGVCTDPQPLKEQPALNDSRYCLSSRLRVSATFWQNPRNHFRCQVQFYGLSENDEWTQDRAKPVTQIVSAEAWGRADDVIKIHWQEKKSNTILGSQEGNTMKTNDTYMKFSWLTVPEKSLDKEHRCIVRHENNKNGVDQEIIFPPIKTDVITMDPKDNCSKDANDTLLLQLTNTSAYYMYLLLLLKSVVYFAIITCCLLMAMVKRKDSRGRAKRSGSGATNFSLLKQAGDVEENPGPTSMDWIWRILFLVGAATGAHSFEQMQLVQSGAEVKEPGESLRISCKGSGYSFTNFWISWVRQMPGKGLEWMGRVDPGYSYSTYSPSFQGHVTISADKSTSTAYLQWNSLKASDTAMYYCARVQYSGYYDWFDPWGQGTLVTVSSTRIQNPDPAVYQLRDSKSSDKSVCLFTDFDSQTNVSQSKDSDVYITDKCVLDMRSMDFKSNSAVAWSNKSDFACANAFNNSIIPEDTFFPSPESSDSTDHVKPKETENTKQPSKSCHKPKAIVHTEKVNMMSLTVLGLRMLFAKTVAVNFLLTAKLFFLLTA

SEQ ID NO: 14811 - protein, 869 aa, synthetic construct
MALPVTALLLPLALLLHAARPEVQLVESGGGLVQPGGSLRLSCAASGFSFSDFWMSWVRQAPGKGLEWVATISQAGSEKDYVDSVKGRFTISRDNAKKSLYLQMNSLRAEDTAVYYCASGVYSFDYRGQGTLVTVSSGTGGGGSGGGGSGGGGSEFEQKLISEEDLEFDIQMTQSPSTLSASVGDRVTITCRASQNINKWLAWYQQRPGKAPQLLIYKASSLESGVPSRFSGSGSGTEYTLTISSLQPDDFATYYCQQYNSYATFGQGTKVEIKRLEDLKNVFPPEVAVFEPSEAEISHTQKATLVCLATGFYPDHVELSWWVNGKEVHSGVCTDPQPLKEQPALNDSRYCLSSRLRVSATFWQNPRNHFRCQVQFYGLSENDEWTQDRAKPVTQIVSAEAWGRADDVIKIHWQEKKSNTILGSQEGNTMKTNDTYMKFSWLTVPEKSLDKEHRCIVRHENNKNGVDQEIIFPPIKTDVITMDPKDNCSKDANDTLLLQLTNTSAYYMYLLLLLKSVVYFAIITCCLLMAMVKRKDSRGRAKRSGSGATNFSLLKQAGDVEENPGPTSMDWIWRILFLVGAATGAHSFEQVQLVQSGAEVKKPGESLKISCKGSGYNFSNKWIGWVRQLPGRGLEWIAIIYPGYSDITYSPSFQGRVTISADTSINTAYLHWHSLKASDTAMYYCVRHTALAGFDYWGLGTLVTVSSTRIQNPDPAVYQLRDSKSSDKSVCLFTDFDSQTNVSQSKDSDVYITDKCVLDMRSMDFKSNSAVAWSNKSDFACANAFNNSIIPEDTFFPSPESSDSTDHVKPKETENTKQPSKSCHKPKAIVHTEKVNMMSLTVLGLRMLFAKTVAVNFLLTAKLFFLLTA

SEQ ID NO: 14812 - protein, 860 aa, synthetic construct
MALPVTALLLPLALLLHAARPEVQLVESGGGLVQPGGSLRLSCAASGFSFSDFWMSWVRQAPGKGLEWVATISQAGSEKDYVDSVKGRFTISRDNAKKSLYLQMNSLRAEDTAVYYCASGVYSFDYRGQGTLVTVSSGTGGGGSGGGGSGGGGSEFIVLTQSPASLAVSLGQRATISCRASESVDNYGNTFMHWYQQKPGQPPKLLIYRASNLESGIPARFSGSGSRTDFTLTINPVEADDVATYYCQQSNEDPPTFGAGTKLELKLEDLKNVFPPEVAVFEPSEAEISHTQKATLVCLATGFYPDHVELSWWVNGKEVHSGVCTDPQPLKEQPALNDSRYCLSSRLRVSATFWQNPRNHFRCQVQFYGLSENDEWTQDRAKPVTQIVSAEAWGRADDVIKIHWQEKKSNTILGSQEGNTMKTNDTYMKFSWLTVPEKSLDKEHRCIVRHENNKNGVDQEIIFPPIKTDVITMDPKDNCSKDANDTLLLQLTNTSAYYMYLLLLLKSVVYFAIITCCLLMAMVKRKDSRGRAKRSGSGATNFSLLKQAGDVEENPGPTSMDWIWRILFLVGAATGAHSFEQIQLVQSGPELKKPGETVKISCKASGYIFTNYGMNWVKQAPGKSFKWMGWINTYTGESTYSADFKGRFAFSLETSASTAYLHINDLKNEDTATYFCARSGGYDPMDYWGQGTSVTVSSTRIQNPDPAVYQLRDSKSSDKSVCLFTDFDSQTNVSQSKDSDVYITDKCVLDMRSMDFKSNSAVAWSNKSDFACANAFNNSIIPEDTFFPSPESSDSTDHVKPKETENTKQPSKSCHKPKAIVHTEKVNMMSLTVLGLRMLFAKTVAVNFLLTAKLFFLLTA

SEQ ID NO: 14813 - protein, 859 aa, synthetic construct
MALPVTALLLPLALLLHAARPEVQLVESGGGLVQPGGSLRLSCAASGFSFSDFWMSWVRQAPGKGLEWVATISQAGSEKDYVDSVKGRFTISRDNAKKSLYLQMNSLRAEDTAVYYCASGVYSFDYRGQGTLVTVSSGTGGGGSGGGGSGGGGSEFEIVLTQSPGTLSLSPGERATLSCRASQSVSNTYLAWYHQRPGQAPRLLIYGASSRATGIPDRFSGSGSGTDFALTISSLEPEDFAVYYCQQYSNSWTFGQGTKVEIKRLEDLKNVFPPEVAVFEPSEAEISHTQKATLVCLATGFYPDHVELSWWVNGKEVHSGVCTDPQPLKEQPALNDSRYCLSSRLRVSATFWQNPRNHFRCQVQFYGLSENDEWTQDRAKPVTQIVSAEAWGRADDVIKIHWQEKKSNTILGSQEGNTMKTNDTYMKFSWLTVPEKSLDKEHRCIVRHENNKNGVDQEIIFPPIKTDVITMDPKDNCSKDANDTLLLQLTNTSAYYMYLLLLLKSVVYFAIITCCLLMAMVKRKDSRGRAKRSGSGATNFSLLKQAGDVEENPGPTSMDWIWRILFLVGAATGAHSFEQVQLVESGGGVVQPGRSLRLSCAASGFTFSSYDMHWVRQAPGKGLEWVAVISYDGTNEYYADSVKGRFTISRDTSKNTLYLQMNSLRAEDTAVYYCARERYFDWSFDYWGQGTLVSVSSTRIQNPDPAVYQLRDSKSSDKSVCLFTDFDSQTNVSQSKDSDVYITDKCVLDMRSMDFKSNSAVAWSNKSDFACANAFNNSIIPEDTFFPSPESSDSTDHVKPKETENTKQPSKSCHKPKAIVHTEKVNMMSLTVLGLRMLFAKTVAVNFLLTAKLFFLLTA

SEQ ID NO: 14814 - protein, 858 aa, synthetic construct
MALPVTALLLPLALLLHAARPEVQLVESGGGLVQPGGSLRLSCAASGFSFSDFWMSWVRQAPGKGLEWVATISQAGSEKDYVDSVKGRFTISRDNAKKSLYLQMNSLRAEDTAVYYCASGVYSFDYRGQGTLVTVSSGTGGGGSGGGGSGGGGSEFELTQDPAVSVALGQTVRITCQGDSLRSNYANWYQQKPGQAPVLVIYGQNNRPSGIPDRFSGSSSGNTASLTITGAQAADEADYYCDSRVSTGNHVVFGGGTKLTVLGQLEDLKNVFPPEVAVFEPSEAEISHTQKATLVCLATGFYPDHVELSWWVNGKEVHSGVCTDPQPLKEQPALNDSRYCLSSRLRVSATFWQNPRNHFRCQVQFYGLSENDEWTQDRAKPVTQIVSAEAWGRADDVIKIHWQEKKSNTILGSQEGNTMKTNDTYMKFSWLTVPEKSLDKEHRCIVRHENNKNGVDQEIIFPPIKTDVITMDPKDNCSKDANDTLLLQLTNTSAYYMYLLLLLKSVVYFAIITCCLLMAMVKRKDSRGRAKRSGSGATNFSLLKQAGDVEENPGPTSMDWIWRILFLVGAATGAHSFEEVQLVQSGAEVKKPGASVKVSCKASGYTFTSYAMHWVRQAPGQRLEWMGWINAGNGNTKYSQKFQGRVTITRDTSASTAYMELSSLRSEDTAVYYCARDISYGSFDYWGQGTLVTVSSTRIQNPDPAVYQLRDSKSSDKSVCLFTDFDSQTNVSQSKDSDVYITDKCVLDMRSMDFKSNSAVAWSNKSDFACANAFNNSIIPEDTFFPSPESSDSTDHVKPKETENTKQPSKSCHKPKAIVHTEKVNMMSLTVLGLRMLFAKTVAVNFLLTAKLFFLLTA

SEQ ID NO: 14815 - protein, 860 aa, synthetic construct
MALPVTALLLPLALLLHAARPEVQLVESGGGLVQPGGSLRLSCAASGFSFSDFWMSWVRQAPGKGLEWVATISQAGSEKDYVDSVKGRFTISRDNAKKSLYLQMNSLRAEDTAVYYCASGVYSFDYRGQGTLVTVSSGTGGGGSGGGGSGGGGSEFDIVLTQTPATLSVTPGDSVSLSCRASQSISNNLHWYQQKSHESPRLLIKNASQSISGIPSKFSGSGSGTDFTLRINSVETEDFGMYFCQQSNSWPYTFGSGTKLEIKLEDLKNVFPPEVAVFEPSEAEISHTQKATLVCLATGFYPDHVELSWWVNGKEVHSGVCTDPQPLKEQPALNDSRYCLSSRLRVSATFWQNPRNHFRCQVQFYGLSENDEWTQDRAKPVTQIVSAEAWGRADDVIKIHWQEKKSNTILGSQEGNTMKTNDTYMKFSWLTVPEKSLDKEHRCIVRHENNKNGVDQEIIFPPIKTDVITMDPKDNCSKDANDTLLLQLTNTSAYYMYLLLLLKSVVYFAIITCCLLMAMVKRKDSRGRAKRSGSGATNFSLLKQAGDVEENPGPTSMDWIWRILFLVGAATGAHSFEQVKLQQSGPELVKPGASVKISCKASGYSFTGYYMHWVKQSHGNILDWIGYIYPYNGVSSYNQKFKGKATLTVDKSSSTAYMELRSLTSEDSAVYYCARERGLYQLRAMDYWGQGTSVTVSSTRIQNPDPAVYQLRDSKSSDKSVCLFTDFDSQTNVSQSKDSDVYITDKCVLDMRSMDFKSNSAVAWSNKSDFACANAFNNSIIPEDTFFPSPESSDSTDHVKPKETENTKQPSKSCHKPKAIVHTEKVNMMSLTVLGLRMLFAKTVAVNFLLTAKLFFLLTA

SEQ ID NO: 14816 - protein, 851 aa, synthetic construct
MALPVTALLLPLALLLHAARPEVQLVESGGGLVQPGGSLRLSCAASGFSFSDFWMSWVRQAPGKGLEWVATISQAGSEKDYVDSVKGRFTISRDNAKKSLYLQMNSLRAEDTAVYYCASGVYSFDYRGQGTLVTVSSGTGGGGSGGGGSGGGGSEFDIVMTQTPAIMSASPGQKVTITCSASSSVNYMHWYQQKLGSSPKLWIYDTSKLAPGVPARFSGSGSGTSYSLTISSMEAEDAASYFCHQWSSYPYTFGSGTKLEIKLEDLKNVFPPEVAVFEPSEAEISHTQKATLVCLATGFYPDHVELSWWVNGKEVHSGVCTDPQPLKEQPALNDSRYCLSSRLRVSATFWQNPRNHFRCQVQFYGLSENDEWTQDRAKPVTQIVSAEAWGRADDVIKIHWQEKKSNTILGSQEGNTMKTNDTYMKFSWLTVPEKSLDKEHRCIVRHENNKNGVDQEIIFPPIKTDVITMDPKDNCSKDANDTLLLQLTNTSAYYMYLLLLLKSVVYFAIITCCLLMAMVKRKDSRGRAKRSGSGATNFSLLKQAGDVEENPGPTSMDWIWRILFLVGAATGAHSFEEVQLQESGPDLVKPSQSLSLTCTVTGYSITSGYGWHWIRQFPGNKLEWMGYIHYSGSTTYNPSLKSRISISRDTSKNQFFLQLNSVTTEDTATYYCARSLRYWGQGTTLTVSSTRIQNPDPAVYQLRDSKSSDKSVCLFTDFDSQTNVSQSKDSDVYITDKCVLDMRSMDFKSNSAVAWSNKSDFACANAFNNSIIPEDTFFPSPESSDSTDHVKPKETENTKQPSKSCHKPKAIVHTEKVNMMSLTVLGLRMLFAKTVAVNFLLTAKLFFLLTA

SEQ ID NO: 14817 - protein, 854 aa, synthetic construct
MALPVTALLLPLALLLHAARPEVQLVESGGGLVQPGGSLRLSCAASGFSFSDFWMSWVRQAPGKGLEWVATISQAGSEKDYVDSVKGRFTISRDNAKKSLYLQMNSLRAEDTAVYYCASGVYSFDYRGQGTLVTVSSGTGGGGSGGGGSGGGGSEFDIQMTQSPSSLSASVGDRVTITCSATSSISYMHWYQQKPGKAPKGWIYDTSKLAHGVPSRFSGSGSGTDFTLTISSLQPEDFATYYCHQRRSYPFTFGQGTKVEIKLEDLKNVFPPEVAVFEPSEAEISHTQKATLVCLATGFYPDHVELSWWVNGKEVHSGVCTDPQPLKEQPALNDSRYCLSSRLRVSATFWQNPRNHFRCQVQFYGLSENDEWTQDRAKPVTQIVSAEAWGRADDVIKIHWQEKKSNTILGSQEGNTMKTNDTYMKFSWLTVPEKSLDKEHRCIVRHENNKNGVDQEIIFPPIKTDVITMDPKDNCSKDANDTLLLQLTNTSAYYMYLLLLLKSVVYFAIITCCLLMAMVKRKDSRGRAKRSGSGATNFSLLKQAGDVEENPGPTSMDWIWRILFLVGAATGAHSFEEVQLVQSGAEVKKPGASVKVSCKASGYTFTNFWIHWVRQAPGQGLEWIGEIDPSDSYTNYNQKFKGRVTITRDTSTSTAYLELSSLRSEDTAVYYCAREITTVDYWGQGTLVTVSSTRIQNPDPAVYQLRDSKSSDKSVCLFTDFDSQTNVSQSKDSDVYITDKCVLDMRSMDFKSNSAVAWSNKSDFACANAFNNSIIPEDTFFPSPESSDSTDHVKPKETENTKQPSKSCHKPKAIVHTEKVNMMSLTVLGLRMLFAKTVAVNFLLTAKLFFLLTA

SEQ ID NO: 14818 - protein, 861 aa, synthetic construct
MALPVTALLLPLALLLHAARPEVQLVESGGGLVQPGGSLRLSCAASGFSFSDFWMSWVRQAPGKGLEWVATISQAGSEKDYVDSVKGRFTISRDNAKKSLYLQMNSLRAEDTAVYYCASGVYSFDYRGQGTLVTVSSGTGGGGSGGGGSGGGGSEFDIQMTQSPSSLSASVGDRVTITCKASQGFNKYVAWYQQKPGKAPKLLIYYTSTLQPGVPSRFSGSGSGRDYTLTISSLQPEDFATYYCLQYGNLLYAFGQGTKVEIKRLEDLKNVFPPEVAVFEPSEAEISHTQKATLVCLATGFYPDHVELSWWVNGKEVHSGVCTDPQPLKEQPALNDSRYCLSSRLRVSATFWQNPRNHFRCQVQFYGLSENDEWTQDRAKPVTQIVSAEAWGRADDVIKIHWQEKKSNTILGSQEGNTMKTNDTYMKFSWLTVPEKSLDKEHRCIVRHENNKNGVDQEIIFPPIKTDVITMDPKDNCSKDANDTLLLQLTNTSAYYMYLLLLLKSVVYFAIITCCLLMAMVKRKDSRGRAKRSGSGATNFSLLKQAGDVEENPGPTSMDWIWRILFLVGAATGAHSFEEVQLVQSGAEVKKPGASVKVSCKASGYTFTSYWIGWVRQAPGQGLEWIGDIYPGGGYTNYNEKFKGRVTITRDTSTSTAYLELSSLRSEDTAVYYCARLDGSSYRGAMDSWGQGTLVTVSSTRIQNPDPAVYQLRDSKSSDKSVCLFTDFDSQTNVSQSKDSDVYITDKCVLDMRSMDFKSNSAVAWSNKSDFACANAFNNSIIPEDTFFPSPESSDSTDHVKPKETENTKQPSKSCHKPKAIVHTEKVNMMSLTVLGLRMLFAKTVAVNFLLTAKLFFLLTA

SEQ ID NO: 14819 - protein, 857 aa, synthetic construct
MALPVTALLLPLALLLHAARPEVQLVESGGGLVQPGGSLRLSCAASGFSFSDFWMSWVRQAPGKGLEWVATISQAGSEKDYVDSVKGRFTISRDNAKKSLYLQMNSLRAEDTAVYYCASGVYSFDYRGQGTLVTVSSGTGGGGSGGGGSGGGGSEFDIQMTQSPSSLSASVGDRVTITCRASQDIRYYLNWYQQKPGKAPKLLIYVASSLQSGVPSRFSGSGSGTEFTLTVSSLQPEDFATYYCLQVYSTPRTFGQGTKVEIKLEDLKNVFPPEVAVFEPSEAEISHTQKATLVCLATGFYPDHVELSWWVNGKEVHSGVCTDPQPLKEQPALNDSRYCLSSRLRVSATFWQNPRNHFRCQVQFYGLSENDEWTQDRAKPVTQIVSAEAWGRADDVIKIHWQEKKSNTILGSQEGNTMKTNDTYMKFSWLTVPEKSLDKEHRCIVRHENNKNGVDQEIIFPPIKTDVITMDPKDNCSKDANDTLLLQLTNTSAYYMYLLLLLKSVVYFAIITCCLLMAMVKRKDSRGRAKRSGSGATNFSLLKQAGDVEENPGPTSMDWIWRILFLVGAATGAHSFEEVQLVESGGGLAKPGGSLRLSCAASGFRFTFNNYYMDWVRQAPGQGLEWVSRISSSGDPTWYADSVKGRFTISRENAKNTLFLQMNSLRAEDTAVYYCASLTTGSDSWGQGVLVTVSSTRIQNPDPAVYQLRDSKSSDKSVCLFTDFDSQTNVSQSKDSDVYITDKCVLDMRSMDFKSNSAVAWSNKSDFACANAFNNSIIPEDTFFPSPESSDSTDHVKPKETENTKQPSKSCHKPKAIVHTEKVNMMSLTVLGLRMLFAKTVAVNFLLTAKLFFLLTA

SEQ ID NO: 14820 - protein, 858 aa, synthetic construct
MALPVTALLLPLALLLHAARPEVQLVESGGGLVQPGGSLRLSCAASGFSFSDFWMSWVRQAPGKGLEWVATISQAGSEKDYVDSVKGRFTISRDNAKKSLYLQMNSLRAEDTAVYYCASGVYSFDYRGQGTLVTVSSGTGGGGSGGGGSGGGGSEFEIVMTQSPATLSVSPGERATLSCRASQSVSRNLAWYQQKPGQAPRLLIYGASTRATGIPARFSGSGSGTEFTLTIGSLQSEDFAVYYCQQYKTWPRTFGQGTNVEIKLEDLKNVFPPEVAVFEPSEAEISHTQKATLVCLATGFYPDHVELSWWVNGKEVHSGVCTDPQPLKEQPALNDSRYCLSSRLRVSATFWQNPRNHFRCQVQFYGLSENDEWTQDRAKPVTQIVSAEAWGRADDVIKIHWQEKKSNTILGSQEGNTMKTNDTYMKFSWLTVPEKSLDKEHRCIVRHENNKNGVDQEIIFPPIKTDVITMDPKDNCSKDANDTLLLQLTNTSAYYMYLLLLLKSVVYFAIITCCLLMAMVKRKDSRGRAKRSGSGATNFSLLKQAGDVEENPGPTSMDWIWRILFLVGAATGAHSFEQVQLQQWGAGLLKPSETLSLTCAVFGGSFSGYYWSWIRQPPGKGLEWIGEINHRGNTNDNPSLKSRVTISVDTSKNQFALKLSSVTAADTAVYYCARERGYTYGNFDHWGQGTLVTVSSTRIQNPDPAVYQLRDSKSSDKSVCLFTDFDSQTNVSQSKDSDVYITDKCVLDMRSMDFKSNSAVAWSNKSDFACANAFNNSIIPEDTFFPSPESSDSTDHVKPKETENTKQPSKSCHKPKAIVHTEKVNMMSLTVLGLRMLFAKTVAVNFLLTAKLFFLLTA

SEQ ID NO: 14821 - protein, 859 aa, synthetic construct
MALPVTALLLPLALLLHAARPEVQLVESGGGLVQPGGSLRLSCAASGFSFSDFWMSWVRQAPGKGLEWVATISQAGSEKDYVDSVKGRFTISRDNAKKSLYLQMNSLRAEDTAVYYCASGVYSFDYRGQGTLVTVSSGTGGGGSGGGGSGGGGSEFEIVMTPSSATLSVSPGERATLSCRASQSVSRNLAWYQQKPGQAPRLLIYGASTRATGIPARFSGSGSGTEFTLTISSLQSEDFAVYYCHQYSNWMCSFGQGTKLEIKLEDLKNVFPPEVAVFEPSEAEISHTQKATLVCLATGFYPDHVELSWWVNGKEVHSGVCTDPQPLKEQPALNDSRYCLSSRLRVSATFWQNPRNHFRCQVQFYGLSENDEWTQDRAKPVTQIVSAEAWGRADDVIKIHWQEKKSNTILGSQEGNTMKTNDTYMKFSWLTVPEKSLDKEHRCIVRHENNKNGVDQEIIFPPIKTDVITMDPKDNCSKDANDTLLLQLTNTSAYYMYLLLLLKSVVYFAIITCCLLMAMVKRKDSRGRAKRSGSGATNFSLLKQAGDVEENPGPTSMDWIWRILFLVGAATGAHSFEEVQLLESGGGLVQPGGSLRLSCAASGFTFSRYAMNWVRQAPGKGLEWVSGISGSGGRTYYADSVKGRFTISRDNSKNTLYLQMNSLRAEDTAVYYCAKDRDFWSGPFDYWGQGTLVTVSSTRIQNPDPAVYQLRDSKSSDKSVCLFTDFDSQTNVSQSKDSDVYITDKCVLDMRSMDFKSNSAVAWSNKSDFACANAFNNSIIPEDTFFPSPESSDSTDHVKPKETENTKQPSKSCHKPKAIVHTEKVNMMSLTVLGLRMLFAKTVAVNFLLTAKLFFLLTA

SEQ ID NO: 14822 - protein, 864 aa, synthetic construct
MALPVTALLLPLALLLHAARPEVQLVESGGGLVQPGGSLRLSCAASGFSFSDFWMSWVRQAPGKGLEWVATISQAGSEKDYVDSVKGRFTISRDNAKKSLYLQMNSLRAEDTAVYYCASGVYSFDYRGQGTLVTVSSGTGGGGSGGGGSGGGGSEFDIQMTQSPSSLSASVGDRVTITCKASKNIRSYLAWYQQKPGKAPKLLIYSGSTLHSGVPSRFSGSGSGTDFTLTISSLQPEDFATYYCQQHHEYPLTFGQGTKVEIKRLEDLKNVFPPEVAVFEPSEAEISHTQKATLVCLATGFYPDHVELSWWVNGKEVHSGVCTDPQPLKEQPALNDSRYCLSSRLRVSATFWQNPRNHFRCQVQFYGLSENDEWTQDRAKPVTQIVSAEAWGRADDVIKIHWQEKKSNTILGSQEGNTMKTNDTYMKFSWLTVPEKSLDKEHRCIVRHENNKNGVDQEIIFPPIKTDVITMDPKDNCSKDANDTLLLQLTNTSAYYMYLLLLLKSVVYFAIITCCLLMAMVKRKDSRGRAKRSGSGATNFSLLKQAGDVEENPGPTSMDWIWRILFLVGAATGAHSFEQVQLQESGPGLVKPSETLSLTCTVSGYTITSGYDWSWIRQPPGKGLEWIGYINYGGSTNYKPSLGSRVTISVDTSKNQFSLKLSSVTAADTAVYYCARYNEYKSYIYDWYFDFWGQGTLVTVSSTRIQNPDPAVYQLRDSKSSDKSVCLFTDFDSQTNVSQSKDSDVYITDKCVLDMRSMDFKSNSAVAWSNKSDFACANAFNNSIIPEDTFFPSPESSDSTDHVKPKETENTKQPSKSCHKPKAIVHTEKVNMMSLTVLGLRMLFAKTVAVNFLLTAKLFFLLTA

SEQ ID NO: 14823 - protein, 866 aa, synthetic construct
MALPVTALLLPLALLLHAARPEVQLVESGGGLVQPGGSLRLSCAASGFSFSDFWMSWVRQAPGKGLEWVATISQAGSEKDYVDSVKGRFTISRDNAKKSLYLQMNSLRAEDTAVYYCASGVYSFDYRGQGTLVTVSSGTGGGGSGGGGSGGGGSEFQSVVTQPPSVSAAPGQKVTISCSGSSSNIGNNYVSWYQQLPGTAPKLLIYDNNKRPSGIPDRFSGSKSGTSATLGITGLQTGDEADYYCGTWDGSLYTMLFGGGTKLTVLLEDLKNVFPPEVAVFEPSEAEISHTQKATLVCLATGFYPDHVELSWWVNGKEVHSGVCTDPQPLKEQPALNDSRYCLSSRLRVSATFWQNPRNHFRCQVQFYGLSENDEWTQDRAKPVTQIVSAEAWGRADDVIKIHWQEKKSNTILGSQEGNTMKTNDTYMKFSWLTVPEKSLDKEHRCIVRHENNKNGVDQEIIFPPIKTDVITMDPKDNCSKDANDTLLLQLTNTSAYYMYLLLLLKSVVYFAIITCCLLMAMVKRKDSRGRAKRSGSGATNFSLLKQAGDVEENPGPTSMDWIWRILFLVGAATGAHSFEEVQLVESGGGLVKPGGSLRLSCAASGFTFSNAWMSWVRQAPGKGLEWVGFIRSKAYGGTTEYAASVKGRFTISRDDSKSIAYLQMNNLKTEDTAVYYCARDGLYSSSWYDSDYWGQGTLVTVSSTRIQNPDPAVYQLRDSKSSDKSVCLFTDFDSQTNVSQSKDSDVYITDKCVLDMRSMDFKSNSAVAWSNKSDFACANAFNNSIIPEDTFFPSPESSDSTDHVKPKETENTKQPSKSCHKPKAIVHTEKVNMMSLTVLGLRMLFAKTVAVNFLLTAKLFFLLTA

SEQ ID NO: 14824 - protein, 871 aa, synthetic construct
MALPVTALLLPLALLLHAARPEVQLVESGGGLVQPGGSLRLSCAASGFSFSDFWMSWVRQAPGKGLEWVATISQAGSEKDYVDSVKGRFTISRDNAKKSLYLQMNSLRAEDTAVYYCASGVYSFDYRGQGTLVTVSSGTGGGGSGGGGSGGGGSEFQSVLTQPPSVSGAPGQRVTISCTGSSSNIGAGYDVHWYQQLPGTAPKLLIFGNSNRPSGVPDRFSGFKSGTSASLAITGLQAEDEADYFCQSYDSSLSGSGVFGTGTKVTVLGLEDLKNVFPPEVAVFEPSEAEISHTQKATLVCLATGFYPDHVELSWWVNGKEVHSGVCTDPQPLKEQPALNDSRYCLSSRLRVSATFWQNPRNHFRCQVQFYGLSENDEWTQDRAKPVTQIVSAEAWGRADDVIKIHWQEKKSNTILGSQEGNTMKTNDTYMKFSWLTVPEKSLDKEHRCIVRHENNKNGVDQEIIFPPIKTDVITMDPKDNCSKDANDTLLLQLTNTSAYYMYLLLLLKSVVYFAIITCCLLMAMVKRKDSRGRAKRSGSGATNFSLLKQAGDVEENPGPTSMDWIWRILFLVGAATGAHSFEQMQLVQSGGGLVQPGRSLRLSCAASGFTFDDYAMHWVRQAPGKGLEWVSGISWNSGSIGYADSVKGRFTISRDNAKNSLYLQMNSLRAEDTALYYCAKDIHSGSYYGLLYYAMDVWGQGTTVTVSSTRIQNPDPAVYQLRDSKSSDKSVCLFTDFDSQTNVSQSKDSDVYITDKCVLDMRSMDFKSNSAVAWSNKSDFACANAFNNSIIPEDTFFPSPESSDSTDHVKPKETENTKQPSKSCHKPKAIVHTEKVNMMSLTVLGLRMLFAKTVAVNFLLTAKLFFLLTA

SEQ ID NO: 14825 - protein, 871 aa, synthetic construct
MALPVTALLLPLALLLHAARPEVQLVESGGGLVQPGGSLRLSCAASGFSFSDFWMSWVRQAPGKGLEWVATISQAGSEKDYVDSVKGRFTISRDNAKKSLYLQMNSLRAEDTAVYYCASGVYSFDYRGQGTLVTVSSGTGGGGSGGGGSGGGGSEFLPVLTQPPSASGTPGQRVTISCSGRSSNIGSNSVNWYRQLPGAAPKLLIYSNNQRPPGVPVRFSGSKSGTSASLAISGLQSEDEATYYCATWDDNLNVHYVFGTGTKVTVLGSRLEDLKNVFPPEVAVFEPSEAEISHTQKATLVCLATGFYPDHVELSWWVNGKEVHSGVCTDPQPLKEQPALNDSRYCLSSRLRVSATFWQNPRNHFRCQVQFYGLSENDEWTQDRAKPVTQIVSAEAWGRADDVIKIHWQEKKSNTILGSQEGNTMKTNDTYMKFSWLTVPEKSLDKEHRCIVRHENNKNGVDQEIIFPPIKTDVITMDPKDNCSKDANDTLLLQLTNTSAYYMYLLLLLKSVVYFAIITCCLLMAMVKRKDSRGRAKRSGSGATNFSLLKQAGDVEENPGPTSMDWIWRILFLVGAATGAHSFELEMAQVQLVQSGAEVKKPGSSVKVSCKASGGTFSSYAISWVRQAPGQGLEWMGRIIPILGIANYAQKFQGRVTITADKSTSTAYMELSSLRSEDTAVYYCARGGYYSHDMWSEDWGQGTLVTVSSTRIQNPDPAVYQLRDSKSSDKSVCLFTDFDSQTNVSQSKDSDVYITDKCVLDMRSMDFKSNSAVAWSNKSDFACANAFNNSIIPEDTFFPSPESSDSTDHVKPKETENTKQPSKSCHKPKAIVHTEKVNMMSLTVLGLRMLFAKTVAVNFLLTAKLFFLLTA

SEQ ID NO: 14826 - protein, 865 aa, synthetic construct
MALPVTALLLPLALLLHAARPEVQLVESGGGLVQPGGSLRLSCAASGFSFSDFWMSWVRQAPGKGLEWVATISQAGSEKDYVDSVKGRFTISRDNAKKSLYLQMNSLRAEDTAVYYCASGVYSFDYRGQGTLVTVSSGTGGGGSGGGGSGGGGSEFDFVMTQSPDSLAVSLGERVTMSCKSSQSLLNSGNQKNYLTWYQQKPGQPPKLLIYWASTRESGVPDRFSGSGSGTDFTLTISSLQAEDVAVYYCQNDYSYPYTFGQGTKLEIKLEDLKNVFPPEVAVFEPSEAEISHTQKATLVCLATGFYPDHVELSWWVNGKEVHSGVCTDPQPLKEQPALNDSRYCLSSRLRVSATFWQNPRNHFRCQVQFYGLSENDEWTQDRAKPVTQIVSAEAWGRADDVIKIHWQEKKSNTILGSQEGNTMKTNDTYMKFSWLTVPEKSLDKEHRCIVRHENNKNGVDQEIIFPPIKTDVITMDPKDNCSKDANDTLLLQLTNTSAYYMYLLLLLKSVVYFAIITCCLLMAMVKRKDSRGRAKRSGSGATNFSLLKQAGDVEENPGPTSMDWIWRILFLVGAATGAHSFEEVQLVQSGAELKKPGASVKVSCKASGYTFTDYYMKWVRQAPGQGLEWIGDIIPSNGATFYNQKFKGRVTITVDKSTSTAYMELSSLRSEDTAVYYCARSHLLRASWFAYWGQGTLVTVSSTRIQNPDPAVYQLRDSKSSDKSVCLFTDFDSQTNVSQSKDSDVYITDKCVLDMRSMDFKSNSAVAWSNKSDFACANAFNNSIIPEDTFFPSPESSDSTDHVKPKETENTKQPSKSCHKPKAIVHTEKVNMMSLTVLGLRMLFAKTVAVNFLLTAKLFFLLTA

SEQ ID NO: 14827 - protein, 865 aa, synthetic construct
MALPVTALLLPLALLLHAARPEVQLVESGGGLVQPGGSLRLSCAASGFSFSDFWMSWVRQAPGKGLEWVATISQAGSEKDYVDSVKGRFTISRDNAKKSLYLQMNSLRAEDTAVYYCASGVYSFDYRGQGTLVTVSSGTGGGGSGGGGSGGGGSEFDFVMTQSPDSLAVSLGERVTMSCKSSQSLLNSGNQKNYLTWYQQKPGQPPKLLIYWASTRESGVPDRFSGSGSGTDFTLTISSLQAEDVAVYYCQNDYSYPYTFGQGTKLEIKLEDLKNVFPPEVAVFEPSEAEISHTQKATLVCLATGFYPDHVELSWWVNGKEVHSGVCTDPQPLKEQPALNDSRYCLSSRLRVSATFWQNPRNHFRCQVQFYGLSENDEWTQDRAKPVTQIVSAEAWGRADDVIKIHWQEKKSNTILGSQEGNTMKTNDTYMKFSWLTVPEKSLDKEHRCIVRHENNKNGVDQEIIFPPIKTDVITMDPKDNCSKDANDTLLLQLTNTSAYYMYLLLLLKSVVYFAIITCCLLMAMVKRKDSRGRAKRSGSGATNFSLLKQAGDVEENPGPTSMDWIWRILFLVGAATGAHSFEQVQLVQSGAELKKPGASVKVSCKASGYTFTDYYMKWVRQAPGQGLEWIGDIIPSNGATFYNQKFKGRVTITVDKSTSTAYMELSSLRSEDTAVYYCARSHLLRASWFAYWGQGTLVTVSSTRIQNPDPAVYQLRDSKSSDKSVCLFTDFDSQTNVSQSKDSDVYITDKCVLDMRSMDFKSNSAVAWSNKSDFACANAFNNSIIPEDTFFPSPESSDSTDHVKPKETENTKQPSKSCHKPKAIVHTEKVNMMSLTVLGLRMLFAKTVAVNFLLTAKLFFLLTA

SEQ ID NO: 14828 - protein, 855 aa, synthetic construct
MALPVTALLLPLALLLHAARPEVQLVESGGGLVQPGGSLRLSCAASGFSFSDFWMSWVRQAPGKGLEWVATISQAGSEKDYVDSVKGRFTISRDNAKKSLYLQMNSLRAEDTAVYYCASGVYSFDYRGQGTLVTVSSGTGGGGSGGGGSGGGGSEFDVQITQSPSYLAASPGETITINCRASKSISKDLAWYQEKPGKTNKLLIYSGSTLQSGIPSRFSGSGSGTDFTLTISSLEPEDFAMYYCQQHNKYPYTFGGGTKLEIKRLEDLKNVFPPEVAVFEPSEAEISHTQKATLVCLATGFYPDHVELSWWVNGKEVHSGVCTDPQPLKEQPALNDSRYCLSSRLRVSATFWQNPRNHFRCQVQFYGLSENDEWTQDRAKPVTQIVSAEAWGRADDVIKIHWQEKKSNTILGSQEGNTMKTNDTYMKFSWLTVPEKSLDKEHRCIVRHENNKNGVDQEIIFPPIKTDVITMDPKDNCSKDANDTLLLQLTNTSAYYMYLLLLLKSVVYFAIITCCLLMAMVKRKDSRGRAKRSGSGATNFSLLKQAGDVEENPGPTSMDWIWRILFLVGAATGAHSFEQVQLQQPGAELVRPGASVKLSCKASGYTFTSYWMNWVKQRPDQGLEWIGRIDPYDSETHYNQKFKDKAILTVDKSSSTAYMQLSSLTSEDSAVYYCARGNWDDYWGQGTTLTVSSTRIQNPDPAVYQLRDSKSSDKSVCLFTDFDSQTNVSQSKDSDVYITDKCVLDMRSMDFKSNSAVAWSNKSDFACANAFNNSIIPEDTFFPSPESSDSTDHVKPKETENTKQPSKSCHKPKAIVHTEKVNMMSLTVLGLRMLFAKTVAVNFLLTAKLFFLLTA

SEQ ID NO: 14829 - protein, 857 aa, synthetic construct
MALPVTALLLPLALLLHAARPEVQLVESGGGLVQPGGSLRLSCAASGFSFSDFWMSWVRQAPGKGLEWVATISQAGSEKDYVDSVKGRFTISRDNAKKSLYLQMNSLRAEDTAVYYCASGVYSFDYRGQGTLVTVSSGTGGGGSGGGGSGGGGSEFEIVLTQSPTSMTASPGEQVTITCRASSSINYMHWYQQKPGASPRPWIYETSKLASGVPDRFSGSASGTSYSLTINNMEAEDAATYYCQQWNYPSWTFGGGTKLELKLEDLKNVFPPEVAVFEPSEAEISHTQKATLVCLATGFYPDHVELSWWVNGKEVHSGVCTDPQPLKEQPALNDSRYCLSSRLRVSATFWQNPRNHFRCQVQFYGLSENDEWTQDRAKPVTQIVSAEAWGRADDVIKIHWQEKKSNTILGSQEGNTMKTNDTYMKFSWLTVPEKSLDKEHRCIVRHENNKNGVDQEIIFPPIKTDVITMDPKDNCSKDANDTLLLQLTNTSAYYMYLLLLLKSVVYFAIITCCLLMAMVKRKDSRGRAKRSGSGATNFSLLKQAGDVEENPGPTSMDWIWRILFLVGAATGAHSFEEVQLVESGGGLVQPGRSLKLSCAASGFTFSDYNMAWVRQAPKKGLEWVATILYDGGRTYYRGSVKGRFTISRDNAKSTLYLRMDSLRSEDTATYYCATHSRGTDYFDYWGQGVMVTVSSTRIQNPDPAVYQLRDSKSSDKSVCLFTDFDSQTNVSQSKDSDVYITDKCVLDMRSMDFKSNSAVAWSNKSDFACANAFNNSIIPEDTFFPSPESSDSTDHVKPKETENTKQPSKSCHKPKAIVHTEKVNMMSLTVLGLRMLFAKTVAVNFLLTAKLFFLLTA

SEQ ID NO: 14830 - protein, 866 aa, synthetic construct
MALPVTALLLPLALLLHAARPEVQLVESGGGLVQPGGSLRLSCAASGFSFSDFWMSWVRQAPGKGLEWVATISQAGSEKDYVDSVKGRFTISRDNAKKSLYLQMNSLRAEDTAVYYCASGVYSFDYRGQGTLVTVSSGTGGGGSGGGGSGGGGSEFDIVMTQSPSSLAVSEGETVTINCKSSQSFLSSGDGKNYVAWYQYKPGQSPKLLIYWASTRQSGVPDRFIGSGSGTDFTLTISTVQAEDLAIYYCQQYYDTPLTFGSGTKLEIKLEDLKNVFPPEVAVFEPSEAEISHTQKATLVCLATGFYPDHVELSWWVNGKEVHSGVCTDPQPLKEQPALNDSRYCLSSRLRVSATFWQNPRNHFRCQVQFYGLSENDEWTQDRAKPVTQIVSAEAWGRADDVIKIHWQEKKSNTILGSQEGNTMKTNDTYMKFSWLTVPEKSLDKEHRCIVRHENNKNGVDQEIIFPPIKTDVITMDPKDNCSKDANDTLLLQLTNTSAYYMYLLLLLKSVVYFAIITCCLLMAMVKRKDSRGRAKRSGSGATNFSLLKQAGDVEENPGPTSMDWIWRILFLVGAATGAHSFEEVKLQESGPSLVQSSQTLSLTCTVSGFSLTSYHIHWVRQTPGKGLEWMGVMWSDGDTSYNSALKSRLSISRDTSQSQVFLKMNSLQTEDTATYYCARGYYSSYLYLWFAYWGQGTLVTVSSTRIQNPDPAVYQLRDSKSSDKSVCLFTDFDSQTNVSQSKDSDVYITDKCVLDMRSMDFKSNSAVAWSNKSDFACANAFNNSIIPEDTFFPSPESSDSTDHVKPKETENTKQPSKSCHKPKAIVHTEKVNMMSLTVLGLRMLFAKTVAVNFLLTAKLFFLLTA

SEQ ID NO: 14831 - protein, 870 aa, synthetic construct
MALPVTALLLPLALLLHAARPEVQLVESGGGLVQPGGSLRLSCAASGFSFSDFWMSWVRQAPGKGLEWVATISQAGSEKDYVDSVKGRFTISRDNAKKSLYLQMNSLRAEDTAVYYCASGVYSFDYRGQGTLVTVSSGTGGGGSGGGGSGGGGSEFDVLMTQTPVSLPVSLGGQVSISCRSSQSLVHSDGDTYLHWYLQKPGQSPQLLIYRVSNRFSGVPDRFSGSGSGTDFTLKISRVEPEDLGLYYCLQTTHFPPWTFGGGTKLEMKLEDLKNVFPPEVAVFEPSEAEISHTQKATLVCLATGFYPDHVELSWWVNGKEVHSGVCTDPQPLKEQPALNDSRYCLSSRLRVSATFWQNPRNHFRCQVQFYGLSENDEWTQDRAKPVTQIVSAEAWGRADDVIKIHWQEKKSNTILGSQEGNTMKTNDTYMKFSWLTVPEKSLDKEHRCIVRHENNKNGVDQEIIFPPIKTDVITMDPKDNCSKDANDTLLLQLTNTSAYYMYLLLLLKSVVYFAIITCCLLMAMVKRKDSRGRAKRSGSGATNFSLLKQAGDVEENPGPTSMDWIWRILFLVGAATGAHSFEQVQLQQSGPELRRPGSSVRLSCKASGYRIKDFLIHWIKNRPEHGLEWIGWIDPEDGETKYAQKFQTKATLTADTSSNTAYMQLSSLTSEDTATYFCARWGDVYYGLMRGHVMDAWGQGTSVTVSSTRIQNPDPAVYQLRDSKSSDKSVCLFTDFDSQTNVSQSKDSDVYITDKCVLDMRSMDFKSNSAVAWSNKSDFACANAFNNSIIPEDTFFPSPESSDSTDHVKPKETENTKQPSKSCHKPKAIVHTEKVNMMSLTVLGLRMLFAKTVAVNFLLTAKLFFLLTA

SEQ ID NO: 14832 - protein, 865 aa, synthetic construct
MALPVTALLLPLALLLHAARPEVQLVESGGGLVQPGGSLRLSCAASGFSFSDFWMSWVRQAPGKGLEWVATISQAGSEKDYVDSVKGRFTISRDNAKKSLYLQMNSLRAEDTAVYYCASGVYSFDYRGQGTLVTVSSGTGGGGSGGGGSGGGGSEFDIVMTQSPATLSLSPGERATLSCRSSKSLQNVNGNTYLYWFQQKPGQSPQLLIYRMSNLNSGVPDRFSGSGSGTEFTLTISSLEPEDFAVYYCMQHLEYPITFGAGTKLEIKLEDLKNVFPPEVAVFEPSEAEISHTQKATLVCLATGFYPDHVELSWWVNGKEVHSGVCTDPQPLKEQPALNDSRYCLSSRLRVSATFWQNPRNHFRCQVQFYGLSENDEWTQDRAKPVTQIVSAEAWGRADDVIKIHWQEKKSNTILGSQEGNTMKTNDTYMKFSWLTVPEKSLDKEHRCIVRHENNKNGVDQEIIFPPIKTDVITMDPKDNCSKDANDTLLLQLTNTSAYYMYLLLLLKSVVYFAIITCCLLMAMVKRKDSRGRAKRSGSGATNFSLLKQAGDVEENPGPTSMDWIWRILFLVGAATGAHSFEEVQLVESGGGLVKPGGSLKLSCAASGYTFTSYVMHWVRQAPGKGLEWIGYINPYNDGTKYNEKFQGRVTISSDKSISTAYMELSSLRSEDTAMYYCARGTYYYGTRVFDYWGQGTLVTVSSTRIQNPDPAVYQLRDSKSSDKSVCLFTDFDSQTNVSQSKDSDVYITDKCVLDMRSMDFKSNSAVAWSNKSDFACANAFNNSIIPEDTFFPSPESSDSTDHVKPKETENTKQPSKSCHKPKAIVHTEKVNMMSLTVLGLRMLFAKTVAVNFLLTAKLFFLLTA

SEQ ID NO: 14833 - protein, 861 aa, synthetic construct
MALPVTALLLPLALLLHAARPEVQLVESGGGLVQPGGSLRLSCAASGFSFSDFWMSWVRQAPGKGLEWVATISQAGSEKDYVDSVKGRFTISRDNAKKSLYLQMNSLRAEDTAVYYCASGVYSFDYRGQGTLVTVSSGTGGGGSGGGGSGGGGSEFDIQMTQSPSSLSASVGDRVTITCKASDHINNWLAWYQQKPGQAPKLLIYGATTLETGVPSRFSGSGSGTDYTLTISSLQPEDFATYYCQQSWNTPWTFGQGTKLEIKRLEDLKNVFPPEVAVFEPSEAEISHTQKATLVCLATGFYPDHVELSWWVNGKEVHSGVCTDPQPLKEQPALNDSRYCLSSRLRVSATFWQNPRNHFRCQVQFYGLSENDEWTQDRAKPVTQIVSAEAWGRADDVIKIHWQEKKSNTILGSQEGNTMKTNDTYMKFSWLTVPEKSLDKEHRCIVRHENNKNGVDQEIIFPPIKTDVITMDPKDNCSKDANDTLLLQLTNTSAYYMYLLLLLKSVVYFAIITCCLLMAMVKRKDSRGRAKRSGSGATNFSLLKQAGDVEENPGPTSMDWIWRILFLVGAATGAHSFEQVQLQQPGAELVKPGASVKMSCKASGYAFSSYWINWMKQKPGQGLEWIGQIYPGDGDTNYNGKFKGRATLTADTSSSTAYMQLSSLTSEDSAVYFCARSITTVVGCAMDYWGQGTSVTVSSTRIQNPDPAVYQLRDSKSSDKSVCLFTDFDSQTNVSQSKDSDVYITDKCVLDMRSMDFKSNSAVAWSNKSDFACANAFNNSIIPEDTFFPSPESSDSTDHVKPKETENTKQPSKSCHKPKAIVHTEKVNMMSLTVLGLRMLFAKTVAVNFLLTAKLFFLLTA

SEQ ID NO: 14834 - protein, 863 aa, synthetic construct
MALPVTALLLPLALLLHAARPEVQLVESGGGLVQPGGSLRLSCAASGFSFSDFWMSWVRQAPGKGLEWVATISQAGSEKDYVDSVKGRFTISRDNAKKSLYLQMNSLRAEDTAVYYCASGVYSFDYRGQGTLVTVSSGTGGGGSGGGGSGGGGSEFQIVLSQSPAILSASPGEKVTMTCRASSSVSYMHWYQQKPGSSPKPWIYATSNLASGVPARFSGSGSGTSYSFTISRVEAEDAATYYCQQWTFNPPTFGGGTRLEIKRTVAALEDLKNVFPPEVAVFEPSEAEISHTQKATLVCLATGFYPDHVELSWWVNGKEVHSGVCTDPQPLKEQPALNDSRYCLSSRLRVSATFWQNPRNHFRCQVQFYGLSENDEWTQDRAKPVTQIVSAEAWGRADDVIKIHWQEKKSNTILGSQEGNTMKTNDTYMKFSWLTVPEKSLDKEHRCIVRHENNKNGVDQEIIFPPIKTDVITMDPKDNCSKDANDTLLLQLTNTSAYYMYLLLLLKSVVYFAIITCCLLMAMVKRKDSRGRAKRSGSGATNFSLLKQAGDVEENPGPTSMDWIWRILFLVGAATGAHSFEQAYLQQSGAELVRPGASVKMSCKASGYTFTSYNMHWVKQTPRQGLEWIGGIYPGNGDTSYNQKFKGKATLTVGKSSSTAYMQLSSLTSEDSAVYFCARYDYNYAMDYWGQGTSVTVSSASTRIQNPDPAVYQLRDSKSSDKSVCLFTDFDSQTNVSQSKDSDVYITDKCVLDMRSMDFKSNSAVAWSNKSDFACANAFNNSIIPEDTFFPSPESSDSTDHVKPKETENTKQPSKSCHKPKAIVHTEKVNMMSLTVLGLRMLFAKTVAVNFLLTAKLFFLLTA

SEQ ID NO: 14835 - protein, 861 aa, synthetic construct
MALPVTALLLPLALLLHAARPEVQLVESGGGLVQPGGSLRLSCAASGFSFSDFWMSWVRQAPGKGLEWVATISQAGSEKDYVDSVKGRFTISRDNAKKSLYLQMNSLRAEDTAVYYCASGVYSFDYRGQGTLVTVSSGTGGGGSGGGGSGGGGSEFEIVLTQSPATLSLSPGERATLSCRASQSVSSYLAWYQQKPGQAPRLLIYDASNRATGIPARFSGSGSGTDFTLTISSLEPEDFAVYYCQQRSNWPITFGQGTRLEIKLEDLKNVFPPEVAVFEPSEAEISHTQKATLVCLATGFYPDHVELSWWVNGKEVHSGVCTDPQPLKEQPALNDSRYCLSSRLRVSATFWQNPRNHFRCQVQFYGLSENDEWTQDRAKPVTQIVSAEAWGRADDVIKIHWQEKKSNTILGSQEGNTMKTNDTYMKFSWLTVPEKSLDKEHRCIVRHENNKNGVDQEIIFPPIKTDVITMDPKDNCSKDANDTLLLQLTNTSAYYMYLLLLLKSVVYFAIITCCLLMAMVKRKDSRGRAKRSGSGATNFSLLKQAGDVEENPGPTSMDWIWRILFLVGAATGAHSFEEVQLVESGGGLVQPDRSLRLSCAASGFTFHDYAMHWVRQAPGKGLEWVSTISWNSGTIGYADSVKGRFTISRDNAKNSLYLQMNSLRAEDTALYYCAKDIQYGNYYYGMDVWGQGTTVTVSSTRIQNPDPAVYQLRDSKSSDKSVCLFTDFDSQTNVSQSKDSDVYITDKCVLDMRSMDFKSNSAVAWSNKSDFACANAFNNSIIPEDTFFPSPESSDSTDHVKPKETENTKQPSKSCHKPKAIVHTEKVNMMSLTVLGLRMLFAKTVAVNFLLTAKLFFLLTA

SEQ ID NO: 14836 - protein, 856 aa, synthetic construct
MALPVTALLLPLALLLHAARPEVQLVESGGGLVQPGGSLRLSCAASGFSFSDFWMSWVRQAPGKGLEWVATISQAGSEKDYVDSVKGRFTISRDNAKKSLYLQMNSLRAEDTAVYYCASGVYSFDYRGQGTLVTVSSGTGGGGSGGGGSGGGGSEFDIQMTQSPSSLSASVGDRVTINCKASQDINSYLSWFQQKPGKAPKTLIYRANRLVDGVPSRFSGSGSGQDYTLTISSLQPEDFATYYCLQYDEFPLTFGGGTKVEIKLEDLKNVFPPEVAVFEPSEAEISHTQKATLVCLATGFYPDHVELSWWVNGKEVHSGVCTDPQPLKEQPALNDSRYCLSSRLRVSATFWQNPRNHFRCQVQFYGLSENDEWTQDRAKPVTQIVSAEAWGRADDVIKIHWQEKKSNTILGSQEGNTMKTNDTYMKFSWLTVPEKSLDKEHRCIVRHENNKNGVDQEIIFPPIKTDVITMDPKDNCSKDANDTLLLQLTNTSAYYMYLLLLLKSVVYFAIITCCLLMAMVKRKDSRGRAKRSGSGATNFSLLKQAGDVEENPGPTSMDWIWRILFLVGAATGAHSFEQVQLVQSGAEVKKPGASVKVSCKASGYTFTNYDINWVRQAPGQGLEWIGWIYPGDGSTKYNEKFKAKATLTADTSTSTAYMELRSLRSDDTAVYYCASGYEDAMDYWGQGTTVTVSSTRIQNPDPAVYQLRDSKSSDKSVCLFTDFDSQTNVSQSKDSDVYITDKCVLDMRSMDFKSNSAVAWSNKSDFACANAFNNSIIPEDTFFPSPESSDSTDHVKPKETENTKQPSKSCHKPKAIVHTEKVNMMSLTVLGLRMLFAKTVAVNFLLTAKLFFLLTA

SEQ ID NO: 14837 - protein, 858 aa, synthetic construct
MALPVTALLLPLALLLHAARPEVQLVESGGGLVQPGGSLRLSCAASGFSFSDFWMSWVRQAPGKGLEWVATISQAGSEKDYVDSVKGRFTISRDNAKKSLYLQMNSLRAEDTAVYYCASGVYSFDYRGQGTLVTVSSGTGGGGSGGGGSGGGGSEFDIVMTQTPLSLSVTPGQPASISCKSSQSLLDGDGKTYLNWLLQKPGQSPQRLIYLVSKLDSGVPDRFSGSGSGTDFTLKISRVEAEDVGVYYCWQGTHFPRTFGQGTKLEIKLEDLKNVFPPEVAVFEPSEAEISHTQKATLVCLATGFYPDHVELSWWVNGKEVHSGVCTDPQPLKEQPALNDSRYCLSSRLRVSATFWQNPRNHFRCQVQFYGLSENDEWTQDRAKPVTQIVSAEAWGRADDVIKIHWQEKKSNTILGSQEGNTMKTNDTYMKFSWLTVPEKSLDKEHRCIVRHENNKNGVDQEIIFPPIKTDVITMDPKDNCSKDANDTLLLQLTNTSAYYMYLLLLLKSVVYFAIITCCLLMAMVKRKDSRGRAKRSGSGATNFSLLKQAGDVEENPGPTSMDWIWRILFLVGAATGAHSFEQVQLVQSGAEVKKPGASVKVSCKASGYTFKDTYIHWVRQAPGQGLEWMGRIDPANGNTKYDPKFQGRVTMTRDTSISTAYMELSRLRSDDTAVYYCARRGGVDWGQGTLVTVSSTRIQNPDPAVYQLRDSKSSDKSVCLFTDFDSQTNVSQSKDSDVYITDKCVLDMRSMDFKSNSAVAWSNKSDFACANAFNNSIIPEDTFFPSPESSDSTDHVKPKETENTKQPSKSCHKPKAIVHTEKVNMMSLTVLGLRMLFAKTVAVNFLLTAKLFFLLTA

SEQ ID NO: 14838 - protein, 859 aa, synthetic construct
MALPVTALLLPLALLLHAARPEVQLVESGGGLVQPGGSLRLSCAASGFSFSDFWMSWVRQAPGKGLEWVATISQAGSEKDYVDSVKGRFTISRDNAKKSLYLQMNSLRAEDTAVYYCASGVYSFDYRGQGTLVTVSSGTGGGGSGGGGSGGGGSEFDIQMTQSPSSLSASVGDRVTITCKASQDVSTAVAWFQQKPGKAPKLLIYSPSYRYTGVPSRFSGSGSGTDFTLTISSLQPEDFTYYCQQLYSTPYTFGQGTKVEIKLEDLKNVFPPEVAVFEPSEAEISHTQKATLVCLATGFYPDHVELSWWVNGKEVHSGVCTDPQPLKEQPALNDSRYCLSSRLRVSATFWQNPRNHFRCQVQFYGLSENDEWTQDRAKPVTQIVSAEAWGRADDVIKIHWQEKKSNTILGSQEGNTMKTNDTYMKFSWLTVPEKSLDKEHRCIVRHENNKNGVDQEIIFPPIKTDVITMDPKDNCSKDANDTLLLQLTNTSAYYMYLLLLLKSVVYFAIITCCLLMAMVKRKDSRGRAKRSGSGATNFSLLKQAGDVEENPGPTSMDWIWRILFLVGAATGAHSFEEVQLVQSGAEVKKPGASVKVSCKASGYTFTDYYLDVVVRQAPGQGLEWIGRVNPYNGGTIYNQKFKGRVTLTRDTSTSTAYLELSSLRSEDTAVYYCARDHYRYDPLLDYWGQGTLVTVSSTRIQNPDPAVYQLRDSKSSDKSVCLFTDFDSQTNVSQSKDSDVYITDKCVLDMRSMDFKSNSAVAWSNKSDFACANAFNNSIIPEDTFFPSPESSDSTDHVKPKETENTKQPSKSCHKPKAIVHTEKVNMMSLTVLGLRMLFAKTVAVNFLLTAKLFFLLTA

SEQ ID NO: 14839 - protein, 865 aa, synthetic construct
MALPVTALLLPLALLLHAARPEVQLVESGGGLVQPGGSLRLSCAASGFSFSDFWMSWVRQAPGKGLEWVATISQAGSEKDYVDSVKGRFTISRDNAKKSLYLQMNSLRAEDTAVYYCASGVYSFDYRGQGTLVTVSSGTGGGGSGGGGSGGGGSEFDIQMTQSPSSLSASVGDRVTITCRASQSVSTSSYNYMHWYQQKPGKPPKLLIKYASNLESGVPSRFSGSGSGTDFTLTISSLQPEDFATYYCQHSWEIPLTFGQGTKVEIKLEDLKNVFPPEVAVFEPSEAEISHTQKATLVCLATGFYPDHVELSWWVNGKEVHSGVCTDPQPLKEQPALNDSRYCLSSRLRVSATFWQNPRNHFRCQVQFYGLSENDEWTQDRAKPVTQIVSAEAWGRADDVIKIHWQEKKSNTILGSQEGNTMKTNDTYMKFSWLTVPEKSLDKEHRCIVRHENNKNGVDQEIIFPPIKTDVITMDPKDNCSKDANDTLLLQLTNTSAYYMYLLLLLKSVVYFAIITCCLLMAMVKRKDSRGRAKRSGSGATNFSLLKQAGDVEENPGPTSMDWIWRILFLVGAATGAHSFEEVQLVQSGAEVKKPGASVKVSCKASGYSFTDYYMHWVRQAPGQGLEWIGRINPYNGAAFYSQNFKDRVTLTVDTSTSTAYLELSSLRSEDTAVYYCAIERGADLEGYAMDYWGQGTLVTVSSTRIQNPDPAVYQLRDSKSSDKSVCLFTDFDSQTNVSQSKDSDVYITDKCVLDMRSMDFKSNSAVAWSNKSDFACANAFNNSIIPEDTFFPSPESSDSTDHVKPKETENTKQPSKSCHKPKAIVHTEKVNMMSLTVLGLRMLFAKTVAVNFLLTAKLFFLLTA

SEQ ID NO: 14840 - protein, 863 aa, synthetic construct
MALPVTALLLPLALLLHAARPEVQLVESGGGLVQPGGSLRLSCAASGFSFSDFWMSWVRQAPGKGLEWVATISQAGSEKDYVDSVKGRFTISRDNAKKSLYLQMNSLRAEDTAVYYCASGVYSFDYRGQGTLVTVSSGTGGGGSGGGGSGGGGSEFEIVLTQSPATLSASPGERVTLTCRASSNVISSYVHWYQQKPGSSPRLFLYSTSNLASGVPSRFSGSGSGTDFTFTISSLEAEDAATYYCQQYSGYPLTFGQGTRLEIKLEDLKNVFPPEVAVFEPSEAEISHTQKATLVCLATGFYPDHVELSWWVNGKEVHSGVCTDPQPLKEQPALNDSRYCLSSRLRVSATFWQNPRNHFRCQVQFYGLSENDEWTQDRAKPVTQIVSAEAWGRADDVIKIHWQEKKSNTILGSQEGNTMKTNDTYMKFSWLTVPEKSLDKEHRCIVRHENNKNGVDQEIIFPPIKTDVITMDPKDNCSKDANDTLLLQLTNTSAYYMYLLLLLKSVVYFAIITCCLLMAMVKRKDSRGRAKRSGSGATNFSLLKQAGDVEENPGPTSMDWIWRILFLVGAATGAHSFEQVQLQESGPGLVKPSETLSLTCAVSGYSITSAYYWNWIRQPPGKGLEWIGYISYDGRNNYNPSLKNRITINPDTSKNQFSLQLNSVTPEDTAVYYCAREGDYDVGNYYAMDYWGQGTLVTVSSTRIQNPDPAVYQLRDSKSSDKSVCLFTDFDSQTNVSQSKDSDVYITDKCVLDMRSMDFKSNSAVAWSNKSDFACANAFNNSIIPEDTFFPSPESSDSTDHVKPKETENTKQPSKSCHKPKAIVHTEKVNMMSLTVLGLRMLFAKTVAVNFLLTAKLFFLLTA

SEQ ID NO: 14841 - protein, 863 aa, synthetic construct
MALPVTALLLPLALLLHAARPEVQLVESGGGLVQPGGSLRLSCAASGFSFSDFWMSWVRQAPGKGLEWVATISQAGSEKDYVDSVKGRFTISRDNAKKSLYLQMNSLRAEDTAVYYCASGVYSFDYRGQGTLVTVSSGTGGGGSGGGGSGGGGSEFEIVLTQSPATLSLSPGERATLSCRASSNVISSYVHWYQQKPGQAPRLLIYSTSNLASGIPARFSGSGSGTDFTLTISSLEPEDFAVYYCQQYSGYPLTFGQGTRLEIKLEDLKNVFPPEVAVFEPSEAEISHTQKATLVCLATGFYPDHVELSWWVNGKEVHSGVCTDPQPLKEQPALNDSRYCLSSRLRVSATFWQNPRNHFRCQVQFYGLSENDEWTQDRAKPVTQIVSAEAWGRADDVIKIHWQEKKSNTILGSQEGNTMKTNDTYMKFSWLTVPEKSLDKEHRCIVRHENNKNGVDQEIIFPPIKTDVITMDPKDNCSKDANDTLLLQLTNTSAYYMYLLLLLKSVVYFAIITCCLLMAMVKRKDSRGRAKRSGSGATNFSLLKQAGDVEENPGPTSMDWIWRILFLVGAATGAHSFEEVQLVESGGGLVQPGRSLRLSCAASGYSITSAYYWNWVRQAPGKGLEWVSYISYDGRNNYNPSLKNRFTISRDNAKKSLYLQMNSLRAEDTALYYCAKEGDYDVGNYYAMDYWGQGTTVTVSSTRIQNPDPAVYQLRDSKSSDKSVCLFTDFDSQTNVSQSKDSDVYITDKCVLDMRSMDFKSNSAVAWSNKSDFACANAFNNSIIPEDTFFPSPESSDSTDHVKPKETENTKQPSKSCHKPKAIVHTEKVNMMSLTVLGLRMLFAKTVAVNFLLTAKLFFLLTA

SEQ ID NO: 14842 - protein, 862 aa, synthetic construct
MALPVTALLLPLALLLHAARPEVQLVESGGGLVQPGGSLRLSCAASGFSFSDFWMSWVRQAPGKGLEWVATISQAGSEKDYVDSVKGRFTISRDNAKKSLYLQMNSLRAEDTAVYYCASGVYSFDYRGQGTLVTVSSGTGGGGSGGGGSGGGGSEFDVVMTQTPLSLPVSLGDQASISCRSSQSLVHSNGNTYLRWYLQKPGQSPKVLIYKVSNRVSGVPDRFSGSGSGTDFTLKINRVEAEDLGVYFCSQSTHVPWTFGGGTKLEIKLEDLKNVFPPEVAVFEPSEAEISHTQKATLVCLATGFYPDHVELSWWVNGKEVHSGVCTDPQPLKEQPALNDSRYCLSSRLRVSATFWQNPRNHFRCQVQFYGLSENDEWTQDRAKPVTQIVSAEAWGRADDVIKIHWQEKKSNTILGSQEGNTMKTNDTYMKFSWLTVPEKSLDKEHRCIVRHENNKNGVDQEIIFPPIKTDVITMDPKDNCSKDANDTLLLQLTNTSAYYMYLLLLLKSVVYFAIITCCLLMAMVKRKDSRGRAKRSGSGATNFSLLKQAGDVEENPGPTSMDWIWRILFLVGAATGAHSFEGVKLDETGGGLVQPGGAMKLSCVTSGFTFGHYWMNWVRQSPEKGLEWVAQFRNKPYNYETYYSDSVKGRFTISRDDSKSSVYLQMNNLRVEDTGIYYCTGASYGMEYLGQGTSVTVSTTRIQNPDPAVYQLRDSKSSDKSVCLFTDFDSQTNVSQSKDSDVYITDKCVLDMRSMDFKSNSAVAWSNKSDFACANAFNNSIIPEDTFFPSPESSDSTDHVKPKETENTKQPSKSCHKPKAIVHTEKVNMMSLTVLGLRMLFAKTVAVNFLLTAKLFFLLTA

SEQ ID NO: 14843 - protein, 868 aa, synthetic construct
MALPVTALLLPLALLLHAARPEVQLVESGGGLVQPGGSLRLSCAASGFSFSDFWMSWVRQAPGKGLEWVATISQAGSEKDYVDSVKGRFTISRDNAKKSLYLQMNSLRAEDTAVYYCASGVYSFDYRGQGTLVTVSSGTGGGGSGGGGSGGGGSEFQVQLVESGGNLVQPGGSLRLSCAASGFTFGSFSMSWVRQAPGGGLEWVAGLSARSSLTHYADSVKGRFTISRDNAKNSVYLQMNSLRVEDTAVYYCARRSYDSSGYWGHFYSYMDVWGQGTLVTVSLEDLKNVFPPEVAVFEPSEAEISHTQKATLVCLATGFYPDHVELSWWVNGKEVHSGVCTDPQPLKEQPALNDSRYCLSSRLRVSATFWQNPRNHFRCQVQFYGLSENDEWTQDRAKPVTQIVSAEAWGRADDVIKIHWQEKKSNTILGSQEGNTMKTNDTYMKFSWLTVPEKSLDKEHRCIVRHENNKNGVDQEIIFPPIKTDVITMDPKDNCSKDANDTLLLQLTNTSAYYMYLLLLLKSVVYFAIITCCLLMAMVKRKDSRGRAKRSGSGATNFSLLKQAGDVEENPGPTSMDWIWRILFLVGAATGAHSFESVLTQPSSVSAAPGQKVTISCSGSTSNIGNNYVSWYQQHPGKAPKLMIYDVSKRPSGVPDRFSGSKSGNSASLDISGLQSEDEADYYCAAWDDSLSEFLFGTGTKLTVLGTRIQNPDPAVYQLRDSKSSDKSVCLFTDFDSQTNVSQSKDSDVYITDKCVLDMRSMDFKSNSAVAWSNKSDFACANAFNNSIIPEDTFFPSPESSDSTDHVKPKETENTKQPSKSCHKPKAIVHTEKVNMMSLTVLGLRMLFAKTVAVNFLLTAKLFFLLTA

SEQ ID NO: 14844 - protein, 863 aa, synthetic construct
MALPVTALLLPLALLLHAARPEVQLVESGGGLVQPGGSLRLSCAASGFSFSDFWMSWVRQAPGKGLEWVATISQAGSEKDYVDSVKGRFTISRDNAKKSLYLQMNSLRAEDTAVYYCASGVYSFDYRGQGTLVTVSSGTGGGGSGGGGSGGGGSEFDVVMTQSPSSLSASVGDRVTITCQSSLDISHYLNWYQQKPGKAPKLLIYDASNLETGVPSRFSGSGSGTHFTFTISSLQPEDFATYYCQQYDNLPLTFGGGTKLEIKRLEDLKNVFPPEVAVFEPSEAEISHTQKATLVCLATGFYPDHVELSWWVNGKEVHSGVCTDPQPLKEQPALNDSRYCLSSRLRVSATFWQNPRNHFRCQVQFYGLSENDEWTQDRAKPVTQIVSAEAWGRADDVIKIHWQEKKSNTILGSQEGNTMKTNDTYMKFSWLTVPEKSLDKEHRCIVRHENNKNGVDQEIIFPPIKTDVITMDPKDNCSKDANDTLLLQLTNTSAYYMYLLLLLKSVVYFAIITCCLLMAMVKRKDSRGRAKRSGSGATNFSLLKQAGDVEENPGPTSMDWIWRILFLVGAATGAHSFEQVQLVQSGGGVVQPGGSLRVSCAASGVTLSDYGMHWVRQAPGKGLEWVAFIRNDGSDKYYADSVKGRFTISRDNSEKTVSLQMSSLRAEDTAVYYCAKNGESGPLDYWYLDLWGRGTLVTVSSTRIQNPDPAVYQLRDSKSSDKSVCLFTDFDSQTNVSQSKDSDVYITDKCVLDMRSMDFKSNSAVAWSNKSDFACANAFNNSIIPEDTFFPSPESSDSTDHVKPKETENTKQPSKSCHKPKAIVHTEKVNMMSLTVLGLRMLFAKTVAVNFLLTAKLFFLLTA

SEQ ID NO: 14845 - protein, 867 aa, synthetic construct
MALPVTALLLPLALLLHAARPEVQLVESGGGLVQPGGSLRLSCAASGFSFSDFWMSWVRQAPGKGLEWVATISQAGSEKDYVDSVKGRFTISRDNAKKSLYLQMNSLRAEDTAVYYCASGVYSFDYRGQGTLVTVSSGTGGGGSGGGGSGGGGSEFSYELTQPPSVSGTPGQRVAISCSGSSSNIGTRMVTWYQHVPGTAPKLLIFNNNQRPSGVPDRFSASKSGTSASLAIIGLQSDDEADYYCATWDDNVKSYVFGTGTKVTVLGSRLEDLKNVFPPEVAVFEPSEAEISHTQKATLVCLATGFYPDHVELSWWVNGKEVHSGVCTDPQPLKEQPALNDSRYCLSSRLRVSATFWQNPRNHFRCQVQFYGLSENDEWTQDRAKPVTQIVSAEAWGRADDVIKIHWQEKKSNTILGSQEGNTMKTNDTYMKFSWLTVPEKSLDKEHRCIVRHENNKNGVDQEIIFPPIKTDVITMDPKDNCSKDANDTLLLQLTNTSAYYMYLLLLLKSVVYFAIITCCLLMAMVKRKDSRGRAKRSGSGATNFSLLKQAGDVEENPGPTSMDWIWRILFLVGAATGAHSFELEMAQVQLQQWGAGLLKPSETLSLTCAVYGGSFSGYYWSWIRQPPGKGLEWIGEINHSGSTNYNPSLKSRVTISVDTSKNQFSLKLSSVTAADTAVYYCARAPQSWYVGDVWGQGTLVTVSSTRIQNPDPAVYQLRDSKSSDKSVCLFTDFDSQTNVSQSKDSDVYITDKCVLDMRSMDFKSNSAVAWSNKSDFACANAFNNSIIPEDTFFPSPESSDSTDHVKPKETENTKQPSKSCHKPKAIVHTEKVNMMSLTVLGLRMLFAKTVAVNFLLTAKLFFLLTA

SEQ ID NO: 14846 - protein, 864 aa, synthetic construct
MALPVTALLLPLALLLHAARPEVQLVESGGGLVQPGGSLRLSCAASGFSFSDFWMSWVRQAPGKGLEWVATISQAGSEKDYVDSVKGRFTISRDNAKKSLYLQMNSLRAEDTAVYYCASGVYSFDYRGQGTLVTVSSGTGGGGSGGGGSGGGGSEFQSVLTQPPSLSVAPGKTASITCGGNNIGMKSVHWYQQRPGQAPVLVIYYDSDRPSGIPGRFSGSNSGNTATLTISRVEAGDEADYYCQVWDTTGDHPGYVFGTGTKVTVLLEDLKNVFPPEVAVFEPSEAEISHTQKATLVCLATGFYPDHVELSWWVNGKEVHSGVCTDPQPLKEQPALNDSRYCLSSRLRVSATFWQNPRNHFRCQVQFYGLSENDEWTQDRAKPVTQIVSAEAWGRADDVIKIHWQEKKSNTILGSQEGNTMKTNDTYMKFSWLTVPEKSLDKEHRCIVRHENNKNGVDQEIIFPPIKTDVITMDPKDNCSKDANDTLLLQLTNTSAYYMYLLLLLKSVVYFAIITCCLLMAMVKRKDSRGRAKRSGSGATNFSLLKQAGDVEENPGPTSMDWIWRILFLVGAATGAHSFEQVQLVQSGAEVKKPGSSVKVSCKASGGTFSSYAISWVRQAPGQGLEWMGGIIPIFGTANYAQKFQGRVTITADESTSTAYMELSSLRSEDTAVYYCARGVYGYSGSAPYDEWGQGTLVTVSSTRIQNPDPAVYQLRDSKSSDKSVCLFTDFDSQTNVSQSKDSDVYITDKCVLDMRSMDFKSNSAVAWSNKSDFACANAFNNSIIPEDTFFPSPESSDSTDHVKPKETENTKQPSKSCHKPKAIVHTEKVNMMSLTVLGLRMLFAKTVAVNFLLTAKLFFLLTA

SEQ ID NO: 14847 - protein, 862 aa, synthetic construct
MALPVTALLLPLALLLHAARPEVQLVESGGGLVQPGGSLRLSCAASGFSFSDFWMSWVRQAPGKGLEWVATISQAGSEKDYVDSVKGRFTISRDNAKKSLYLQMNSLRAEDTAVYYCASGVYSFDYRGQGTLVTVSSGTGGGGSGGGGSGGGGSEFEVQLVESGGGLVQPGRSLRLSCAASGFTFDDYAMHWVRQAPGKGLEWVSGISWNSGSIGYADSVKGRFTISRDNAKNSLYLQMNSLRAEDTALYYCAKDKGGGYYDFWSGSDYWGQGTLVTVSSLEDLKNVFPPEVAVFEPSEAEISHTQKATLVCLATGFYPDHVELSWWVNGKEVHSGVCTDPQPLKEQPALNDSRYCLSSRLRVSATFWQNPRNHFRCQVQFYGLSENDEWTQDRAKPVTQIVSAEAWGRADDVIKIHWQEKKSNTILGSQEGNTMKTNDTYMKFSWLTVPEKSLDKEHRCIVRHENNKNGVDQEIIFPPIKTDVITMDPKDNCSKDANDTLLLQLTNTSAYYMYLLLLLKSVVYFAIITCCLLMAMVKRKDSRGRAKRSGSGATNFSLLKQAGDVEENPGPTSMDWIWRILFLVGAATGAHSFESSELTQDPAVSVALGQTVRITCQGDSLRSYYASWYQQKPGQAPVLVIYGKNNRPSGIPDRFSGSSSGNTASLTITGAQAEDEADYYCNSRDSSGWVFGGGTKLTVLTRIQNPDPAVYQLRDSKSSDKSVCLFTDFDSQTNVSQSKDSDVYITDKCVLDMRSMDFKSNSAVAWSNKSDFACANAFNNSIIPEDTFFPSPESSDSTDHVKPKETENTKQPSKSCHKPKAIVHTEKVNMMSLTVLGLRMLFAKTVAVNFLLTAKLFFLLTA

SEQ ID NO: 14848 - protein, 871 aa, synthetic construct
MALPVTALLLPLALLLHAARPEVQLVESGGGLVQPGGSLRLSCAASGFSFSDFWMSWVRQAPGKGLEWVATISQAGSEKDYVDSVKGRFTISRDNAKKSLYLQMNSLRAEDTAVYYCASGVYSFDYRGQGTLVTVSSGTGGGGSGGGGSGGGGSEFEVQLQQSGPGLVKPSQTLSLTCAISGDSVLSNSDTWNWIRQSPSRGLEWLGRTYHRSTWYDDYASSVRGRVSINVDTSKNQYSLQLNAVTPEDTGVYYCARDRLQDGNSWSDAFDVWGQGTMVTVSSLEDLKNVFPPEVAVFEPSEAEISHTQKATLVCLATGFYPDHVELSWWVNGKEVHSGVCTDPQPLKEQPALNDSRYCLSSRLRVSATFWQNPRNHFRCQVQFYGLSENDEWTQDRAKPVTQIVSAEAWGRADDVIKIHWQEKKSNTILGSQEGNTMKTNDTYMKFSWLTVPEKSLDKEHRCIVRHENNKNGVDQEIIFPPIKTDVITMDPKDNCSKDANDTLLLQLTNTSAYYMYLLLLLKSVVYFAIITCCLLMAMVKRKDSRGRAKRSGSGATNFSLLKQAGDVEENPGPTSMDWIWRILFLVGAATGAHSFEQSALTQPASVSGSPGQSITISCTGTSSDVGGYNYVSWYQQHPGKAPKLMIYDVSNRPSGVSNRFSGSKSGNTASLTISGLQAEDEADYYCSSYTSSSTLVYVFGTGTKVTVLTRIQNPDPAVYQLRDSKSSDKSVCLFTDFDSQTNVSQSKDSDVYITDKCVLDMRSMDFKSNSAVAWSNKSDFACANAFNNSIIPEDTFFPSPESSDSTDHVKPKETENTKQPSKSCHKPKAIVHTEKVNMMSLTVLGLRMLFAKTVAVNFLLTAKLFFLLTA

SEQ ID NO: 14849 - protein, 849 aa, synthetic construct
MALPVTALLLPLALLLHAARPEVQLVESGGGLVQPGGSLRLSCAASGFSFSDFWMSWVRQAPGKGLEWVATISQAGSEKDYVDSVKGRFTISRDNAKKSLYLQMNSLRAEDTAVYYCASGVYSFDYRGQGTLVTVSSGTGGGGSGGGGSGGGGSEFQVQLVQSGAEVKKPGASVKVSCKASGYTFTSYDINWVRQATGQGLEWMGWMNPNSGNTGYAQKFQGRVTMTRNTSISTAYMELSSLRSEDTAVYYCARGDSTKVEIKLEDLKNVFPPEVAVFEPSEAEISHTQKATLVCLATGFYPDHVELSWWVNGKEVHSGVCTDPQPLKEQPALNDSRYCLSSRLRVSATFWQNPRNHFRCQVQFYGLSENDEWTQDRAKPVTQIVSAEAWGRADDVIKIHWQEKKSNTILGSQEGNTMKTNDTYMKFSWLTVPEKSLDKEHRCIVRHENNKNGVDQEIIFPPIKTDVITMDPKDNCSKDANDTLLLQLTNTSAYYMYLLLLLKSVVYFAIITCCLLMAMVKRKDSRGRAKRSGSGATNFSLLKQAGDVEENPGPTSMDWIWRILFLVGAATGAHSFEQSVLTQPRSVSGSPGQSVTISCTGTSSDVGGYNYVSWYQQHPGEAPKLIIYDADKRPSGISNRFSSGKSGNTASLTISGLQVEDEADYYCCSYAGGSTWVFGGGTKVTVLTRIQNPDPAVYQLRDSKSSDKSVCLFTDFDSQTNVSQSKDSDVYITDKCVLDMRSMDFKSNSAVAWSNKSDFACANAFNNSIIPEDTFFPSPESSDSTDHVKPKETENTKQPSKSCHKPKAIVHTEKVNMMSLTVLGLRMLFAKTVAVNFLLTAKLFFLLTA

SEQ ID NO: 14850 - protein, 871 aa, synthetic construct
MALPVTALLLPLALLLHAARPEVQLVESGGGLVQPGGSLRLSCAASGFSFSDFWMSWVRQAPGKGLEWVATISQAGSEKDYVDSVKGRFTISRDNAKKSLYLQMNSLRAEDTAVYYCASGVYSFDYRGQGTLVTVSSGTGGGGSGGGGSGGGGSEFEVQLQQSGPGLVKPSQTLSLTCAISGDSVSSNSAAWNWIRQSPSRGLEWLGRTYYRSKWYSDYAVSVKSRITINPDTSKNQFSLQLNSVTPEDTAVYYCARDPYDFWSGYPDAFDIWGQGTMVTVSSLEDLKNVFPPEVAVFEPSEAEISHTQKATLVCLATGFYPDHVELSWWVNGKEVHSGVCTDPQPLKEQPALNDSRYCLSSRLRVSATFWQNPRNHFRCQVQFYGLSENDEWTQDRAKPVTQIVSAEAWGRADDVIKIHWQEKKSNTILGSQEGNTMKTNDTYMKFSWLTVPEKSLDKEHRCIVRHENNKNGVDQEIIFPPIKTDVITMDPKDNCSKDANDTLLLQLTNTSAYYMYLLLLLKSVVYFAIITCCLLMAMVKRKDSRGRAKRSGSGATNFSLLKQAGDVEENPGPTSMDWIWRILFLVGAATGAHSFEQSALTQPASVSGSPGQSITISCTGTSSDVGGYNYVSWYQQHPGKAPKVIISEVNNRPSGVSHRFSGSKSGNTASLTISGLQAEDEADYFCSSYTSGRTLYVFGTGSKVTVLGTRIQNPDPAVYQLRDSKSSDKSVCLFTDFDSQTNVSQSKDSDVYITDKCVLDMRSMDFKSNSAVAWSNKSDFACANAFNNSIIPEDTFFPSPESSDSTDHVKPKETENTKQPSKSCHKPKAIVHTEKVNMMSLTVLGLRMLFAKTVAVNFLLTAKLFFLLTA

SEQ ID NO: 14851 - protein, 870 aa, synthetic construct
MALPVTALLLPLALLLHAARPEVQLVESGGGLVQPGGSLRLSCAASGFSFSDFWMSWVRQAPGKGLEWVATISQAGSEKDYVDSVKGRFTISRDNAKKSLYLQMNSLRAEDTAVYYCASGVYSFDYRGQGTLVTVSSGTGGGGSGGGGSGGGGSEFQSALTQPASASGSPGQSVTISCTGTSSDVGGYNYVSWYQQHPGKAPKLMIYDVSNRPSGVSNRFSGSKSGNTASLTISGLQAEDEADYYCSSYTSSSTLYVFGTGTQLTVLLEDLKNVFPPEVAVFEPSEAEISHTQKATLVCLATGFYPDHVELSWWVNGKEVHSGVCTDPQPLKEQPALNDSRYCLSSRLRVSATFWQNPRNHFRCQVQFYGLSENDEWTQDRAKPVTQIVSAEAWGRADDVIKIHWQEKKSNTILGSQEGNTMKTNDTYMKFSWLTVPEKSLDKEHRCIVRHENNKNGVDQEIIFPPIKTDVITMDPKDNCSKDANDTLLLQLTNTSAYYMYLLLLLKSVVYFAIITCCLLMAMVKRKDSRGRAKRSGSGATNFSLLKQAGDVEENPGPTSMDWIWRILFLVGAATGAHSFEEVQLQQSGPGLVKPSQTLSLTCAISGDSMLSNSDTWNWIRQSPSRGLEWLGRTYHRSTWYDDYASSVRGRVSINVDTSKNQYSLQLNAVTPEDTGVYYCARVRLQDGNSWSDAFDVWGQGTMVTVSSTRIQNPDPAVYQLRDSKSSDKSVCLFTDFDSQTNVSQSKDSDVYITDKCVLDMRSMDFKSNSAVAWSNKSDFACANAFNNSIIPEDTFFPSPESSDSTDHVKPKETENTKQPSKSCHKPKAIVHTEKVNMMSLTVLGLRMLFAKTVAVNFLLTAKLFFLLTA

SEQ ID NO: 14852 - protein, 870 aa, synthetic construct
MALPVTALLLPLALLLHAARPEVQLVESGGGLVQPGGSLRLSCAASGFSFSDFWMSWVRQAPGKGLEWVATISQAGSEKDYVDSVKGRFTISRDNAKKSLYLQMNSLRAEDTAVYYCASGVYSFDYRGQGTLVTVSSGTGGGGSGGGGSGGGGSEFDVMLTQTPLSLPVSLGDQASISCRSSQSILHSTGDTYLEWYLQKPGQSPKLLINKVSNRLSGVPDRFSGSGSGTDFTLKISRVEAEDLGVYYCFQGSHVPWTFGGGTKLEIKRADAAPTVSIFPLEDLKNVFPPEVAVFEPSEAEISHTQKATLVCLATGFYPDHVELSWWVNGKEVHSGVCTDPQPLKEQPALNDSRYCLSSRLRVSATFWQNPRNHFRCQVQFYGLSENDEWTQDRAKPVTQIVSAEAWGRADDVIKIHWQEKKSNTILGSQEGNTMKTNDTYMKFSWLTVPEKSLDKEHRCIVRHENNKNGVDQEIIFPPIKTDVITMDPKDNCSKDANDTLLLQLTNTSAYYMYLLLLLKSVVYFAIITCCLLMAMVKRKDSRGRAKRSGSGATNFSLLKQAGDVEENPGPTSMDWIWRILFLVGAATGAHSFEQVKLQQSGPSLVKPGASVKMSCKASGYTFTDFYMKWVKQSHGKSLEWIGDINPNIGDTFYNQKFKGKATLTVDKSSSTAYMQLNSLTSEDSAVYFCSVGYFDVWGAGTTVTVSSTRIQNPDPAVYQLRDSKSSDKSVCLFTDFDSQTNVSQSKDSDVYITDKCVLDMRSMDFKSNSAVAWSNKSDFACANAFNNSIIPEDTFFPSPESSDSTDHVKPKETENTKQPSKSCHKPKAIVHTEKVNMMSLTVLGLRMLFAKTVAVNFLLTAKLFFLLTA

SEQ ID NO: 14853 - protein, 866 aa, synthetic construct
MALPVTALLLPLALLLHAARPEVQLVESGGGLVQPGGSLRLSCAASGFSFSDFWMSWVRQAPGKGLEWVATISQAGSEKDYVDSVKGRFTISRDNAKKSLYLQMNSLRAEDTAVYYCASGVYSFDYRGQGTLVTVSSGTGGGGSGGGGSGGGGSEFEIVLTQSPATLSLSPGERATLSCRASQSVSIYLAWYQQKPGQAPRLLIYDASNRATGIPARFSGSGSGTDFTLTISSLEPEDFAVYYCQQRSNWPPFTFGPGTKVDIKLEDLKNVFPPEVAVFEPSEAEISHTQKATLVCLATGFYPDHVELSWWVNGKEVHSGVCTDPQPLKEQPALNDSRYCLSSRLRVSATFWQNPRNHFRCQVQFYGLSENDEWTQDRAKPVTQIVSAEAWGRADDVIKIHWQEKKSNTILGSQEGNTMKTNDTYMKFSWLTVPEKSLDKEHRCIVRHENNKNGVDQEIIFPPIKTDVITMDPKDNCSKDANDTLLLQLTNTSAYYMYLLLLLKSVVYFAIITCCLLMAMVKRKDSRGRAKRSGSGATNFSLLKQAGDVEENPGPTSMDWIWRILFLVGAATGAHSFEQVQLVESGGGVVQPGRSLRLSCAASGFTFSSYGMHWVRQAPGKGLEWVAVIWDDGSNKYYVDSVKGRFTISRDNSKNTLYLQMNSLRAEDTAVYYCARDDYYGSGSFNSYYGTDVWGQGTTVTVSSTRIQNPDPAVYQLRDSKSSDKSVCLFTDFDSQTNVSQSKDSDVYITDKCVLDMRSMDFKSNSAVAWSNKSDFACANAFNNSIIPEDTFFPSPESSDSTDHVKPKETENTKQPSKSCHKPKAIVHTEKVNMMSLTVLGLRMLFAKTVAVNFLLTAKLFFLLTA

SEQ ID NO: 14854 - protein, 851 aa, synthetic construct
MALPVTALLLPLALLLHAARPEVQLVESGGGLVQPGGSLRLSCAASGFSFSDFWMSWVRQAPGKGLEWVATISQAGSEKDYVDSVKGRFTISRDNAKKSLYLQMNSLRAEDTAVYYCASGVYSFDYRGQGTLVTVSSGTGGGGSGGGGSGGGGSEFDIQMTQSPSSLSASVGDRVTITCRASQGISSWLAWYQQKPEKAPKSLIYAASSLQSGVPSRFSGSGSGTDFTLTISSLQPEDFATYYCQQYNSYPYTFGQGTKLEIKLEDLKNVFPPEVAVFEPSEAEISHTQKATLVCLATGFYPDHVELSWWVNGKEVHSGVCTDPQPLKEQPALNDSRYCLSSRLRVSATFWQNPRNHFRCQVQFYGLSENDEWTQDRAKPVTQIVSAEAWGRADDVIKIHWQEKKSNTILGSQEGNTMKTNDTYMKFSWLTVPEKSLDKEHRCIVRHENNKNGVDQEIIFPPIKTDVITMDPKDNCSKDANDTLLLQLTNTSAYYMYLLLLLKSVVYFAIITCCLLMAMVKRKDSRGRAKRSGSGATNFSLLKQAGDVEENPGPTSMDWIWRILFLVGAATGAHSFEEVQLVQSGGGLVHPGGSLRLSCAGSGFTFSTYLMYWVRQAPGKTLEWVSAIGSGGDTYYADSVKGRFTISRDNAKNSLYLQMNSLRAEDMAVYYCARGLGYWGQGTLVTVSSTRIQNPDPAVYQLRDSKSSDKSVCLFTDFDSQTNVSQSKDSDVYITDKCVLDMRSMDFKSNSAVAWSNKSDFACANAFNNSIIPEDTFFPSPESSDSTDHVKPKETENTKQPSKSCHKPKAIVHTEKVNMMSLTVLGLRMLFAKTVAVNFLLTAKLFFLLTA

SEQ ID NO: 14855 - protein, 870 aa, synthetic construct
MALPVTALLLPLALLLHAARPEVQLVESGGGLVQPGGSLRLSCAASGFSFSDFWMSWVRQAPGKGLEWVATISQAGSEKDYVDSVKGRFTISRDNAKKSLYLQMNSLRAEDTAVYYCASGVYSFDYRGQGTLVTVSSGTGGGGSGGGGSGGGGSEFLPVLTQPPSVSVAPGKTARITCGGNNIGSKSVHWYQQKPGQAPVLVVYDDSDRPSGIPERFSGSNSGNTATLTISRVEAGDEADYYCQVWDSSSDYVVFGGGTKLTVLLEDLKNVFPPEVAVFEPSEAEISHTQKATLVCLATGFYPDHVELSWWVNGKEVHSGVCTDPQPLKEQPALNDSRYCLSSRLRVSATFWQNPRNHFRCQVQFYGLSENDEWTQDRAKPVTQIVSAEAWGRADDVIKIHWQEKKSNTILGSQEGNTMKTNDTYMKFSWLTVPEKSLDKEHRCIVRHENNKNGVDQEIIFPPIKTDVITMDPKDNCSKDANDTLLLQLTNTSAYYMYLLLLLKSVVYFAIITCCLLMAMVKRKDSRGRAKRSGSGATNFSLLKQAGDVEENPGPTSMDWIWRILFLVGAATGAHSFEEVQLVQSGAEVKKPGESLKISCKGSGYSFTSYWIGWVRQMPGKGLEWMGIIYPGDSDTRYSPSFQGQVTISADKSISTAYLQWSSLKASDTAMYYCARQVWGWQGGMYPRSNWWYNLDSWGQGTLVTVSSTRIQNPDPAVYQLRDSKSSDKSVCLFTDFDSQTNVSQSKDSDVYITDKCVLDMRSMDFKSNSAVAWSNKSDFACANAFNNSIIPEDTFFPSPESSDSTDHVKPKETENTKQPSKSCHKPKAIVHTEKVNMMSLTVLGLRMLFAKTVAVNFLLTAKLFFLLTA

SEQ ID NO: 14856 - protein, 863 aa, synthetic construct
MALPVTALLLPLALLLHAARPEVQLVESGGGLVQPGGSLRLSCAASGFSFSDFWMSWVRQAPGKGLEWVATISQAGSEKDYVDSVKGRFTISRDNAKKSLYLQMNSLRAEDTAVYYCASGVYSFDYRGQGTLVTVSSGTGGGGSGGGGSGGGGSEFELVMTQSPASLAVSLGQRATISCRASESVDSYGKSFMHWYQLKPGQPPKLLIYRASNLESGVPARFSGSGSRTDFTLTIDPVEADDAATYYCQQNNEDPWTFGGGTKLEIKLEDLKNVFPPEVAVFEPSEAEISHTQKATLVCLATGFYPDHVELSWWVNGKEVHSGVCTDPQPLKEQPALNDSRYCLSSRLRVSATFWQNPRNHFRCQVQFYGLSENDEWTQDRAKPVTQIVSAEAWGRADDVIKIHWQEKKSNTILGSQEGNTMKTNDTYMKFSWLTVPEKSLDKEHRCIVRHENNKNGVDQEIIFPPIKTDVITMDPKDNCSKDANDTLLLQLTNTSAYYMYLLLLLKSVVYFAIITCCLLMAMVKRKDSRGRAKRSGSGATNFSLLKQAGDVEENPGPTSMDWIWRILFLVGAATGAHSFEEVQLEQSGPELVKPGASVKMSCKASGYTFTNYYMKWVKQSHGKSLEWIGDLNPNNGDTFYNQKFKGKATLTVDKSSNTAYMQLNSLTSEDSAVYYCARTGRYEENAMDYWGQGTSVTVSSTRIQNPDPAVYQLRDSKSSDKSVCLFTDFDSQTNVSQSKDSDVYITDKCVLDMRSMDFKSNSAVAWSNKSDFACANAFNNSIIPEDTFFPSPESSDSTDHVKPKETENTKQPSKSCHKPKAIVHTEKVNMMSLTVLGLRMLFAKTVAVNFLLTAKLFFLLTA

SEQ ID NO: 14857 - protein, 857 aa, synthetic construct
MALPVTALLLPLALLLHAARPEVQLVESGGGLVQPGGSLRLSCAASGFSFSDFWMSWVRQAPGKGLEWVATISQAGSEKDYVDSVKGRFTISRDNAKKSLYLQMNSLRAEDTAVYYCASGVYSFDYRGQGTLVTVSSGTGGGGSGGGGSGGGGSEFDVVMTQSPSSLSASVGDRVTITCMASEDIYIRLAWYQQKPGNAPKLLIYAATSLETGVPSRFSGSGSGTDFTLTISSLQPEDFATYYCQQYWSSPWTFGGGTKVEIKLEDLKNVFPPEVAVFEPSEAEISHTQKATLVCLATGFYPDHVELSWWVNGKEVHSGVCTDPQPLKEQPALNDSRYCLSSRLRVSATFWQNPRNHFRCQVQFYGLSENDEWTQDRAKPVTQIVSAEAWGRADDVIKIHWQEKKSNTILGSQEGNTMKTNDTYMKFSWLTVPEKSLDKEHRCIVRHENNKNGVDQEIIFPPIKTDVITMDPKDNCSKDANDTLLLQLTNTSAYYMYLLLLLKSVVYFAIITCCLLMAMVKRKDSRGRAKRSGSGATNFSLLKQAGDVEENPGPTSMDWIWRILFLVGAATGAHSFEQVQLQESGPGLVKPSQTLSLTCTVSGYSITSDYTWNWIRQPPGNGLEWIGYITYSGSTSYNPSLKSRVLISVDTSKNQVSLKLSSVTAADTAVYYCARLGRRYTMDYWGQGTTVTVSSTRIQNPDPAVYQLRDSKSSDKSVCLFTDFDSQTNVSQSKDSDVYITDKCVLDMRSMDFKSNSAVAWSNKSDFACANAFNNSIIPEDTFFPSPESSDSTDHVKPKETENTKQPSKSCHKPKAIVHTEKVNMMSLTVLGLRMLFAKTVAVNFLLTAKLFFLLTA

SEQ ID NO: 14858 - protein, 861 aa, synthetic construct; identical to SEQ ID NO: 14721

SEQ ID NO: 14859 - protein, 861 aa, synthetic construct
MALPVTALLLPLALLLHAARPEVQLVESGGGLVQPGGSLRLSCAASGFSFSDFWMSWVRQAPGKGLEWVATISQAGSEKDYVDSVKGRFTISRDNAKKSLYLQMNSLRAEDTAVYYCASGVYSFDYRGQGTLVTVSSGTGGGGSGGGGSGGGGSEFDIVLTQSPATLSLSPGDRATLSCRASESVTILGSHLIYWYQQKPGQAPRLLIQLASNVQTGIPARFSGSGSRTDFTLTISSLEPEDFAVYYCLQSRTIPRTFGQGTKLEIKRLEDLKNVFPPEVAVFEPSEAEISHTQKATLVCLATGFYPDHVELSWWVNGKEVHSGVCTDPQPLKEQPALNDSRYCLSSRLRVSATFWQNPRNHFRCQVQFYGLSENDEWTQDRAKPVTQIVSAEAWGRADDVIKIHWQEKKSNTILGSQEGNTMKTNDTYMKFSWLTVPEKSLDKEHRCIVRHENNKNGVDQEIIFPPIKTDVITMDPKDNCSKDANDTLLLQLTNTSAYYMYLLLLLKSVVYFAIITCCLLMAMVKRKDSRGRAKRSGSGATNFSLLKQAGDVEENPGPTSMDWIWRILFLVGAATGAHSFEQVQLVQSGSELKKPGESVKISCKASGYTFTHYSMNWVRQAPGQGLEWMGRINTETGEPLYADDFKGRFVFSLDTSASTAYLQISSLKAEDTAVYYCSNDYLYSLDYWGQGTLVTVSSTRIQNPDPAVYQLRDSKSSDKSVCLFTDFDSQTNVSQSKDSDVYITDKCVLDMRSMDFKSNSAVAWSNKSDFACANAFNNSIIPEDTFFPSPESSDSTDHVKPKETENTKQPSKSCHKPKAIVHTEKVNMMSLTVLGLRMLFAKTVAVNFLLTAKLFFLLTA

SEQ ID NO: 14860 - protein, 862 aa, synthetic construct
MALPVTALLLPLALLLHAARPEVQLVESGGGLVQPGGSLRLSCAASGFSFSDFWMSWVRQAPGKGLEWVATISQAGSEKDYVDSVKGRFTISRDNAKKSLYLQMNSLRAEDTAVYYCASGVYSFDYRGQGTLVTVSSGTGGGGSGGGGSGGGGSEFDIQLTQSPSFLSASVGDRVTITCRASQGISTDLNWYQQKPGKAPKLLIYAASNLESGVPSRFSGSGSGTEFTLTISSLQPEDFATYYCQQSYNWPYTFGGGTKVEIKRLEDLKNVFPPEVAVFEPSEAEISHTQKATLVCLATGFYPDHVELSWWVNGKEVHSGVCTDPQPLKEQPALNDSRYCLSSRLRVSATFWQNPRNHFRCQVQFYGLSENDEWTQDRAKPVTQIVSAEAWGRADDVIKIHWQEKKSNTILGSQEGNTMKTNDTYMKFSWLTVPEKSLDKEHRCIVRHENNKNGVDQEIIFPPIKTDVITMDPKDNCSKDANDTLLLQLTNTSAYYMYLLLLLKSVVYFAIITCCLLMAMVKRKDSRGRAKRSGSGATNFSLLKQAGDVEENPGPTSMDWIWRILFLVGAATGAHSFEEVQLVESGGGLVKPGGSLRLSCAASGFTFSNFEMNWVRQAPGKGLEWVSGISSNGRYINYADSVKGRFTISRDNAKNSLYLQMNSLRAEDTAVYYCARVVDFDQDYNGFDYWGQGTLVTVSSTRIQNPDPAVYQLRDSKSSDKSVCLFTDFDSQTNVSQSKDSDVYITDKCVLDMRSMDFKSNSAVAWSNKSDFACANAFNNSIIPEDTFFPSPESSDSTDHVKPKETENTKQPSKSCHKPKAIVHTEKVNMMSLTVLGLRMLFAKTVAVNFLLTAKLFFLLTA

SEQ ID NO: 14861 - protein, 860 aa, synthetic construct
MALPVTALLLPLALLLHAARPEVQLVESGGGLVQPGGSLRLSCAASGFSFSDFWMSWVRQAPGKGLEWVATISQAGSEKDYVDSVKGRFTISRDNAKKSLYLQMNSLRAEDTAVYYCASGVYSFDYRGQGTLVTVSSGTGGGGSGGGGSGGGGSEFDIQLTQSPSFLSASVGDRVTITCSLSLGISTWRDWFPPRLGRGLEPLTYAASTLQSGVPSRFSGSGSGTEFTLTISSLQPEDFATYYCQQLNSYPLTFGGGTKVEIKRLEDLKNVFPPEVAVFEPSEAEISHTQKATLVCLATGFYPDHVELSWWVNGKEVHSGVCTDPQPLKEQPALNDSRYCLSSRLRVSATFWQNPRNHFRCQVQFYGLSENDEWTQDRAKPVTQIVSAEAWGRADDVIKIHWQEKKSNTILGSQEGNTMKTNDTYMKFSWLTVPEKSLDKEHRCIVRHENNKNGVDQEIIFPPIKTDVITMDPKDNCSKDANDTLLLQLTNTSAYYMYLLLLLKSVVYFAIITCCLLMAMVKRKDSRGRAKRSGSGATNFSLLKQAGDVEENPGPTSMDWIWRILFLVGAATGAHSFEEVQLVESGGGLVKPGGSLRLSCAASGFTFSTYGMSWVRQAPGKGLEWVAYINNGSGYIYYADSVKGRFTISRDNAKNSLYLQMNSLRAEDTAVYYCARGQWWSGGDFDYWGQGTLVTVSSTRIQNPDPAVYQLRDSKSSDKSVCLFTDFDSQTNVSQSKDSDVYITDKCVLDMRSMDFKSNSAVAWSNKSDFACANAFNNSIIPEDTFFPSPESSDSTDHVKPKETENTKQPSKSCHKPKAIVHTEKVNMMSLTVLGLRMLFAKTVAVNFLLTAKLFFLLTA

SEQ ID NO: 14862 - protein, 861 aa, synthetic construct
MALPVTALLLPLALLLHAARPEVQLVESGGGLVQPGGSLRLSCAASGFSFSDFWMSWVRQAPGKGLEWVATISQAGSEKDYVDSVKGRFTISRDNAKKSLYLQMNSLRAEDTAVYYCASGVYSFDYRGQGTLVTVSSGTGGGGSGGGGSGGGGSEFEIVLTQSPATLSLSPGERATLSCSASSSVSYMYWYQQKPGQAPRLLIYRTSNLASGIPARFSGSGSGTDFTLTISSLEPEDFAVYYCQQYHSYPTTFGQGTKVEIKRTVLEDLKNVFPPEVAVFEPSEAEISHTQKATLVCLATGFYPDHVELSWWVNGKEVHSGVCTDPQPLKEQPALNDSRYCLSSRLRVSATFWQNPRNHFRCQVQFYGLSENDEWTQDRAKPVTQIVSAEAWGRADDVIKIHWQEKKSNTILGSQEGNTMKTNDTYMKFSWLTVPEKSLDKEHRCIVRHENNKNGVDQEIIFPPIKTDVITMDPKDNCSKDANDTLLLQLTNTSAYYMYLLLLLKSVVYFAIITCCLLMAMVKRKDSRGRAKRSGSGATNFSLLKQAGDVEENPGPTSMDWIWRILFLVGAATGAHSFEEVQLVESGGGLVQPGGSLRLSCAASGFSFNTYAMNWVRQAPGKGLEWVSHIRSKSNNFATYYADSVKDRFTISRDNAKNSLYLQMNSLRAEDTAVYYCARQGGDFPMDYWGQGTLVTVSSTRIQNPDPAVYQLRDSKSSDKSVCLFTDFDSQTNVSQSKDSDVYITDKCVLDMRSMDFKSNSAVAWSNKSDFACANAFNNSIIPEDTFFPSPESSDSTDHVKPKETENTKQPSKSCHKPKAIVHTEKVNMMSLTVLGLRMLFAKTVAVNFLLTAKLFFLLTA

SEQ ID NO: 14863 - protein, 857 aa, synthetic construct
MALPVTALLLPLALLLHAARPEVQLVESGGGLVQPGGSLRLSCAASGFSFSDFWMSWVRQAPGKGLEWVATISQAGSEKDYVDSVKGRFTISRDNAKKSLYLQMNSLRAEDTAVYYCASGVYSFDYRGQGTLVTVSSGTGGGGSGGGGSGGGGSEFDVVMTQSPSSLSASVGDRVTITCKASEDIYIRLAWYQQKPGKAPKLLIYAATSLETGVPSRFSGSGSGTDFTLTISSLQPEDFATYYCQQYWTTPWTFGGGTKVEIKLEDLKNVFPPEVAVFEPSEAEISHTQKATLVCLATGFYPDHVELSWWVNGKEVHSGVCTDPQPLKEQPALNDSRYCLSSRLRVSATFWQNPRNHFRCQVQFYGLSENDEWTQDRAKPVTQIVSAEAWGRADDVIKIHWQEKKSNTILGSQEGNTMKTNDTYMKFSWLTVPEKSLDKEHRCIVRHENNKNGVDQEIIFPPIKTDVITMDPKDNCSKDANDTLLLQLTNTSAYYMYLLLLLKSVVYFAIITCCLLMAMVKRKDSRGRAKRSGSGATNFSLLKQAGDVEENPGPTSMDWIWRILFLVGAATGAHSFEQVQLQESGPGLVKPSQTLSLTCTVSGYSITIDYTWNWIRQPPGKGLEWIGYITYSGSTDYNPSLKSRVLISVDTSKNQVSLKLSSVTAADTAVYYCARLGRRYALDYWGQGTTVTVSSTRIQNPDPAVYQLRDSKSSDKSVCLFTDFDSQTNVSQSKDSDVYITDKCVLDMRSMDFKSNSAVAWSNKSDFACANAFNNSIIPEDTFFPSPESSDSTDHVKPKETENTKQPSKSCHKPKAIVHTEKVNMMSLTVLGLRMLFAKTVAVNFLLTAKLFFLLTA

SEQ ID NO: 14864 - protein, 862 aa, synthetic construct
MALPVTALLLPLALLLHAARPEVQLVESGGGLVQPGGSLRLSCAASGFSFSDFWMSWVRQAPGKGLEWVATISQAGSEKDYVDSVKGRFTISRDNAKKSLYLQMNSLRAEDTAVYYCASGVYSFDYRGQGTLVTVSSGTGGGGSGGGGSGGGGSEFDIQMTQTTSSLSASLGDRVTISCRASQDISNYLNWYQQKPDGTVKLLIYYTSILHSGVPSRFSGSGSGTDYSLTISNLEQEDFATYFCQQGNTLPWTFGGGTKLEIKALEDLKNVFPPEVAVFEPSEAEISHTQKATLVCLATGFYPDHVELSWWVNGKEVHSGVCTDPQPLKEQPALNDSRYCLSSRLRVSATFWQNPRNHFRCQVQFYGLSENDEWTQDRAKPVTQIVSAEAWGRADDVIKIHWQEKKSNTILGSQEGNTMKTNDTYMKFSWLTVPEKSLDKEHRCIVRHENNKNGVDQEIIFPPIKTDVITMDPKDNCSKDANDTLLLQLTNTSAYYMYLLLLLKSVVYFAIITCCLLMAMVKRKDSRGRAKRSGSGATNFSLLKQAGDVEENPGPTSMDWIWRILFLVGAATGAHSFEEVQLVESGGGLVKPGGSLKLSCAASGFAFSIYDMSWVRQTPEKRLEWVAYISSGGGTYYPDTVKGRFTISRDNAKNTLYLQMSSLKSEDTAMYYCARHSGYGTHWGVLFAYWGQGTLVTVSATRIQNPDPAVYQLRDSKSSDKSVCLFTDFDSQTNVSQSKDSDVYITDKCVLDMRSMDFKSNSAVAWSNKSDFACANAFNNSIIPEDTFFPSPESSDSTDHVKPKETENTKQPSKSCHKPKAIVHTEKVNMMSLTVLGLRMLFAKTVAVNFLLTAKLFFLLTA

SEQ ID NO: 14865 - protein, 872 aa, synthetic construct
MALPVTALLLPLALLLHAARPEVQLVESGGGLVQPGGSLRLSCAASGFSFSDFWMSWVRQAPGKGLEWVATISQAGSEKDYVDSVKGRFTISRDNAKKSLYLQMNSLRAEDTAVYYCASGVYSFDYRGQGTLVTVSSGTGGGGSGGGGSGGGGSEFDIVMTQSPDSLAVSLGERATINCKSSQSLLYRSNQKNYLAWYQQKPGQPPKLLIYWASTRESGVPDRFSGSGSGTDFTLTISSLQAEDVAVYYCQQYYNYPRTFGQGTKVEIKRTVLEDLKNVFPPEVAVFEPSEAEISHTQKATLVCLATGFYPDHVELSWWVNGKEVHSGVCTDPQPLKEQPALNDSRYCLSSRLRVSATFWQNPRNHFRCQVQFYGLSENDEWTQDRAKPVTQIVSAEAWGRADDVIKIHWQEKKSNTILGSQEGNTMKTNDTYMKFSWLTVPEKSLDKEHRCIVRHENNKNGVDQEIIFPPIKTDVITMDPKDNCSKDANDTLLLQLTNTSAYYMYLLLLLKSVVYFAIITCCLLMAMVKRKDSRGRAKRSGSGATNFSLLKQAGDVEENPGPTSMDWIWRILFLVGAATGAHSFEEVQLLESGGGLVQPGGSLRLSCAASGYSITSDYAWNWVRQAPGKGLEWVSYISNSGSTSYNPSLKSRFTISRDNSKNTLYLQMNSLRAEDTAVYYCAKERNYDYDDYYYAMDYWGQGTLVTVSSTRIQNPDPAVYQLRDSKSSDKSVCLFTDFDSQTNVSQSKDSDVYITDKCVLDMRSMDFKSNSAVAWSNKSDFACANAFNNSIIPEDTFFPSPESSDSTDHVKPKETENTKQPSKSCHKPKAIVHTEKVNMMSLTVLGLRMLFAKTVAVNFLLTAKLFFLLTA

SEQ ID NO: 14866 - protein, 865 aa, synthetic construct
MALPVTALLLPLALLLHAARPEVQLVESGGGLVQPGGSLRLSCAASGFSFSDFWMSWVRQAPGKGLEWVATISQAGSEKDYVDSVKGRFTISRDNAKKSLYLQMNSLRAEDTAVYYCASGVYSFDYRGQGTLVTVSSGTGGGGSGGGGSGGGGSEFDVVMTQSPLSLPVTLGQPASISCRSSQSLLHSSGNTYLEWYQQRPGQSPRPLIYKISTRFSGVPDRFSGSGSGTDFTLKISRVEAEDVGVYYCFQGSHVPYTFGGGTKVEIKRLEDLKNVFPPEVAVFEPSEAEISHTQKATLVCLATGFYPDHVELSWWVNGKEVHSGVCTDPQPLKEQPALNDSRYCLSSRLRVSATFWQNPRNHFRCQVQFYGLSENDEWTQDRAKPVTQIVSAEAWGRADDVIKIHWQEKKSNTILGSQEGNTMKTNDTYMKFSWLTVPEKSLDKEHRCIVRHENNKNGVDQEIIFPPIKTDVITMDPKDNCSKDANDTLLLQLTNTSAYYMYLLLLLKSVVYFAIITCCLLMAMVKRKDSRGRAKRSGSGATNFSLLKQAGDVEENPGPTSMDWIWRILFLVGAATGAHSFEQVQLVQSGAEVKKPGASVKVSCKASGLTIEDYYMHWVRQAPGQGLEWMGWIDPENGDTEYGPKFQGRVTMTRDTSINTAYMELSRLRSDDTAVYYCAVHNAHYGTWFAYWGQGTLVTVSSTRIQNPDPAVYQLRDSKSSDKSVCLFTDFDSQTNVSQSKDSDVYITDKCVLDMRSMDFKSNSAVAWSNKSDFACANAFNNSIIPEDTFFPSPESSDSTDHVKPKETENTKQPSKSCHKPKAIVHTEKVNMMSLTVLGLRMLFAKTVAVNFLLTAKLFFLLTA

SEQ ID NO: 14867 - protein, 857 aa, synthetic construct
MALPVTALLLPLALLLHAARPEVQLVESGGGLVQPGGSLRLSCAASGFSFSDFWMSWVRQAPGKGLEWVATISQAGSEKDYVDSVKGRFTISRDNAKKSLYLQMNSLRAEDTAVYYCASGVYSFDYRGQGTLVTVSSGTGGGGSGGGGSGGGGSEFDIQMTQSPSSLSASVGDRVTITCRASENIYSNLAWYQQKPGKAPKLLIYAATNLADGVPSRFSGSGSGTDFTLTISSLQPEDFATYYCQHFWGTPTFGQGTKVEIKRTVLEDLKNVFPPEVAVFEPSEAEISHTQKATLVCLATGFYPDHVELSWWVNGKEVHSGVCTDPQPLKEQPALNDSRYCLSSRLRVSATFWQNPRNHFRCQVQFYGLSENDEWTQDRAKPVTQIVSAEAWGRADDVIKIHWQEKKSNTILGSQEGNTMKTNDTYMKFSWLTVPEKSLDKEHRCIVRHENNKNGVDQEIIFPPIKTDVITMDPKDNCSKDANDTLLLQLTNTSAYYMYLLLLLKSVVYFAIITCCLLMAMVKRKDSRGRAKRSGSGATNFSLLKQAGDVEENPGPTSMDWIWRILFLVGAATGAHSFEEVQLVESGGGLVQPGGSLRLSCAASGFSLTNYGVHWVRQAPGKGLEWVSVIWSGGSTDYNAAFISRFTISADTSKNTAYLQMNSLRAEDTAVYYCARELIHAMDNWGQGTLVTVSSTRIQNPDPAVYQLRDSKSSDKSVCLFTDFDSQTNVSQSKDSDVYITDKCVLDMRSMDFKSNSAVAWSNKSDFACANAFNNSIIPEDTFFPSPESSDSTDHVKPKETENTKQPSKSCHKPKAIVHTEKVNMMSLTVLGLRMLFAKTVAVNFLLTAKLFFLLTA

SEQ ID NO: 14868 - protein, 864 aa, synthetic construct
MALPVTALLLPLALLLHAARPEVQLVESGGGLVQPGGSLRLSCAASGFSFSDFWMSWVRQAPGKGLEWVATISQAGSEKDYVDSVKGRFTISRDNAKKSLYLQMNSLRAEDTAVYYCASGVYSFDYRGQGTLVTVSSGTGGGGSGGGGSGGGGSEFDFVMTQSPLSLPVTPGEPASISCRSSQSIVHSNGNTYLEWYLQKPGQSPQLLIYKVSNRFSGVPDRFSGSGSGTDFTLKISRVEAEDVGVYYCFQGSHVPLTFGQGTKLEIKRLEDLKNVFPPEVAVFEPSEAEISHTQKATLVCLATGFYPDHVELSWWVNGKEVHSGVCTDPQPLKEQPALNDSRYCLSSRLRVSATFWQNPRNHFRCQVQFYGLSENDEWTQDRAKPVTQIVSAEAWGRADDVIKIHWQEKKSNTILGSQEGNTMKTNDTYMKFSWLTVPEKSLDKEHRCIVRHENNKNGVDQEIIFPPIKTDVITMDPKDNCSKDANDTLLLQLTNTSAYYMYLLLLLKSVVYFAIITCCLLMAMVKRKDSRGRAKRSGSGATNFSLLKQAGDVEENPGPTSMDWIWRILFLVGAATGAHSFEEVQLVESGAEVKKPGASVKVSCKASGYTFTSYWIHWVRQAPGQGLEWMGENDPSNGRTNYNEKFKNRVTLTVDTSISTAYMELSRLRSDDTAVYYCARGPNYFYSMDYWGQGTMVTVSSTRIQNPDPAVYQLRDSKSSDKSVCLFTDFDSQTNVSQSKDSDVYITDKCVLDMRSMDFKSNSAVAWSNKSDFACANAFNNSIIPEDTFFPSPESSDSTDHVKPKETENTKQPSKSCHKPKAIVHTEKVNMMSLTVLGLRMLFAKTVAVNFLLTAKLFFLLTA

SEQ ID NO: 14869 - protein, 857 aa, synthetic construct
MALPVTALLLPLALLLHAARPEVQLVESGGGLVQPGGSLRLSCAASGFSFSDFWMSWVRQAPGKGLEWVATISQAGSEKDYVDSVKGRFTISRDNAKKSLYLQMNSLRAEDTAVYYCASGVYSFDYRGQGTLVTVSSGTGGGGSGGGGSGGGGSEFDIQLTQSPSFLSASVGDRVTITCSARSSISFMYWYQQKPGKAPKLLIYDTSNLASGVPSRFSGSGSGTEFTLTISSLEAEDAATYYCQQWSSYPLTFGQGTKLEIKLEDLKNVFPPEVAVFEPSEAEISHTQKATLVCLATGFYPDHVELSWWVNGKEVHSGVCTDPQPLKEQPALNDSRYCLSSRLRVSATFWQNPRNHFRCQVQFYGLSENDEWTQDRAKPVTQIVSAEAWGRADDVIKIHWQEKKSNTILGSQEGNTMKTNDTYMKFSWLTVPEKSLDKEHRCIVRHENNKNGVDQEIIFPPIKTDVITMDPKDNCSKDANDTLLLQLTNTSAYYMYLLLLLKSVVYFAIITCCLLMAMVKRKDSRGRAKRSGSGATNFSLLKQAGDVEENPGPTSMDWIWRILFLVGAATGAHSFEQVQLVQSGAEVKKPGASVKVSCKASGYTFTGSWMNWVRQAPGQGLEWIGRIYPGDGETNYNGKFKDRVTITADKSTSTAYMELSSLRSEDTAVYYCARIYGNNVYFDVWGQGTTVTVSSTRIQNPDPAVYQLRDSKSSDKSVCLFTDFDSQTNVSQSKDSDVYITDKCVLDMRSMDFKSNSAVAWSNKSDFACANAFNNSIIPEDTFFPSPESSDSTDHVKPKETENTKQPSKSCHKPKAIVHTEKVNMMSLTVLGLRMLFAKTVAVNFLLTAKLFFLLTA

SEQ ID NO: 14870 - protein, 865 aa, synthetic construct
MALPVTALLLPLALLLHAARPEVQLVESGGGLVQPGGSLRLSCAASGFSFSDFWMSWVRQAPGKGLEWVATISQAGSEKDYVDSVKGRFTISRDNAKKSLYLQMNSLRAEDTAVYYCASGVYSFDYRGQGTLVTVSSGTGGGGSGGGGSGGGGSEFQLVLTQSPSASASLGSSVKLTCTLSSGHKTDTIDWYQQQPGKAPRYLMKLEGSGSYNKGSGVPDRFSGSSSGADWYLTISSLQSEDEADYYCGTDYPGNYLFGGGTQLTVLGLEDLKNVFPPEVAVFEPSEAEISHTQKATLVCLATGFYPDHVELSWWVNGKEVHSGVCTDPQPLKEQPALNDSRYCLSSRLRVSATFWQNPRNHFRCQVQFYGLSENDEWTQDRAKPVTQIVSAEAWGRADDVIKIHWQEKKSNTILGSQEGNTMKTNDTYMKFSWLTVPEKSLDKEHRCIVRHENNKNGVDQEIIFPPIKTDVITMDPKDNCSKDANDTLLLQLTNTSAYYMYLLLLLKSVVYFAIITCCLLMAMVKRKDSRGRAKRSGSGATNFSLLKQAGDVEENPGPTSMDWIWRILFLVGAATGAHSFEQEQLVESGGGLVQPGGSLRLSCAASGFTFSDYYMSWIRQAPGKGLEWVATIYPSSGKTYYADSAKGRLTISSDNAKDSLYLQMNSLRAEDTAVYYCTRDSYADDAALFDIWGQGTTVTVSSTRIQNPDPAVYQLRDSKSSDKSVCLFTDFDSQTNVSQSKDSDVYITDKCVLDMRSMDFKSNSAVAWSNKSDFACANAFNNSIIPEDTFFPSPESSDSTDHVKPKETENTKQPSKSCHKPKAIVHTEKVNMMSLTVLGLRMLFAKTVAVNFLLTAKLFFLLTA

SEQ ID NO: 14871 - protein, 857 aa, synthetic construct; identical to SEQ ID NO: 14867

SEQ ID NO: 14872 - protein, 864 aa, synthetic construct; identical to SEQ ID NO: 14868

SEQ ID NO: 14873 - protein, 857 aa, synthetic construct; identical to SEQ ID NO: 14869

SEQ ID NO: 14874 - protein, 865 aa, synthetic construct; identical to SEQ ID NO: 14870

SEQ ID NO: 14875 - protein, 864 aa, synthetic construct
MALPVTALLLPLALLLHAARPEVQLVESGGGLVQPGGSLRLSCAASGFSFSDFWMSWVRQAPGKGLEWVATISQAGSEKDYVDSVKGRFTISRDNAKKSLYLQMNSLRAEDTAVYYCASGVYSFDYRGQGTLVTVSSGTGGGGSGGGGSGGGGSEFDIQLTQSPSSLSASVGDRVSFTCQASQDINNFLNWYQQKPGKAPKLLIYDASNLETGVPSRFSGSGSGTDFTFTISSLQPEDIATYYCQQYGNLPFTFGGGTKVEIKRLEDLKNVFPPEVAVFEPSEAEISHTQKATLVCLATGFYPDHVELSWWVNGKEVHSGVCTDPQPLKEQPALNDSRYCLSSRLRVSATFWQNPRNHFRCQVQFYGLSENDEWTQDRAKPVTQIVSAEAWGRADDVIKIHWQEKKSNTILGSQEGNTMKTNDTYMKFSWLTVPEKSLDKEHRCIVRHENNKNGVDQEIIFPPIKTDVITMDPKDNCSKDANDTLLLQLTNTSAYYMYLLLLLKSVVYFAIITCCLLMAMVKRKDSRGRAKRSGSGATNFSLLKQAGDVEENPGPTSMDWIWRILFLVGAATGAHSFEQVQLQESGPGLVKPSQTLSLTCTVSGGSISSGGFYWSWIRQHPGKGLEWIGYIHHSGSTHYNPSLKSRVTISIDTSKNLFSLRLSSVTAADTAVYYCASLVYCGGDCYSGFDYWGQGTLVTVSSTRIQNPDPAVYQLRDSKSSDKSVCLFTDFDSQTNVSQSKDSDVYITDKCVLDMRSMDFKSNSAVAWSNKSDFACANAFNNSIIPEDTFFPSPESSDSTDHVKPKETENTKQPSKSCHKPKAIVHTEKVNMMSLTVLGLRMLFAKTVAVNFLLTAKLFFLLTA

SEQ ID NO: 14876 - protein, 860 aa, synthetic construct
MALPVTALLLPLALLLHAARPEVQLVESGGGLVQPGGSLRLSCAASGFSFSDFWMSWVRQAPGKGLEWVATISQAGSEKDYVDSVKGRFTISRDNAKKSLYLQMNSLRAEDTAVYYCASGVYSFDYRGQGTLVTVSSGTGGGGSGGGGSGGGGSEFDIQMTQSPSSLSASVGDRVTITCKSSQSVLYSSNQKNYLAWFQQKPGKAPKLLIYWASTRESGVPSRFSGSGSGTDFTLTISSLQPEDFATYFCHQYLSSYTFGQGTKVEIKRLEDLKNVFPPEVAVFEPSEAEISHTQKATLVCLATGFYPDHVELSWWVNGKEVHSGVCTDPQPLKEQPALNDSRYCLSSRLRVSATFWQNPRNHFRCQVQFYGLSENDEWTQDRAKPVTQIVSAEAWGRADDVIKIHWQEKKSNTILGSQEGNTMKTNDTYMKFSWLTVPEKSLDKEHRCIVRHENNKNGVDQEIIFPPIKTDVITMDPKDNCSKDANDTLLLQLTNTSAYYMYLLLLLKSVVYFAIITCCLLMAMVKRKDSRGRAKRSGSGATNFSLLKQAGDVEENPGPTSMDWIWRILFLVGAATGAHSFEEVQLVESGGGLVQPGGSLRLSCAASGYTFTTYWMHWVRQAPGKGLEWVGYIRPSTGYTEYNQKFKDRFTISADTSKNTAYLQMNSLRAEDTAVYYCARSRWLLDYWGQGTLVTVSTRIQNPDPAVYQLRDSKSSDKSVCLFTDFDSQTNVSQSKDSDVYITDKCVLDMRSMDFKSNSAVAWSNKSDFACANAFNNSIIPEDTFFPSPESSDSTDHVKPKETENTKQPSKSCHKPKAIVHTEKVNMMSLTVLGLRMLFAKTVAVNFLLTAKLFFLLTA

SEQ ID NO: 14877 - protein, 857 aa, synthetic construct
MALPVTALLLPLALLLHAARPEVQLVESGGGLVQPGGSLRLSCAASGFSFSDFWMSWVRQAPGKGLEWVATISQAGSEKDYVDSVKGRFTISRDNAKKSLYLQMNSLRAEDTAVYYCASGVYSFDYRGQGTLVTVSSGTGGGGSGGGGSGGGGSEFDIQMTQSPSSLSASVGDRVTITCRASQDISNYLNWYQQKPGKAPKLLIYYTSRLHSGVPSRFSGSGSGTDFTLTISSLQPEDFATYYCQQGNTLPYTFGQGTKVEIKRLEDLKNVFPPEVAVFEPSEAEISHTQKATLVCLATGFYPDHVELSWWVNGKEVHSGVCTDPQPLKEQPALNDSRYCLSSRLRVSATFWQNPRNHFRCQVQFYGLSENDEWTQDRAKPVTQIVSAEAWGRADDVIKIHWQEKKSNTILGSQEGNTMKTNDTYMKFSWLTVPEKSLDKEHRCIVRHENNKNGVDQEIIFPPIKTDVITMDPKDNCSKDANDTLLLQLTNTSAYYMYLLLLLKSVVYFAIITCCLLMAMVKRKDSRGRAKRSGSGATNFSLLKQAGDVEENPGPTSMDWIWRILFLVGAATGAHSFEEVQLVESGGGLVQPGGSLRLSCAASGFTFSDYFMSWVRQAPGKGLEWVATISNGGTYTYYPDSVKGRFTISRDNSKNTLYLQMNSLRAEDTAVYYCARFDGYIFDYWGQGTLVTVSSTRIQNPDPAVYQLRDSKSSDKSVCLFTDFDSQTNVSQSKDSDVYITDKCVLDMRSMDFKSNSAVAWSNKSDFACANAFNNSIIPEDTFFPSPESSDSTDHVKPKETENTKQPSKSCHKPKAIVHTEKVNMMSLTVLGLRMLFAKTVAVNFLLTAKLFFLLTA

SEQ ID NO: 14878 - protein, 862 aa, synthetic construct
MALPVTALLLPLALLLHAARPEVQLVESGGGLVQPGGSLRLSCAASGFSFSDFWMSWVRQAPGKGLEWVATISQAGSEKDYVDSVKGRFTISRDNAKKSLYLQMNSLRAEDTAVYYCASGVYSFDYRGQGTLVTVSSGTGGGGSGGGGSGGGGSEFDIQMTQTTSSLSASLGDRVTISCRASQDISKYLNWYQQKPDGTVKLLIYHTSRLHSGVPSRFSGSGSGTDYSLTISNLEQEDIATYFCQQGNTLPYTFGGGTKLEITLEIQNPDPAVYQLRDSKSSDKSVCLFTDFDSQTNVSQSKDSDVYITDKCVLDMRSMDFKSNSAVAWSNKSDFACANAFNNSIIPEDTFFPSPESSDSTDHVKPKETENTKQPSKSCHKPKAIVHTEKVNMMSLTVLGLRMLFAKTVAVNFLLTAKLFFLLTARAKRSGSGVKQTLNFDLLKLAGDVESNPGPTSMDWIWRILFLVGAATGAHSFEVKLQESGPGLVAPSQSLSVTCTVSGVSLPDYGVSWIRQPPRKGLEWLGVIWGSETTYYNSALKSRLTIIKDNSKSQVFLKMNSLQTDDTAIYYCAKHYYYGGSYAMDYWGQGTSVTVSSTREDLKNVFPPEVAVFEPSEAEISHTQKATLVCLATGFYPDHVELSWWVNGKEVHSGVCTDPQPLKEQPALNDSRYCLSSRLRVSATFWQNPRNHFRCQVQFYGLSENDEWTQDRAKPVTQIVSAEAWGRADDVIKIHWQEKKSNTILGSQEGNTMKTNDTYMKFSWLTVPEKSLDKEHRCIVRHENNKNGVDQEIIFPPIKTDVITMDPKDNCSKDANDTLLLQLTNTSAYYMYLLLLLKSVVYFAIITCCLLMAMVKRKDSRG

SEQ ID NO: 14879 - protein, 863 aa, synthetic construct
MALPVTALLLPLALLLHAARPEVQLVESGGGLVQPGGSLRLSCAASGFSFSDFWMSWVRQAPGKGLEWVATISQAGSEKDYVDSVKGRFTISRDNAKKSLYLQMNSLRAEDTAVYYCASGVYSFDYRGQGTLVTVSSGTGGGGSGGGGSGGGGSEFEIVMTQSPATLSLSPGERATLSCRASQDISKYLNWYQQKPGQAPRLLIYHTSRLHSGIPARFSGSGSGTDYTLTISSLQPEDFAVYFCQQGNTLPYTFGQGTKLEIKLEIQNPDPAVYQLRDSKSSDKSVCLFTDFDSQTNVSQSKDSDVYITDKCVLDMRSMDFKSNSAVAWSNKSDFACANAFNNSIIPEDTFFPSPESSDSTDHVKPKETENTKQPSKSCHKPKAIVHTEKVNMMSLTVLGLRMLFAKTVAVNFLLTAKLFFLLTARAKRSGSGVKQTLNFDLLKLAGDVESNPGPTSMDWIWRILFLVGAATGAHSFEQVQLQESGPGLVKPSETLSLTCTVSGVSLPDYGVSWIRQPPGKGLEWIGVIWGSETTYYNSSLKSRVTISKDNSKNQVSLKLSSVTAADTAVYYCAKHYYYGGSYAMDYWGQGTLVTVSSTREDLKNVFPPEVAVFEPSEAEISHTQKATLVCLATGFYPDHVELSWWVNGKEVHSGVCTDPQPLKEQPALNDSRYCLSSRLRVSATFWQNPRNHFRCQVQFYGLSENDEWTQDRAKPVTQIVSAEAWGRADDVIKIHWQEKKSNTILGSQEGNTMKTNDTYMKFSWLTVPEKSLDKEHRCIVRHENNKNGVDQEIIFPPIKTDVITMDPKDNCSKDANDTLLLQLTNTSAYYMYLLLLLKSVVYFAIITCCLLMAMVKRKDSRG

SEQ ID NO: 14880 - protein, 864 aa, synthetic construct
MALPVTALLLPLALLLHAARPEVQLVESGGGLVQPGGSLRLSCAASGFSFSDFWMSWVRQAPGKGLEWVATISQAGSEKDYVDSVKGRFTISRDNAKKSLYLQMNSLRAEDTAVYYCASGVYSFDYRGQGTLVTVSSGTGGGGSGGGGSGGGGSEFDEIVLTQSPATLSLSPGERATLSCSASSSVSYMHWYQQKPGQAPRLLIYDTSKLASGIPARFSGSGSGTDFTLTISSLEPEDVAVYYCFQGSVYPFTFGQGTKLEIKRLEIQNPDPAVYQLRDSKSSDKSVCLFTDFDSQTNVSQSKDSDVYITDKCVLDMRSMDFKSNSAVAWSNKSDFACANAFNNSIIPEDTFFPSPESSDSTDHVKPKETENTKQPSKSCHKPKAIVHTEKVNMMSLTVLGLRMLFAKTVAVNFLLTAKLFFLLTARAKRSGSGVKQTLNFDLLKLAGDVESNPGPTSMDWIWRILFLVGAATGAHSFEQVQLQESGPGLVKPSQTLSLTCTVSGGSISTSGMGVGWIRQHPGKGLEWIGHIWWDDDKRYNPALKSRVTISVDTSKNQFSLKLSSVTAADTAVYYCARMELWSYYFDYWGQGTLVTVSSTREDLKNVFPPEVAVFEPSEAEISHTQKATLVCLATGFYPDHVELSWWVNGKEVHSGVCTDPQPLKEQPALNDSRYCLSSRLRVSATFWQNPRNHFRCQVQFYGLSENDEWTQDRAKPVTQIVSAEAWGRADDVIKIHWQEKKSNTILGSQEGNTMKTNDTYMKFSWLTVPEKSLDKEHRCIVRHENNKNGVDQEIIFPPIKTDVITMDPKDNCSKDANDTLLLQLTNTSAYYMYLLLLLKSVVYFAIITCCLLMAMVKRKDSRG

SEQ ID NO: 14881 - protein, 862 aa, synthetic construct
MALPVTALLLPLALLLHAARPEVQLVESGGGLVQPGGSLRLSCAASGFSFSDFWMSWVRQAPGKGLEWVATISQAGSEKDYVDSVKGRFTISRDNAKKSLYLQMNSLRAEDTAVYYCASGVYSFDYRGQGTLVTVSSGTGGGGSGGGGSGGGGSEFDYIHVTQSPSSLSVSIGDRVTINCQTSQGVGSDLHWYQHKPGRAPKLLIHHASSVEDGVPSRFSGTGFHTSFNLTINDLQADDIGTYYCQVLQSFGRGSRLDTKLEIQNPDPAVYQLRDSKSSDKSVCLFTDFDSQTNVSQSKDSDVYITDKCVLDMRSMDFKSNSAVAWSNKSDFACANAFNNSIIPEDTFFPSPESSDSTDHVKPKETENTKQPSKSCHKPKAIVHTEKVNMMSLTVLGLRMLFAKTVAVNFLLTAKLFFLLTARAKRSGSGVKQTLNFDLLKLAGDVESNPGPTSMDWIWRILFLVGAATGAHSFERAHLVQSGTAMKKPGASVRVSCQTSGYTFTAHILFWFRQAPGRGLEWVGWIKPQYGAVNFGGGFRDRVTLTRDVYREIAYMDIRGLKPDDTAVYYCARDRSYGDSSWALDAWGQGTTVVVSATREDLKNVFPPEVAVFEPSEAEISHTQKATLVCLATGFYPDHVELSWWVNGKEVHSGVCTDPQPLKEQPALNDSRYCLSSRLRVSATFWQNPRNHFRCQVQFYGLSENDEWTQDRAKPVTQIVSAEAWGRADDVIKIHWQEKKSNTILGSQEGNTMKTNDTYMKFSWLTVPEKSLDKEHRCIVRHENNKNGVDQEIIFPPIKTDVITMDPKDNCSKDANDTLLLQLTNTSAYYMYLLLLLKSVVYFAIITCCLLMAMVKRKDSRG

SEQ ID NO: 14882 - protein, 872 aa, synthetic construct
MALPVTALLLPLALLLHAARPEVQLVESGGGLVQPGGSLRLSCAASGFSFSDFWMSWVRQAPGKGLEWVATISQAGSEKDYVDSVKGRFTISRDNAKKSLYLQMNSLRAEDTAVYYCASGVYSFDYRGQGTLVTVSSGTGGGGSGGGGSGGGGSEFDVQMIQTPDSLAVSLGQRATISCRASESVDNYGISFMHWYQQKPGQSPKLLIYRASNLESGIPARFSGSGSRTDFTLTINPVETDDVATYYCQQNNKDPPTFGGGTKLEIKLEIQNPDPAVYQLRDSKSSDKSVCLFTDFDSQTNVSQSKDSDVYITDKCVLDMRSMDFKSNSAVAWSNKSDFACANAFNNSIIPEDTFFPSPESSDSTDHVKPKETENTKQPSKSCHKPKAIVHTEKVNMMSLTVLGLRMLFAKTVAVNFLLTAKLFFLLTARAKRSGSGVKQTLNFDLLKLAGDVESNPGPTSMDWIWRILFLVGAATGAHSFEGGGGSQVQLQQSGAELVKPGASVKISCKASGYAFSSYWMNWVKQRPGKGLEWIGQIYPGDGDTTYNGKFKGKATLTADKSSSTVYMQLNSLTSEDSAVYFCVRYYYGSSGYFDYWGQGTTLTVSSTREDLKNVFPPEVAVFEPSEAEISHTQKATLVCLATGFYPDHVELSWWVNGKEVHSGVCTDPQPLKEQPALNDSRYCLSSRLRVSATFWQNPRNHFRCQVQFYGLSENDEWTQDRAKPVTQIVSAEAWGRADDVIKIHWQEKKSNTILGSQEGNTMKTNDTYMKFSWLTVPEKSLDKEHRCIVRHENNKNGVDQEIIFPPIKTDVITMDPKDNCSKDANDTLLLQLTNTSAYYMYLLLLLKSVVYFAIITCCLLMAMVKRKDSRG

SEQ ID NO: 14883 - protein, 863 aa, synthetic construct
MALPVTALLLPLALLLHAARPEVQLVESGGGLVQPGGSLRLSCAASGFSFSDFWMSWVRQAPGKGLEWVATISQAGSEKDYVDSVKGRFTISRDNAKKSLYLQMNSLRAEDTAVYYCASGVYSFDYRGQGTLVTVSSGTGGGGSGGGGSGGGGSEFDVQMIQTPSSLSASLGDRVTISCRASQDIGNYLNWYQQKPDGTVKLLIYYTSRLHSGVPSRFSGSGSGTEYSLTISNLEQEDIATYFCQQGSALPPTFGGGTKLEINLEIQNPDPAVYQLRDSKSSDKSVCLFTDFDSQTNVSQSKDSDVYITDKCVLDMRSMDFKSNSAVAWSNKSDFACANAFNNSIIPEDTFFPSPESSDSTDHVKPKETENTKQPSKSCHKPKAIVHTEKVNMMSLTVLGLRMLFAKTVAVNFLLTAKLFFLLTARAKRSGSGVKQTLNFDLLKLAGDVESNPGPTSMDWIWRILFLVGAATGAHSFEALQLQQSGAELVRPGASVTLSCKASGYTFTDYEMHWVKQTPVHGLEWIGAIDPETGGTAYNQKFEGKAILTADKSSSTAYMELRSLTSEDSPVYYCARRRYYGSSSFDYWGQGTTLTVSSTREDLKNVFPPEVAVFEPSEAEISHTQKATLVCLATGFYPDHVELSWWVNGKEVHSGVCTDPQPLKEQPALNDSRYCLSSRLRVSATFWQNPRNHFRCQVQFYGLSENDEWTQDRAKPVTQIVSAEAWGRADDVIKIHWQEKKSNTILGSQEGNTMKTNDTYMKFSWLTVPEKSLDKEHRCIVRHENNKNGVDQEIIFPPIKTDVITMDPKDNCSKDANDTLLLQLTNTSAYYMYLLLLLKSVVYFAIITCCLLMAMVKRKDSRG

SEQ ID NO: 14884 - protein, 867 aa, synthetic construct
MALPVTALLLPLALLLHAARPEVQLVESGGGLVQPGGSLRLSCAASGFSFSDFWMSWVRQAPGKGLEWVATISQAGSEKDYVDSVKGRFTISRDNAKKSLYLQMNSLRAEDTAVYYCASGVYSFDYRGQGTLVTVSSGTGGGGSGGGGSGGGGSEFDIVLTQSPASLAVSLGQRATISCRASKSVSTSGYSYLHWYQQKPGQPPKLLIYLASNLESGVPARFSGSGSGTDFTLNIHPVEEEDAATYYCQHSRELPFTFGSGTKLEIKLEIQNPDPAVYQLRDSKSSDKSVCLFTDFDSQTNVSQSKDSDVYITDKCVLDMRSMDFKSNSAVAWSNKSDFACANAFNNSIIPEDTFFPSPESSDSTDHVKPKETENTKQPSKSCHKPKAIVHTEKVNMMSLTVLGLRMLFAKTVAVNFLLTAKLFFLLTARAKRSGSGVKQTLNFDLLKLAGDVESNPGPTSMDWIWRILFLVGAATGAHSFEQVQLVESGGGLVQPGGSLKLSCAASGFDFSRYWMSWVRQAPGKGLEWIGEINPTSSTINFTPSLKDKVFISRDNAKNTLYLQMSKVRSEDTALYYCARGNYYRYGDAMDYWGQGTSVTVSTREDLKNVFPPEVAVFEPSEAEISHTQKATLVCLATGFYPDHVELSWWVNGKEVHSGVCTDPQPLKEQPALNDSRYCLSSRLRVSATFWQNPRNHFRCQVQFYGLSENDEWTQDRAKPVTQIVSAEAWGRADDVIKIHWQEKKSNTILGSQEGNTMKTNDTYMKFSWLTVPEKSLDKEHRCIVRHENNKNGVDQEIIFPPIKTDVITMDPKDNCSKDANDTLLLQLTNTSAYYMYLLLLLKSVVYFAIITCCLLMAMVKRKDSRG

SEQ ID NO: 14885 - protein, 865 aa, synthetic construct
MALPVTALLLPLALLLHAARPEVQLVESGGGLVQPGGSLRLSCAASGFSFSDFWMSWVRQAPGKGLEWVATISQAGSEKDYVDSVKGRFTISRDNAKKSLYLQMNSLRAEDTAVYYCASGVYSFDYRGQGTLVTVSSGTGGGGSGGGGSGGGGSEFDIQMTQSPSSLSASVGDRVTITCSASQDISNYLNWYQQKPGKAPKLLIYYTSNLHSGVPSRFSGSGSGTDFTLTISSLQPEDFATYYCQQYRKLPWTFGQGTKLEIKRLEIQNPDPAVYQLRDSKSSDKSVCLFTDFDSQTNVSQSKDSDVYITDKCVLDMRSMDFKSNSAVAWSNKSDFACANAFNNSIIPEDTFFPSPESSDSTDHVKPKETENTKQPSKSCHKPKAIVHTEKVNMMSLTVLGLRMLFAKTVAVNFLLTAKLFFLLTARAKRSGSGVKQTLNFDLLKLAGDVESNPGPTSMDWIWRILFLVGAATGAHSFEQVQLVQSGAEVKKPGSSVKVSCKASGGTFSNYWMHWVRQAPGQGLEWMGATYRGHSDTYYNQKFKGRVTITADKSTSTAYMELSSLRSEDTAVYYCARGAIYDGYDVLDNWGQGTLVTVSSTREDLKNVFPPEVAVFEPSEAEISHTQKATLVCLATGFYPDHVELSWWVNGKEVHSGVCTDPQPLKEQPALNDSRYCLSSRLRVSATFWQNPRNHFRCQVQFYGLSENDEWTQDRAKPVTQIVSAEAWGRADDVIKIHWQEKKSNTILGSQEGNTMKTNDTYMKFSWLTVPEKSLDKEHRCIVRHENNKNGVDQEIIFPPIKTDVITMDPKDNCSKDANDTLLLQLTNTSAYYMYLLLLLKSVVYFAIITCCLLMAMVKRKDSRG

SEQ ID NO: 14886 - protein, 865 aa, synthetic construct
MALPVTALLLPLALLLHAARPEVQLVESGGGLVQPGGSLRLSCAASGFSFSDFWMSWVRQAPGKGLEWVATISQAGSEKDYVDSVKGRFTISRDNAKKSLYLQMNSLRAEDTAVYYCASGVYSFDYRGQGTLVTVSSGTGGGGSGGGGSGGGGSEFDIVLTQSPATLSLSPGDRATISCRASESVTILGSHLIYWYQQKPGQPPRLLIQLASNVQTGVPARFSGSGSRTDFTLTISSVEPEDFAVYYCLQSRTIPRTFGQGTKLEIKRLEIQNPDPAVYQLRDSKSSDKSVCLFTDFDSQTNVSQSKDSDVYITDKCVLDMRSMDFKSNSAVAWSNKSDFACANAFNNSIIPEDTFFPSPESSDSTDHVKPKETENTKQPSKSCHKPKAIVHTEKVNMMSLTVLGLRMLFAKTVAVNFLLTAKLFFLLTARAKRSGSGVKQTLNFDLLKLAGDVESNPGPTSMDWIWRILFLVGAATGAHSFEQVQLVQSGPEVKKPGESVKISCKASGYTFRHYSMNWVKQAPGQGLKWMGRINTESGVPIYADDFKGRFSFTVDTSASTAYLEISSLTSEDTAVYFCSNDYLYSLDFWGQGTTLTVSSTREDLKNVFPPEVAVFEPSEAEISHTQKATLVCLATGFYPDHVELSWWVNGKEVHSGVCTDPQPLKEQPALNDSRYCLSSRLRVSATFWQNPRNHFRCQVQFYGLSENDEWTQDRAKPVTQIVSAEAWGRADDVIKIHWQEKKSNTILGSQEGNTMKTNDTYMKFSWLTVPEKSLDKEHRCIVRHENNKNGVDQEIIFPPIKTDVITMDPKDNCSKDANDTLLLQLTNTSAYYMYLLLLLKSVVYFAIITCCLLMAMVKRKDSRG

SEQ ID NO: 14887 - protein, 866 aa, synthetic construct
MALPVTALLLPLALLLHAARPEVQLVESGGGLVQPGGSLRLSCAASGFSFSDFWMSWVRQAPGKGLEWVATISQAGSEKDYVDSVKGRFTISRDNAKKSLYLQMNSLRAEDTAVYYCASGVYSFDYRGQGTLVTVSSGTGGGGSGGGGSGGGGSEFQSVLTQPPSVSGAPGQRVTISCTGSSSNIGAGFDVHWYQQLPGTAPKLLIYGNSNRPSGVPDRFSGSKSGTSASLAITGLQAEDEADYYCQSYDSSLSGYVFGTGTKVTVLGLEIQNPDPAVYQLRDSKSSDKSVCLFTDFDSQTNVSQSKDSDVYITDKCVLDMRSMDFKSNSAVAWSNKSDFACANAFNNSIIPEDTFFPSPESSDSTDHVKPKETENTKQPSKSCHKPKAIVHTEKVNMMSLTVLGLRMLFAKTVAVNFLLTAKLFFLLTARAKRSGSGVKQTLNFDLLKLAGDVESNPGPTSMDWIWRILFLVGAATGAHSFEQVQLVQSGAEVKKPGASVKVSCKASGYTFTDYYMHWVRQAPGQRLEWMGWINPNSGGTNYAQKFQDRITVTRDTSSNTGYMELTRLRSDDTAVYYCARSPYSGVLDKWGQGTLVTVSSTREDLKNVFPPEVAVFEPSEAEISHTQKATLVCLATGFYPDHVELSWWVNGKEVHSGVCTDPQPLKEQPALNDSRYCLSSRLRVSATFWQNPRNHFRCQVQFYGLSENDEWTQDRAKPVTQIVSAEAWGRADDVIKIHWQEKKSNTILGSQEGNTMKTNDTYMKFSWLTVPEKSLDKEHRCIVRHENNKNGVDQEIIFPPIKTDVITMDPKDNCSKDANDTLLLQLTNTSAYYMYLLLLLKSVVYFAIITCCLLMAMVKRKDSRG

SEQ ID NO: 14888 - protein, 863 aa, synthetic construct
MALPVTALLLPLALLLHAARPEVQLVESGGGLVQPGGSLRLSCAASGFSFSDFWMSWVRQAPGKGLEWVATISQAGSEKDYVDSVKGRFTISRDNAKKSLYLQMNSLRAEDTAVYYCASGVYSFDYRGQGTLVTVSSGTGGGGSGGGGSGGGGSEFQAVLTQPPSASGTPGQRVTISCSGSSSNIGSYTVSWYQQLPGTAPKFLIYSNNQRPSGVPDRFSGSKSGTSASLAISGLQSEDEADYYCAAWDDSLNGYVFGTGTKVTVLGLEIQNPDPAVYQLRDSKSSDKSVCLFTDFDSQTNVSQSKDSDVYITDKCVLDMRSMDFKSNSAVAWSNKSDFACANAFNNSIIPEDTFFPSPESSDSTDHVKPKETENTKQPSKSCHKPKAIVHTEKVNMMSLTVLGLRMLFAKTVAVNFLLTAKLFFLLTARAKRSGSGVKQTLNFDLLKLAGDVESNPGPTSMDWIWRILFLVGAATGAHSFEVQLVQSGAEVKKPGESLKISCKGSGYDFTTYWIGWVRQMPGKGLEWMGIIYPGDSDTRYSPSVRGRVTISADKSINTAYLQWSSLEASDTAMYYCARMWTFSQDGWGQGTLVTVSSTREDLKNVFPPEVAVFEPSEAEISHTQKATLVCLATGFYPDHVELSWWVNGKEVHSGVCTDPQPLKEQPALNDSRYCLSSRLRVSATFWQNPRNHFRCQVQFYGLSENDEWTQDRAKPVTQIVSAEAWGRADDVIKIHWQEKKSNTILGSQEGNTMKTNDTYMKFSWLTVPEKSLDKEHRCIVRHENNKNGVDQEIIFPPIKTDVITMDPKDNCSKDANDTLLLQLTNTSAYYMYLLLLLKSVVYFAIITCCLLMAMVKRKDSRG

SEQ ID NO: 14889 - protein, 866 aa, synthetic construct
MALPVTALLLPLALLLHAARPEVQLVESGGGLVQPGGSLRLSCAASGFSFSDFWMSWVRQAPGKGLEWVATISQAGSEKDYVDSVKGRFTISRDNAKKSLYLQMNSLRAEDTAVYYCASGVYSFDYRGQGTLVTVSSGTGGGGSGGGGSGGGGSEFDIVMTQSPDSLAVSLGERATINCKSSQSILYSSNQKNYLAWYQQKPGQSPKLLIYWASTRESGVPDRFSGSGSGTDFTLTISSLQAEDVAVYYCHQYISSYTFGQGTKLEIKLEIQNPDPAVYQLRDSKSSDKSVCLFTDFDSQTNVSQSKDSDVYITDKCVLDMRSMDFKSNSAVAWSNKSDFACANAFNNSIIPEDTFFPSPESSDSTDHVKPKETENTKQPSKSCHKPKAIVHTEKVNMMSLTVLGLRMLFAKTVAVNFLLTAKLFFLLTARAKRSGSGVKQTLNFDLLKLAGDVESNPGPTSMDWIWRILFLVGAATGAHSFEQVQLVQSGAEVKKPGASVKVSCKASGYTFASQWMHWMRQAPGQGLEWIGWINPGNVNTKYNEKFKGRATLTVDTSTNTAYMELSSLRSEDTAVYYCARSTWYRPLDYWGQGTLVTVSSTREDLKNVFPPEVAVFEPSEAEISHTQKATLVCLATGFYPDHVELSWWVNGKEVHSGVCTDPQPLKEQPALNDSRYCLSSRLRVSATFWQNPRNHFRCQVQFYGLSENDEWTQDRAKPVTQIVSAEAWGRADDVIKIHWQEKKSNTILGSQEGNTMKTNDTYMKFSWLTVPEKSLDKEHRCIVRHENNKNGVDQEIIFPPIKTDVITMDPKDNCSKDANDTLLLQLTNTSAYYMYLLLLLKSVVYFAIITCCLLMAMVKRKDSRG

SEQ ID NO: 14890 - protein, 866 aa, synthetic construct
MALPVTALLLPLALLLHAARPEVQLVESGGGLVQPGGSLRLSCAASGFSFSDFWMSWVRQAPGKGLEWVATISQAGSEKDYVDSVKGRFTISRDNAKKSLYLQMNSLRAEDTAVYYCASGVYSFDYRGQGTLVTVSSGTGGGGSGGGGSGGGGSEFDHIVLTQSPSSLSASLGDRVTISCRASQDISTYLNWYQQKPDGTVKLLIFYTSRLHAGVPSRFSGSGSGTHHSLTISNLEQEDIATYFCQQGNSLPFTFGSGTKLEIKRLEIQNPDPAVYQLRDSKSSDKSVCLFTDFDSQTNVSQSKDSDVYITDKCVLDMRSMDFKSNSAVAWSNKSDFACANAFNNSIIPEDTFFPSPESSDSTDHVKPKETENTKQPSKSCHKPKAIVHTEKVNMMSLTVLGLRMLFAKTVAVNFLLTAKLFFLLTARAKRSGSGVKQTLNFDLLKLAGDVESNPGPTSMDWIWRILFLVGAATGAHSFEQVQLKESGPELEKPGASVKISCKASGYSFTAYSMNWVKQNNGMSLEWIGSIDPYYGDTKYAQKFKGKATLTVDKASSTAYLQLKSLTSEDSAVYYCARRMITTGDWYFDVWGAGTTVTVSSTREDLKNVFPPEVAVFEPSEAEISHTQKATLVCLATGFYPDHVELSWWVNGKEVHSGVCTDPQPLKEQPALNDSRYCLSSRLRVSATFWQNPRNHFRCQVQFYGLSENDEWTQDRAKPVTQIVSAEAWGRADDVIKIHWQEKKSNTILGSQEGNTMKTNDTYMKFSWLTVPEKSLDKEHRCIVRHENNKNGVDQEIIFPPIKTDVITMDPKDNCSKDANDTLLLQLTNTSAYYMYLLLLLKSVVYFAIITCCLLMAMVKRKDSRG

SEQ ID NO: 14891 - protein, 866 aa, synthetic construct; identical to SEQ ID NO: 14890

SEQ ID NO: 14892 - protein, 866 aa, synthetic construct
MALPVTALLLPLALLLHAARPEVQLVESGGGLVQPGGSLRLSCAASGFSFSDFWMSWVRQAPGKGLEWVATISQAGSEKDYVDSVKGRFTISRDNAKKSLYLQMNSLRAEDTAVYYCASGVYSFDYRGQGTLVTVSSGTGGGGSGGGGSGGGGSEFDEIVLTQSPATLSLSPGERATLSCRASQSVSSYLAWYQQKPGQAPRLLIYDASNRATGIPARFSGSGSGTDFTLTISSLEPEDFAVYYCQQRSNWPITFGQGTRLEIKLEIQNPDPAVYQLRDSKSSDKSVCLFTDFDSQTNVSQSKDSDVYITDKCVLDMRSMDFKSNSAVAWSNKSDFACANAFNNSIIPEDTFFPSPESSDSTDHVKPKETENTKQPSKSCHKPKAIVHTEKVNMMSLTVLGLRMLFAKTVAVNFLLTAKLFFLLTARAKRSGSGVKQTLNFDLLKLAGDVESNPGPTSMDWIWRILFLVGAATGAHSFEEVQLVESGGGLVQPGRSLRLSCAASGFTFNDYAMHWVRQAPGKGLEWVSTISWNSGSIGYADSVKGRFTISRDNAKKSLYLQMNSLRAEDTALYYCAKDIQYGNYYYGMDVWGQGTTVTVSSTREDLKNVFPPEVAVFEPSEAEISHTQKATLVCLATGFYPDHVELSWWVNGKEVHSGVCTDPQPLKEQPALNDSRYCLSSRLRVSATFWQNPRNHFRCQVQFYGLSENDEWTQDRAKPVTQIVSAEAWGRADDVIKIHWQEKKSNTILGSQEGNTMKTNDTYMKFSWLTVPEKSLDKEHRCIVRHENNKNGVDQEIIFPPIKTDVITMDPKDNCSKDANDTLLLQLTNTSAYYMYLLLLLKSVVYFAIITCCLLMAMVKRKDSRG

SEQ ID NO: 14893 - protein, 868 aa, synthetic construct
MALPVTALLLPLALLLHAARPEVQLVESGGGLVQPGGSLRLSCAASGFSFSDFWMSWVRQAPGKGLEWVATISQAGSEKDYVDSVKGRFTISRDNAKKSLYLQMNSLRAEDTAVYYCASGVYSFDYRGQGTLVTVSSGTGGGGSGGGGSGGGGSEFDIVMTQTPLSLPVTPGEPASISCRSSKSLLHSNGITYLYWYLQKPGQSPQLLIYQMSNLVSGVPDRFSGSGSGTDFTLKISRVEAEDVGVYYCAQNLELPYTFGGGTKVEIKRLEIQNPDPAVYQLRDSKSSDKSVCLFTDFDSQTNVSQSKDSDVYITDKCVLDMRSMDFKSNSAVAWSNKSDFACANAFNNSIIPEDTFFPSPESSDSTDHVKPKETENTKQPSKSCHKPKAIVHTEKVNMMSLTVLGLRMLFAKTVAVNFLLTAKLFFLLTARAKRSGSGVKQTLNFDLLKLAGDVESNPGPTSMDWIWRILFLVGAATGAHSFEQVQLVQSGAEVKKPGSSVKVSCKASGYAFSYSWINWVRQAPGQGLEWMGRIFPGDGDTDYNGKFKGRVTITADKSTSTAYMELSSLRSEDTAVYYCARNVFDGYWLVYWGQGTLVTVSSTREDLKNVFPPEVAVFEPSEAEISHTQKATLVCLATGFYPDHVELSWWVNGKEVHSGVCTDPQPLKEQPALNDSRYCLSSRLRVSATFWQNPRNHFRCQVQFYGLSENDEWTQDRAKPVTQIVSAEAWGRADDVIKIHWQEKKSNTILGSQEGNTMKTNDTYMKFSWLTVPEKSLDKEHRCIVRHENNKNGVDQEIIFPPIKTDVITMDPKDNCSKDANDTLLLQLTNTSAYYMYLLLLLKSVVYFAIITCCLLMAMVKRKDSRG

SEQ ID NO: 14894 - protein, 869 aa, synthetic construct
MALPVTALLLPLALLLHAARPEVQLVESGGGLVQPGGSLRLSCAASGFSFSDFWMSWVRQAPGKGLEWVATISQAGSEKDYVDSVKGRFTISRDNAKKSLYLQMNSLRAEDTAVYYCASGVYSFDYRGQGTLVTVSSGTGGGGSGGGGSGGGGSEFDIQMTQSPSSLSASVGDRVTITCRSSQSIVHSVGNTFLEWYQQKPGKAPKLLIYKVSNRFSGVPSRFSGSGSGTDFTLTISSLQPEDFATYYCFQGSQFPYTFGQGTKVEIKRLEIQNPDPAVYQLRDSKSSDKSVCLFTDFDSQTNVSQSKDSDVYITDKCVLDMRSMDFKSNSAVAWSNKSDFACANAFNNSIIPEDTFFPSPESSDSTDHVKPKETENTKQPSKSCHKPKAIVHTEKVNMMSLTVLGLRMLFAKTVAVNFLLTAKLFFLLTARAKRSGSGVKQTLNFDLLKLAGDVESNPGPTSMDWIWRILFLVGAATGAHSFEEVQLVESGGGLVQPGGSLRLSCAASGYEFSRSWMNWVRQAPGKGLEWVGRIYPGDGDTNYSGKFKGRFTISADTSKNTAYLQMNSLRAEDTAVYYCARDGSSWDWYFDVWGQGTLVTVSSTREDLKNVFPPEVAVFEPSEAEISHTQKATLVCLATGFYPDHVELSWWVNGKEVHSGVCTDPQPLKEQPALNDSRYCLSSRLRVSATFWQNPRNHFRCQVQFYGLSENDEWTQDRAKPVTQIVSAEAWGRADDVIKIHWQEKKSNTILGSQEGNTMKTNDTYMKFSWLTVPEKSLDKEHRCIVRHENNKNGVDQEIIFPPIKTDVITMDPKDNCSKDANDTLLLQLTNTSAYYMYLLLLLKSVVYFAIITCCLLMAMVKRKDSRG

SEQ ID NO: 14895 - protein, 867 aa, synthetic construct
MALPVTALLLPLALLLHAARPEVQLVESGGGLVQPGGSLRLSCAASGFSFSDFWMSWVRQAPGKGLEWVATISQAGSEKDYVDSVKGRFTISRDNAKKSLYLQMNSLRAEDTAVYYCASGVYSFDYRGQGTLVTVSSGTGGGGSGGGGSGGGGSEFDIQMTQSPSSLSASVGDRVTITCRASQTIWSYLNWYQQRPGKAPNLLIYAASSLQSGVPSRFSGRGSGTDFTLTISSLQAEDFATYYCQQSYSIPQIFGQGTKLEIKLEIQNPDPAVYQLRDSKSSDKSVCLFTDFDSQTNVSQSKDSDVYITDKCVLDMRSMDFKSNSAVAWSNKSDFACANAFNNSIIPEDTFFPSPESSDSTDHVKPKETENTKQPSKSCHKPKAIVHTEKVNMMSLTVLGLRMLFAKTVAVNFLLTAKLFFLLTARAKRSGSGVKQTLNFDLLKLAGDVESNPGPTSMDWIWRILFLVGAATGAHSFEQVQLQQSGPGLVKPSQTLSLTCAISGDSVSSNSAAWNWIRQSPSRGLEWLGRTYYRSKWYNDYAVSVKSRITINPDTSKNQFSLQLNSVTPEDTAVYYCAREVTGDLEDAFDIWGQGTMVTVSSTREDLKNVFPPEVAVFEPSEAEISHTQKATLVCLATGFYPDHVELSWWVNGKEVHSGVCTDPQPLKEQPALNDSRYCLSSRLRVSATFWQNPRNHFRCQVQFYGLSENDEWTQDRAKPVTQIVSAEAWGRADDVIKIHWQEKKSNTILGSQEGNTMKTNDTYMKFSWLTVPEKSLDKEHRCIVRHENNKNGVDQEIIFPPIKTDVITMDPKDNCSKDANDTLLLQLTNTSAYYMYLLLLLKSVVYFAIITCCLLMAMVKRKDSRG

SEQ ID NO: 14896 - protein, 860 aa, synthetic construct
MALPVTALLLPLALLLHAARPEVQLVESGGGLVQPGGSLRLSCAASGFSFSDFWMSWVRQAPGKGLEWVATISQAGSEKDYVDSVKGRFTISRDNAKKSLYLQMNSLRAEDTAVYYCASGVYSFDYRGQGTLVTVSSGTGGGGSGGGGSGGGGSEFDIQMTQSPATIENTSLSASVGDRVTITCRASQGISSWLTWYQQKPEKAPKSLIYAASSLQSGVPSRFSGSGSGTDFTLTISSLQPEDFATYYCQQYDSYPITFGQGTRLEIKLEIQNPDPAVYQLRDSKSSDKSVCLFTDFDSQTNVSQSKDSDVYITDKCVLDMRSMDFKSNSAVAWSNKSDFACANAFNNSIIPEDTFFPSPESSDSTDHVKPKETENTKQPSKSCHKPKAIVHTEKVNMMSLTVLGLRMLFAKTVAVNFLLTAKLFFLLTARAKRSGSGVKQTLNFDLLKLAGDVESNPGPTSMDWIWRILFLVGAATGAHSFEQVQLQQWGAGLLKPSETLSLTCAVYGGSFSAYYWSWIRQPPGKGLEWIGDINHGGGTNYNPSLKSRVTISVDTSKNQFSLKLNSVTAADTAVYYCASLTAYWGQGSLVTVSSTREDLKNVFPPEVAVFEPSEAEISHTQKATLVCLATGFYPDHVELSWWVNGKEVHSGVCTDPQPLKEQPALNDSRYCLSSRLRVSATFWQNPRNHFRCQVQFYGLSENDEWTQDRAKPVTQIVSAEAWGRADDVIKIHWQEKKSNTILGSQEGNTMKTNDTYMKFSWLTVPEKSLDKEHRCIVRHENNKNGVDQEIIFPPIKTDVITMDPKDNCSKDANDTLLLQLTNTSAYYMYLLLLLKSVVYFAIITCCLLMAMVKRKDSRG

SEQ ID NO: 14897 - protein, 865 aa, synthetic construct
MALPVTALLLPLALLLHAARPEVQLVESGGGLVQPGGSLRLSCAASGFSFSDFWMSWVRQAPGKGLEWVATISQAGSEKDYVDSVKGRFTISRDNAKKSLYLQMNSLRAEDTAVYYCASGVYSFDYRGQGTLVTVSSGTGGGGSGGGGSGGGGSEFDEIVLTQSPDSLAVSLGERATINCKASQSVDFDGDSYLNWYQQKPGQPPKVLIYAASTLQSGVPSRFSGSGSGTDFTLTINSLEAEDAATYYCQQSNEDPWTFGGGTKVEIKLEIQNPDPAVYQLRDSKSSDKSVCLFTDFDSQTNVSQSKDSDVYITDKCVLDMRSMDFKSNSAVAWSNKSDFACANAFNNSIIPEDTFFPSPESSDSTDHVKPKETENTKQPSKSCHKPKAIVHTEKVNMMSLTVLGLRMLFAKTVAVNFLLTAKLFFLLTARAKRSGSGVKQTLNFDLLKLAGDVESNPGPTSMDWIWRILFLVGAATGAHSFEQVQLVQSGAEVKKPGASVKVSCKVSGYTFTDYYITWVRQAPGQALEWMGWIYPGSGNTKYSQKFQGRFVFSVDTSASTAYLQLSSLKAEDTAVYYCANYGNYWFAYWGQGTLVTVSSTREDLKNVFPPEVAVFEPSEAEISHTQKATLVCLATGFYPDHVELSWWVNGKEVHSGVCTDPQPLKEQPALNDSRYCLSSRLRVSATFWQNPRNHFRCQVQFYGLSENDEWTQDRAKPVTQIVSAEAWGRADDVIKIHWQEKKSNTILGSQEGNTMKTNDTYMKFSWLTVPEKSLDKEHRCIVRHENNKNGVDQEIIFPPIKTDVITMDPKDNCSKDANDTLLLQLTNTSAYYMYLLLLLKSVVYFAIITCCLLMAMVKRKDSRG

SEQ ID NO: 14898 - protein, 862 aa, synthetic construct
MALPVTALLLPLALLLHAARPEVQLVESGGGLVQPGGSLRLSCAASGFSFSDFWMSWVRQAPGKGLEWVATISQAGSEKDYVDSVKGRFTISRDNAKKSLYLQMNSLRAEDTAVYYCASGVYSFDYRGQGTLVTVSSGTGGGGSGGGGSGGGGSEFDIQMTQSPSSLSASVGDRVTITCRASQGISSWLAWYQQKPEKAPKSLIYAASSLQSGVPSRFSGSGSGTDFTLTISSLQPEDFATYYCQQYNSYPPTFGGGTKVEIKLEIQNPDPAVYQLRDSKSSDKSVCLFTDFDSQTNVSQSKDSDVYITDKCVLDMRSMDFKSNSAVAWSNKSDFACANAFNNSIIPEDTFFPSPESSDSTDHVKPKETENTKQPSKSCHKPKAIVHTEKVNMMSLTVLGLRMLFAKTVAVNFLLTAKLFFLLTARAKRSGSGVKQTLNFDLLKLAGDVESNPGPTSMDWIWRILFLVGAATGAHSFEEVQLVQSGGGLVHPGGSLRLSCAGSGFAFSSSTMHWIRQAPGKGLEWISLIGSGGGIYYGDSVKGRFTISRDNAKNSLYLQMNSLRAEDMAVYYCVRGYFDWVDYFDYWGQGTLVTVSSTREDLKNVFPPEVAVFEPSEAEISHTQKATLVCLATGFYPDHVELSWWVNGKEVHSGVCTDPQPLKEQPALNDSRYCLSSRLRVSATFWQNPRNHFRCQVQFYGLSENDEWTQDRAKPVTQIVSAEAWGRADDVIKIHWQEKKSNTILGSQEGNTMKTNDTYMKFSWLTVPEKSLDKEHRCIVRHENNKNGVDQEIIFPPIKTDVITMDPKDNCSKDANDTLLLQLTNTSAYYMYLLLLLKSVVYFAIITCCLLMAMVKRKDSRG

SEQ ID NO: 14899 - protein, 872 aa, synthetic construct
MALPVTALLLPLALLLHAARPEVQLVESGGGLVQPGGSLRLSCAASGFSFSDFWMSWVRQAPGKGLEWVATISQAGSEKDYVDSVKGRFTISRDNAKKSLYLQMNSLRAEDTAVYYCASGVYSFDYRGQGTLVTVSSGTGGGGSGGGGSGGGGSEFDDIVMTQSPDSLTVSLGERTTINCKSSQSVLDSSKNKNSLAWYQQKPGQPPKLLLSWASTRESGIPDRFSGSGSGTDFTLTIDSLQPEDSATYYCQQSAHFPITFGQGTRLEIKLEIQNPDPAVYQLRDSKSSDKSVCLFTDFDSQTNVSQSKDSDVYITDKCVLDMRSMDFKSNSAVAWSNKSDFACANAFNNSIIPEDTFFPSPESSDSTDHVKPKETENTKQPSKSCHKPKAIVHTEKVNMMSLTVLGLRMLFAKTVAVNFLLTAKLFFLLTARAKRSGSGVKQTLNFDLLKLAGDVESNPGPTSMDWIWRILFLVGAATGAHSFEQVQLVQSGAEVKKPGASVKVSCKASGYTFTNYGMNWVKQAPGQGLKWMGWINTYTGEPTYADDFKGRVTMTSDTSTSTAYLELHNLRSDDTAVYYCARWSWSDGYYVYFDYWGQGTTVTVSSTREDLKNVFPPEVAVFEPSEAEISHTQKATLVCLATGFYPDHVELSWWVNGKEVHSGVCTDPQPLKEQPALNDSRYCLSSRLRVSATFWQNPRNHFRCQVQFYGLSENDEWTQDRAKPVTQIVSAEAWGRADDVIKIHWQEKKSNTILGSQEGNTMKTNDTYMKFSWLTVPEKSLDKEHRCIVRHENNKNGVDQEIIFPPIKTDVITMDPKDNCSKDANDTLLLQLTNTSAYYMYLLLLLKSVVYFAIITCCLLMAMVKRKDSRG

SEQ ID NO: 14900 - protein, 868 aa, synthetic construct
MALPVTALLLPLALLLHAARPEVQLVESGGGLVQPGGSLRLSCAASGFSFSDFWMSWVRQAPGKGLEWVATISQAGSEKDYVDSVKGRFTISRDNAKKSLYLQMNSLRAEDTAVYYCASGVYSFDYRGQGTLVTVSSGTGGGGSGGGGSGGGGSEFDEIVLTQSPGSLAVSPGERVTMSCKSSQSVFFSSSQKNYLAWYQQIPGQSPRLLIYWASTRESGVPDRFTGSGSGTDFTLTISSVQPEDLAIYYCHQYLSSRTFGQGTKLEIKRLEIQNPDPAVYQLRDSKSSDKSVCLFTDFDSQTNVSQSKDSDVYITDKCVLDMRSMDFKSNSAVAWSNKSDFACANAFNNSIIPEDTFFPSPESSDSTDHVKPKETENTKQPSKSCHKPKAIVHTEKVNMMSLTVLGLRMLFAKTVAVNFLLTAKLFFLLTARAKRSGSGVKQTLNFDLLKLAGDVESNPGPTSMDWIWRILFLVGAATGAHSFEQVQLQQPGAEVVKPGASVKMSCKASGYTFTSYYIHWIKQTPGQGLEWVGVIYPGNDDISYNQKFQGKATLTADKSSTTAYMQLSSLTSEDSAVYYCAREVRLRYFDVWGQGTTVTVSSTREDLKNVFPPEVAVFEPSEAEISHTQKATLVCLATGFYPDHVELSWWVNGKEVHSGVCTDPQPLKEQPALNDSRYCLSSRLRVSATFWQNPRNHFRCQVQFYGLSENDEWTQDRAKPVTQIVSAEAWGRADDVIKIHWQEKKSNTILGSQEGNTMKTNDTYMKFSWLTVPEKSLDKEHRCIVRHENNKNGVDQEIIFPPIKTDVITMDPKDNCSKDANDTLLLQLTNTSAYYMYLLLLLKSVVYFAIITCCLLMAMVKRKDSRG

SEQ ID NO: 14901 - protein, 872 aa, synthetic construct
MALPVTALLLPLALLLHAARPEVQLVESGGGLVQPGGSLRLSCAASGFSFSDFWMSWVRQAPGKGLEWVATISQAGSEKDYVDSVKGRFTISRDNAKKSLYLQMNSLRAEDTAVYYCASGVYSFDYRGQGTLVTVSSGTGGGGSGGGGSGGGGSEFDVLLTQSPLSLPVTLGQPASISCRSSQTIVHSNGNTYLEWFQQRPGQSPRLLIYQVSNRFSGVPDRFSGSGSGTDFTLKISRVEAEDVGVYYCFQGSHVPRTFGGGTKVEIKRALEIQNPDPAVYQLRDSKSSDKSVCLFTDFDSQTNVSQSKDSDVYITDKCVLDMRSMDFKSNSAVAWSNKSDFACANAFNNSIIPEDTFFPSPESSDSTDHVKPKETENTKQPSKSCHKPKAIVHTEKVNMMSLTVLGLRMLFAKTVAVNFLLTAKLFFLLTARAKRSGSGVKQTLNFDLLKLAGDVESNPGPTSMDWIWRILFLVGAATGAHSFEQIQLVQSGSELKKPGASVKVSCKASGYTFTNYGMNWVRQAPGQGLKWMGWINTNTGEPKYAEEFKGRFALSLDTSVSTAYLQINSLKAEDTAVYFCARGYGNYARGAWLAYWGQGTLVTVSSTREDLKNVFPPEVAVFEPSEAEISHTQKATLVCLATGFYPDHVELSWWVNGKEVHSGVCTDPQPLKEQPALNDSRYCLSSRLRVSATFWQNPRNHFRCQVQFYGLSENDEWTQDRAKPVTQIVSAEAWGRADDVIKIHWQEKKSNTILGSQEGNTMKTNDTYMKFSWLTVPEKSLDKEHRCIVRHENNKNGVDQEIIFPPIKTDVITMDPKDNCSKDANDTLLLQLTNTSAYYMYLLLLLKSVVYFAIITCCLLMAMVKRKDSRG

SEQ ID NO: 14902 - protein, 857 aa, synthetic construct
MALPVTALLLPLALLLHAARPEVQLVESGGGLVQPGGSLRLSCAASGFSFSDFWMSWVRQAPGKGLEWVATISQAGSEKDYVDSVKGRFTISRDNAKKSLYLQMNSLRAEDTAVYYCASGVYSFDYRGQGTLVTVSSGTGGGGSGGGGSGGGGSEFDEIVLTQSPATLSLSPGERATLSCSASSSINYIYWLQQKPGQAPRILIYLTSNLASGVPARFSGSGSGTDFTLTISSLEPEDFAVYYCLQWSSNPLTFGGGTKVEIKLEIQNPDPAVYQLRDSKSSDKSVCLFTDFDSQTNVSQSKDSDVYITDKCVLDMRSMDFKSNSAVAWSNKSDFACANAFNNSIIPEDTFFPSPESSDSTDHVKPKETENTKQPSKSCHKPKAIVHTEKVNMMSLTVLGLRMLFAKTVAVNFLLTAKLFFLLTARAKRSGSGVKQTLNFDLLKLAGDVESNPGPTSMDWIWRILFLVGAATGAHSFEEVQLVESGGGLVKPGGSLRLSCAASGFTFSSYDMSWVRQAPGKGLEWVSTISSGGSYTYYLDSIKGRFTISRDNAKNSLYLQMNSLRAEDTAVYYCARQGLDYWGRGTLVTVSSTREDLKNVFPPEVAVFEPSEAEISHTQKATLVCLATGFYPDHVELSWWVNGKEVHSGVCTDPQPLKEQPALNDSRYCLSSRLRVSATFWQNPRNHFRCQVQFYGLSENDEWTQDRAKPVTQIVSAEAWGRADDVIKIHWQEKKSNTILGSQEGNTMKTNDTYMKFSWLTVPEKSLDKEHRCIVRHENNKNGVDQEIIFPPIKTDVITMDPKDNCSKDANDTLLLQLTNTSAYYMYLLLLLKSVVYFAIITCCLLMAMVKRKDSRG

SEQ ID NO: 14903 - protein, 866 aa, synthetic construct
MALPVTALLLPLALLLHAARPEVQLVESGGGLVQPGGSLRLSCAASGFSFSDFWMSWVRQAPGKGLEWVATISQAGSEKDYVDSVKGRFTISRDNAKKSLYLQMNSLRAEDTAVYYCASGVYSFDYRGQGTLVTVSSGTGGGGSGGGGSGGGGSEFDIVMTQSPDSLAVSLGERATINCRASKSVSTSGYSFMHWYQQKPGQPPKLLIYLASNLESGVPDRFSGSGSGTDFTLTISSLQAEDVAVYYCQHSREVPWTFGQGTKVEIKRLEIQNPDPAVYQLRDSKSSDKSVCLFTDFDSQTNVSQSKDSDVYITDKCVLDMRSMDFKSNSAVAWSNKSDFACANAFNNSIIPEDTFFPSPESSDSTDHVKPKETENTKQPSKSCHKPKAIVHTEKVNMMSLTVLGLRMLFAKTVAVNFLLTAKLFFLLTARAKRSGSGVKQTLNFDLLKLAGDVESNPGPTSMDWIWRILFLVGAATGAHSFEQVQLVQSGAEVKKPGASVKVSCKASGYTFTNYGMNWVRQAPGQGLEWMGWINTYTGEPTYADAFKGRFAFSLDTSTSTAYLQINSLRSDDTAVYYCARDYGDYGMDYWGQGTTVTVSSTREDLKNVFPPEVAVFEPSEAEISHTQKATLVCLATGFYPDHVELSWWVNGKEVHSGVCTDPQPLKEQPALNDSRYCLSSRLRVSATFWQNPRNHFRCQVQFYGLSENDEWTQDRAKPVTQIVSAEAWGRADDVIKIHWQEKKSNTILGSQEGNTMKTNDTYMKFSWLTVPEKSLDKEHRCIVRHENNKNGVDQEIIFPPIKTDVITMDPKDNCSKDANDTLLLQLTNTSAYYMYLLLLLKSVVYFAIITCCLLMAMVKRKDSRG

SEQ ID NO: 14904 - protein, 862 aa, synthetic construct
MALPVTALLLPLALLLHAARPEVQLVESGGGLVQPGGSLRLSCAASGFSFSDFWMSWVRQAPGKGLEWVATISQAGSEKDYVDSVKGRFTISRDNAKKSLYLQMNSLRAEDTAVYYCASGVYSFDYRGQGTLVTVSSGTGGGGSGGGGSGGGGSEFDIVMTQTPLTLSVTIGQPASISCKSSQSLLDSDGKTYLNWLLQRPGQSPERLIYLVSKLDSGVPDRFTGSGSGTDFTLKISRVEAEDLGVYCCWQGTHFPYTFGGGTKVEIKGLEIQNPDPAVYQLRDSKSSDKSVCLFTDFDSQTNVSQSKDSDVYITDKCVLDMRSMDFKSNSAVAWSNKSDFACANAFNNSIIPEDTFFPSPESSDSTDHVKPKETENTKQPSKSCHKPKAIVHTEKVNMMSLTVLGLRMLFAKTVAVNFLLTAKLFFLLTARAKRSGSGVKQTLNFDLLKLAGDVESNPGPTSMDWIWRILFLVGAATGAHSFEQVQLQQPGAELVRPGASVKLSCKASGYTFTSYWMNWVKQRPGQGLEWIGMIDPSDSETHYNHIFKDKATLTVDKSSSTAYLQLSSLTSEDSAVYYCARNLYLWGQGTSVTVSSTREDLKNVFPPEVAVFEPSEAEISHTQKATLVCLATGFYPDHVELSWWVNGKEVHSGVCTDPQPLKEQPALNDSRYCLSSRLRVSATFWQNPRNHFRCQVQFYGLSENDEWTQDRAKPVTQIVSAEAWGRADDVIKIHWQEKKSNTILGSQEGNTMKTNDTYMKFSWLTVPEKSLDKEHRCIVRHENNKNGVDQEIIFPPIKTDVITMDPKDNCSKDANDTLLLQLTNTSAYYMYLLLLLKSVVYFAIITCCLLMAMVKRKDSRG

SEQ ID NO: 14905 - protein, 870 aa, synthetic construct
MALPVTALLLPLALLLHAARPEVQLVESGGGLVQPGGSLRLSCAASGFSFSDFWMSWVRQAPGKGLEWVATISQAGSEKDYVDSVKGRFTISRDNAKKSLYLQMNSLRAEDTAVYYCASGVYSFDYRGQGTLVTVSSGTGGGGSGGGGSGGGGSEFDIVMTQSPDSLAVSLGERATINCESSQSLLNSGNQKNYLTWYQQKPGQPPKPLIYWASTRESGVPDRFSGSGSGTDFTLTISSLQAEDVAVYYCQNDYSYPYTFGQGTKLEIKRLEIQNPDPAVYQLRDSKSSDKSVCLFTDFDSQTNVSQSKDSDVYITDKCVLDMRSMDFKSNSAVAWSNKSDFACANAFNNSIIPEDTFFPSPESSDSTDHVKPKETENTKQPSKSCHKPKAIVHTEKVNMMSLTVLGLRMLFAKTVAVNFLLTAKLFFLLTARAKRSGSGVKQTLNFDLLKLAGDVESNPGPTSMDWIWRILFLVGAATGAHSFEEVQLVQSGAEVKKPGESLKISCKGSGYSFTDYYMKWARQMPGKGLEWMGDIIPSNGATFYNQKFKGQVTISADKSISTTYLQWSSLKASDTAMYYCARSHLLRASWFAYWGQGTMVTVSSTREDLKNVFPPEVAVFEPSEAEISHTQKATLVCLATGFYPDHVELSWWVNGKEVHSGVCTDPQPLKEQPALNDSRYCLSSRLRVSATFWQNPRNHFRCQVQFYGLSENDEWTQDRAKPVTQIVSAEAWGRADDVIKIHWQEKKSNTILGSQEGNTMKTNDTYMKFSWLTVPEKSLDKEHRCIVRHENNKNGVDQEIIFPPIKTDVITMDPKDNCSKDANDTLLLQLTNTSAYYMYLLLLLKSVVYFAIITCCLLMAMVKRKDSRG

SEQ ID NO: 14906 - protein, 865 aa, synthetic construct
MALPVTALLLPLALLLHAARPEVQLVESGGGLVQPGGSLRLSCAASGFSFSDFWMSWVRQAPGKGLEWVATISQAGSEKDYVDSVKGRFTISRDNAKKSLYLQMNSLRAEDTAVYYCASGVYSFDYRGQGTLVTVSSGTGGGGSGGGGSGGGGSEFDIQMTQSTSSLSASLGDRVTISCSASQGINNYLNWYQQKPDGTVELLIYYTSTLQSGVPSRFSGSGSGTDYSLTISNLEPEDIGTYYCQQYSKLPRTFGGGTKLEIKLEIQNPDPAVYQLRDSKSSDKSVCLFTDFDSQTNVSQSKDSDVYITDKCVLDMRSMDFKSNSAVAWSNKSDFACANAFNNSIIPEDTFFPSPESSDSTDHVKPKETENTKQPSKSCHKPKAIVHTEKVNMMSLTVLGLRMLFAKTVAVNFLLTAKLFFLLTARAKRSGSGVKQTLNFDLLKLAGDVESNPGPTSMDWIWRILFLVGAATGAHSFEQVQLQQSGSELMMPGASVKISCKATGYTFSNYWIEWVKQRPGHGLEWIGEILPGTGRTIYNEKFKGKATFTADISSNTVQMQLSSLTSEDSAVYYCARRDYYGNFYYAMDYWGQGTSVTVSSTREDLKNVFPPEVAVFEPSEAEISHTQKATLVCLATGFYPDHVELSWWVNGKEVHSGVCTDPQPLKEQPALNDSRYCLSSRLRVSATFWQNPRNHFRCQVQFYGLSENDEWTQDRAKPVTQIVSAEAWGRADDVIKIHWQEKKSNTILGSQEGNTMKTNDTYMKFSWLTVPEKSLDKEHRCIVRHENNKNGVDQEIIFPPIKTDVITMDPKDNCSKDANDTLLLQLTNTSAYYMYLLLLLKSVVYFAIITCCLLMAMVKRKDSRG

SEQ ID NO: 14907 - protein, 860 aa, synthetic construct
MALPVTALLLPLALLLHAARPEVQLVESGGGLVQPGGSLRLSCAASGFSFSDFWMSWVRQAPGKGLEWVATISQAGSEKDYVDSVKGRFTISRDNAKKSLYLQMNSLRAEDTAVYYCASGVYSFDYRGQGTLVTVSSGTGGGGSGGGGSGGGGSEFDIQMTQSPASLSVSVGETVTITCRASENIYSNLAWYQQKQGKSPQLLVYAATNLADGVPSRFSGSGSGTQYSLKINSLQSEDFGSYYCQHFWGTWTFGGGTTLEIKLEIQNPDPAVYQLRDSKSSDKSVCLFTDFDSQTNVSQSKDSDVYITDKCVLDMRSMDFKSNSAVAWSNKSDFACANAFNNSIIPEDTFFPSPESSDSTDHVKPKETENTKQPSKSCHKPKAIVHTEKVNMMSLTVLGLRMLFAKTVAVNFLLTAKLFFLLTARAKRSGSGVKQTLNFDLLKLAGDVESNPGPTSMDWIWRILFLVGAATGAHSFEEVQLQQSGPELVKPGASVKMSCKASGYTFTDYYMKWMKQSHGKSLEWIGDINPNNGGTTYNQKFKGKATLTVDKSSSTAYMQLNSLTSEDSAVYYCARDYGYGYFDYWGQGTTLTVSSTREDLKNVFPPEVAVFEPSEAEISHTQKATLVCLATGFYPDHVELSWWVNGKEVHSGVCTDPQPLKEQPALNDSRYCLSSRLRVSATFWQNPRNHFRCQVQFYGLSENDEWTQDRAKPVTQIVSAEAWGRADDVIKIHWQEKKSNTILGSQEGNTMKTNDTYMKFSWLTVPEKSLDKEHRCIVRHENNKNGVDQEIIFPPIKTDVITMDPKDNCSKDANDTLLLQLTNTSAYYMYLLLLLKSVVYFAIITCCLLMAMVKRKDSRG

SEQ ID NO: 14908 - protein, 863 aa, synthetic construct
MALPVTALLLPLALLLHAARPEVQLVESGGGLVQPGGSLRLSCAASGFSFSDFWMSWVRQAPGKGLEWVATISQAGSEKDYVDSVKGRFTISRDNAKKSLYLQMNSLRAEDTAVYYCASGVYSFDYRGQGTLVTVSSGTGGGGSGGGGSGGGGSEFEIVLTQSPGTLSLSPGERATLSCRASQSVGGYLAWYQQKPGQAPRLLIYDASNRATGIPARFSGSGSGTDFTLTISSLEPEDFAVYYCQQRNNWPPMYTFGQGTKLEIKRLEIQNPDPAVYQLRDSKSSDKSVCLFTDFDSQTNVSQSKDSDVYITDKCVLDMRSMDFKSNSAVAWSNKSDFACANAFNNSIIPEDTFFPSPESSDSTDHVKPKETENTKQPSKSCHKPKAIVHTEKVNMMSLTVLGLRMLFAKTVAVNFLLTAKLFFLLTARAKRSGSGVKQTLNFDLLKLAGDVESNPGPTSMDWIWRILFLVGAATGAHSFEQVQLVQSGAEVKKPGSSVKVSCKASGGTFSSYAISWVRQAPGQGLEWMGGIIPILGTANYAQKFQGRVTITADESTSTAYMELSSLRSEDTAVYYCARWGGGAFDIWGQGTMVTVSSTREDLKNVFPPEVAVFEPSEAEISHTQKATLVCLATGFYPDHVELSWWVNGKEVHSGVCTDPQPLKEQPALNDSRYCLSSRLRVSATFWQNPRNHFRCQVQFYGLSENDEWTQDRAKPVTQIVSAEAWGRADDVIKIHWQEKKSNTILGSQEGNTMKTNDTYMKFSWLTVPEKSLDKEHRCIVRHENNKNGVDQEIIFPPIKTDVITMDPKDNCSKDANDTLLLQLTNTSAYYMYLLLLLKSVVYFAIITCCLLMAMVKRKDSRG

SEQ ID NO: 14909 - protein, 858 aa, synthetic construct
MALPVTALLLPLALLLHAARPEVQLVESGGGLVQPGGSLRLSCAASGFSFSDFWMSWVRQAPGKGLEWVATISQAGSEKDYVDSVKGRFTISRDNAKKSLYLQMNSLRAEDTAVYYCASGVYSFDYRGQGTLVTVSSGTGGGGSGGGGSGGGGSEFQIVLTQSPALMSASPGEKVTMTCSASSSVRYMYWYQQKPRSSPKPWIHLTSNLASGVPARFSGSGSGTSYSLTISSMEAEDAATYYCQQWSSHPFTFGSGTKLEIKLEIQNPDPAVYQLRDSKSSDKSVCLFTDFDSQTNVSQSKDSDVYITDKCVLDMRSMDFKSNSAVAWSNKSDFACANAFNNSIIPEDTFFPSPESSDSTDHVKPKETENTKQPSKSCHKPKAIVHTEKVNMMSLTVLGLRMLFAKTVAVNFLLTAKLFFLLTARAKRSGSGVKQTLNFDLLKLAGDVESNPGPTSMDWIWRILFLVGAATGAHSFEDVQLQESGPGLVKPSQSLSLTCTVTGFSITSDYSWNWIRQFPGNKLEWMGYISYSGHTSYNPSLESRISITRDTSKNQFFLQLNSVTTEDTATYYCTRGNWDVVYWGQGTLVTVSATREDLKNVFPPEVAVFEPSEAEISHTQKATLVCLATGFYPDHVELSWWVNGKEVHSGVCTDPQPLKEQPALNDSRYCLSSRLRVSATFWQNPRNHFRCQVQFYGLSENDEWTQDRAKPVTQIVSAEAWGRADDVIKIHWQEKKSNTILGSQEGNTMKTNDTYMKFSWLTVPEKSLDKEHRCIVRHENNKNGVDQEIIFPPIKTDVITMDPKDNCSKDANDTLLLQLTNTSAYYMYLLLLLKSVVYFAIITCCLLMAMVKRKDSRG

SEQ ID NO: 14910 - protein, 868 aa, synthetic construct
MALPVTALLLPLALLLHAARPEVQLVESGGGLVQPGGSLRLSCAASGFSFSDFWMSWVRQAPGKGLEWVATISQAGSEKDYVDSVKGRFTISRDNAKKSLYLQMNSLRAEDTAVYYCASGVYSFDYRGQGTLVTVSSGTGGGGSGGGGSGGGGSEFDVVMTQSPLSLPVTLGQPASISCRSSQSIVHSDGNTYLEWYQQRPGQSPRRLIYKVSNRFSGVPDRFSGSGSGTDFTLKISRVEAEDVGVYYCFQGSHAPWTFGGGTKVEIKLEIQNPDPAVYQLRDSKSSDKSVCLFTDFDSQTNVSQSKDSDVYITDKCVLDMRSMDFKSNSAVAWSNKSDFACANAFNNSIIPEDTFFPSPESSDSTDHVKPKETENTKQPSKSCHKPKAIVHTEKVNMMSLTVLGLRMLFAKTVAVNFLLTAKLFFLLTARAKRSGSGVKQTLNFDLLKLAGDVESNPGPTSMDWIWRILFLVGAATGAHSFEEVQLVESGGGLVQPGGSLRLSCAASGFTFSSYGMHWVRQAPGKGLEWVAYITTRSSTIYYADSVKGRFTISRDNAKNSLYLQMNSLRAEDTAVYYCTREPLTGYYAMDYWGQGTSVTVSSTREDLKNVFPPEVAVFEPSEAEISHTQKATLVCLATGFYPDHVELSWWVNGKEVHSGVCTDPQPLKEQPALNDSRYCLSSRLRVSATFWQNPRNHFRCQVQFYGLSENDEWTQDRAKPVTQIVSAEAWGRADDVIKIHWQEKKSNTILGSQEGNTMKTNDTYMKFSWLTVPEKSLDKEHRCIVRHENNKNGVDQEIIFPPIKTDVITMDPKDNCSKDANDTLLLQLTNTSAYYMYLLLLLKSVVYFAIITCCLLMAMVKRKDSRG

SEQ ID NO: 14911 - protein, 860 aa, synthetic construct
MALPVTALLLPLALLLHAARPEVQLVESGGGLVQPGGSLRLSCAASGFSFSDFWMSWVRQAPGKGLEWVATISQAGSEKDYVDSVKGRFTISRDNAKKSLYLQMNSLRAEDTAVYYCASGVYSFDYRGQGTLVTVSSGTGGGGSGGGGSGGGGSEFDIQMTQSPSSLSASVGDRVTITCRASQSISLWLNWYQQKPGKAPKLLIYAASTLQSGVPSRFSGSGSGTDFTLTISSLQPEDFATYYCQQYYTSPYTFGQGTKVEIKRLEIQNPDPAVYQLRDSKSSDKSVCLFTDFDSQTNVSQSKDSDVYITDKCVLDMRSMDFKSNSAVAWSNKSDFACANAFNNSIIPEDTFFPSPESSDSTDHVKPKETENTKQPSKSCHKPKAIVHTEKVNMMSLTVLGLRMLFAKTVAVNFLLTAKLFFLLTARAKRSGSGVKQTLNFDLLKLAGDVESNPGPTSMDWIWRILFLVGAATGAHSFEQVQLLESGGGLVQPGGSLRLSCAASGFTFSSYAMSWVRQAPGKGLEWVSVIRSSGSSTYYADSVKGRFTISRDNSKNTLYLQMNSLRAEDTAVYYCARGGGYFDYWGQGTLVTVSSTREDLKNVFPPEVAVFEPSEAEISHTQKATLVCLATGFYPDHVELSWWVNGKEVHSGVCTDPQPLKEQPALNDSRYCLSSRLRVSATFWQNPRNHFRCQVQFYGLSENDEWTQDRAKPVTQIVSAEAWGRADDVIKIHWQEKKSNTILGSQEGNTMKTNDTYMKFSWLTVPEKSLDKEHRCIVRHENNKNGVDQEIIFPPIKTDVITMDPKDNCSKDANDTLLLQLTNTSAYYMYLLLLLKSVVYFAIITCCLLMAMVKRKDSRG

SEQ ID NO: 14912 - protein, 863 aa, synthetic construct
MALPVTALLLPLALLLHAARPEVQLVESGGGLVQPGGSLRLSCAASGFSFSDFWMSWVRQAPGKGLEWVATISQAGSEKDYVDSVKGRFTISRDNAKKSLYLQMNSLRAEDTAVYYCASGVYSFDYRGQGTLVTVSSGTGGGGSGGGGSGGGGSEFDIQMTQSPSSLSASVGDRVTITCRASQSISSYLNWYQQKPGKAPKLLIYAVSTLQSGVPSRFSGSGSGTDFTLTISSLQPEDFATYYCQQSGTFPPTTFGQGTKVEIKRLEIQNPDPAVYQLRDSKSSDKSVCLFTDFDSQTNVSQSKDSDVYITDKCVLDMRSMDFKSNSAVAWSNKSDFACANAFNNSIIPEDTFFPSPESSDSTDHVKPKETENTKQPSKSCHKPKAIVHTEKVNMMSLTVLGLRMLFAKTVAVNFLLTAKLFFLLTARAKRSGSGVKQTLNFDLLKLAGDVESNPGPTSMDWIWRILFLVGAATGAHSFEQVQLLESGGGLVQPGGSLRLSCAASGFTFSSHGMHWVRQAPGKGLEWVSVISGSGSNTGYADSVKGRFTISRDNSKNTLYLQMNSLRAEDTAVYYCARQWGSYAFDSWGQGTLVTVSSTREDLKNVFPPEVAVFEPSEAEISHTQKATLVCLATGFYPDHVELSWWVNGKEVHSGVCTDPQPLKEQPALNDSRYCLSSRLRVSATFWQNPRNHFRCQVQFYGLSENDEWTQDRAKPVTQIVSAEAWGRADDVIKIHWQEKKSNTILGSQEGNTMKTNDTYMKFSWLTVPEKSLDKEHRCIVRHENNKNGVDQEIIFPPIKTDVITMDPKDNCSKDANDTLLLQLTNTSAYYMYLLLLLKSVVYFAIITCCLLMAMVKRKDSRG

SEQ ID NO: 14913 - protein, 873 aa, synthetic construct
MALPVTALLLPLALLLHAARPEVQLVESGGGLVQPGGSLRLSCAASGFSFSDFWMSWVRQAPGKGLEWVATISQAGSEKDYVDSVKGRFTISRDNAKKSLYLQMNSLRAEDTAVYYCASGVYSFDYRGQGTLVTVSSGTGGGGSGGGGSGGGGSEFDIVMSQSPSSLAVSVGEKVTMSCKSSQSLLHSSNQKNYLAWYQQKPGQSPKVLIYWASTRESGVPDRFTGSGSGTDFTLTITSVKSEDLAVYYCQQYYSYPWTFGGGTRLEIKRLEIQNPDPAVYQLRDSKSSDKSVCLFTDFDSQTNVSQSKDSDVYITDKCVLDMRSMDFKSNSAVAWSNKSDFACANAFNNSIIPEDTFFPSPESSDSTDHVKPKETENTKQPSKSCHKPKAIVHTEKVNMMSLTVLGLRMLFAKTVAVNFLLTAKLFFLLTARAKRSGSGVKQTLNFDLLKLAGDVESNPGPTSMDWIWRILFLVGAATGAHSFEEVQLQQSVAELVKPGASVKMSCKVSGYTLTDHTIHWMKQRPEQGLEWIGYIYPRDGITGYNEKFKGKATLTADTSSSTAYMQLNSLTSEDSAVYFCARWGYSYRNYAYYYDYWGQGTTLTVSSTREDLKNVFPPEVAVFEPSEAEISHTQKATLVCLATGFYPDHVELSWWVNGKEVHSGVCTDPQPLKEQPALNDSRYCLSSRLRVSATFWQNPRNHFRCQVQFYGLSENDEWTQDRAKPVTQIVSAEAWGRADDVIKIHWQEKKSNTILGSQEGNTMKTNDTYMKFSWLTVPEKSLDKEHRCIVRHENNKNGVDQEIIFPPIKTDVITMDPKDNCSKDANDTLLLQLTNTSAYYMYLLLLLKSVVYFAIITCCLLMAMVKRKDSRG

SEQ ID NO: 14914 - protein, 870 aa, synthetic construct
MALPVTALLLPLALLLHAARPEVQLVESGGGLVQPGGSLRLSCAASGFSFSDFWMSWVRQAPGKGLEWVATISQAGSEKDYVDSVKGRFTISRDNAKKSLYLQMNSLRAEDTAVYYCASGVYSFDYRGQGTLVTVSSGTGGGGSGGGGSGGGGSEFEIVLTQSPGTLSLSPGERATLSCRASQSVSSSYLAWYQQKPGQAPRLLIYGTSSRATGIPDRFSGSGSGTDFTLTISRLEPEDFAVYYCQQYGSSPFTFGGGTKVEIKRLEIQNPDPAVYQLRDSKSSDKSVCLFTDFDSQTNVSQSKDSDVYITDKCVLDMRSMDFKSNSAVAWSNKSDFACANAFNNSIIPEDTFFPSPESSDSTDHVKPKETENTKQPSKSCHKPKAIVHTEKVNMMSLTVLGLRMLFAKTVAVNFLLTAKLFFLLTARAKRSGSGVKQTLNFDLLKLAGDVESNPGPTSMDWIWRILFLVGAATGAHSFEQVQLQESGPGLAKPSETLSLTCTVSGDSITSYYWSWIRQPPGKGLEWIGYIYYSGSTNYNPSLKSRVTISVDTSKNQFSLKLSSVTAADTAVYYCARDQRRIAAAGTHFYGMDVWGQGTTVTVSSTREDLKNVFPPEVAVFEPSEAEISHTQKATLVCLATGFYPDHVELSWWVNGKEVHSGVCTDPQPLKEQPALNDSRYCLSSRLRVSATFWQNPRNHFRCQVQFYGLSENDEWTQDRAKPVTQIVSAEAWGRADDVIKIHWQEKKSNTILGSQEGNTMKTNDTYMKFSWLTVPEKSLDKEHRCIVRHENNKNGVDQEIIFPPIKTDVITMDPKDNCSKDANDTLLLQLTNTSAYYMYLLLLLKSVVYFAIITCCLLMAMVKRKDSRG

SEQ ID NO: 14915 - protein, 862 aa, synthetic construct
MALPVTALLLPLALLLHAARPEVQLVESGGGLVQPGGSLRLSCAASGFSFSDFWMSWVRQAPGKGLEWVATISQAGSEKDYVDSVKGRFTISRDNAKKSLYLQMNSLRAEDTAVYYCASGVYSFDYRGQGTLVTVSSGTGGGGSGGGGSGGGGSEFDILLTQSPVILSVSPGERVSFSCRASQSIGTNIHWYQQRTNGSPRLLIKYASESISGIPSRFSGSGSGTDFTLSINSVESEDIADYYCQQNNNWPTTFGAGTKLELKLEIQNPDPAVYQLRDSKSSDKSVCLFTDFDSQTNVSQSKDSDVYITDKCVLDMRSMDFKSNSAVAWSNKSDFACANAFNNSIIPEDTFFPSPESSDSTDHVKPKETENTKQPSKSCHKPKAIVHTEKVNMMSLTVLGLRMLFAKTVAVNFLLTAKLFFLLTARAKRSGSGVKQTLNFDLLKLAGDVESNPGPTSMDWIWRILFLVGAATGAHSFEQVQLKQSGPGLVQPSQSLSITCTVSGFSLTNYGVHWVRQSPGKGLEWLGVIWSGGNTDYNTPFTSRLSINKDNSKSQVFFKMNSLQSNDTAIYYCARALTYYDYEFAYWGQGTLVTVSATREDLKNVFPPEVAVFEPSEAEISHTQKATLVCLATGFYPDHVELSWWVNGKEVHSGVCTDPQPLKEQPALNDSRYCLSSRLRVSATFWQNPRNHFRCQVQFYGLSENDEWTQDRAKPVTQIVSAEAWGRADDVIKIHWQEKKSNTILGSQEGNTMKTNDTYMKFSWLTVPEKSLDKEHRCIVRHENNKNGVDQEIIFPPIKTDVITMDPKDNCSKDANDTLLLQLTNTSAYYMYLLLLLKSVVYFAIITCCLLMAMVKRKDSRG

SEQ ID NO: 14916 - protein, 855 aa, synthetic construct
MALPVTALLLPLALLLHAARPEVQLVESGGGLVQPGGSLRLSCAASGFSFSDFWMSWVRQAPGKGLEWVATISQAGSEKDYVDSVKGRFTISRDNAKKSLYLQMNSLRAEDTAVYYCASGVYSFDYRGQGTLVTVSSGTGGGGSGGGGSGGGGSEFMTQSPKFLLVSAGDRVTLTCKASQSVNNDVYWYQQEPGQSPKLLIYWASTRESGVPDRFTGSGSGTDFTLTISSVQAEDLAVYYCKQSYNLYTFGGGTKLEIKRLEIQNPDPAVYQLRDSKSSDKSVCLFTDFDSQTNVSQSKDSDVYITDKCVLDMRSMDFKSNSAVAWSNKSDFACANAFNNSIIPEDTFFPSPESSDSTDHVKPKETENTKQPSKSCHKPKAIVHTEKVNMMSLTVLGLRMLFAKTVAVNFLLTAKLFFLLTARAKRSGSGVKQTLNFDLLKLAGDVESNPGPTSMDWIWRILFLVGAATGAHSFEESGRGLVQPGGSRKLSCAASGFTFSTSGMHWVRQAPEKGLEWVAYISSGSTTIYHADTVKGRFTISRDNPKNTLFLQMTSLRSEDTAMYYCCARSGQFGNYFDYWGQGTTLTVSSTREDLKNVFPPEVAVFEPSEAEISHTQKATLVCLATGFYPDHVELSWWVNGKEVHSGVCTDPQPLKEQPALNDSRYCLSSRLRVSATFWQNPRNHFRCQVQFYGLSENDEWTQDRAKPVTQIVSAEAWGRADDVIKIHWQEKKSNTILGSQEGNTMKTNDTYMKFSWLTVPEKSLDKEHRCIVRHENNKNGVDQEIIFPPIKTDVITMDPKDNCSKDANDTLLLQLTNTSAYYMYLLLLLKSVVYFAIITCCLLMAMVKRKDSRG

SEQ ID NO: 14917 - protein, 860 aa, synthetic construct
MALPVTALLLPLALLLHAARPEVQLVESGGGLVQPGGSLRLSCAASGFSFSDFWMSWVRQAPGKGLEWVATISQAGSEKDYVDSVKGRFTISRDNAKKSLYLQMNSLRAEDTAVYYCASGVYSFDYRGQGTLVTVSSGTGGGGSGGGGSGGGGSEFQSPSSLAVSAGEKVTMSCKSSQSLLNSRTRKNYLAWYQQKPGQSPKLLIYWASTRESGVPDRFTGSGSGTDFTLTISSVQAEDLAVYYCKQSNLYTFGGGTKLEIKLEIQNPDPAVYQLRDSKSSDKSVCLFTDFDSQTNVSQSKDSDVYITDKCVLDMRSMDFKSNSAVAWSNKSDFACANAFNNSIIPEDTFFPSPESSDSTDHVKPKETENTKQPSKSCHKPKAIVHTEKVNMMSLTVLGLRMLFAKTVAVNFLLTAKLFFLLTARAKRSGSGVKQTLNFDLLKLAGDVESNPGPTSMDWIWRILFLVGAATGAHSFEQVQLEESGPELVKPGASVKLSCKASGYTFTEYIIHWVKQRSGQGLEWIGWFYPGSGSIKYNEKFKDKATLTADKSSSTVYMELSGLTSEDSAVYFCARHDGYSYFDYWGQGTTLTVSSTREDLKNVFPPEVAVFEPSEAEISHTQKATLVCLATGFYPDHVELSWWVNGKEVHSGVCTDPQPLKEQPALNDSRYCLSSRLRVSATFWQNPRNHFRCQVQFYGLSENDEWTQDRAKPVTQIVSAEAWGRADDVIKIHWQEKKSNTILGSQEGNTMKTNDTYMKFSWLTVPEKSLDKEHRCIVRHENNKNGVDQEIIFPPIKTDVITMDPKDNCSKDANDTLLLQLTNTSAYYMYLLLLLKSVVYFAIITCCLLMAMVKRKDSRG

SEQ ID NO: 14918 - protein, 863 aa, synthetic construct
MALPVTALLLPLALLLHAARPEVQLVESGGGLVQPGGSLRLSCAASGFSFSDFWMSWVRQAPGKGLEWVATISQAGSEKDYVDSVKGRFTISRDNAKKSLYLQMNSLRAEDTAVYYCASGVYSFDYRGQGTLVTVSSGTGGGGSGGGGSGGGGSEFDIQMTQSPSSLSASLGERVSLTCRATQELSGYLSWLQQKPDGTIKRLIYAASTLDSGVPKRFSGNRSGSDYSLTISSLESEDFADYYCLQYAIYPYTFGGGTKLEIKLEIQNPDPAVYQLRDSKSSDKSVCLFTDFDSQTNVSQSKDSDVYITDKCVLDMRSMDFKSNSAVAWSNKSDFACANAFNNSIIPEDTFFPSPESSDSTDHVKPKETENTKQPSKSCHKPKAIVHTEKVNMMSLTVLGLRMLFAKTVAVNFLLTAKLFFLLTARAKRSGSGVKQTLNFDLLKLAGDVESNPGPTSMDWIWRILFLVGAATGAHSFEEVQLQQSGPELVKPGASVKMSCKASGYTFTSYFIHWVKQKPGQGLEWIGFINPYNDGSKYNEKFKGKATLTSDKSSSTAYMELSSLTSEDSAVYYCTRDDGYYGYAMDYWGQGTSVTVSSTREDLKNVFPPEVAVFEPSEAEISHTQKATLVCLATGFYPDHVELSWWVNGKEVHSGVCTDPQPLKEQPALNDSRYCLSSRLRVSATFWQNPRNHFRCQVQFYGLSENDEWTQDRAKPVTQIVSAEAWGRADDVIKIHWQEKKSNTILGSQEGNTMKTNDTYMKFSWLTVPEKSLDKEHRCIVRHENNKNGVDQEIIFPPIKTDVITMDPKDNCSKDANDTLLLQLTNTSAYYMYLLLLLKSVVYFAIITCCLLMAMVKRKDSRG

SEQ ID NO: 14919 - protein, 868 aa, synthetic construct
MALPVTALLLPLALLLHAARPEVQLVESGGGLVQPGGSLRLSCAASGFSFSDFWMSWVRQAPGKGLEWVATISQAGSEKDYVDSVKGRFTISRDNAKKSLYLQMNSLRAEDTAVYYCASGVYSFDYRGQGTLVTVSSGTGGGGSGGGGSGGGGSEFDTIVLTQSPASLAVSLGQRATISCRASESVDSYGNSFMHWYQQKPGQPPKLLIYLASNLESGVPARFSGSGSRTDFTLTIDPVEADDAATYYCQQNNYDPWTFGGGTKLEIKLEIQNPDPAVYQLRDSKSSDKSVCLFTDFDSQTNVSQSKDSDVYITDKCVLDMRSMDFKSNSAVAWSNKSDFACANAFNNSIIPEDTFFPSPESSDSTDHVKPKETENTKQPSKSCHKPKAIVHTEKVNMMSLTVLGLRMLFAKTVAVNFLLTAKLFFLLTARAKRSGSGVKQTLNFDLLKLAGDVESNPGPTSMDWIWRILFLVGAATGAHSFEEVQLQQSGPELVKPGASVKMSCKASGYTFTSYVMHWVKQKPGQGLEWIGYINPYNDGTKYNEKFKGKATLTSDTSSSTAYMELNSLTSEDSAVYFCARPIYFDNDYFDYWGQGTTLKVSSTREDLKNVFPPEVAVFEPSEAEISHTQKATLVCLATGFYPDHVELSWWVNGKEVHSGVCTDPQPLKEQPALNDSRYCLSSRLRVSATFWQNPRNHFRCQVQFYGLSENDEWTQDRAKPVTQIVSAEAWGRADDVIKIHWQEKKSNTILGSQEGNTMKTNDTYMKFSWLTVPEKSLDKEHRCIVRHENNKNGVDQEIIFPPIKTDVITMDPKDNCSKDANDTLLLQLTNTSAYYMYLLLLLKSVVYFAIITCCLLMAMVKRKDSRG

SEQ ID NO: 14920 - protein, 863 aa, synthetic construct
MALPVTALLLPLALLLHAARPEVQLVESGGGLVQPGGSLRLSCAASGFSFSDFWMSWVRQAPGKGLEWVATISQAGSEKDYVDSVKGRFTISRDNAKKSLYLQMNSLRAEDTAVYYCASGVYSFDYRGQGTLVTVSSGTGGGGSGGGGSGGGGSEFDIQMTQSPSSLSASVGDRVTITCKASQDVGIAVAWYQQKPGKVPKLLIYWASTRHTGVPDRFSGSGSGTDFTLTISSLQPEDVATYYCQQYSSYPYTFGQGTKVEIKRLEIQNPDPAVYQLRDSKSSDKSVCLFTDFDSQTNVSQSKDSDVYITDKCVLDMRSMDFKSNSAVAWSNKSDFACANAFNNSIIPEDTFFPSPESSDSTDHVKPKETENTKQPSKSCHKPKAIVHTEKVNMMSLTVLGLRMLFAKTVAVNFLLTAKLFFLLTARAKRSGSGVKQTLNFDLLKLAGDVESNPGPTSMDWIWRILFLVGAATGAHSFEEVQLVESGGGLVQPGGSLRLSCAASGFDFSRYWMSWVRQAPGKGLEWIGEINPDSSTINYAPSLKDKFIISRDNAKNSLYLQMNSLRAEDTAVYYCARPDGNYWYFDVWGQGTLVTVSSTREDLKNVFPPEVAVFEPSEAEISHTQKATLVCLATGFYPDHVELSWWVNGKEVHSGVCTDPQPLKEQPALNDSRYCLSSRLRVSATFWQNPRNHFRCQVQFYGLSENDEWTQDRAKPVTQIVSAEAWGRADDVIKIHWQEKKSNTILGSQEGNTMKTNDTYMKFSWLTVPEKSLDKEHRCIVRHENNKNGVDQEIIFPPIKTDVITMDPKDNCSKDANDTLLLQLTNTSAYYMYLLLLLKSVVYFAIITCCLLMAMVKRKDSRG

SEQ ID NO: 14921 - protein, 863 aa, synthetic construct
MALPVTALLLPLALLLHAARPEVQLVESGGGLVQPGGSLRLSCAASGFSFSDFWMSWVRQAPGKGLEWVATISQAGSEKDYVDSVKGRFTISRDNAKKSLYLQMNSLRAEDTAVYYCASGVYSFDYRGQGTLVTVSSGTGGGGSGGGGSGGGGSEFDIVMTQSQKSMSTSVGDRVSITCKASQDVITGVAWYQQKPGQSPKLLIYSASYRYTGVPDRFTGSGSGTDFTFTISNVQAEDLAVYYCQQHYSTPLTFGAGTKLELKLEIQNPDPAVYQLRDSKSSDKSVCLFTDFDSQTNVSQSKDSDVYITDKCVLDMRSMDFKSNSAVAWSNKSDFACANAFNNSIIPEDTFFPSPESSDSTDHVKPKETENTKQPSKSCHKPKAIVHTEKVNMMSLTVLGLRMLFAKTVAVNFLLTAKLFFLLTARAKRSGSGVKQTLNFDLLKLAGDVESNPGPTSMDWIWRILFLVGAATGAHSFEQVQLQQPGAELVRPGASVKLSCKASGYSFTTYWMNWVKQRPGQGLEWIGMIHPSDSETRLNQKFKDKATLTVDKSSSTAYMQLSSPTSEDSAVYYCARSTMIATRAMDYWGQGTSVTVSSTREDLKNVFPPEVAVFEPSEAEISHTQKATLVCLATGFYPDHVELSWWVNGKEVHSGVCTDPQPLKEQPALNDSRYCLSSRLRVSATFWQNPRNHFRCQVQFYGLSENDEWTQDRAKPVTQIVSAEAWGRADDVIKIHWQEKKSNTILGSQEGNTMKTNDTYMKFSWLTVPEKSLDKEHRCIVRHENNKNGVDQEIIFPPIKTDVITMDPKDNCSKDANDTLLLQLTNTSAYYMYLLLLLKSVVYFAIITCCLLMAMVKRKDSRG

SEQ ID NO: 14922 - protein, 869 aa, synthetic construct
MALPVTALLLPLALLLHAARPEVQLVESGGGLVQPGGSLRLSCAASGFSFSDFWMSWVRQAPGKGLEWVATISQAGSEKDYVDSVKGRFTISRDNAKKSLYLQMNSLRAEDTAVYYCASGVYSFDYRGQGTLVTVSSGTGGGGSGGGGSGGGGSEFQSVLTQPPSVSGAPGQRVTISCTGSGSNIGAPYDVSWYQQLPGTAPKLLIYHNNKRPSGVPDRFSGSKSGTSASLAITGLQAEDEADYYCATVEAGLSGSVFGGGTKLTVLGALEIQNPDPAVYQLRDSKSSDKSVCLFTDFDSQTNVSQSKDSDVYITDKCVLDMRSMDFKSNSAVAWSNKSDFACANAFNNSIIPEDTFFPSPESSDSTDHVKPKETENTKQPSKSCHKPKAIVHTEKVNMMSLTVLGLRMLFAKTVAVNFLLTAKLFFLLTARAKRSGSGVKQTLNFDLLKLAGDVESNPGPTSMDWIWRILFLVGAATGAHSFEQVQLVQSGAEVKKPGASVKVSCKVSGYTLTELSIHWVRQAPGKGLEWMGGFDPEENEIVYAQRFQGRVTMTEDTSTDTAYMELSSLRSEDTAVYYCAIVGSFSPLTLGLWGQGTMVTVSSTREDLKNVFPPEVAVFEPSEAEISHTQKATLVCLATGFYPDHVELSWWVNGKEVHSGVCTDPQPLKEQPALNDSRYCLSSRLRVSATFWQNPRNHFRCQVQFYGLSENDEWTQDRAKPVTQIVSAEAWGRADDVIKIHWQEKKSNTILGSQEGNTMKTNDTYMKFSWLTVPEKSLDKEHRCIVRHENNKNGVDQEIIFPPIKTDVITMDPKDNCSKDANDTLLLQLTNTSAYYMYLLLLLKSVVYFAIITCCLLMAMVKRKDSRG

SEQ ID NO: 14923 - protein, 869 aa, synthetic construct
MALPVTALLLPLALLLHAARPEVQLVESGGGLVQPGGSLRLSCAASGFSFSDFWMSWVRQAPGKGLEWVATISQAGSEKDYVDSVKGRFTISRDNAKKSLYLQMNSLRAEDTAVYYCASGVYSFDYRGQGTLVTVSSGTGGGGSGGGGSGGGGSEFQSVLTQPPSVSGAPGQRVTISCTGSGSNIGAPYDVSWYQQLPGTAPKLLIYHNNKRPSGVPDRFSGSKSGTSASLAITGLQAEDEADYYCQSYDSSSISTIFGGGTKLTVLGALEIQNPDPAVYQLRDSKSSDKSVCLFTDFDSQTNVSQSKDSDVYITDKCVLDMRSMDFKSNSAVAWSNKSDFACANAFNNSIIPEDTFFPSPESSDSTDHVKPKETENTKQPSKSCHKPKAIVHTEKVNMMSLTVLGLRMLFAKTVAVNFLLTAKLFFLLTARAKRSGSGVKQTLNFDLLKLAGDVESNPGPTSMDWIWRILFLVGAATGAHSFEQVQLVQSGAEVKKPGASVKVSCKVSGYTLTELSIHWVRQAPGKGLEWMGGFDPEENEIVYAQRFQGRVTMTEDTSTDTAYMELSSLRSEDTAVYYCAIVGSFSGIAYRPWGQGTMVTVSSTREDLKNVFPPEVAVFEPSEAEISHTQKATLVCLATGFYPDHVELSWWVNGKEVHSGVCTDPQPLKEQPALNDSRYCLSSRLRVSATFWQNPRNHFRCQVQFYGLSENDEWTQDRAKPVTQIVSAEAWGRADDVIKIHWQEKKSNTILGSQEGNTMKTNDTYMKFSWLTVPEKSLDKEHRCIVRHENNKNGVDQEIIFPPIKTDVITMDPKDNCSKDANDTLLLQLTNTSAYYMYLLLLLKSVVYFAIITCCLLMAMVKRKDSRG

SEQ ID NO: 14924 - protein, 857 aa, synthetic construct
MALPVTALLLPLALLLHAARPEVQLVESGGGLVQPGGSLRLSCAASGFSFSDFWMSWVRQAPGKGLEWVATISQAGSEKDYVDSVKGRFTISRDNAKKSLYLQMNSLRAEDTAVYYCASGVYSFDYRGQGTLVTVSSGTGGGGSGGGGSGGGGSEFDIQMTQSPSSLSASVGDRVTITCRASQGIRNNLAWYQQKPGKAPKRLIYAASNLQSGVPSRFTGSGSGTEFTLIVSSLQPEDFATYYCLQHHSYPLTSGGGTKVELEIQNPDPAVYQLRDSKSSDKSVCLFTDFDSQTNVSQSKDSDVYITDKCVLDMRSMDFKSNSAVAWSNKSDFACANAFNNSIIPEDTFFPSPESSDSTDHVKPKETENTKQPSKSCHKPKAIVHTEKVNMMSLTVLGLRMLFAKTVAVNFLLTAKLFFLLTARAKRSGSGVKQTLNFDLLKLAGDVESNPGPTSMDWIWRILFLVGAATGAHSFEEVQVLESGGGLVQPGGSLRLSCAASGFTFSSYAMSWVRQAPGKGLEWVSAISGSGGSTNYADSVKGRFTISRDNSKNTLYLQMNSLRAEDTAVYYCAGSSGWSEYWGQGTLVTVSSTREDLKNVFPPEVAVFEPSEAEISHTQKATLVCLATGFYPDHVELSWWVNGKEVHSGVCTDPQPLKEQPALNDSRYCLSSRLRVSATFWQNPRNHFRCQVQFYGLSENDEWTQDRAKPVTQIVSAEAWGRADDVIKIHWQEKKSNTILGSQEGNTMKTNDTYMKFSWLTVPEKSLDKEHRCIVRHENNKNGVDQEIIFPPIKTDVITMDPKDNCSKDANDTLLLQLTNTSAYYMYLLLLLKSVVYFAIITCCLLMAMVKRKDSRG

SEQ ID NO: 14925 - protein, 863 aa, synthetic construct
MALPVTALLLPLALLLHAARPEVQLVESGGGLVQPGGSLRLSCAASGFSFSDFWMSWVRQAPGKGLEWVATISQAGSEKDYVDSVKGRFTISRDNAKKSLYLQMNSLRAEDTAVYYCASGVYSFDYRGQGTLVTVSSGTGGGGSGGGGSGGGGSEFDEIQLVQSGAEVKKPGESLRISCKGSGFNIEDYYIHWVRQMPGKGLEWMGRIDPENDETKYGPIFQGHVTISADTSINTVYLQWSSLKASDTAMYYCAFRGGVYWGQGTTVTVSSLEIQNPDPAVYQLRDSKSSDKSVCLFTDFDSQTNVSQSKDSDVYITDKCVLDMRSMDFKSNSAVAWSNKSDFACANAFNNSIIPEDTFFPSPESSDSTDHVKPKETENTKQPSKSCHKPKAIVHTEKVNMMSLTVLGLRMLFAKTVAVNFLLTAKLFFLLTARAKRSGSGVKQTLNFDLLKLAGDVESNPGPTSMDWIWRILFLVGAATGAHSFEDVVMTQSPDSLAVSLGERATINCKSSQSLLDSDGKTYLNWLQQKPGQPPKRLISLVSKLDSGVPDRFSGSGSGTDFTLTISSLQAEDVAVYYCWQGTHFPGTFGGGTKVEIKTREDLKNVFPPEVAVFEPSEAEISHTQKATLVCLATGFYPDHVELSWWVNGKEVHSGVCTDPQPLKEQPALNDSRYCLSSRLRVSATFWQNPRNHFRCQVQFYGLSENDEWTQDRAKPVTQIVSAEAWGRADDVIKIHWQEKKSNTILGSQEGNTMKTNDTYMKFSWLTVPEKSLDKEHRCIVRHENNKNGVDQEIIFPPIKTDVITMDPKDNCSKDANDTLLLQLTNTSAYYMYLLLLLKSVVYFAIITCCLLMAMVKRKDSRG

SEQ ID NO: 14926 - protein, 870 aa, synthetic construct
MALPVTALLLPLALLLHAARPEVQLVESGGGLVQPGGSLRLSCAASGFSFSDFWMSWVRQAPGKGLEWVATISQAGSEKDYVDSVKGRFTISRDNAKKSLYLQMNSLRAEDTAVYYCASGVYSFDYRGQGTLVTVSSGTGGGGSGGGGSGGGGSEFDELVMTQSPSSLTVTAGEKVTMSCKSSQSLLNSGNQKNYLTWYQQKPGQPPKLLIYWASTRESGVPDRFTGSGSGTDFTLTISSVQAEDLAVYYCQNDYSYPLTFGAGTKLEIKLEIQNPDPAVYQLRDSKSSDKSVCLFTDFDSQTNVSQSKDSDVYITDKCVLDMRSMDFKSNSAVAWSNKSDFACANAFNNSIIPEDTFFPSPESSDSTDHVKPKETENTKQPSKSCHKPKAIVHTEKVNMMSLTVLGLRMLFAKTVAVNFLLTAKLFFLLTARAKRSGSGVKQTLNFDLLKLAGDVESNPGPTSMDWIWRILFLVGAATGAHSFEEVQLLEQSGAELVRPGTSVKISCKASGYAFTNYWLGWVKQRPGHGLEWIGDIFPGSGNIHYNEKFKGKATLTADKSSSTAYMQLSSLTFEDSAVYFCARLRNWDEPMDYWGQGTTVTVSSTREDLKNVFPPEVAVFEPSEAEISHTQKATLVCLATGFYPDHVELSWWVNGKEVHSGVCTDPQPLKEQPALNDSRYCLSSRLRVSATFWQNPRNHFRCQVQFYGLSENDEWTQDRAKPVTQIVSAEAWGRADDVIKIHWQEKKSNTILGSQEGNTMKTNDTYMKFSWLTVPEKSLDKEHRCIVRHENNKNGVDQEIIFPPIKTDVITMDPKDNCSKDANDTLLLQLTNTSAYYMYLLLLLKSVVYFAIITCCLLMAMVKRKDSRG

SEQ ID NO: 14927 - protein, 871 aa, synthetic construct
MALPVTALLLPLALLLHAARPEVQLVESGGGLVQPGGSLRLSCAASGFSFSDFWMSWVRQAPGKGLEWVATISQAGSEKDYVDSVKGRFTISRDNAKKSLYLQMNSLRAEDTAVYYCASGVYSFDYRGQGTLVTVSSGTGGGGSGGGGSGGGGSEFDELQMTQSPSSLSASVGDRVTITCRASQSISSYLNWYQQKPGQPPKLLIYWASTRESGVPDRFSGSESGTNYTLTISSLQPEDFATYFCQQSDSLPITFGQGTRLDIQLEIQNPDPAVYQLRDSKSSDKSVCLFTDFDSQTNVSQSKDSDVYITDKCVLDMRSMDFKSNSAVAWSNKSDFACANAFNNSIIPEDTFFPSPESSDSTDHVKPKETENTKQPSKSCHKPKAIVHTEKVNMMSLTVLGLRMLFAKTVAVNFLLTAKLFFLLTARAKRSGSGVKQTLNFDLLKLAGDVESNPGPTSMDWIWRILFLVGAATGAHSFEEVQLLESGGGVVQPGRSLRLSCAASGFTFSSYGMHWVRQAPGKGLEWVAVISYDGSNKYYADSVKGRFTISRDNSKNTLYLQMNSLRAEDTAVYYCAKDMGWGSGWRPYYYYGMDVWGQGTTVTVSSTREDLKNVFPPEVAVFEPSEAEISHTQKATLVCLATGFYPDHVELSWWVNGKEVHSGVCTDPQPLKEQPALNDSRYCLSSRLRVSATFWQNPRNHFRCQVQFYGLSENDEWTQDRAKPVTQIVSAEAWGRADDVIKIHWQEKKSNTILGSQEGNTMKTNDTYMKFSWLTVPEKSLDKEHRCIVRHENNKNGVDQEIIFPPIKTDVITMDPKDNCSKDANDTLLLQLTNTSAYYMYLLLLLKSVVYFAIITCCLLMAMVKRKDSRG

SEQ ID NO: 14928 - protein, 868 aa, synthetic construct
MALPVTALLLPLALLLHAARPEVQLVESGGGLVQPGGSLRLSCAASGFSFSDFWMSWVRQAPGKGLEWVATISQAGSEKDYVDSVKGRFTISRDNAKKSLYLQMNSLRAEDTAVYYCASGVYSFDYRGQGTLVTVSSGTGGGGSGGGGSGGGGSEFDDIQMTQSPSSLSASVGDRVTITCRASQSISSYLNWYQQKPGKAPKLLIYAASSLQSGVPSRFSGSGSGTDFTLTISSLQPEDLATYYCQQSYSTPFTFGPGTKVDIKLEIQNPDPAVYQLRDSKSSDKSVCLFTDFDSQTNVSQSKDSDVYITDKCVLDMRSMDFKSNSAVAWSNKSDFACANAFNNSIIPEDTFFPSPESSDSTDHVKPKETENTKQPSKSCHKPKAIVHTEKVNMMSLTVLGLRMLFAKTVAVNFLLTAKLFFLLTARAKRSGSGVKQTLNFDLLKLAGDVESNPGPTSMDWIWRILFLVGAATGAHSFEVHEVQLVQSGAEVKKPGSSVKVSCKASGGTFSSYAISWVRQAPGQGLEWMGGIIPIFGTANYAQKFQGRVTITADKSTSTAYMELSSLRSEDTAVYYCATFALFGFREQAFDIWGQGTTVTVSSTREDLKNVFPPEVAVFEPSEAEISHTQKATLVCLATGFYPDHVELSWWVNGKEVHSGVCTDPQPLKEQPALNDSRYCLSSRLRVSATFWQNPRNHFRCQVQFYGLSENDEWTQDRAKPVTQIVSAEAWGRADDVIKIHWQEKKSNTILGSQEGNTMKTNDTYMKFSWLTVPEKSLDKEHRCIVRHENNKNGVDQEIIFPPIKTDVITMDPKDNCSKDANDTLLLQLTNTSAYYMYLLLLLKSVVYFAIITCCLLMAMVKRKDSRG

SEQ ID NO: 14929 - protein, 866 aa, synthetic construct
MALPVTALLLPLALLLHAARPEVQLVESGGGLVQPGGSLRLSCAASGFSFSDFWMSWVRQAPGKGLEWVATISQAGSEKDYVDSVKGRFTISRDNAKKSLYLQMNSLRAEDTAVYYCASGVYSFDYRGQGTLVTVSSGTGGGGSGGGGSGGGGSEFDIVLTQSPLSLAVSLGQPAIISCKASQSVSFAGTSLMHWYHQKPGQQPRLLIYRASNLEAGVPDRFSGSGSKTDFTLTISPVEAEDAATYYCQQSREYPYTFGGGTKLEIKRLEIQNPDPAVYQLRDSKSSDKSVCLFTDFDSQTNVSQSKDSDVYITDKCVLDMRSMDFKSNSAVAWSNKSDFACANAFNNSIIPEDTFFPSPESSDSTDHVKPKETENTKQPSKSCHKPKAIVHTEKVNMMSLTVLGLRMLFAKTVAVNFLLTAKLFFLLTARAKRSGSGVKQTLNFDLLKLAGDVESNPGPTSMDWIWRILFLVGAATGAHSFEQVQLVQSGAEVVKPGASVKISCKASGYTFTGYFMNWVKQSPGQSLEWIGRIHPYDGDTFYNQKFQGKATLTVDKSSNTAHMELLSLTSEDFAVYYCTRYDGSRAMDYWGQGTTVTVSSTREDLKNVFPPEVAVFEPSEAEISHTQKATLVCLATGFYPDHVELSWWVNGKEVHSGVCTDPQPLKEQPALNDSRYCLSSRLRVSATFWQNPRNHFRCQVQFYGLSENDEWTQDRAKPVTQIVSAEAWGRADDVIKIHWQEKKSNTILGSQEGNTMKTNDTYMKFSWLTVPEKSLDKEHRCIVRHENNKNGVDQEIIFPPIKTDVITMDPKDNCSKDANDTLLLQLTNTSAYYMYLLLLLKSVVYFAIITCCLLMAMVKRKDSRG

SEQ ID NO: 14930 - protein, 863 aa, synthetic construct
MALPVTALLLPLALLLHAARPEVQLVESGGGLVQPGGSLRLSCAASGFSFSDFWMSWVRQAPGKGLEWVATISQAGSEKDYVDSVKGRFTISRDNAKKSLYLQMNSLRAEDTAVYYCASGVYSFDYRGQGTLVTVSSGTGGGGSGGGGSGGGGSEFDDVVMTQTPLSLPVTPGEPASISCRSSQSLVHRNGNTYLHWYLQKPGQSPKLLIHKVSNRFSGVPDRFSGSGSGTDFTLKISRVEAEDLGVYFCSQSTHVPPLTFGAGTKLELKLEIQNPDPAVYQLRDSKSSDKSVCLFTDFDSQTNVSQSKDSDVYITDKCVLDMRSMDFKSNSAVAWSNKSDFACANAFNNSIIPEDTFFPSPESSDSTDHVKPKETENTKQPSKSCHKPKAIVHTEKVNMMSLTVLGLRMLFAKTVAVNFLLTAKLFFLLTARAKRSGSGVKQTLNFDLLKLAGDVESNPGPTSMDWIWRILFLVGAATGAHSFEEVQLVQSGAEVEKPGASVKISCKASGSSFTGYNMNWVRQNIGKSLEWIGAIDPYYGGTSYNQKFKGRATLTVDKSTSTAYMHLKSLRSEDTAVYYCVSGMEYWGQGTSVTVSSTREDLKNVFPPEVAVFEPSEAEISHTQKATLVCLATGFYPDHVELSWWVNGKEVHSGVCTDPQPLKEQPALNDSRYCLSSRLRVSATFWQNPRNHFRCQVQFYGLSENDEWTQDRAKPVTQIVSAEAWGRADDVIKIHWQEKKSNTILGSQEGNTMKTNDTYMKFSWLTVPEKSLDKEHRCIVRHENNKNGVDQEIIFPPIKTDVITMDPKDNCSKDANDTLLLQLTNTSAYYMYLLLLLKSVVYFAIITCCLLMAMVKRKDSRG

SEQ ID NO: 14931 - protein, 861 aa, synthetic construct
MALPVTALLLPLALLLHAARPEVQLVESGGGLVQPGGSLRLSCAASGFSFSDFWMSWVRQAPGKGLEWVATISQAGSEKDYVDSVKGRFTISRDNAKKSLYLQMNSLRAEDTAVYYCASGVYSFDYRGQGTLVTVSSGTGGGGSGGGGSGGGGSEFDEIVMTQTPATLSVSAGERVTITCKASQSVSNDVTWYQQKPGQAPRLLIYSASNRYSGVPARFSGSGYGTEFTFTISSVQSEDFAVYFCQQDYSSFGQGTKLEIKRLEIQNPDPAVYQLRDSKSSDKSVCLFTDFDSQTNVSQSKDSDVYITDKCVLDMRSMDFKSNSAVAWSNKSDFACANAFNNSIIPEDTFFPSPESSDSTDHVKPKETENTKQPSKSCHKPKAIVHTEKVNMMSLTVLGLRMLFAKTVAVNFLLTAKLFFLLTARAKRSGSGVKQTLNFDLLKLAGDVESNPGPTSMDWIWRILFLVGAATGAHSFEQVQLVESGPGVVQPGRSLRISCAVSGFSVTNYGVHWVRQPPGKGLEWLGVIWAGGITNYNSAFMSRLTISKDNSKNTVYLQMNSLRAEDTAMYYCASRGGHYGYALDYWGQGTLVTVSSTREDLKNVFPPEVAVFEPSEAEISHTQKATLVCLATGFYPDHVELSWWVNGKEVHSGVCTDPQPLKEQPALNDSRYCLSSRLRVSATFWQNPRNHFRCQVQFYGLSENDEWTQDRAKPVTQIVSAEAWGRADDVIKIHWQEKKSNTILGSQEGNTMKTNDTYMKFSWLTVPEKSLDKEHRCIVRHENNKNGVDQEIIFPPIKTDVITMDPKDNCSKDANDTLLLQLTNTSAYYMYLLLLLKSVVYFAIITCCLLMAMVKRKDSRG

SEQ ID NO: 14932 - protein, 863 aa, synthetic construct
MALPVTALLLPLALLLHAARPEVQLVESGGGLVQPGGSLRLSCAASGFSFSDFWMSWVRQAPGKGLEWVATISQAGSEKDYVDSVKGRFTISRDNAKKSLYLQMNSLRAEDTAVYYCASGVYSFDYRGQGTLVTVSSGTGGGGSGGGGSGGGGSEFDIQMTQTASSLPASLGDRVTISCSASQDISNYLNWYQQKPDGTVKLLIFYSSNLHSGVPSRFSGGGSGTDYSLTISNLEPEDIATYFCHQYSKLPWTFGGGTKLEIKRLEIQNPDPAVYQLRDSKSSDKSVCLFTDFDSQTNVSQSKDSDVYITDKCVLDMRSMDFKSNSAVAWSNKSDFACANAFNNSIIPEDTFFPSPESSDSTDHVKPKETENTKQPSKSCHKPKAIVHTEKVNMMSLTVLGLRMLFAKTVAVNFLLTAKLFFLLTARAKRSGSGVKQTLNFDLLKLAGDVESNPGPTSMDWIWRILFLVGAATGAHSFEEVTLVESGGDFVKPGGSLKVSCAASGFAFSHYAMSWVRQTPAKRLEWVAYISSGGSGTYYSDSVKGRFTISRDNAKNTLYLQMRSLRSEDSAMYFCTRVKLGTYYFDSWGQGTTLTVSSTREDLKNVFPPEVAVFEPSEAEISHTQKATLVCLATGFYPDHVELSWWVNGKEVHSGVCTDPQPLKEQPALNDSRYCLSSRLRVSATFWQNPRNHFRCQVQFYGLSENDEWTQDRAKPVTQIVSAEAWGRADDVIKIHWQEKKSNTILGSQEGNTMKTNDTYMKFSWLTVPEKSLDKEHRCIVRHENNKNGVDQEIIFPPIKTDVITMDPKDNCSKDANDTLLLQLTNTSAYYMYLLLLLKSVVYFAIITCCLLMAMVKRKDSRG

SEQ ID NO: 14933 - protein, 865 aa, synthetic construct
MALPVTALLLPLALLLHAARPEVQLVESGGGLVQPGGSLRLSCAASGFSFSDFWMSWVRQAPGKGLEWVATISQAGSEKDYVDSVKGRFTISRDNAKKSLYLQMNSLRAEDTAVYYCASGVYSFDYRGQGTLVTVSSGTGGGGSGGGGSGGGGSEFQFVLTQSPSASAALGASAKLTCTLSSAHKTYTIDWYQQQKGKAPRYLIQVKSDGTYTKATGVPDRFSGSSSGADRYLIIPSVQADDEADYYCGTDYTGGYVFGGGTQLTVTLEIQNPDPAVYQLRDSKSSDKSVCLFTDFDSQTNVSQSKDSDVYITDKCVLDMRSMDFKSNSAVAWSNKSDFACANAFNNSIIPEDTFFPSPESSDSTDHVKPKETENTKQPSKSCHKPKAIVHTEKVNMMSLTVLGLRMLFAKTVAVNFLLTAKLFFLLTARAKRSGSGVKQTLNFDLLKLAGDVESNPGPTSMDWIWRILFLVGAATGAHSFEEQLKESGGGLFKPTDTLTLTCTVSGFSLSYYGVNWVRQAPGNGLEWIGTIGGSGDTYYASWAKSRSTIIRNTNENTVTLKMTSLTAADTATYFCVRYANIGYEYFNVWGPGTLVTVSSTREDLKNVFPPEVAVFEPSEAEISHTQKATLVCLATGFYPDHVELSWWVNGKEVHSGVCTDPQPLKEQPALNDSRYCLSSRLRVSATFWQNPRNHFRCQVQFYGLSENDEWTQDRAKPVTQIVSAEAWGRADDVIKIHWQEKKSNTILGSQEGNTMKTNDTYMKFSWLTVPEKSLDKEHRCIVRHENNKNGVDQEIIFPPIKTDVITMDPKDNCSKDANDTLLLQLTNTSAYYMYLLLLLKSVVYFAIITCCLLMAMVKRKDSRG

SEQ ID NO: 14934 - protein, 870 aa, synthetic construct
MALPVTALLLPLALLLHAARPEVQLVESGGGLVQPGGSLRLSCAASGFSFSDFWMSWVRQAPGKGLEWVATISQAGSEKDYVDSVKGRFTISRDNAKKSLYLQMNSLRAEDTAVYYCASGVYSFDYRGQGTLVTVSSGTGGGGSGGGGSGGGGSEFQFVLTQSPSVSAALGASAKLTCTLSSAHKTYTIDWYQQQQGEAPRYLMQVKSDGSYTKGTGVPDRFSGSSSGADRYLIIPSVQADDEAGYVCGADDNGGYVFGGGTQLTVTLEIQNPDPAVYQLRDSKSSDKSVCLFTDFDSQTNVSQSKDSDVYITDKCVLDMRSMDFKSNSAVAWSNKSDFACANAFNNSIIPEDTFFPSPESSDSTDHVKPKETENTKQPSKSCHKPKAIVHTEKVNMMSLTVLGLRMLFAKTVAVNFLLTAKLFFLLTARAKRSGSGVKQTLNFDLLKLAGDVESNPGPTSMDWIWRILFLVGAATGAHSFEQSVKESEGGLFKPTDTLTLTCTVSGFSLSRHALTWVRQAPGNGLEWIGAIDNAGTTYYASWAKSRSTITRNTDLHTVTLKMTSLTASDTATYFCARVFYDINSGYYLDGMDLWGPGTLVTVSSTREDLKNVFPPEVAVFEPSEAEISHTQKATLVCLATGFYPDHVELSWWVNGKEVHSGVCTDPQPLKEQPALNDSRYCLSSRLRVSATFWQNPRNHFRCQVQFYGLSENDEWTQDRAKPVTQIVSAEAWGRADDVIKIHWQEKKSNTILGSQEGNTMKTNDTYMKFSWLTVPEKSLDKEHRCIVRHENNKNGVDQEIIFPPIKTDVITMDPKDNCSKDANDTLLLQLTNTSAYYMYLLLLLKSVVYFAIITCCLLMAMVKRKDSRG

SEQ ID NO: 14935 - protein, 864 aa, synthetic construct
MALPVTALLLPLALLLHAARPEVQLVESGGGLVQPGGSLRLSCAASGFSFSDFWMSWVRQAPGKGLEWVATISQAGSEKDYVDSVKGRFTISRDNAKKSLYLQMNSLRAEDTAVYYCASGVYSFDYRGQGTLVTVSSGTGGGGSGGGGSGGGGSEFDIQMTQSPSSLSASVGDRVTITCRASQGISSWLAWYQQKPEKAPKSLIYAASSLQSGVPSRFSGSGSGTDFTLTISSLQPEDFATYYCQQYNSYPPTFGGGTKVEIKLEIQNPDPAVYQLRDSKSSDKSVCLFTDFDSQTNVSQSKDSDVYITDKCVLDMRSMDFKSNSAVAWSNKSDFACANAFNNSIIPEDTFFPSPESSDSTDHVKPKETENTKQPSKSCHKPKAIVHTEKVNMMSLTVLGLRMLFAKTVAVNFLLTAKLFFLLTARAKRSGSGVKQTLNFDLLKLAGDVESNPGPTSMDWIWRILFLVGAATGAHSFEEVQLVESGGGLVQPGESLRLSCVASGFTFSRYKMNWVRQAPGKGLEWVSYISRSGRDIYYADSVKGRFTISRDNAKNSLYLQMNSLRDEDTAVYYCAGTVTTYYYFGMDVWGHGTTVTVSSTREDLKNVFPPEVAVFEPSEAEISHTQKATLVCLATGFYPDHVELSWWVNGKEVHSGVCTDPQPLKEQPALNDSRYCLSSRLRVSATFWQNPRNHFRCQVQFYGLSENDEWTQDRAKPVTQIVSAEAWGRADDVIKIHWQEKKSNTILGSQEGNTMKTNDTYMKFSWLTVPEKSLDKEHRCIVRHENNKNGVDQEIIFPPIKTDVITMDPKDNCSKDANDTLLLQLTNTSAYYMYLLLLLKSVVYFAIITCCLLMAMVKRKDSRG

SEQ ID NO: 14936 - protein, 865 aa, synthetic construct
MALPVTALLLPLALLLHAARPEVQLVESGGGLVQPGGSLRLSCAASGFSFSDFWMSWVRQAPGKGLEWVATISQAGSEKDYVDSVKGRFTISRDNAKKSLYLQMNSLRAEDTAVYYCASGVYSFDYRGQGTLVTVSSGTGGGGSGGGGSGGGGSEFDIQMTQSPSSLSASVGDRVTITCRASQGISSWLAWYQQKPEKAPKSLIYAASSLQSGVPSRFSGSGSGTDFTLTISSLQPEDFATYYCQQYNSYPPTFGGGTKVEIKLEIQNPDPAVYQLRDSKSSDKSVCLFTDFDSQTNVSQSKDSDVYITDKCVLDMRSMDFKSNSAVAWSNKSDFACANAFNNSIIPEDTFFPSPESSDSTDHVKPKETENTKQPSKSCHKPKAIVHTEKVNMMSLTVLGLRMLFAKTVAVNFLLTAKLFFLLTARAKRSGSGVKQTLNFDLLKLAGDVESNPGPTSMDWIWRILFLVGAATGAHSFEEVQLVESGGGSVQPGESLRLSCVASGFTFSRYKMNWVRQAPGKGLEWVSYISRSGRDIYYADSVKGRFTISRDNAKNSLYLQMNSLRDEDTAVYYCAGTVTTYYYDFGMDVWGQGTTVTVSSTREDLKNVFPPEVAVFEPSEAEISHTQKATLVCLATGFYPDHVELSWWVNGKEVHSGVCTDPQPLKEQPALNDSRYCLSSRLRVSATFWQNPRNHFRCQVQFYGLSENDEWTQDRAKPVTQIVSAEAWGRADDVIKIHWQEKKSNTILGSQEGNTMKTNDTYMKFSWLTVPEKSLDKEHRCIVRHENNKNGVDQEIIFPPIKTDVITMDPKDNCSKDANDTLLLQLTNTSAYYMYLLLLLKSVVYFAIITCCLLMAMVKRKDSRG

SEQ ID NO: 14937 - protein, 863 aa, synthetic construct
MALPVTALLLPLALLLHAARPEVQLVESGGGLVQPGGSLRLSCAASGFSFSDFWMSWVRQAPGKGLEWVATISQAGSEKDYVDSVKGRFTISRDNAKKSLYLQMNSLRAEDTAVYYCASGVYSFDYRGQGTLVTVSSGTGGGGSGGGGSGGGGSEFQSVLTQPPSASGTPGQRVTISCSGSRSNVGGNYVFWYQQVPGATPKLLIYRSNQRPSGVPDRFAGSKSGSSASLAISGLRSEDEADYYCATWDDSLSGFVFGTGTKVTVLGLEIQNPDPAVYQLRDSKSSDKSVCLFTDFDSQTNVSQSKDSDVYITDKCVLDMRSMDFKSNSAVAWSNKSDFACANAFNNSIIPEDTFFPSPESSDSTDHVKPKETENTKQPSKSCHKPKAIVHTEKVNMMSLTVLGLRMLFAKTVAVNFLLTAKLFFLLTARAKRSGSGVKQTLNFDLLKLAGDVESNPGPTSMDWIWRILFLVGAATGAHSFEVQLVESGGGLVKPGGSLRLSCAASGFTFSDYYMSWIRQAPGKGLEWVSYISSSGSTIYYADSVKGRFTISRDNAKNSLYLQMNSLRAEDTAVYYCARGYGKAYDQWGQGTLVTVSSTREDLKNVFPPEVAVFEPSEAEISHTQKATLVCLATGFYPDHVELSWWVNGKEVHSGVCTDPQPLKEQPALNDSRYCLSSRLRVSATFWQNPRNHFRCQVQFYGLSENDEWTQDRAKPVTQIVSAEAWGRADDVIKIHWQEKKSNTILGSQEGNTMKTNDTYMKFSWLTVPEKSLDKEHRCIVRHENNKNGVDQEIIFPPIKTDVITMDPKDNCSKDANDTLLLQLTNTSAYYMYLLLLLKSVVYFAIITCCLLMAMVKRKDSRG

SEQ ID NO: 14938 - protein, 862 aa, synthetic construct
MALPVTALLLPLALLLHAARPEVQLVESGGGLVQPGGSLRLSCAASGFSFSDFWMSWVRQAPGKGLEWVATISQAGSEKDYVDSVKGRFTISRDNAKKSLYLQMNSLRAEDTAVYYCASGVYSFDYRGQGTLVTVSSGTGGGGSGGGGSGGGGSEFQSVVTQPPSMSAAPGQQVTISCSGGNSNIERNYVSWYLQLPGTAPKLVIFDNDRRPSGIPDRFSGSKSGTSATLGITGLQTGDEADYYCGTWDSSLRGWVFGGGTKLTVLGLEIQNPDPAVYQLRDSKSSDKSVCLFTDFDSQTNVSQSKDSDVYITDKCVLDMRSMDFKSNSAVAWSNKSDFACANAFNNSIIPEDTFFPSPESSDSTDHVKPKETENTKQPSKSCHKPKAIVHTEKVNMMSLTVLGLRMLFAKTVAVNFLLTAKLFFLLTARAKRSGSGVKQTLNFDLLKLAGDVESNPGPTSMDWIWRILFLVGAATGAHSFEVQLVESGGGLIQPGGSLRLSCAASGFTFSNYAMNWVRQAPGKGLEWVSTINGRGSSTIYADSVKGRFTISRDNSKNTLYLQMNSLRAEDTATYYCARYISRGLGDSWGQGTLVTVTREDLKNVFPPEVAVFEPSEAEISHTQKATLVCLATGFYPDHVELSWWVNGKEVHSGVCTDPQPLKEQPALNDSRYCLSSRLRVSATFWQNPRNHFRCQVQFYGLSENDEWTQDRAKPVTQIVSAEAWGRADDVIKIHWQEKKSNTILGSQEGNTMKTNDTYMKFSWLTVPEKSLDKEHRCIVRHENNKNGVDQEIIFPPIKTDVITMDPKDNCSKDANDTLLLQLTNTSAYYMYLLLLLKSVVYFAIITCCLLMAMVKRKDSRG

SEQ ID NO: 14939 - protein, 863 aa, synthetic construct
MALPVTALLLPLALLLHAARPEVQLVESGGGLVQPGGSLRLSCAASGFSFSDFWMSWVRQAPGKGLEWVATISQAGSEKDYVDSVKGRFTISRDNAKKSLYLQMNSLRAEDTAVYYCASGVYSFDYRGQGTLVTVSSGTGGGGSGGGGSGGGGSEFDVVMTQTPLSLPVSLGDQASISCRSSQSLVHSNGNTYLHWYLQKPGQSPKLLIYKVSNRFSGVPDRFSGSGSGTDFTLKISRVEAEDLGVYFCSQNTPVPPKFGSGTKLEIKLEIQNPDPAVYQLRDSKSSDKSVCLFTDFDSQTNVSQSKDSDVYITDKCVLDMRSMDFKSNSAVAWSNKSDFACANAFNNSIIPEDTFFPSPESSDSTDHVKPKETENTKQPSKSCHKPKAIVHTEKVNMMSLTVLGLRMLFAKTVAVNFLLTAKLFFLLTARAKRSGSGVKQTLNFDLLKLAGDVESNPGPTSMDWIWRILFLVGAATGAHSFEQVQLQQSGAELVRPGASVKLSCKASGYTFNDYEMHWVKQTPVHGLKWIGALEPKTGDTAYSQKFKGKATLTADKSSSTAYMELRSLTSEDSAVYYCTSCYYYTYSGQGTLVTVSATREDLKNVFPPEVAVFEPSEAEISHTQKATLVCLATGFYPDHVELSWWVNGKEVHSGVCTDPQPLKEQPALNDSRYCLSSRLRVSATFWQNPRNHFRCQVQFYGLSENDEWTQDRAKPVTQIVSAEAWGRADDVIKIHWQEKKSNTILGSQEGNTMKTNDTYMKFSWLTVPEKSLDKEHRCIVRHENNKNGVDQEIIFPPIKTDVITMDPKDNCSKDANDTLLLQLTNTSAYYMYLLLLLKSVVYFAIITCCLLMAMVKRKDSRG

SEQ ID NO: 14940 - protein, 862 aa, synthetic construct
MALPVTALLLPLALLLHAARPEVQLVESGGGLVQPGGSLRLSCAASGFSFSDFWMSWVRQAPGKGLEWVATISQAGSEKDYVDSVKGRFTISRDNAKKSLYLQMNSLRAEDTAVYYCASGVYSFDYRGQGTLVTVSSGTGGGGSGGGGSGGGGSEFDIQLTQSPSSLSASVGDRVTITCRASQGIRNDLGWYQQKPGKAPKRLIYAASSLQNGVPSRFSGSGSGTEFTLTISSLQPEDFATYYCLQHNTYPAFGQGTKVEIKRLEIQNPDPAVYQLRDSKSSDKSVCLFTDFDSQTNVSQSKDSDVYITDKCVLDMRSMDFKSNSAVAWSNKSDFACANAFNNSIIPEDTFFPSPESSDSTDHVKPKETENTKQPSKSCHKPKAIVHTEKVNMMSLTVLGLRMLFAKTVAVNFLLTAKLFFLLTARAKRSGSGVKQTLNFDLLKLAGDVESNPGPTSMDWIWRILFLVGAATGAHSFEQVQLQESGPGLVKPSQTLSLTCTVSGGSISSFNYYWSWIRHHPGKGLEWIGYIYYSGSTYSNPSLKSRVTISVDTSKNQFSLTLSSVTAADTAVYYCARGYNWNYFDYWGQGTLVTVSSTREDLKNVFPPEVAVFEPSEAEISHTQKATLVCLATGFYPDHVELSWWVNGKEVHSGVCTDPQPLKEQPALNDSRYCLSSRLRVSATFWQNPRNHFRCQVQFYGLSENDEWTQDRAKPVTQIVSAEAWGRADDVIKIHWQEKKSNTILGSQEGNTMKTNDTYMKFSWLTVPEKSLDKEHRCIVRHENNKNGVDQEIIFPPIKTDVITMDPKDNCSKDANDTLLLQLTNTSAYYMYLLLLLKSVVYFAIITCCLLMAMVKRKDSRG

SEQ ID NO: 14941 - protein, 864 aa, synthetic construct
MALPVTALLLPLALLLHAARPEVQLVESGGGLVQPGGSLRLSCAASGFSFSDFWMSWVRQAPGKGLEWVATISQAGSEKDYVDSVKGRFTISRDNAKKSLYLQMNSLRAEDTAVYYCASGVYSFDYRGQGTLVTVSSGTGGGGSGGGGSGGGGSEFDDIVLTQSPASLAVSLGQSVTISCRASESVEYYGTSLMQWYQQKPGQPPKLLIYATSNVESGVPARFSGSGSGTDFSLNIHPVEEDDIAMYFCQQSRKLPSTFGGGTKLEIKLEIQNPDPAVYQLRDSKSSDKSVCLFTDFDSQTNVSQSKDSDVYITDKCVLDMRSMDFKSNSAVAWSNKSDFACANAFNNSIIPEDTFFPSPESSDSTDHVKPKETENTKQPSKSCHKPKAIVHTEKVNMMSLTVLGLRMLFAKTVAVNFLLTAKLFFLLTARAKRSGSGVKQTLNFDLLKLAGDVESNPGPTSMDWIWRILFLVGAATGAHSFEDVRLQESGPGQVKPSQTVSLTCSVTGYSITNGNHWWNWIRQVSGSKLEWIGYISSSGSTDSNPSLKSRISITRDTSKNQLFLQLNSVTTEDIATYYCARGYYFDYWGQGTTLTVSSTREDLKNVFPPEVAVFEPSEAEISHTQKATLVCLATGFYPDHVELSWWVNGKEVHSGVCTDPQPLKEQPALNDSRYCLSSRLRVSATFWQNPRNHFRCQVQFYGLSENDEWTQDRAKPVTQIVSAEAWGRADDVIKIHWQEKKSNTILGSQEGNTMKTNDTYMKFSWLTVPEKSLDKEHRCIVRHENNKNGVDQEIIFPPIKTDVITMDPKDNCSKDANDTLLLQLTNTSAYYMYLLLLLKSVVYFAIITCCLLMAMVKRKDSRG

SEQ ID NO: 14942 - protein, 863 aa, synthetic construct
MALPVTALLLPLALLLHAARPEVQLVESGGGLVQPGGSLRLSCAASGFSFSDFWMSWVRQAPGKGLEWVATISQAGSEKDYVDSVKGRFTISRDNAKKSLYLQMNSLRAEDTAVYYCASGVYSFDYRGQGTLVTVSSGTGGGGSGGGGSGGGGSEFDIQMTQSPSSLSASVGDRVTITCRASQDVNTAVAWYQQKPGKAPKLLIYSASFLESGVPSRFSGSRSGTDFTLTISSLQPEDFATYYCQQHYTTPPTFGQTKVEIKRLEIQNPDPAVYQLRDSKSSDKSVCLFTDFDSQTNVSQSKDSDVYITDKCVLDMRSMDFKSNSAVAWSNKSDFACANAFNNSIIPEDTFFPSPESSDSTDHVKPKETENTKQPSKSCHKPKAIVHTEKVNMMSLTVLGLRMLFAKTVAVNFLLTAKLFFLLTARAKRSGSGVKQTLNFDLLKLAGDVESNPGPTSMDWIWRILFLVGAATGAHSFEEVQLVESGGGLVQPGGSLRLSCAASGFNIKDTYIHWVRQAPGKGLEWVARIYPTNGYTRYADSVKGRFTISADTSKNTAYLQMNSLRAEDTAVYYCSRWGGDGFYAMDVWGQGTLVTVSSTREDLKNVFPPEVAVFEPSEAEISHTQKATLVCLATGFYPDHVELSWWVNGKEVHSGVCTDPQPLKEQPALNDSRYCLSSRLRVSATFWQNPRNHFRCQVQFYGLSENDEWTQDRAKPVTQIVSAEAWGRADDVIKIHWQEKKSNTILGSQEGNTMKTNDTYMKFSWLTVPEKSLDKEHRCIVRHENNKNGVDQEIIFPPIKTDVITMDPKDNCSKDANDTLLLQLTNTSAYYMYLLLLLKSVVYFAIITCCLLMAMVKRKDSRG

SEQ ID NO: 14943 - protein, 862 aa, synthetic construct
MALPVTALLLPLALLLHAARPEVQLVESGGGLVQPGGSLRLSCAASGFSFSDFWMSWVRQAPGKGLEWVATISQAGSEKDYVDSVKGRFTISRDNAKKSLYLQMNSLRAEDTAVYYCASGVYSFDYRGQGTLVTVSSGTGGGGSGGGGSGGGGSEFDQSVLTQPPSVSVAPGKTARIPCEGNYIGSSNVHWYQQKPGQAPVLVIHFDSDRPSGIPDRFSGSNSGNMATLTISRVEAGDEADYYCQVWENHGWVFGGGTKLTVLSLEIQNPDPAVYQLRDSKSSDKSVCLFTDFDSQTNVSQSKDSDVYITDKCVLDMRSMDFKSNSAVAWSNKSDFACANAFNNSIIPEDTFFPSPESSDSTDHVKPKETENTKQPSKSCHKPKAIVHTEKVNMMSLTVLGLRMLFAKTVAVNFLLTAKLFFLLTARAKRSGSGVKQTLNFDLLKLAGDVESNPGPTSMDWIWRILFLVGAATGAHSFEEVQLVETGGGLVQPGESLRLSCAASGFTFSDYEMNWVRQAPGKGLEWVSYISSSGSTIYYADSVKGRFTIYRDNAKNSLYLQMNSLRAEDTALYYCARAWGVGPPDYWGQGTLVTVSSTREDLKNVFPPEVAVFEPSEAEISHTQKATLVCLATGFYPDHVELSWWVNGKEVHSGVCTDPQPLKEQPALNDSRYCLSSRLRVSATFWQNPRNHFRCQVQFYGLSENDEWTQDRAKPVTQIVSAEAWGRADDVIKIHWQEKKSNTILGSQEGNTMKTNDTYMKFSWLTVPEKSLDKEHRCIVRHENNKNGVDQEIIFPPIKTDVITMDPKDNCSKDANDTLLLQLTNTSAYYMYLLLLLKSVVYFAIITCCLLMAMVKRKDSRG

SEQ ID NO: 14944 - protein, 870 aa, synthetic construct
MALPVTALLLPLALLLHAARPEVQLVESGGGLVQPGGSLRLSCAASGFSFSDFWMSWVRQAPGKGLEWVATISQAGSEKDYVDSVKGRFTISRDNAKKSLYLQMNSLRAEDTAVYYCASGVYSFDYRGQGTLVTVSSGTGGGGSGGGGSGGGGSEFDIQMTQSPSSLSASVGDTVTITCQANGYLNWYQQRRGKAPKLLIYDGSKLERGVPSRFSGRRWGQEYNLTINNLQPEDIATYFCQVYEFVVPGTRLDLKRTVAAPLEIQNPDPAVYQLRDSKSSDKSVCLFTDFDSQTNVSQSKDSDVYITDKCVLDMRSMDFKSNSAVAWSNKSDFACANAFNNSIIPEDTFFPSPESSDSTDHVKPKETENTKQPSKSCHKPKAIVHTEKVNMMSLTVLGLRMLFAKTVAVNFLLTAKLFFLLTARAKRSGSGVKQTLNFDLLKLAGDVESNPGPTSMDWIWRILFLVGAATGAHSFEQVQLLQSGAAVTKPGASVRVSCEASGYNIRDYFIHWWRQAPGQGLQWVGWINPKTGQPNNPRQFQGRVSLTRHASWDFDTFSFYMDLKALRSDDTAVYFCARQRSDYWDFDVWGSGTQVTVSSASTKGPTREDLKNVFPPEVAVFEPSEAEISHTQKATLVCLATGFYPDHVELSWWVNGKEVHSGVCTDPQPLKEQPALNDSRYCLSSRLRVSATFWQNPRNHFRCQVQFYGLSENDEWTQDRAKPVTQIVSAEAWGRADDVIKIHWQEKKSNTILGSQEGNTMKTNDTYMKFSWLTVPEKSLDKEHRCIVRHENNKNGVDQEIIFPPIKTDVITMDPKDNCSKDANDTLLLQLTNTSAYYMYLLLLLKSVVYFAIITCCLLMAMVKRKDSRG

SEQ ID NO: 14945 - protein, 876 aa, synthetic construct
MALPVTALLLPLALLLHAARPEVQLVESGGGLVQPGGSLRLSCAASGFSFSDFWMSWVRQAPGKGLEWVATISQAGSEKDYVDSVKGRFTISRDNAKKSLYLQMNSLRAEDTAVYYCASGVYSFDYRGQGTLVTVSSGTGGGGSGGGGSGGGGSEFQSALTQPPSASGSPGQSITISCTGTSNNFVSWYQQHAGKAPKLVIYDVNKRPSGVPDRFSGSKSGNTASLTVSGLQTDDEAVYYCGSLVGNWDVIFGGGTKLTVLLEIQNPDPAVYQLRDSKSSDKSVCLFTDFDSQTNVSQSKDSDVYITDKCVLDMRSMDFKSNSAVAWSNKSDFACANAFNNSIIPEDTFFPSPESSDSTDHVKPKETENTKQPSKSCHKPKAIVHTEKVNMMSLTVLGLRMLFAKTVAVNFLLTAKLFFLLTARAKRSGSGVKQTLNFDLLKLAGDVESNPGPTSMDWIWRILFLVGAATGAHSFEQPQLQESGPTLVEASETLSLTCAVSGDSTAACNSFWGWVRQPPGKGLEWVGSLSHCASYWNRGWTYHNPSLKSRLTLALDTPKNLVFLKLNSVTAADTATYYCARFGGEVLRYTDWPKPAWVDLWGRGTLVTVSSTREDLKNVFPPEVAVFEPSEAEISHTQKATLVCLATGFYPDHVELSWWVNGKEVHSGVCTDPQPLKEQPALNDSRYCLSSRLRVSATFWQNPRNHFRCQVQFYGLSENDEWTQDRAKPVTQIVSAEAWGRADDVIKIHWQEKKSNTILGSQEGNTMKTNDTYMKFSWLTVPEKSLDKEHRCIVRHENNKNGVDQEIIFPPIKTDVITMDPKDNCSKDANDTLLLQLTNTSAYYMYLLLLLKSVVYFAIITCCLLMAMVKRKDSRG

SEQ ID NO: 14946 - protein, 861 aa, synthetic construct
MALPVTALLLPLALLLHAARPEVQLVESGGGLVQPGGSLRLSCAASGFSFSDFWMSWVRQAPGKGLEWVATISQAGSEKDYVDSVKGRFTISRDNAKKSLYLQMNSLRAEDTAVYYCASGVYSFDYRGQGTLVTVSSGTGGGGSGGGGSGGGGSEFEIVLTQSPGTLSLSPGETAIISCRTSQYGSLAWYQQRPGQAPRLVIYSGSTRAAGIPDRFSGSRWGPDYNLTISNLESGDFGVYYCQQYEFFGQGTKVQVDIKRLEIQNPDPAVYQLRDSKSSDKSVCLFTDFDSQTNVSQSKDSDVYITDKCVLDMRSMDFKSNSAVAWSNKSDFACANAFNNSIIPEDTFFPSPESSDSTDHVKPKETENTKQPSKSCHKPKAIVHTEKVNMMSLTVLGLRMLFAKTVAVNFLLTAKLFFLLTARAKRSGSGVKQTLNFDLLKLAGDVESNPGPTSMDWIWRILFLVGAATGAHSFEQVQLVQSGGQMKKPGESMRISCRASGYEFIDCTLNWIRLAPGKRPEWMGWLKPRGGAVNYARPLQGRVTMTRDVYSDTAFLELRSLTVDDTAVYFCTRGKNCDYNWDFEHWGRGTPVIVSSTREDLKNVFPPEVAVFEPSEAEISHTQKATLVCLATGFYPDHVELSWWVNGKEVHSGVCTDPQPLKEQPALNDSRYCLSSRLRVSATFWQNPRNHFRCQVQFYGLSENDEWTQDRAKPVTQIVSAEAWGRADDVIKIHWQEKKSNTILGSQEGNTMKTNDTYMKFSWLTVPEKSLDKEHRCIVRHENNKNGVDQEIIFPPIKTDVITMDPKDNCSKDANDTLLLQLTNTSAYYMYLLLLLKSVVYFAIITCCLLMAMVKRKDSRG

SEQ ID NO: 14947 - protein, 871 aa, synthetic construct
MALPVTALLLPLALLLHAARPEVQLVESGGGLVQPGGSLRLSCAASGFSFSDFWMSWVRQAPGKGLEWVATISQAGSEKDYVDSVKGRFTISRDNAKKSLYLQMNSLRAEDTAVYYCASGVYSFDYRGQGTLVTVSSGTGGGGSGGGGSGGGGSEFELVLTQSPGTLSLSAGERATLSCRASQSVSSGSLAWYQQKPGQAPRLLIYGASTRATGIPDRFSGSGSGTDFTLTIGRLEPEDLAVYYCQQYGTSPYTFGQGTKLEILEIQNPDPAVYQLRDSKSSDKSVCLFTDFDSQTNVSQSKDSDVYITDKCVLDMRSMDFKSNSAVAWSNKSDFACANAFNNSIIPEDTFFPSPESSDSTDHVKPKETENTKQPSKSCHKPKAIVHTEKVNMMSLTVLGLRMLFAKTVAVNFLLTAKLFFLLTARAKRSGSGVKQTLNFDLLKLAGDVESNPGPTSMDWIWRILFLVGAATGAHSFELEQSGAEVKKPGSSVQVSCKASGGTFSMYGFNWVRQAPGHGLEWMGGIIPIFGTSNYAQKFRGRVTFTADQATSTAYMELTNLRSDDTAVYYCARDFGPDWEDGDSYDGSGRGFFDFWGQGTLVTVSSTREDLKNVFPPEVAVFEPSEAEISHTQKATLVCLATGFYPDHVELSWWVNGKEVHSGVCTDPQPLKEQPALNDSRYCLSSRLRVSATFWQNPRNHFRCQVQFYGLSENDEWTQDRAKPVTQIVSAEAWGRADDVIKIHWQEKKSNTILGSQEGNTMKTNDTYMKFSWLTVPEKSLDKEHRCIVRHENNKNGVDQEIIFPPIKTDVITMDPKDNCSKDANDTLLLQLTNTSAYYMYLLLLLKSVVYFAIITCCLLMAMVKRKDSRG

SEQ ID NO: 14948 - protein, 851 aa, synthetic construct
MALPVTALLLPLALLLHAARPEVQLVESGGGLVQPGGSLRLSCAASGFSFSDFWMSWVRQAPGKGLEWVATISQAGSEKDYVDSVKGRFTISRDNAKKSLYLQMNSLRAEDTAVYYCASGVYSFDYRGQGTLVTVSSGTGGGGSGGGGSGGGGSEFDIQMTQSPSSLSASVGDRVTITCQASQDINNYLNWYQQKPGKAPKLLIYDASNLQTGVPSRFSGSGSGTDFTFTIEDIATYYCQQYTFGPGTKVDIKLEIQNPDPAVYQLRDSKSSDKSVCLFTDFDSQTNVSQSKDSDVYITDKCVLDMRSMDFKSNSAVAWSNKSDFACANAFNNSIIPEDTFFPSPESSDSTDHVKPKETENTKQPSKSCHKPKAIVHTEKVNMMSLTVLGLRMLFAKTVAVNFLLTAKLFFLLTARAKRSGSGVKQTLNFDLLKLAGDVESNPGPTSMDWIWRILFLVGAATGAHSFEEVQLLESGGGLVQPGGSLRLSCAASGFTFSWYSMTWVRQAPGKGLEWVSSIVPWGDFTQYADSVKGRFTISRDNSKNTLYLQMNSLRAEDTAVYYCAKGPGWGSFDLWGRGTLVTVSSTREDLKNVFPPEVAVFEPSEAEISHTQKATLVCLATGFYPDHVELSWWVNGKEVHSGVCTDPQPLKEQPALNDSRYCLSSRLRVSATFWQNPRNHFRCQVQFYGLSENDEWTQDRAKPVTQIVSAEAWGRADDVIKIHWQEKKSNTILGSQEGNTMKTNDTYMKFSWLTVPEKSLDKEHRCIVRHENNKNGVDQEIIFPPIKTDVITMDPKDNCSKDANDTLLLQLTNTSAYYMYLLLLLKSVVYFAIITCCLLMAMVKRKDSRG

SEQ ID NO: 14949 - protein, 861 aa, synthetic construct
MALPVTALLLPLALLLHAARPEVQLVESGGGLVQPGGSLRLSCAASGFSFSDFWMSWVRQAPGKGLEWVATISQAGSEKDYVDSVKGRFTISRDNAKKSLYLQMNSLRAEDTAVYYCASGVYSFDYRGQGTLVTVSSGTGGGGSGGGGSGGGGSEFDIQMTQSPSSLSASVGDRVTITCTASLSVSSTYLHWYQQKPGSSPKLWIYSTSNLASGVPSRFSGSGSGTSYTLTISSLQPEDFATYYCHQYHRSPLTFGGGTKVEIKRLEIQNPDPAVYQLRDSKSSDKSVCLFTDFDSQTNVSQSKDSDVYITDKCVLDMRSMDFKSNSAVAWSNKSDFACANAFNNSIIPEDTFFPSPESSDSTDHVKPKETENTKQPSKSCHKPKAIVHTEKVNMMSLTVLGLRMLFAKTVAVNFLLTAKLFFLLTARAKRSGSGVKQTLNFDLLKLAGDVESNPGPTSMDWIWRILFLVGAATGAHSFEEVQLVESGGGLVQPGGSLRLSCAASGFSLTKYGVHWVRQAPGKGLEWVGVKWAGGSTDYNSALMSRFTISKDNAKNSLYLQMNSLRAEDTAVYYCARDHRDAMDYWGQGTLVTVSSTREDLKNVFPPEVAVFEPSEAEISHTQKATLVCLATGFYPDHVELSWWVNGKEVHSGVCTDPQPLKEQPALNDSRYCLSSRLRVSATFWQNPRNHFRCQVQFYGLSENDEWTQDRAKPVTQIVSAEAWGRADDVIKIHWQEKKSNTILGSQEGNTMKTNDTYMKFSWLTVPEKSLDKEHRCIVRHENNKNGVDQEIIFPPIKTDVITMDPKDNCSKDANDTLLLQLTNTSAYYMYLLLLLKSVVYFAIITCCLLMAMVKRKDSRG

SEQ ID NO: 14950 - protein, 865 aa, synthetic construct
MALPVTALLLPLALLLHAARPEVQLVESGGGLVQPGGSLRLSCAASGFSFSDFWMSWVRQAPGKGLEWVATISQAGSEKDYVDSVKGRFTISRDNAKKSLYLQMNSLRAEDTAVYYCASGVYSFDYRGQGTLVTVSSGTGGGGSGGGGSGGGGSEFDIQMTQSPSSLSASVGDRVTITCKASQDVGTAVAWYQQKPGKAPKLLIYSASYRSTGVPSRFSGSGSGTDFTLTISSLQPEDFATYYCQHHYSAPWTFGGGTKVEIKLEIQNPDPAVYQLRDSKSSDKSVCLFTDFDSQTNVSQSKDSDVYITDKCVLDMRSMDFKSNSAVAWSNKSDFACANAFNNSIIPEDTFFPSPESSDSTDHVKPKETENTKQPSKSCHKPKAIVHTEKVNMMSLTVLGLRMLFAKTVAVNFLLTAKLFFLLTARAKRSGSGVKQTLNFDLLKLAGDVESNPGPTSMDWIWRILFLVGAATGAHSFEEVQLVESGGGLVQPGGSLRLSCAASGFTFSRNGMSWVRQAPGKGLEWVATVSSGGSYIYYADSVKGRFTISRDNAKNSLYLQMNSLRAEDTAVYYCARQGTTALATRFFDVWGQGTLVTVSSTREDLKNVFPPEVAVFEPSEAEISHTQKATLVCLATGFYPDHVELSWWVNGKEVHSGVCTDPQPLKEQPALNDSRYCLSSRLRVSATFWQNPRNHFRCQVQFYGLSENDEWTQDRAKPVTQIVSAEAWGRADDVIKIHWQEKKSNTILGSQEGNTMKTNDTYMKFSWLTVPEKSLDKEHRCIVRHENNKNGVDQEIIFPPIKTDVITMDPKDNCSKDANDTLLLQLTNTSAYYMYLLLLLKSVVYFAIITCCLLMAMVKRKDSRG

SEQ ID NO: 14951 - protein, 861 aa, synthetic construct
MALPVTALLLPLALLLHAARPEVQLVESGGGLVQPGGSLRLSCAASGFSFSDFWMSWVRQAPGKGLEWVATISQAGSEKDYVDSVKGRFTISRDNAKKSLYLQMNSLRAEDTAVYYCASGVYSFDYRGQGTLVTVSSGTGGGGSGGGGSGGGGSEFDIQMTQSPPSLSASVGGKVTITCKASQDIDRYMAWYQDKPGKGPKLLIHDTSTLQPGIPSRFSGSGSGRDYSFSISNLEPEDIATYYCLQYDNLWTFGGGTKLEIKRLEIQNPDPAVYQLRDSKSSDKSVCLFTDFDSQTNVSQSKDSDVYITDKCVLDMRSMDFKSNSAVAWSNKSDFACANAFNNSIIPEDTFFPSPESSDSTDHVKPKETENTKQPSKSCHKPKAIVHTEKVNMMSLTVLGLRMLFAKTVAVNFLLTAKLFFLLTARAKRSGSGVKQTLNFDLLKLAGDVESNPGPTSMDWIWRILFLVGAATGAHSFEQVQLVQSGAELVKPGASVKMSCKASGYIFTNYNIHWVKKSPGQGLEWIGAIYPGNGDAPYSQKFQDRATLTADTSSSTTYMELSSLTSEDSAVYYCVRANWDVAFAYWGQGTLVSVSSTREDLKNVFPPEVAVFEPSEAEISHTQKATLVCLATGFYPDHVELSWWVNGKEVHSGVCTDPQPLKEQPALNDSRYCLSSRLRVSATFWQNPRNHFRCQVQFYGLSENDEWTQDRAKPVTQIVSAEAWGRADDVIKIHWQEKKSNTILGSQEGNTMKTNDTYMKFSWLTVPEKSLDKEHRCIVRHENNKNGVDQEIIFPPIKTDVITMDPKDNCSKDANDTLLLQLTNTSAYYMYLLLLLKSVVYFAIITCCLLMAMVKRKDSRG

SEQ ID NO: 14952 - protein, 862 aa, synthetic construct
MALPVTALLLPLALLLHAARPEVQLVESGGGLVQPGGSLRLSCAASGFSFSDFWMSWVRQAPGKGLEWVATISQAGSEKDYVDSVKGRFTISRDNAKKSLYLQMNSLRAEDTAVYYCASGVYSFDYRGQGTLVTVSSGTGGGGSGGGGSGGGGSEFDIQMTQSPASLSASVGETVTITCRVSGNIHNYLAWYQQKQGKSPQLLVYNAKTLADGVPSRFSGSGSGTQYSLKINSLQPEDFGSYYCQHFWSNPYTFGGGTKLEIKLEIQNPDPAVYQLRDSKSSDKSVCLFTDFDSQTNVSQSKDSDVYITDKCVLDMRSMDFKSNSAVAWSNKSDFACANAFNNSIIPEDTFFPSPESSDSTDHVKPKETENTKQPSKSCHKPKAIVHTEKVNMMSLTVLGLRMLFAKTVAVNFLLTAKLFFLLTARAKRSGSGVKQTLNFDLLKLAGDVESNPGPTSMDWIWRILFLVGAATGAHSFEQVQLQQSGASVKVSCKASELVRPGTGYAFTNYLIEWVKQRPGQGLEWIGVINPGSGGTNYNEKFKGKATLTADKSSSTAYMQLSSLTSDDSAVYFCARYRSYDWYFDVWGAGTTVTVSSTREDLKNVFPPEVAVFEPSEAEISHTQKATLVCLATGFYPDHVELSWWVNGKEVHSGVCTDPQPLKEQPALNDSRYCLSSRLRVSATFWQNPRNHFRCQVQFYGLSENDEWTQDRAKPVTQIVSAEAWGRADDVIKIHWQEKKSNTILGSQEGNTMKTNDTYMKFSWLTVPEKSLDKEHRCIVRHENNKNGVDQEIIFPPIKTDVITMDPKDNCSKDANDTLLLQLTNTSAYYMYLLLLLKSVVYFAIITCCLLMAMVKRKDSRG

SEQ ID NO: 14953 - protein, 861 aa, synthetic construct
MALPVTALLLPLALLLHAARPEVQLVESGGGLVQPGGSLRLSCAASGFSFSDFWMSWVRQAPGKGLEWVATISQAGSEKDYVDSVKGRFTISRDNAKKSLYLQMNSLRAEDTAVYYCASGVYSFDYRGQGTLVTVSSGTGGGGSGGGGSGGGGSEFDIQMTQSFSSLSASVGDRVTITCRASQDISNYLNWYQQKPGKAPKLLIYYTSRLHSGVPSRFSGSGSGTDYTLTISSLQPEDFATYFCQQGNTLPWTFGGGTKLEIKRLEIQNPDPAVYQLRDSKSSDKSVCLFTDFDSQTNVSQSKDSDVYITDKCVLDMRSMDFKSNSAVAWSNKSDFACANAFNNSIIPEDTFFPSPESSDSTDHVKPKETENTKQPSKSCHKPKAIVHTEKVNMMSLTVLGLRMLFAKTVAVNFLLTAKLFFLLTARAKRSGSGVKQTLNFDLLKLAGDVESNPGPTSMDWIWRILFLVGAATGAHSFEEVQLVQSGGGLVQSGGSLRLSCRASGYTFTRYWMLWVRQRPGKGLEWVAEINPRNDRTNYNEKFKTRFTISVDRSKNTLYLQMDSLRAEDTAVYFCALGGGYAMDYWGQGTLVTVSSTREDLKNVFPPEVAVFEPSEAEISHTQKATLVCLATGFYPDHVELSWWVNGKEVHSGVCTDPQPLKEQPALNDSRYCLSSRLRVSATFWQNPRNHFRCQVQFYGLSENDEWTQDRAKPVTQIVSAEAWGRADDVIKIHWQEKKSNTILGSQEGNTMKTNDTYMKFSWLTVPEKSLDKEHRCIVRHENNKNGVDQEIIFPPIKTDVITMDPKDNCSKDANDTLLLQLTNTSAYYMYLLLLLKSVVYFAIITCCLLMAMVKRKDSRG

SEQ ID NO: 14954 - protein, 862 aa, synthetic construct
MALPVTALLLPLALLLHAARPEVQLVESGGGLVQPGGSLRLSCAASGFSFSDFWMSWVRQAPGKGLEWVATISQAGSEKDYVDSVKGRFTISRDNAKKSLYLQMNSLRAEDTAVYYCASGVYSFDYRGQGTLVTVSSGTGGGGSGGGGSGGGGSEFDIQMTQSPASLSASVGETVTIICRASVNIYSYLAWYQQKQGKSPQLLVYNAKILAEGVPSRFSGSGSGTQFSLKINSLQPEDFGSYYCQHHYGTFTFGSGTKLEIKRLEIQNPDPAVYQLRDSKSSDKSVCLFTDFDSQTNVSQSKDSDVYITDKCVLDMRSMDFKSNSAVAWSNKSDFACANAFNNSIIPEDTFFPSPESSDSTDHVKPKETENTKQPSKSCHKPKAIVHTEKVNMMSLTVLGLRMLFAKTVAVNFLLTAKLFFLLTARAKRSGSGVKQTLNFDLLKLAGDVESNPGPTSMDWIWRILFLVGAATGAHSFEQVQLKESGPGLVAPSQSLSITCTISGFSLTSYGVHWVRQPPGKGLEWLVVIWSDGSTTYNSALKSRLSISKDNSKSQVFLKMNSLQTDDTAIYYCASHYGSTLAFASWGHGTLVTVSAATREDLKNVFPPEVAVFEPSEAEISHTQKATLVCLATGFYPDHVELSWWVNGKEVHSGVCTDPQPLKEQPALNDSRYCLSSRLRVSATFWQNPRNHFRCQVQFYGLSENDEWTQDRAKPVTQIVSAEAWGRADDVIKIHWQEKKSNTILGSQEGNTMKTNDTYMKFSWLTVPEKSLDKEHRCIVRHENNKNGVDQEIIFPPIKTDVITMDPKDNCSKDANDTLLLQLTNTSAYYMYLLLLLKSVVYFAIITCCLLMAMVKRKDSRG

SEQ ID NO: 14955 - protein, 870 aa, synthetic construct
MALPVTALLLPLALLLHAARPEVQLVESGGGLVQPGGSLRLSCAASGFSFSDFWMSWVRQAPGKGLEWVATISQAGSEKDYVDSVKGRFTISRDNAKKSLYLQMNSLRAEDTAVYYCASGVYSFDYRGQGTLVTVSSGTGGGGSGGGGSGGGGSEFDIVMTQSHKFMSTSVGDRVSVTCKASQNVGNNVAWYQQKPGQSPKVLIYSASYRYSGVPDRFTGSGSGTDFTLTISNVQSEDLAEYFCQQYNTYPFTFGSGTKLEIKLEIQNPDPAVYQLRDSKSSDKSVCLFTDFDSQTNVSQSKDSDVYITDKCVLDMRSMDFKSNSAVAWSNKSDFACANAFNNSIIPEDTFFPSPESSDSTDHVKPKETENTKQPSKSCHKPKAIVHTEKVNMMSLTVLGLRMLFAKTVAVNFLLTAKLFFLLTARAKRSGSGVKQTLNFDLLKLAGDVESNPGPTSMDWIWRILFLVGAATGAHSFEEVQLEESGGGLVQPGGSMKLSCVASGFTFSNYWMNWVRQSPEKGLEWVAEIRFKSHNYATHFAESVKGRFTISRDDSKSSVYLQMNNLRAEDTGIYYCTRRIGNSDYDWWYFDVWGAGTSVTVSSASTREDLKNVFPPEVAVFEPSEAEISHTQKATLVCLATGFYPDHVELSWWVNGKEVHSGVCTDPQPLKEQPALNDSRYCLSSRLRVSATFWQNPRNHFRCQVQFYGLSENDEWTQDRAKPVTQIVSAEAWGRADDVIKIHWQEKKSNTILGSQEGNTMKTNDTYMKFSWLTVPEKSLDKEHRCIVRHENNKNGVDQEIIFPPIKTDVITMDPKDNCSKDANDTLLLQLTNTSAYYMYLLLLLKSVVYFAIITCCLLMAMVKRKDSRG

SEQ ID NO: 14956 - protein, 863 aa, synthetic construct
MALPVTALLLPLALLLHAARPEVQLVESGGGLVQPGGSLRLSCAASGFSFSDFWMSWVRQAPGKGLEWVATISQAGSEKDYVDSVKGRFTISRDNAKKSLYLQMNSLRAEDTAVYYCASGVYSFDYRGQGTLVTVSSGTGGGGSGGGGSGGGGSEFDQIVLTQSPAIMSASPGEKVTISCSASSSVSYMYWYQQKPGSSPKPWIYRTSNLASGVPARFSGSGSGTSYSLTISNMEAEDAAAYYCQQYHSYPTTFGGGTKLEVKLEIQNPDPAVYQLRDSKSSDKSVCLFTDFDSQTNVSQSKDSDVYITDKCVLDMRSMDFKSNSAVAWSNKSDFACANAFNNSIIPEDTFFPSPESSDSTDHVKPKETENTKQPSKSCHKPKAIVHTEKVNMMSLTVLGLRMLFAKTVAVNFLLTAKLFFLLTARAKRSGSGVKQTLNFDLLKLAGDVESNPGPTSMDWIWRILFLVGAATGAHSFEEVQLVESGGGLVQPKGSLKLSCAASGFSFNTYAMNWVRQAPGKGLEWIAHIRSKSNNFATYYADSVKDRFSISRDASENILFLQMNNLKTEDTAMYYCVRQGGDFPMDYWGQGTSVTVSSTREDLKNVFPPEVAVFEPSEAEISHTQKATLVCLATGFYPDHVELSWWVNGKEVHSGVCTDPQPLKEQPALNDSRYCLSSRLRVSATFWQNPRNHFRCQVQFYGLSENDEWTQDRAKPVTQIVSAEAWGRADDVIKIHWQEKKSNTILGSQEGNTMKTNDTYMKFSWLTVPEKSLDKEHRCIVRHENNKNGVDQEIIFPPIKTDVITMDPKDNCSKDANDTLLLQLTNTSAYYMYLLLLLKSVVYFAIITCCLLMAMVKRKDSRG

SEQ ID NO: 14957 - protein, 862 aa, synthetic construct
MALPVTALLLPLALLLHAARPEVQLVESGGGLVQPGGSLRLSCAASGFSFSDFWMSWVRQAPGKGLEWVATISQAGSEKDYVDSVKGRFTISRDNAKKSLYLQMNSLRAEDTAVYYCASGVYSFDYRGQGTLVTVSSGTGGGGSGGGGSGGGGSEFDDIQMTQSSSSFSVSLGDRVTITCMASEDIYIRLAWYQQKPGNAPRLLISAATSLETGVPSRFSGSGSGKDYTLSITSLQTEDVGTYYCQQYWSSPWTFGGGTKLEINLEIQNPDPAVYQLRDSKSSDKSVCLFTDFDSQTNVSQSKDSDVYITDKCVLDMRSMDFKSNSAVAWSNKSDFACANAFNNSIIPEDTFFPSPESSDSTDHVKPKETENTKQPSKSCHKPKAIVHTEKVNMMSLTVLGLRMLFAKTVAVNFLLTAKLFFLLTARAKRSGSGVKQTLNFDLLKLAGDVESNPGPTSMDWIWRILFLVGAATGAHSFEDVQLQESGPGLVKPSQSLSLTCTVTGYSITSDYTWNWIRQFPGNKLEWMGYITYSGSTSYNPSLKSRNSITRDTSKNQFFLQLNSVTTEDTATYYCARLGRRYTMDYWGQGTSVTVSSTREDLKNVFPPEVAVFEPSEAEISHTQKATLVCLATGFYPDHVELSWWVNGKEVHSGVCTDPQPLKEQPALNDSRYCLSSRLRVSATFWQNPRNHFRCQVQFYGLSENDEWTQDRAKPVTQIVSAEAWGRADDVIKIHWQEKKSNTILGSQEGNTMKTNDTYMKFSWLTVPEKSLDKEHRCIVRHENNKNGVDQEIIFPPIKTDVITMDPKDNCSKDANDTLLLQLTNTSAYYMYLLLLLKSVVYFAIITCCLLMAMVKRKDSRG

SEQ ID NO: 14958 - protein, 865 aa, synthetic construct
MALPVTALLLPLALLLHAARPEVQLVESGGGLVQPGGSLRLSCAASGFSFSDFWMSWVRQAPGKGLEWVATISQAGSEKDYVDSVKGRFTISRDNAKKSLYLQMNSLRAEDTAVYYCASGVYSFDYRGQGTLVTVSSGTGGGGSGGGGSGGGGSEFDDIQMTQSPSSLSASVGDRVTITCRASQSISSYLNWYQQKPGKAPKLLIYDASNLETGVPSRFSGSGSGTDFTFTISSLQPEDIATYYCQQYDNLPLTFGGGTKVDIKRLEIQNPDPAVYQLRDSKSSDKSVCLFTDFDSQTNVSQSKDSDVYITDKCVLDMRSMDFKSNSAVAWSNKSDFACANAFNNSIIPEDTFFPSPESSDSTDHVKPKETENTKQPSKSCHKPKAIVHTEKVNMMSLTVLGLRMLFAKTVAVNFLLTAKLFFLLTARAKRSGSGVKQTLNFDLLKLAGDVESNPGPTSMDWIWRILFLVGAATGAHSFEQVQLVESGGGVVQPGRSLRLSCAASGFTFSSYAMHWVRQAPGKGLEWVAVISYDGSNKYYADSVKGRFTISRDNSKNTLYLQMNSLRAEDTAVYYCARAHNSSSWSFDYWGQGTLVTVSSTREDLKNVFPPEVAVFEPSEAEISHTQKATLVCLATGFYPDHVELSWWVNGKEVHSGVCTDPQPLKEQPALNDSRYCLSSRLRVSATFWQNPRNHFRCQVQFYGLSENDEWTQDRAKPVTQIVSAEAWGRADDVIKIHWQEKKSNTILGSQEGNTMKTNDTYMKFSWLTVPEKSLDKEHRCIVRHENNKNGVDQEIIFPPIKTDVITMDPKDNCSKDANDTLLLQLTNTSAYYMYLLLLLKSVVYFAIITCCLLMAMVKRKDSRG

SEQ ID NO: 14959 - protein, 874 aa, synthetic construct
MALPVTALLLPLALLLHAARPEVQLVESGGGLVQPGGSLRLSCAASGFSFSDFWMSWVRQAPGKGLEWVATISQAGSEKDYVDSVKGRFTISRDNAKKSLYLQMNSLRAEDTAVYYCASGVYSFDYRGQGTLVTVSSGTGGGGSGGGGSGGGGSEFDDVVMTQSPLSLPVSLGDQASISCRSSQRLVHSNGNTYLHWYLQKPGQSPKLLIYRVSNRFPGVPDRFSGSGSGTDFTLKISRVEAEDLGIYFCSQSTHVPYTFGGGTKLEIKRLEIQNPDPAVYQLRDSKSSDKSVCLFTDFDSQTNVSQSKDSDVYITDKCVLDMRSMDFKSNSAVAWSNKSDFACANAFNNSIIPEDTFFPSPESSDSTDHVKPKETENTKQPSKSCHKPKAIVHTEKVNMMSLTVLGLRMLFAKTVAVNFLLTAKLFFLLTARAKRSGSGVKQTLNFDLLKLAGDVESNPGPTSMDWIWRILFLVGAATGAHSFEEVRLQQSGPDLIKPGASVKMSCKASGYTFTGYVMHWVKQRPGQGLEWIGFINPYNDDIQSNERFRGKATLTSDKSSTTAYMELSSLTSEDSAVYYCARGAGYNFDGAYRFFDFWGQGTTLTVSSTREDLKNVFPPEVAVFEPSEAEISHTQKATLVCLATGFYPDHVELSWWVNGKEVHSGVCTDPQPLKEQPALNDSRYCLSSRLRVSATFWQNPRNHFRCQVQFYGLSENDEWTQDRAKPVTQIVSAEAWGRADDVIKIHWQEKKSNTILGSQEGNTMKTNDTYMKFSWLTVPEKSLDKEHRCIVRHENNKNGVDQEIIFPPIKTDVITMDPKDNCSKDANDTLLLQLTNTSAYYMYLLLLLKSVVYFAIITCCLLMAMVKRKDSRG

SEQ ID NO: 14960 - protein, 865 aa, synthetic construct
MALPVTALLLPLALLLHAARPEVQLVESGGGLVQPGGSLRLSCAASGFSFSDFWMSWVRQAPGKGLEWVATISQAGSEKDYVDSVKGRFTISRDNAKKSLYLQMNSLRAEDTAVYYCASGVYSFDYRGQGTLVTVSSGTGGGGSGGGGSGGGGSEFDSYELTQPPSVSVSPGQTATISCSGDQLGGKYGHWYQKKPGQSPVLVLYQDRKRPAGIPERFSGSSSGNTITLTISGTQAVDEADYYCQAWDTNLGGVFGGGTKVTVLGQLEIQNPDPAVYQLRDSKSSDKSVCLFTDFDSQTNVSQSKDSDVYITDKCVLDMRSMDFKSNSAVAWSNKSDFACANAFNNSIIPEDTFFPSPESSDSTDHVKPKETENTKQPSKSCHKPKAIVHTEKVNMMSLTVLGLRMLFAKTVAVNFLLTAKLFFLLTARAKRSGSGVKQTLNFDLLKLAGDVESNPGPTSMDWIWRILFLVGAATGAHSFEQVQLVESGAEVKKPGASVKVSCKASGYTFTGYYMHWVRQAPGQGLEWMGRINPNSGGTNYAQKFQGRVTMTRDTSISTAYMELSRLRSDDTAVYYCASPRGRGSAFDIWGQGTLVTVSSTREDLKNVFPPEVAVFEPSEAEISHTQKATLVCLATGFYPDHVELSWWVNGKEVHSGVCTDPQPLKEQPALNDSRYCLSSRLRVSATFWQNPRNHFRCQVQFYGLSENDEWTQDRAKPVTQIVSAEAWGRADDVIKIHWQEKKSNTILGSQEGNTMKTNDTYMKFSWLTVPEKSLDKEHRCIVRHENNKNGVDQEIIFPPIKTDVITMDPKDNCSKDANDTLLLQLTNTSAYYMYLLLLLKSVVYFAIITCCLLMAMVKRKDSRG

SEQ ID NO: 14961 - protein, 868 aa, synthetic construct
MALPVTALLLPLALLLHAARPEVQLVESGGGLVQPGGSLRLSCAASGFSFSDFWMSWVRQAPGKGLEWVATISQAGSEKDYVDSVKGRFTISRDNAKKSLYLQMNSLRAEDTAVYYCASGVYSFDYRGQGTLVTVSSGTGGGGSGGGGSGGGGSEFDNFMLTQPHSVSESPGKTVTISCTRSSGSIASKYVQWYQQRPGSSPTTVIYEDNQRPSGVPDRFSGSIDTSSNSASLTISGLRTEDEADYYCHSYDSNNHSVFGGGTKVTVLGQLEIQNPDPAVYQLRDSKSSDKSVCLFTDFDSQTNVSQSKDSDVYITDKCVLDMRSMDFKSNSAVAWSNKSDFACANAFNNSIIPEDTFFPSPESSDSTDHVKPKETENTKQPSKSCHKPKAIVHTEKVNMMSLTVLGLRMLFAKTVAVNFLLTAKLFFLLTARAKRSGSGVKQTLNFDLLKLAGDVESNPGPTSMDWIWRILFLVGAATGAHSFEEVQLVESGGGVVQPGGSLRLSCAASGFTFSSYAMSWVRQAPGKGLEWVSAISGSGGSTYYADSVKGRFSISRDNSKNTLYLQMNSLRAEDTAVYYCARTRSSGAFDIWGQGTLVTVSSTREDLKNVFPPEVAVFEPSEAEISHTQKATLVCLATGFYPDHVELSWWVNGKEVHSGVCTDPQPLKEQPALNDSRYCLSSRLRVSATFWQNPRNHFRCQVQFYGLSENDEWTQDRAKPVTQIVSAEAWGRADDVIKIHWQEKKSNTILGSQEGNTMKTNDTYMKFSWLTVPEKSLDKEHRCIVRHENNKNGVDQEIIFPPIKTDVITMDPKDNCSKDANDTLLLQLTNTSAYYMYLLLLLKSVVYFAIITCCLLMAMVKRKDSRG

SEQ ID NO: 14962 - protein, 863 aa, synthetic construct
MALPVTALLLPLALLLHAARPEVQLVESGGGLVQPGGSLRLSCAASGFSFSDFWMSWVRQAPGKGLEWVATISQAGSEKDYVDSVKGRFTISRDNAKKSLYLQMNSLRAEDTAVYYCASGVYSFDYRGQGTLVTVSSGTGGGGSGGGGSGGGGSEFDIQMNQSPSSLSASLGDTITITCHASQNINVWLSWYQQKPGNIPKLLIYKASNLHTGVPSRFSGSGSGTGFTITISSLQPEDIATYYCQQGQSYPWTFGGGTKLEIKRLEIQNPDPAVYQLRDSKSSDKSVCLFTDFDSQTNVSQSKDSDVYITDKCVLDMRSMDFKSNSAVAWSNKSDFACANAFNNSIIPEDTFFPSPESSDSTDHVKPKETENTKQPSKSCHKPKAIVHTEKVNMMSLTVLGLRMLFAKTVAVNFLLTAKLFFLLTARAKRSGSGVKQTLNFDLLKLAGDVESNPGPTSMDWIWRILFLVGAATGAHSFEEVQLQQSGPELVKPGASVKISCKASGYSFTGYFMNWVKQSHGKSLEYIGRFNPYNGETLYNQKFKGKATLTVDKSSSTVHMELLSVTSEDSAVYYCGRSGNDDAMDYWGQGTSVTVSSATREDLKNVFPPEVAVFEPSEAEISHTQKATLVCLATGFYPDHVELSWWVNGKEVHSGVCTDPQPLKEQPALNDSRYCLSSRLRVSATFWQNPRNHFRCQVQFYGLSENDEWTQDRAKPVTQIVSAEAWGRADDVIKIHWQEKKSNTILGSQEGNTMKTNDTYMKFSWLTVPEKSLDKEHRCIVRHENNKNGVDQEIIFPPIKTDVITMDPKDNCSKDANDTLLLQLTNTSAYYMYLLLLLKSVVYFAIITCCLLMAMVKRKDSRG

SEQ ID NO: 14963 - protein, 864 aa, synthetic construct
MALPVTALLLPLALLLHAARPEVQLVESGGGLVQPGGSLRLSCAASGFSFSDFWMSWVRQAPGKGLEWVATISQAGSEKDYVDSVKGRFTISRDNAKKSLYLQMNSLRAEDTAVYYCASGVYSFDYRGQGTLVTVSSGTGGGGSGGGGSGGGGSEFEIVLTQSPATLSLSPGERATLSCRASQSVRSYLAWYQQKPGQAPRLLIYDASNRATGIPARFSGSGSGTDFTLTISSLEPEDFAVYYCQQRSNWPPTFGQGTKVEIKLEIQNPDPAVYQLRDSKSSDKSVCLFTDFDSQTNVSQSKDSDVYITDKCVLDMRSMDFKSNSAVAWSNKSDFACANAFNNSIIPEDTFFPSPESSDSTDHVKPKETENTKQPSKSCHKPKAIVHTEKVNMMSLTVLGLRMLFAKTVAVNFLLTAKLFFLLTARAKRSGSGVKQTLNFDLLKLAGDVESNPGPTSMDWIWRILFLVGAATGAHSFEQLQVQESGPGLVKPSETLSLTCTVSGGSISNSYFSWGWIRQPPGKGLEWIGSFYYGEKTYYNPSLKSRATISIDTSKSQFSLKLSSVTAADTAVYYCPRGPTMIRGVIDSWGQGTLVTVSSTREDLKNVFPPEVAVFEPSEAEISHTQKATLVCLATGFYPDHVELSWWVNGKEVHSGVCTDPQPLKEQPALNDSRYCLSSRLRVSATFWQNPRNHFRCQVQFYGLSENDEWTQDRAKPVTQIVSAEAWGRADDVIKIHWQEKKSNTILGSQEGNTMKTNDTYMKFSWLTVPEKSLDKEHRCIVRHENNKNGVDQEIIFPPIKTDVITMDPKDNCSKDANDTLLLQLTNTSAYYMYLLLLLKSVVYFAIITCCLLMAMVKRKDSRG

SEQ ID NO: 14964 - protein, 873 aa, synthetic construct
MALPVTALLLPLALLLHAARPEVQLVESGGGLVQPGGSLRLSCAASGFSFSDFWMSWVRQAPGKGLEWVATISQAGSEKDYVDSVKGRFTISRDNAKKSLYLQMNSLRAEDTAVYYCASGVYSFDYRGQGTLVTVSSGTGGGGSGGGGSGGGGSEFDIVMTQTPLSLPVTPGEPASISCRSSRSLLDSDDGNTYLDWYLQKPGQSPQLLIYTLSYRASGVPDRFSGSGSGTDFTLKISRVEAEDVGVYYCMQRVEFPITFGQGTRLEIKRLEIQNPDPAVYQLRDSKSSDKSVCLFTDFDSQTNVSQSKDSDVYITDKCVLDMRSMDFKSNSAVAWSNKSDFACANAFNNSIIPEDTFFPSPESSDSTDHVKPKETENTKQPSKSCHKPKAIVHTEKVNMMSLTVLGLRMLFAKTVAVNFLLTAKLFFLLTARAKRSGSGVKQTLNFDLLKLAGDVESNPGPTSMDWIWRILFLVGAATGAHSFEQVQLVESGGGVVQPGRSLRLSCAASGFIFSRYGMHWVRQAPGKGLKWVAVIWYDGSNKLYADSVKGRFTISRDNSKNTLYLQMNSLRAEDTAVYYCARDYYDNSRHHWGFDYWGQGTLVTVSSTREDLKNVFPPEVAVFEPSEAEISHTQKATLVCLATGFYPDHVELSWWVNGKEVHSGVCTDPQPLKEQPALNDSRYCLSSRLRVSATFWQNPRNHFRCQVQFYGLSENDEWTQDRAKPVTQIVSAEAWGRADDVIKIHWQEKKSNTILGSQEGNTMKTNDTYMKFSWLTVPEKSLDKEHRCIVRHENNKNGVDQEIIFPPIKTDVITMDPKDNCSKDANDTLLLQLTNTSAYYMYLLLLLKSVVYFAIITCCLLMAMVKRKDSRG

SEQ ID NO: 14965 - protein, 863 aa, synthetic construct
MALPVTALLLPLALLLHAARPEVQLVESGGGLVQPGGSLRLSCAASGFSFSDFWMSWVRQAPGKGLEWVATISQAGSEKDYVDSVKGRFTISRDNAKKSLYLQMNSLRAEDTAVYYCASGVYSFDYRGQGTLVTVSSGTGGGGSGGGGSGGGGSEFEIQMTQSPSSMSASLGDTITITCQATQDIFKNLNWYQQKPGKPPSLLIYYATELAEGVPSRFSGSGSGSDYSLTISNLESEDFAAYYCLQFFEFPFTFGSGTKLEMKLEIQNPDPAVYQLRDSKSSDKSVCLFTDFDSQTNVSQSKDSDVYITDKCVLDMRSMDFKSNSAVAWSNKSDFACANAFNNSIIPEDTFFPSPESSDSTDHVKPKETENTKQPSKSCHKPKAIVHTEKVNMMSLTVLGLRMLFAKTVAVNFLLTAKLFFLLTARAKRSGSGVKQTLNFDLLKLAGDVESNPGPTSMDWIWRILFLVGAATGAHSFEQVQLQQSGAELVRPGTSVKVSCKASGYVFTNYWIEWIKQRPGQGLEWIGVMNPGSGETTYNEKFKGKATLTADKSSSTAYMQLSSLTSVDSAVYFCARDHDRDYYAMDYWGQGTSVTVSSTREDLKNVFPPEVAVFEPSEAEISHTQKATLVCLATGFYPDHVELSWWVNGKEVHSGVCTDPQPLKEQPALNDSRYCLSSRLRVSATFWQNPRNHFRCQVQFYGLSENDEWTQDRAKPVTQIVSAEAWGRADDVIKIHWQEKKSNTILGSQEGNTMKTNDTYMKFSWLTVPEKSLDKEHRCIVRHENNKNGVDQEIIFPPIKTDVITMDPKDNCSKDANDTLLLQLTNTSAYYMYLLLLLKSVVYFAIITCCLLMAMVKRKDSRG

SEQ ID NO: 14966 - protein, 860 aa, synthetic construct
MALPVTALLLPLALLLHAARPEVQLVESGGGLVQPGGSLRLSCAASGFSFSDFWMSWVRQAPGKGLEWVATISQAGSEKDYVDSVKGRFTISRDNAKKSLYLQMNSLRAEDTAVYYCASGVYSFDYRGQGTLVTVSSGTGGGGSGGGGSGGGGSEFDILLTQSPAILSVSPGERVSFSCRASQNIGTSIHWYQQRTNGSPRLLIKYASESVSGIPSRFSGSGSGTDFTLSINSVESEDIADYYCQHTNSWPTTFGGGTKLEIKRLEIQNPDPAVYQLRDSKSSDKSVCLFTDFDSQTNVSQSKDSDVYITDKCVLDMRSMDFKSNSAVAWSNKSDFACANAFNNSIIPEDTFFPSPESSDSTDHVKPKETENTKQPSKSCHKPKAIVHTEKVNMMSLTVLGLRMLFAKTVAVNFLLTAKLFFLLTARAKRSGSGVKQTLNFDLLKLAGDVESNPGPTSMDWIWRILFLVGAATGAHSFEQVQLQQSDAELVKPGASVKISCKASGYTFTDHAIHWVKQKPEQGLEWIGYFSPGNGDIKYNEKFKGKATLTADKSSSTAYMQLNSLTSEDSAVYFCKRSYGNYDYWGQGTTLTVSSTREDLKNVFPPEVAVFEPSEAEISHTQKATLVCLATGFYPDHVELSWWVNGKEVHSGVCTDPQPLKEQPALNDSRYCLSSRLRVSATFWQNPRNHFRCQVQFYGLSENDEWTQDRAKPVTQIVSAEAWGRADDVIKIHWQEKKSNTILGSQEGNTMKTNDTYMKFSWLTVPEKSLDKEHRCIVRHENNKNGVDQEIIFPPIKTDVITMDPKDNCSKDANDTLLLQLTNTSAYYMYLLLLLKSVVYFAIITCCLLMAMVKRKDSRG

SEQ ID NO: 14967 - protein, 865 aa, synthetic construct
MALPVTALLLPLALLLHAARPEVQLVESGGGLVQPGGSLRLSCAASGFSFSDFWMSWVRQAPGKGLEWVATISQAGSEKDYVDSVKGRFTISRDNAKKSLYLQMNSLRAEDTAVYYCASGVYSFDYRGQGTLVTVSSGTGGGGSGGGGSGGGGSEFDIVMTQSPDSLAVSLGERATINCKSSQSLLNSGDQKNYLTWYQQKPGQPPKLLIYWASTRESGVPDRFSGSGSGTDFTLTISSLQAEDVAVYYCQNDYSYPLTFGQGTKVEIKLEIQNPDPAVYQLRDSKSSDKSVCLFTDFDSQTNVSQSKDSDVYITDKCVLDMRSMDFKSNSAVAWSNKSDFACANAFNNSIIPEDTFFPSPESSDSTDHVKPKETENTKQPSKSCHKPKAIVHTEKVNMMSLTVLGLRMLFAKTVAVNFLLTAKLFFLLTARAKRSGSGVKQTLNFDLLKLAGDVESNPGPTSMDWIWRILFLVGAATGAHSFEQVQLVQSGAEVKKTGSSVKVSCKASGYTFTDHAIHVWRQAPGQALEWMGHFSPGNTDIKYNDKFKGRVTLTVDRSMSTAYMELSSLRSEDTAMYYCKTSTFFFDYWGQGTMVTVSSTREDLKNVFPPEVAVFEPSEAEISHTQKATLVCLATGFYPDHVELSWWVNGKEVHSGVCTDPQPLKEQPALNDSRYCLSSRLRVSATFWQNPRNHFRCQVQFYGLSENDEWTQDRAKPVTQIVSAEAWGRADDVIKIHWQEKKSNTILGSQEGNTMKTNDTYMKFSWLTVPEKSLDKEHRCIVRHENNKNGVDQEIIFPPIKTDVITMDPKDNCSKDANDTLLLQLTNTSAYYMYLLLLLKSVVYFAIITCCLLMAMVKRKDSRG

SEQ ID NO: 14968 - protein, 864 aa, synthetic construct
MALPVTALLLPLALLLHAARPEVQLVESGGGLVQPGGSLRLSCAASGFSFSDFWMSWVRQAPGKGLEWVATISQAGSEKDYVDSVKGRFTISRDNAKKSLYLQMNSLRAEDTAVYYCASGVYSFDYRGQGTLVTVSSGTGGGGSGGGGSGGGGSEFDIQMTQSPSSLSASVGDRVTITCKASQDVSIAVAWYQQKPGKAPKVLIYSASYRYTGVPDRFSGSGSGTDFTFTISSLQPEDIAVYYCQQHYITPLTFGGGTKVEIKLEIQNPDPAVYQLRDSKSSDKSVCLFTDFDSQTNVSQSKDSDVYITDKCVLDMRSMDFKSNSAVAWSNKSDFACANAFNNSIIPEDTFFPSPESSDSTDHVKPKETENTKQPSKSCHKPKAIVHTEKVNMMSLTVLGLRMLFAKTVAVNFLLTAKLFFLLTARAKRSGSGVKQTLNFDLLKLAGDVESNPGPTSMDWIWRILFLVGAATGAHSFEQIQLVQSGHEVKKPGASVKVSCKASGYTFTNYGMNWVRQAPGQGLEWMGWINTKTGEPTYAEEFKGRFVFSLETSASTAYLQISSLKAEDTAMYFCGRGGYGSSYWYFDVWGQGTTVTVSSTREDLKNVFPPEVAVFEPSEAEISHTQKATLVCLATGFYPDHVELSWWVNGKEVHSGVCTDPQPLKEQPALNDSRYCLSSRLRVSATFWQNPRNHFRCQVQFYGLSENDEWTQDRAKPVTQIVSAEAWGRADDVIKIHWQEKKSNTILGSQEGNTMKTNDTYMKFSWLTVPEKSLDKEHRCIVRHENNKNGVDQEIIFPPIKTDVITMDPKDNCSKDANDTLLLQLTNTSAYYMYLLLLLKSVVYFAIITCCLLMAMVKRKDSRG

SEQ ID NO: 14969 - protein, 866 aa, synthetic construct
MALPVTALLLPLALLLHAARPEVQLVESGGGLVQPGGSLRLSCAASGFSFSDFWMSWVRQAPGKGLEWVATISQAGSEKDYVDSVKGRFTISRDNAKKSLYLQMNSLRAEDTAVYYCASGVYSFDYRGQGTLVTVSSGTGGGGSGGGGSGGGGSEFDIVMTQSPDSLAVSLGERATINCRASKSVSTSGYSYMHWYQQKPGQPPKLLIYLASNLESGVPDRFSGSGSGTDFTLTISSLQAEDVAVYYCQHSRELPYTFGQGTKLEIKLEIQNPDPAVYQLRDSKSSDKSVCLFTDFDSQTNVSQSKDSDVYITDKCVLDMRSMDFKSNSAVAWSNKSDFACANAFNNSIIPEDTFFPSPESSDSTDHVKPKETENTKQPSKSCHKPKAIVHTEKVNMMSLTVLGLRMLFAKTVAVNFLLTAKLFFLLTARAKRSGSGVKQTLNFDLLKLAGDVESNPGPTSMDWIWRILFLVGAATGAHSFEQVQLQESGPGLVKPSETLSLTCTVSGGSISSYGVHWIRQPPGKGLEWIGVIWTSGVTDYNSALMGRVTISVDTSKNQFSLKLSSVTAADTAVYYCARDGDYDRYTMDYWGQGTLVTVSSTREDLKNVFPPEVAVFEPSEAEISHTQKATLVCLATGFYPDHVELSWWVNGKEVHSGVCTDPQPLKEQPALNDSRYCLSSRLRVSATFWQNPRNHFRCQVQFYGLSENDEWTQDRAKPVTQIVSAEAWGRADDVIKIHWQEKKSNTILGSQEGNTMKTNDTYMKFSWLTVPEKSLDKEHRCIVRHENNKNGVDQEIIFPPIKTDVITMDPKDNCSKDANDTLLLQLTNTSAYYMYLLLLLKSVVYFAIITCCLLMAMVKRKDSRG

SEQ ID NO: 14970 - protein, 866 aa, synthetic construct
MALPVTALLLPLALLLHAARPEVQLVESGGGLVQPGGSLRLSCAASGFSFSDFWMSWVRQAPGKGLEWVATISQAGSEKDYVDSVKGRFTISRDNAKKSLYLQMNSLRAEDTAVYYCASGVYSFDYRGQGTLVTVSSGTGGGGSGGGGSGGGGSEFDIQMTQSPSSLSASVGDRVTITCRASQSIGTSLHWYQQKPGKAPKLLIKFASRLQSGVPSRFSGSGSGTDFTLTISSLQPEDFATYYCQQSPGFPPTFGQGTKLEIKRLEIQNPDPAVYQLRDSKSSDKSVCLFTDFDSQTNVSQSKDSDVYITDKCVLDMRSMDFKSNSAVAWSNKSDFACANAFNNSIIPEDTFFPSPESSDSTDHVKPKETENTKQPSKSCHKPKAIVHTEKVNMMSLTVLGLRMLFAKTVAVNFLLTAKLFFLLTARAKRSGSGVKQTLNFDLLKLAGDVESNPGPTSMDWIWRILFLVGAATGAHSFEQVQLVESGGGLVKPGGSLRLSCAASGFSITTSGYYWTWIRQFPGKGLEWMGYIGYNSKTYYNPALKSRITISRDNAKNSLYLQMNSLRAEDTAVYYCARSLYGGYKDAFDSWGQGTLVTVSSTREDLKNVFPPEVAVFEPSEAEISHTQKATLVCLATGFYPDHVELSWWVNGKEVHSGVCTDPQPLKEQPALNDSRYCLSSRLRVSATFWQNPRNHFRCQVQFYGLSENDEWTQDRAKPVTQIVSAEAWGRADDVIKIHWQEKKSNTILGSQEGNTMKTNDTYMKFSWLTVPEKSLDKEHRCIVRHENNKNGVDQEIIFPPIKTDVITMDPKDNCSKDANDTLLLQLTNTSAYYMYLLLLLKSVVYFAIITCCLLMAMVKRKDSRG

SEQ ID NO: 14971 - protein, 871 aa, synthetic construct
MALPVTALLLPLALLLHAARPEVQLVESGGGLVQPGGSLRLSCAASGFSFSDFWMSWVRQAPGKGLEWVATISQAGSEKDYVDSVKGRFTISRDNAKKSLYLQMNSLRAEDTAVYYCASGVYSFDYRGQGTLVTVSSGTGGGGSGGGGSGGGGSEFDEIVLTQSPLSLPVTPGEPASISCRSSQSLLHSIGYNYLDWYLQKPGQSPQLLIYLGSNRASGVPDRFSGSGSGTDFTLKISRVEAEDVGVYYCMQALQTPLTFGGGTKVEIKRLEIQNPDPAVYQLRDSKSSDKSVCLFTDFDSQTNVSQSKDSDVYITDKCVLDMRSMDFKSNSAVAWSNKSDFACANAFNNSIIPEDTFFPSPESSDSTDHVKPKETENTKQPSKSCHKPKAIVHTEKVNMMSLTVLGLRMLFAKTVAVNFLLTAKLFFLLTARAKRSGSGVKQTLNFDLLKLAGDVESNPGPTSMDWIWRILFLVGAATGAHSFEEVQLVESGGGVVQPGRSLRLSCAASGFTFRSYGMHWVRQAPGKGLEWVAVISYDGSNKYYTDSVNGRFTISRDNSKNTLYLQMNSLRAEDTAVYYCARGGGYYETSGPDYWGQGTLVTVSSTREDLKNVFPPEVAVFEPSEAEISHTQKATLVCLATGFYPDHVELSWWVNGKEVHSGVCTDPQPLKEQPALNDSRYCLSSRLRVSATFWQNPRNHFRCQVQFYGLSENDEWTQDRAKPVTQIVSAEAWGRADDVIKIHWQEKKSNTILGSQEGNTMKTNDTYMKFSWLTVPEKSLDKEHRCIVRHENNKNGVDQEIIFPPIKTDVITMDPKDNCSKDANDTLLLQLTNTSAYYMYLLLLLKSVVYFAIITCCLLMAMVKRKDSRG

SEQ ID NO: 14972 - protein, 869 aa, synthetic construct
MALPVTALLLPLALLLHAARPEVQLVESGGGLVQPGGSLRLSCAASGFSFSDFWMSWVRQAPGKGLEWVATISQAGSEKDYVDSVKGRFTISRDNAKKSLYLQMNSLRAEDTAVYYCASGVYSFDYRGQGTLVTVSSGTGGGGSGGGGSGGGGSEFDDVVMTQSPLSLPVTPGEPASISCRSSQSLLHSIGYNYLHWFLQKPGQSPQLLIYLGSNRASGVPDRFSGSGSGTDFTLKISRVEAEDVGVYYCMQALQTPPTFGQGTRLEIKRLEIQNPDPAVYQLRDSKSSDKSVCLFTDFDSQTNVSQSKDSDVYITDKCVLDMRSMDFKSNSAVAWSNKSDFACANAFNNSIIPEDTFFPSPESSDSTDHVKPKETENTKQPSKSCHKPKAIVHTEKVNMMSLTVLGLRMLFAKTVAVNFLLTAKLFFLLTARAKRSGSGVKQTLNFDLLKLAGDVESNPGPTSMDWIWRILFLVGAATGAHSFEQLQLQESGPGLVKPSGTLSLTCAVSGGSISSSNWWSWVRQPPGKGLEWIGEIYHSGSTNYNPSLKSRVTISVDKSKNQFSLKLSSVTAADTAVYYCVGSPYGDYVLDYWGQGTLVTVSSTREDLKNVFPPEVAVFEPSEAEISHTQKATLVCLATGFYPDHVELSWWVNGKEVHSGVCTDPQPLKEQPALNDSRYCLSSRLRVSATFWQNPRNHFRCQVQFYGLSENDEWTQDRAKPVTQIVSAEAWGRADDVIKIHWQEKKSNTILGSQEGNTMKTNDTYMKFSWLTVPEKSLDKEHRCIVRHENNKNGVDQEIIFPPIKTDVITMDPKDNCSKDANDTLLLQLTNTSAYYMYLLLLLKSVVYFAIITCCLLMAMVKRKDSRG

SEQ ID NO: 14973 - protein, 867 aa, synthetic construct
MALPVTALLLPLALLLHAARPEVQLVESGGGLVQPGGSLRLSCAASGFSFSDFWMSWVRQAPGKGLEWVATISQAGSEKDYVDSVKGRFTISRDNAKKSLYLQMNSLRAEDTAVYYCASGVYSFDYRGQGTLVTVSSGTGGGGSGGGGSGGGGSEFDEIVLTQSPGTLSLSLGERATLSCRASQSISSSFLAWYQQKPGQAPKLLIYAASTRATGIPDRFSGSGSGTDFTLTISRLEPEDFAVYYCQQYGRSLSFGGGTKVEVKLEIQNPDPAVYQLRDSKSSDKSVCLFTDFDSQTNVSQSKDSDVYITDKCVLDMRSMDFKSNSAVAWSNKSDFACANAFNNSIIPEDTFFPSPESSDSTDHVKPKETENTKQPSKSCHKPKAIVHTEKVNMMSLTVLGLRMLFAKTVAVNFLLTAKLFFLLTARAKRSGSGVKQTLNFDLLKLAGDVESNPGPTSMDWIWRILFLVGAATGAHSFEQVQLQQSGPGLVKPSQTLSLTCAISGDSVSGNSATWNWIRQSPSRGLEWLGRTYYRSKWNHDYAESVKSRITINPDTSKNQFSLQLNSVTPEDTAVYYCARGDSSSWYAFDYWGQGTLVTVSSTREDLKNVFPPEVAVFEPSEAEISHTQKATLVCLATGFYPDHVELSWWVNGKEVHSGVCTDPQPLKEQPALNDSRYCLSSRLRVSATFWQNPRNHFRCQVQFYGLSENDEWTQDRAKPVTQIVSAEAWGRADDVIKIHWQEKKSNTILGSQEGNTMKTNDTYMKFSWLTVPEKSLDKEHRCIVRHENNKNGVDQEIIFPPIKTDVITMDPKDNCSKDANDTLLLQLTNTSAYYMYLLLLLKSVVYFAIITCCLLMAMVKRKDSRG

SEQ ID NO: 14974 - protein, 866 aa, synthetic construct
MALPVTALLLPLALLLHAARPEVQLVESGGGLVQPGGSLRLSCAASGFSFSDFWMSWVRQAPGKGLEWVATISQAGSEKDYVDSVKGRFTISRDNAKKSLYLQMNSLRAEDTAVYYCASGVYSFDYRGQGTLVTVSSGTGGGGSGGGGSGGGGSEFDQSVVTQPPSVSVAPGKTARITCGRNNIGSKSVHWYQQKPGQAPVLVVYDDSDRPSGIPERFSGSNSGNTATLTISRVEAGDEADYYCQVWDSSSDHVVFGGGTKLTVLGLEIQNPDPAVYQLRDSKSSDKSVCLFTDFDSQTNVSQSKDSDVYITDKCVLDMRSMDFKSNSAVAWSNKSDFACANAFNNSIIPEDTFFPSPESSDSTDHVKPKETENTKQPSKSCHKPKAIVHTEKVNMMSLTVLGLRMLFAKTVAVNFLLTAKLFFLLTARAKRSGSGVKQTLNFDLLKLAGDVESNPGPTSMDWIWRILFLVGAATGAHSFEVQLVQSGGGVMRPGGSLRLSCAASGFTFDDYGMSWVRQAPGKGLEWVSGINWNGGSTGYADSVRGRFTISRDNAKNSLYLQMNSLRAEDTALYYCARERGYGYHDPHDYWGQGTLVTVSSTREDLKNVFPPEVAVFEPSEAEISHTQKATLVCLATGFYPDHVELSWWVNGKEVHSGVCTDPQPLKEQPALNDSRYCLSSRLRVSATFWQNPRNHFRCQVQFYGLSENDEWTQDRAKPVTQIVSAEAWGRADDVIKIHWQEKKSNTILGSQEGNTMKTNDTYMKFSWLTVPEKSLDKEHRCIVRHENNKNGVDQEIIFPPIKTDVITMDPKDNCSKDANDTLLLQLTNTSAYYMYLLLLLKSVVYFAIITCCLLMAMVKRKDSRG

SEQ ID NO: 14975 - protein, 879 aa, synthetic construct
MALPVTALLLPLALLLHAARPEVQLVESGGGLVQPGGSLRLSCAASGFSFSDFWMSWVRQAPGKGLEWVATISQAGSEKDYVDSVKGRFTISRDNAKKSLYLQMNSLRAEDTAVYYCASGVYSFDYRGQGTLVTVSSGTGGGGSGGGGSGGGGSEFEQKLISEEDLEFQAVVTQPPSASGTPGQRVTISCSGSSSNIGSNTVNWYQQVPGTAPKLLIYSNNQRPSGVPDRFSGSKSGTSASLAISGLQSEDEADYYCAAWDDSLNGWVFGGGTKLTVLLEIQNPDPAVYQLRDSKSSDKSVCLFTDFDSQTNVSQSKDSDVYITDKCVLDMRSMDFKSNSAVAWSNKSDFACANAFNNSIIPEDTFFPSPESSDSTDHVKPKETENTKQPSKSCHKPKAIVHTEKVNMMSLTVLGLRMLFAKTVAVNFLLTAKLFFLLTARAKRSGSGVKQTLNFDLLKLAGDVESNPGPTSMDWIWRILFLVGAATGAHSFEQMQLVQSGAEVKEPGESLRISCKGSGYSFTNFWISWVRQMPGKGLEWMGRVDPGYSYSTYSPSFQGHVTISADKSTSTAYLQWNSLKASDTAMYYCARVQYSGYYDWFDPWGQGTLVTVSSTREDLKNVFPPEVAVFEPSEAEISHTQKATLVCLATGFYPDHVELSWWVNGKEVHSGVCTDPQPLKEQPALNDSRYCLSSRLRVSATFWQNPRNHFRCQVQFYGLSENDEWTQDRAKPVTQIVSAEAWGRADDVIKIHWQEKKSNTILGSQEGNTMKTNDTYMKFSWLTVPEKSLDKEHRCIVRHENNKNGVDQEIIFPPIKTDVITMDPKDNCSKDANDTLLLQLTNTSAYYMYLLLLLKSVVYFAIITCCLLMAMVKRKDSRG

SEQ ID NO: 14976 - protein, 873 aa, synthetic construct
MALPVTALLLPLALLLHAARPEVQLVESGGGLVQPGGSLRLSCAASGFSFSDFWMSWVRQAPGKGLEWVATISQAGSEKDYVDSVKGRFTISRDNAKKSLYLQMNSLRAEDTAVYYCASGVYSFDYRGQGTLVTVSSGTGGGGSGGGGSGGGGSEFEQKLISEEDLEFDIQMTQSPSTLSASVGDRVTITCRASQNINKWLAWYQQRPGKAPQLLIYKASSLESGVPSRFSGSGSGTEYTLTISSLQPDDFATYYCQQYNSYATFGQGTKVEIKRLEIQNPDPAVYQLRDSKSSDKSVCLFTDFDSQTNVSQSKDSDVYITDKCVLDMRSMDFKSNSAVAWSNKSDFACANAFNNSIIPEDTFFPSPESSDSTDHVKPKETENTKQPSKSCHKPKAIVHTEKVNMMSLTVLGLRMLFAKTVAVNFLLTAKLFFLLTARAKRSGSGVKQTLNFDLLKLAGDVESNPGPTSMDWIWRILFLVGAATGAHSFEQVQLVQSGAEVKKPGESLKISCKGSGYNFSNKWIGWVRQLPGRGLEWIAIIYPGYSDITYSPSFQGRVTISADTSINTAYLHWHSLKASDTAMYYCVRHTALAGFDYWGLGTLVTVSSTREDLKNVFPPEVAVFEPSEAEISHTQKATLVCLATGFYPDHVELSWWVNGKEVHSGVCTDPQPLKEQPALNDSRYCLSSRLRVSATFWQNPRNHFRCQVQFYGLSENDEWTQDRAKPVTQIVSAEAWGRADDVIKIHWQEKKSNTILGSQEGNTMKTNDTYMKFSWLTVPEKSLDKEHRCIVRHENNKNGVDQEIIFPPIKTDVITMDPKDNCSKDANDTLLLQLTNTSAYYMYLLLLLKSVVYFAIITCCLLMAMVKRKDSRG

SEQ ID NO: 14977 - protein, 865 aa, synthetic construct
MALPVTALLLPLALLLHAARPEVQLVESGGGLVQPGGSLRLSCAASGFSFSDFWMSWVRQAPGKGLEWVATISQAGSEKDYVDSVKGRFTISRDNAKKSLYLQMNSLRAEDTAVYYCASGVYSFDYRGQGTLVTVSSGTGGGGSGGGGSGGGGSEFDIVLTQSPASLAVSLGQRATISCRASESVDNYGNTFMHWYQQKPGQPPKLLIYRASNLESGIPARFSGSGSRTDFTLTINPVEADDVATYYCQQSNEDPPTFGAGTKLELKLEIQNPDPAVYQLRDSKSSDKSVCLFTDFDSQTNVSQSKDSDVYITDKCVLDMRSMDFKSNSAVAWSNKSDFACANAFNNSIIPEDTFFPSPESSDSTDHVKPKETENTKQPSKSCHKPKAIVHTEKVNMMSLTVLGLRMLFAKTVAVNFLLTAKLFFLLTARAKRSGSGVKQTLNFDLLKLAGDVESNPGPTSMDWIWRILFLVGAATGAHSFEQIQLVQSGPELKKPGETVKISCKASGYIFTNYGMNWVKQAPGKSFKWMGWINTYTGESTYSADFKGRFAFSLETSASTAYLHINDLKNEDTATYFCARSGGYDPMDYWGQGTSVTVSSTREDLKNVFPPEVAVFEPSEAEISHTQKATLVCLATGFYPDHVELSWWVNGKEVHSGVCTDPQPLKEQPALNDSRYCLSSRLRVSATFWQNPRNHFRCQVQFYGLSENDEWTQDRAKPVTQIVSAEAWGRADDVIKIHWQEKKSNTILGSQEGNTMKTNDTYMKFSWLTVPEKSLDKEHRCIVRHENNKNGVDQEIIFPPIKTDVITMDPKDNCSKDANDTLLLQLTNTSAYYMYLLLLLKSVVYFAIITCCLLMAMVKRKDSRG

SEQ ID NO: 14978 - protein, 864 aa, synthetic construct
MALPVTALLLPLALLLHAARPEVQLVESGGGLVQPGGSLRLSCAASGFSFSDFWMSWVRQAPGKGLEWVATISQAGSEKDYVDSVKGRFTISRDNAKKSLYLQMNSLRAEDTAVYYCASGVYSFDYRGQGTLVTVSSGTGGGGSGGGGSGGGGSEFDEIVLTQSPGTLSLSPGERATLSCRASQSVSNTYLAWYHQRPGQAPRLLIYGASSRATGIPDRFSGSGSGTDFALTISSLEPEDFAVYYCQQYSNSWTFGQGTKVEIKRLEIQNPDPAVYQLRDSKSSDKSVCLFTDFDSQTNVSQSKDSDVYITDKCVLDMRSMDFKSNSAVAWSNKSDFACANAFNNSIIPEDTFFPSPESSDSTDHVKPKETENTKQPSKSCHKPKAIVHTEKVNMMSLTVLGLRMLFAKTVAVNFLLTAKLFFLLTARAKRSGSGVKQTLNFDLLKLAGDVESNPGPTSMDWIWRILFLVGAATGAHSFEQVQLVESGGGVVQPGRSLRLSCAASGFTFSSYDMHWVRQAPGKGLEWVAVISYDGTNEYYADSVKGRFTISRDTSKNTLYLQMNSLRAEDTAVYYCARERYFDWSFDYWGQGTLVSVSSTREDLKNVFPPEVAVFEPSEAEISHTQKATLVCLATGFYPDHVELSWWVNGKEVHSGVCTDPQPLKEQPALNDSRYCLSSRLRVSATFWQNPRNHFRCQVQFYGLSENDEWTQDRAKPVTQIVSAEAWGRADDVIKIHWQEKKSNTILGSQEGNTMKTNDTYMKFSWLTVPEKSLDKEHRCIVRHENNKNGVDQEIIFPPIKTDVITMDPKDNCSKDANDTLLLQLTNTSAYYMYLLLLLKSVVYFAIITCCLLMAMVKRKDSRG

SEQ ID NO: 14979 - protein, 863 aa, synthetic construct
MALPVTALLLPLALLLHAARPEVQLVESGGGLVQPGGSLRLSCAASGFSFSDFWMSWVRQAPGKGLEWVATISQAGSEKDYVDSVKGRFTISRDNAKKSLYLQMNSLRAEDTAVYYCASGVYSFDYRGQGTLVTVSSGTGGGGSGGGGSGGGGSEFDELTQDPAVSVALGQTVRITCQGDSLRSNYANWYQQKPGQAPVLVIYGQNNRPSGIPDRFSGSSSGNTASLTITGAQAADEADYYCDSRVSTGNHVVFGGGTKLTVLGQLEIQNPDPAVYQLRDSKSSDKSVCLFTDFDSQTNVSQSKDSDVYITDKCVLDMRSMDFKSNSAVAWSNKSDFACANAFNNSIIPEDTFFPSPESSDSTDHVKPKETENTKQPSKSCHKPKAIVHTEKVNMMSLTVLGLRMLFAKTVAVNFLLTAKLFFLLTARAKRSGSGVKQTLNFDLLKLAGDVESNPGPTSMDWIWRILFLVGAATGAHSFEEVQLVQSGAEVKKPGASVKVSCKASGYTFTSYAMHWVRQAPGQRLEWMGWINAGNGNTKYSQKFQGRVTITRDTSASTAYMELSSLRSEDTAVYYCARDISYGSFDYWGQGTLVTVSSTREDLKNVFPPEVAVFEPSEAEISHTQKATLVCLATGFYPDHVELSWWVNGKEVHSGVCTDPQPLKEQPALNDSRYCLSSRLRVSATFWQNPRNHFRCQVQFYGLSENDEWTQDRAKPVTQIVSAEAWGRADDVIKIHWQEKKSNTILGSQEGNTMKTNDTYMKFSWLTVPEKSLDKEHRCIVRHENNKNGVDQEIIFPPIKTDVITMDPKDNCSKDANDTLLLQLTNTSAYYMYLLLLLKSVVYFAIITCCLLMAMVKRKDSRG

SEQ ID NO: 14980 - protein, 865 aa, synthetic construct
MALPVTALLLPLALLLHAARPEVQLVESGGGLVQPGGSLRLSCAASGFSFSDFWMSWVRQAPGKGLEWVATISQAGSEKDYVDSVKGRFTISRDNAKKSLYLQMNSLRAEDTAVYYCASGVYSFDYRGQGTLVTVSSGTGGGGSGGGGSGGGGSEFDDIVLTQTPATLSVTPGDSVSLSCRASQSISNNLHWYQQKSHESPRLLIKNASQSISGIPSKFSGSGSGTDFTLRINSVETEDFGMYFCQQSNSWPYTFGSGTKLEIKLEIQNPDPAVYQLRDSKSSDKSVCLFTDFDSQTNVSQSKDSDVYITDKCVLDMRSMDFKSNSAVAWSNKSDFACANAFNNSIIPEDTFFPSPESSDSTDHVKPKETENTKQPSKSCHKPKAIVHTEKVNMMSLTVLGLRMLFAKTVAVNFLLTAKLFFLLTARAKRSGSGVKQTLNFDLLKLAGDVESNPGPTSMDWIWRILFLVGAATGAHSFEQVKLQQSGPELVKPGASVKISCKASGYSFTGYYMHWVKQSHGNILDWIGYIYPYNGVSSYNQKFKGKATLTVDKSSSTAYMELRSLTSEDSAVYYCARERGLYQLRAMDYWGQGTSVTVSSTREDLKNVFPPEVAVFEPSEAEISHTQKATLVCLATGFYPDHVELSWWVNGKEVHSGVCTDPQPLKEQPALNDSRYCLSSRLRVSATFWQNPRNHFRCQVQFYGLSENDEWTQDRAKPVTQIVSAEAWGRADDVIKIHWQEKKSNTILGSQEGNTMKTNDTYMKFSWLTVPEKSLDKEHRCIVRHENNKNGVDQEIIFPPIKTDVITMDPKDNCSKDANDTLLLQLTNTSAYYMYLLLLLKSVVYFAIITCCLLMAMVKRKDSRG

SEQ ID NO: 14981 - protein, 856 aa, synthetic construct
MALPVTALLLPLALLLHAARPEVQLVESGGGLVQPGGSLRLSCAASGFSFSDFWMSWVRQAPGKGLEWVATISQAGSEKDYVDSVKGRFTISRDNAKKSLYLQMNSLRAEDTAVYYCASGVYSFDYRGQGTLVTVSSGTGGGGSGGGGSGGGGSEFDDIVMTQTPAIMSASPGQKVTITCSASSSVNYMHWYQQKLGSSPKLWIYDTSKLAPGVPARFSGSGSGTSYSLTISSMEAEDAASYFCHQWSSYPYTFGSGTKLEIKLEIQNPDPAVYQLRDSKSSDKSVCLFTDFDSQTNVSQSKDSDVYITDKCVLDMRSMDFKSNSAVAWSNKSDFACANAFNNSIIPEDTFFPSPESSDSTDHVKPKETENTKQPSKSCHKPKAIVHTEKVNMMSLTVLGLRMLFAKTVAVNFLLTAKLFFLLTARAKRSGSGVKQTLNFDLLKLAGDVESNPGPTSMDWIWRILFLVGAATGAHSFEEVQLQESGPDLVKPSQSLSLTCTVTGYSITSGYGWHWIRQFPGNKLEWMGYIHYSGSTTYNPSLKSRISISRDTSKNQFFLQLNSVTTEDTATYYCARSLRYWGQGTTLTVSSTREDLKNVFPPEVAVFEPSEAEISHTQKATLVCLATGFYPDHVELSWWVNGKEVHSGVCTDPQPLKEQPALNDSRYCLSSRLRVSATFWQNPRNHFRCQVQFYGLSENDEWTQDRAKPVTQIVSAEAWGRADDVIKIHWQEKKSNTILGSQEGNTMKTNDTYMKFSWLTVPEKSLDKEHRCIVRHENNKNGVDQEIIFPPIKTDVITMDPKDNCSKDANDTLLLQLTNTSAYYMYLLLLLKSVVYFAIITCCLLMAMVKRKDSRG

SEQ ID NO: 14982 - protein, 859 aa, synthetic construct
MALPVTALLLPLALLLHAARPEVQLVESGGGLVQPGGSLRLSCAASGFSFSDFWMSWVRQAPGKGLEWVATISQAGSEKDYVDSVKGRFTISRDNAKKSLYLQMNSLRAEDTAVYYCASGVYSFDYRGQGTLVTVSSGTGGGGSGGGGSGGGGSEFDDIQMTQSPSSLSASVGDRVTITCSATSSISYMHWYQQKPGKAPKGWIYDTSKLAHGVPSRFSGSGSGTDFTLTISSLQPEDFATYYCHQRRSYPFTFGQGTKVEIKLEIQNPDPAVYQLRDSKSSDKSVCLFTDFDSQTNVSQSKDSDVYITDKCVLDMRSMDFKSNSAVAWSNKSDFACANAFNNSIIPEDTFFPSPESSDSTDHVKPKETENTKQPSKSCHKPKAIVHTEKVNMMSLTVLGLRMLFAKTVAVNFLLTAKLFFLLTARAKRSGSGVKQTLNFDLLKLAGDVESNPGPTSMDWIWRILFLVGAATGAHSFEEVQLVQSGAEVKKPGASVKVSCKASGYTFTNFWIHWVRQAPGQGLEWIGEIDPSDSYTNYNQKFKGRVTITRDTSTSTAYLELSSLRSEDTAVYYCAREITTVDYWGQGTLVTVSSTREDLKNVFPPEVAVFEPSEAEISHTQKATLVCLATGFYPDHVELSWWVNGKEVHSGVCTDPQPLKEQPALNDSRYCLSSRLRVSATFWQNPRNHFRCQVQFYGLSENDEWTQDRAKPVTQIVSAEAWGRADDVIKIHWQEKKSNTILGSQEGNTMKTNDTYMKFSWLTVPEKSLDKEHRCIVRHENNKNGVDQEIIFPPIKTDVITMDPKDNCSKDANDTLLLQLTNTSAYYMYLLLLLKSVVYFAIITCCLLMAMVKRKDSRG

SEQ ID NO: 14983 - protein, 866 aa, synthetic construct
MALPVTALLLPLALLLHAARPEVQLVESGGGLVQPGGSLRLSCAASGFSFSDFWMSWVRQAPGKGLEWVATISQAGSEKDYVDSVKGRFTISRDNAKKSLYLQMNSLRAEDTAVYYCASGVYSFDYRGQGTLVTVSSGTGGGGSGGGGSGGGGSEFDDIQMTQSPSSLSASVGDRVTITCKASQGFNKYVAWYQQKPGKAPKLLIYYTSTLQPGVPSRFSGSGSGRDYTLTISSLQPEDFATYYCLQYGNLLYAFGQGTKVEIKRLEIQNPDPAVYQLRDSKSSDKSVCLFTDFDSQTNVSQSKDSDVYITDKCVLDMRSMDFKSNSAVAWSNKSDFACANAFNNSIIPEDTFFPSPESSDSTDHVKPKETENTKQPSKSCHKPKAIVHTEKVNMMSLTVLGLRMLFAKTVAVNFLLTAKLFFLLTARAKRSGSGVKQTLNFDLLKLAGDVESNPGPTSMDWIWRILFLVGAATGAHSFEEVQLVQSGAEVKKPGASVKVSCKASGYTFTSYWIGWVRQAPGQGLEWIGDIYPGGGYTNYNEKFKGRVTITRDTSTSTAYLELSSLRSEDTAVYYCARLDGSSYRGAMDSWGQGTLVTVSSTREDLKNVFPPEVAVFEPSEAEISHTQKATLVCLATGFYPDHVELSWWVNGKEVHSGVCTDPQPLKEQPALNDSRYCLSSRLRVSATFWQNPRNHFRCQVQFYGLSENDEWTQDRAKPVTQIVSAEAWGRADDVIKIHWQEKKSNTILGSQEGNTMKTNDTYMKFSWLTVPEKSLDKEHRCIVRHENNKNGVDQEIIFPPIKTDVITMDPKDNCSKDANDTLLLQLTNTSAYYMYLLLLLKSVVYFAIITCCLLMAMVKRKDSRG

SEQ ID NO: 14984 - protein, 862 aa, synthetic construct
MALPVTALLLPLALLLHAARPEVQLVESGGGLVQPGGSLRLSCAASGFSFSDFWMSWVRQAPGKGLEWVATISQAGSEKDYVDSVKGRFTISRDNAKKSLYLQMNSLRAEDTAVYYCASGVYSFDYRGQGTLVTVSSGTGGGGSGGGGSGGGGSEFDDIQMTQSPSSLSASVGDRVTITCRASQDIRYYLNWYQQKPGKAPKLLIYVASSLQSGVPSRFSGSGSGTEFTLTVSSLQPEDFATYYCLQVYSTPRTFGQGTKVEIKLEIQNPDPAVYQLRDSKSSDKSVCLFTDFDSQTNVSQSKDSDVYITDKCVLDMRSMDFKSNSAVAWSNKSDFACANAFNNSIIPEDTFFPSPESSDSTDHVKPKETENTKQPSKSCHKPKAIVHTEKVNMMSLTVLGLRMLFAKTVAVNFLLTAKLFFLLTARAKRSGSGVKQTLNFDLLKLAGDVESNPGPTSMDWIWRILFLVGAATGAHSFEEVQLVESGGGLAKPGGSLRLSCAASGFRFTFNNYYMDWVRQAPGQGLEWVSRISSSGDPTWYADSVKGRFTISRENAKNTLFLQMNSLRAEDTAVYYCASLTTGSDSWGQGVLVTVSSTREDLKNVFPPEVAVFEPSEAEISHTQKATLVCLATGFYPDHVELSWWVNGKEVHSGVCTDPQPLKEQPALNDSRYCLSSRLRVSATFWQNPRNHFRCQVQFYGLSENDEWTQDRAKPVTQIVSAEAWGRADDVIKIHWQEKKSNTILGSQEGNTMKTNDTYMKFSWLTVPEKSLDKEHRCIVRHENNKNGVDQEIIFPPIKTDVITMDPKDNCSKDANDTLLLQLTNTSAYYMYLLLLLKSVVYFAIITCCLLMAMVKRKDSRG

SEQ ID NO: 14985 - protein, 862 aa, synthetic construct
MALPVTALLLPLALLLHAARPEVQLVESGGGLVQPGGSLRLSCAASGFSFSDFWMSWVRQAPGKGLEWVATISQAGSEKDYVDSVKGRFTISRDNAKKSLYLQMNSLRAEDTAVYYCASGVYSFDYRGQGTLVTVSSGTGGGGSGGGGSGGGGSEFEIVMTQSPATLSVSPGERATLSCRASQSVSRNLAWYQQKPGQAPRLLIYGASTRATGIPARFSGSGSGTEFTLTIGSLQSEDFAVYYCQQYKTWPRTFGQGTNVEIKLEIQNPDPAVYQLRDSKSSDKSVCLFTDFDSQTNVSQSKDSDVYITDKCVLDMRSMDFKSNSAVAWSNKSDFACANAFNNSIIPEDTFFPSPESSDSTDHVKPKETENTKQPSKSCHKPKAIVHTEKVNMMSLTVLGLRMLFAKTVAVNFLLTAKLFFLLTARAKRSGSGVKQTLNFDLLKLAGDVESNPGPTSMDWIWRILFLVGAATGAHSFEQVQLQQWGAGLLKPSETLSLTCAVFGGSFSGYYWSWIRQPPGKGLEWIGEINHRGNTNDNPSLKSRVTISVDTSKNQFALKLSSVTAADTAVYYCARERGYTYGNFDHWGQGTLVTVSSTREDLKNVFPPEVAVFEPSEAEISHTQKATLVCLATGFYPDHVELSWWVNGKEVHSGVCTDPQPLKEQPALNDSRYCLSSRLRVSATFWQNPRNHFRCQVQFYGLSENDEWTQDRAKPVTQIVSAEAWGRADDVIKIHWQEKKSNTILGSQEGNTMKTNDTYMKFSWLTVPEKSLDKEHRCIVRHENNKNGVDQEIIFPPIKTDVITMDPKDNCSKDANDTLLLQLTNTSAYYMYLLLLLKSVVYFAIITCCLLMAMVKRKDSRG

SEQ ID NO: 14986 - protein, 863 aa, synthetic construct
MALPVTALLLPLALLLHAARPEVQLVESGGGLVQPGGSLRLSCAASGFSFSDFWMSWVRQAPGKGLEWVATISQAGSEKDYVDSVKGRFTISRDNAKKSLYLQMNSLRAEDTAVYYCASGVYSFDYRGQGTLVTVSSGTGGGGSGGGGSGGGGSEFEIVMTPSSATLSVSPGERATLSCRASQSVSRNLAWYQQKPGQAPRLLIYGASTRATGIPARFSGSGSGTEFTLTISSLQSEDFAVYYCHQYSNWMCSFGQGTKLEIKLEIQNPDPAVYQLRDSKSSDKSVCLFTDFDSQTNVSQSKDSDVYITDKCVLDMRSMDFKSNSAVAWSNKSDFACANAFNNSIIPEDTFFPSPESSDSTDHVKPKETENTKQPSKSCHKPKAIVHTEKVNMMSLTVLGLRMLFAKTVAVNFLLTAKLFFLLTARAKRSGSGVKQTLNFDLLKLAGDVESNPGPTSMDWIWRILFLVGAATGAHSFEEVQLLESGGGLVQPGGSLRLSCAASGFTFSRYAMNWVRQAPGKGLEWVSGISGSGGRTYYADSVKGRFTISRDNSKNTLYLQMNSLRAEDTAVYYCAKDRDFWSGPFDYWGQGTLVTVSSTREDLKNVFPPEVAVFEPSEAEISHTQKATLVCLATGFYPDHVELSWWVNGKEVHSGVCTDPQPLKEQPALNDSRYCLSSRLRVSATFWQNPRNHFRCQVQFYGLSENDEWTQDRAKPVTQIVSAEAWGRADDVIKIHWQEKKSNTILGSQEGNTMKTNDTYMKFSWLTVPEKSLDKEHRCIVRHENNKNGVDQEIIFPPIKTDVITMDPKDNCSKDANDTLLLQLTNTSAYYMYLLLLLKSVVYFAIITCCLLMAMVKRKDSRG

SEQ ID NO: 14987 - protein, 868 aa, synthetic construct
MALPVTALLLPLALLLHAARPEVQLVESGGGLVQPGGSLRLSCAASGFSFSDFWMSWVRQAPGKGLEWVATISQAGSEKDYVDSVKGRFTISRDNAKKSLYLQMNSLRAEDTAVYYCASGVYSFDYRGQGTLVTVSSGTGGGGSGGGGSGGGGSEFDIQMTQSPSSLSASVGDRVTITCKASKNIRSYLAWYQQKPGKAPKLLIYSGSTLHSGVPSRFSGSGSGTDFTLTISSLQPEDFATYYCQQHHEYPLTFGQGTKVEIKRLEIQNPDPAVYQLRDSKSSDKSVCLFTDFDSQTNVSQSKDSDVYITDKCVLDMRSMDFKSNSAVAWSNKSDFACANAFNNSIIPEDTFFPSPESSDSTDHVKPKETENTKQPSKSCHKPKAIVHTEKVNMMSLTVLGLRMLFAKTVAVNFLLTAKLFFLLTARAKRSGSGVKQTLNFDLLKLAGDVESNPGPTSMDWIWRILFLVGAATGAHSFEQVQLQESGPGLVKPSETLSLTCTVSGYTITSGYDWSWIRQPPGKGLEWIGYINYGGSTNYKPSLGSRVTISVDTSKNQFSLKLSSVTAADTAVYYCARYNEYKSYIYDWYFDFWGQGTLVTVSSTREDLKNVFPPEVAVFEPSEAEISHTQKATLVCLATGFYPDHVELSWWVNGKEVHSGVCTDPQPLKEQPALNDSRYCLSSRLRVSATFWQNPRNHFRCQVQFYGLSENDEWTQDRAKPVTQIVSAEAWGRADDVIKIHWQEKKSNTILGSQEGNTMKTNDTYMKFSWLTVPEKSLDKEHRCIVRHENNKNGVDQEIIFPPIKTDVITMDPKDNCSKDANDTLLLQLTNTSAYYMYLLLLLKSVVYFAIITCCLLMAMVKRKDSRG

SEQ ID NO: 14988 - protein, 870 aa, synthetic construct
MALPVTALLLPLALLLHAARPEVQLVESGGGLVQPGGSLRLSCAASGFSFSDFWMSWVRQAPGKGLEWVATISQAGSEKDYVDSVKGRFTISRDNAKKSLYLQMNSLRAEDTAVYYCASGVYSFDYRGQGTLVTVSSGTGGGGSGGGGSGGGGSEFQSVVTQPPSVSAAPGQKVTISCSGSSSNIGNNYVSWYQQLPGTAPKLLIYDNNKRPSGIPDRFSGSKSGTSATLGITGLQTGDEADYYCGTWDGSLYTMLFGGGTKLTVLLEIQNPDPAVYQLRDSKSSDKSVCLFTDFDSQTNVSQSKDSDVYITDKCVLDMRSMDFKSNSAVAWSNKSDFACANAFNNSIIPEDTFFPSPESSDSTDHVKPKETENTKQPSKSCHKPKAIVHTEKVNMMSLTVLGLRMLFAKTVAVNFLLTAKLFFLLTARAKRSGSGVKQTLNFDLLKLAGDVESNPGPTSMDWIWRILFLVGAATGAHSFEEVQLVESGGGLVKPGGSLRLSCAASGFTFSNAWMSWVRQAPGKGLEWVGFIRSKAYGGTTEYAASVKGRFTISRDDSKSIAYLQMNNLKTEDTAVYYCARDGLYSSSWYDSDYWGQGTLVTVSSTREDLKNVFPPEVAVFEPSEAEISHTQKATLVCLATGFYPDHVELSWWVNGKEVHSGVCTDPQPLKEQPALNDSRYCLSSRLRVSATFWQNPRNHFRCQVQFYGLSENDEWTQDRAKPVTQIVSAEAWGRADDVIKIHWQEKKSNTILGSQEGNTMKTNDTYMKFSWLTVPEKSLDKEHRCIVRHENNKNGVDQEIIFPPIKTDVITMDPKDNCSKDANDTLLLQLTNTSAYYMYLLLLLKSVVYFAIITCCLLMAMVKRKDSRG

SEQ ID NO: 14989 - protein, 875 aa, synthetic construct
MALPVTALLLPLALLLHAARPEVQLVESGGGLVQPGGSLRLSCAASGFSFSDFWMSWVRQAPGKGLEWVATISQAGSEKDYVDSVKGRFTISRDNAKKSLYLQMNSLRAEDTAVYYCASGVYSFDYRGQGTLVTVSSGTGGGGSGGGGSGGGGSEFQSVLTQPPSVSGAPGQRVTISCTGSSSNIGAGYDVHWYQQLPGTAPKLLIFGNSNRPSGVPDRFSGFKSGTSASLAITGLQAEDEADYFCQSYDSSLSGSGVFGTGTKVTVLGLEIQNPDPAVYQLRDSKSSDKSVCLFTDFDSQTNVSQSKDSDVYITDKCVLDMRSMDFKSNSAVAWSNKSDFACANAFNNSIIPEDTFFPSPESSDSTDHVKPKETENTKQPSKSCHKPKAIVHTEKVNMMSLTVLGLRMLFAKTVAVNFLLTAKLFFLLTARAKRSGSGVKQTLNFDLLKLAGDVESNPGPTSMDWIWRILFLVGAATGAHSFEQMQLVQSGGGLVQPGRSLRLSCAASGFTFDDYAMHWVRQAPGKGLEWVSGISWNSGSIGYADSVKGRFTISRDNAKNSLYLQMNSLRAEDTALYYCAKDIHSGSYYGLLYYAMDVWGQGTTVTVSSTREDLKNVFPPEVAVFEPSEAEISHTQKATLVCLATGFYPDHVELSWWVNGKEVHSGVCTDPQPLKEQPALNDSRYCLSSRLRVSATFWQNPRNHFRCQVQFYGLSENDEWTQDRAKPVTQIVSAEAWGRADDVIKIHWQEKKSNTILGSQEGNTMKTNDTYMKFSWLTVPEKSLDKEHRCIVRHENNKNGVDQEIIFPPIKTDVITMDPKDNCSKDANDTLLLQLTNTSAYYMYLLLLLKSVVYFAIITCCLLMAMVKRKDSRG

SEQ ID NO: 14990 - protein, 875 aa, synthetic construct
MALPVTALLLPLALLLHAARPEVQLVESGGGLVQPGGSLRLSCAASGFSFSDFWMSWVRQAPGKGLEWVATISQAGSEKDYVDSVKGRFTISRDNAKKSLYLQMNSLRAEDTAVYYCASGVYSFDYRGQGTLVTVSSGTGGGGSGGGGSGGGGSEFLPVLTQPPSASGTPGQRVTISCSGRSSNIGSNSVNWYRQLPGAAPKLLIYSNNQRPPGVPVRFSGSKSGTSASLAISGLQSEDEATYYCATWDDNLNVHYVFGTGTKVTVLGSRLEIQNPDPAVYQLRDSKSSDKSVCLFTDFDSQTNVSQSKDSDVYITDKCVLDMRSMDFKSNSAVAWSNKSDFACANAFNNSIIPEDTFFPSPESSDSTDHVKPKETENTKQPSKSCHKPKAIVHTEKVNMMSLTVLGLRMLFAKTVAVNFLLTAKLFFLLTARAKRSGSGVKQTLNFDLLKLAGDVESNPGPTSMDWIWRILFLVGAATGAHSFELEMAQVQLVQSGAEVKKPGSSVKVSCKASGGTFSSYAISWVRQAPGQGLEWMGRIIPILGIANYAQKFQGRVTITADKSTSTAYMELSSLRSEDTAVYYCARGGYYSHDMWSEDWGQGTLVTVSSTREDLKNVFPPEVAVFEPSEAEISHTQKATLVCLATGFYPDHVELSWWVNGKEVHSGVCTDPQPLKEQPALNDSRYCLSSRLRVSATFWQNPRNHFRCQVQFYGLSENDEWTQDRAKPVTQIVSAEAWGRADDVIKIHWQEKKSNTILGSQEGNTMKTNDTYMKFSWLTVPEKSLDKEHRCIVRHENNKNGVDQEIIFPPIKTDVITMDPKDNCSKDANDTLLLQLTNTSAYYMYLLLLLKSVVYFAIITCCLLMAMVKRKDSRG

SEQ ID NO: 14991 - protein, 869 aa, synthetic construct
MALPVTALLLPLALLLHAARPEVQLVESGGGLVQPGGSLRLSCAASGFSFSDFWMSWVRQAPGKGLEWVATISQAGSEKDYVDSVKGRFTISRDNAKKSLYLQMNSLRAEDTAVYYCASGVYSFDYRGQGTLVTVSSGTGGGGSGGGGSGGGGSEFDFVMTQSPDSLAVSLGERVTMSCKSSQSLLNSGNQKNYLTWYQQKPGQPPKLLIYWASTRESGVPDRFSGSGSGTDFTLTISSLQAEDVAVYYCQNDYSYPYTFGQGTKLEIKLEIQNPDPAVYQLRDSKSSDKSVCLFTDFDSQTNVSQSKDSDVYITDKCVLDMRSMDFKSNSAVAWSNKSDFACANAFNNSIIPEDTFFPSPESSDSTDHVKPKETENTKQPSKSCHKPKAIVHTEKVNMMSLTVLGLRMLFAKTVAVNFLLTAKLFFLLTARAKRSGSGVKQTLNFDLLKLAGDVESNPGPTSMDWIWRILFLVGAATGAHSFEEVQLVQSGAELKKPGASVKVSCKASGYTFTDYYMKWVRQAPGQGLEWIGDIIPSNGATFYNQKFKGRVTITVDKSTSTAYMELSSLRSEDTAVYYCARSHLLRASWFAYWGQGTLVTVSSTREDLKNVFPPEVAVFEPSEAEISHTQKATLVCLATGFYPDHVELSWWVNGKEVHSGVCTDPQPLKEQPALNDSRYCLSSRLRVSATFWQNPRNHFRCQVQFYGLSENDEWTQDRAKPVTQIVSAEAWGRADDVIKIHWQEKKSNTILGSQEGNTMKTNDTYMKFSWLTVPEKSLDKEHRCIVRHENNKNGVDQEIIFPPIKTDVITMDPKDNCSKDANDTLLLQLTNTSAYYMYLLLLLKSVVYFAIITCCLLMAMVKRKDSRG

SEQ ID NO: 14992 - protein, 869 aa, synthetic construct
MALPVTALLLPLALLLHAARPEVQLVESGGGLVQPGGSLRLSCAASGFSFSDFWMSWVRQAPGKGLEWVATISQAGSEKDYVDSVKGRFTISRDNAKKSLYLQMNSLRAEDTAVYYCASGVYSFDYRGQGTLVTVSSGTGGGGSGGGGSGGGGSEFDFVMTQSPDSLAVSLGERVTMSCKSSQSLLNSGNQKNYLTWYQQKPGQPPKLLIYWASTRESGVPDRFSGSGSGTDFTLTISSLQAEDVAVYYCQNDYSYPYTFGQGTKLEIKLEIQNPDPAVYQLRDSKSSDKSVCLFTDFDSQTNVSQSKDSDVYITDKCVLDMRSMDFKSNSAVAWSNKSDFACANAFNNSIIPEDTFFPSPESSDSTDHVKPKETENTKQPSKSCHKPKAIVHTEKVNMMSLTVLGLRMLFAKTVAVNFLLTAKLFFLLTARAKRSGSGVKQTLNFDLLKLAGDVESNPGPTSMDWIWRILFLVGAATGAHSFEQVQLVQSGAELKKPGASVKVSCKASGYTFTDYYMKWVRQAPGQGLEWIGDIIPSNGATFYNQKFKGRVTITVDKSTSTAYMELSSLRSEDTAVYYCARSHLLRASWFAYWGQGTLVTVSSTREDLKNVFPPEVAVFEPSEAEISHTQKATLVCLATGFYPDHVELSWWVNGKEVHSGVCTDPQPLKEQPALNDSRYCLSSRLRVSATFWQNPRNHFRCQVQFYGLSENDEWTQDRAKPVTQIVSAEAWGRADDVIKIHWQEKKSNTILGSQEGNTMKTNDTYMKFSWLTVPEKSLDKEHRCIVRHENNKNGVDQEIIFPPIKTDVITMDPKDNCSKDANDTLLLQLTNTSAYYMYLLLLLKSVVYFAIITCCLLMAMVKRKDSRG

SEQ ID NO: 14993 - protein, 859 aa, synthetic construct
MALPVTALLLPLALLLHAARPEVQLVESGGGLVQPGGSLRLSCAASGFSFSDFWMSWVRQAPGKGLEWVATISQAGSEKDYVDSVKGRFTISRDNAKKSLYLQMNSLRAEDTAVYYCASGVYSFDYRGQGTLVTVSSGTGGGGSGGGGSGGGGSEFDVQITQSPSYLAASPGETITINCRASKSISKDLAWYQEKPGKTNKLLIYSGSTLQSGIPSRFSGSGSGTDFTLTISSLEPEDFAMYYCQQHNKYPYTFGGGTKLEIKRLEIQNPDPAVYQLRDSKSSDKSVCLFTDFDSQTNVSQSKDSDVYITDKCVLDMRSMDFKSNSAVAWSNKSDFACANAFNNSIIPEDTFFPSPESSDSTDHVKPKETENTKQPSKSCHKPKAIVHTEKVNMMSLTVLGLRMLFAKTVAVNFLLTAKLFFLLTARAKRSGSGVKQTLNFDLLKLAGDVESNPGPTSMDWIWRILFLVGAATGAHSFEQVQLQQPGAELVRPGASVKLSCKASGYTFTSYWMNWVKQRPDQGLEWIGRIDPYDSETHYNQKFKDKAILTVDKSSSTAYMQLSSLTSEDSAVYYCARGNWDDYWGQGTTLTVSSTREDLKNVFPPEVAVFEPSEAEISHTQKATLVCLATGFYPDHVELSWWVNGKEVHSGVCTDPQPLKEQPALNDSRYCLSSRLRVSATFWQNPRNHFRCQVQFYGLSENDEWTQDRAKPVTQIVSAEAWGRADDVIKIHWQEKKSNTILGSQEGNTMKTNDTYMKFSWLTVPEKSLDKEHRCIVRHENNKNGVDQEIIFPPIKTDVITMDPKDNCSKDANDTLLLQLTNTSAYYMYLLLLLKSVVYFAIITCCLLMAMVKRKDSRG

SEQ ID NO: 14994 - protein, 861 aa, synthetic construct
MALPVTALLLPLALLLHAARPEVQLVESGGGLVQPGGSLRLSCAASGFSFSDFWMSWVRQAPGKGLEWVATISQAGSEKDYVDSVKGRFTISRDNAKKSLYLQMNSLRAEDTAVYYCASGVYSFDYRGQGTLVTVSSGTGGGGSGGGGSGGGGSEFEIVLTQSPTSMTASPGEQVTITCRASSSINYMHWYQQKPGASPRPWIYETSKLASGVPDRFSGSASGTSYSLTINNMEAEDAATYYCQQWNYPSWTFGGGTKLELKLEIQNPDPAVYQLRDSKSSDKSVCLFTDFDSQTNVSQSKDSDVYITDKCVLDMRSMDFKSNSAVAWSNKSDFACANAFNNSIIPEDTFFPSPESSDSTDHVKPKETENTKQPSKSCHKPKAIVHTEKVNMMSLTVLGLRMLFAKTVAVNFLLTAKLFFLLTARAKRSGSGVKQTLNFDLLKLAGDVESNPGPTSMDWIWRILFLVGAATGAHSFEEVQLVESGGGLVQPGRSLKLSCAASGFTFSDYNMAWVRQAPKKGLEWVATILYDGGRTYYRGSVKGRFTISRDNAKSTLYLRMDSLRSEDTATYYCATHSRGTDYFDYWGQGVMVTVSSTREDLKNVFPPEVAVFEPSEAEISHTQKATLVCLATGFYPDHVELSWWVNGKEVHSGVCTDPQPLKEQPALNDSRYCLSSRLRVSATFWQNPRNHFRCQVQFYGLSENDEWTQDRAKPVTQIVSAEAWGRADDVIKIHWQEKKSNTILGSQEGNTMKTNDTYMKFSWLTVPEKSLDKEHRCIVRHENNKNGVDQEIIFPPIKTDVITMDPKDNCSKDANDTLLLQLTNTSAYYMYLLLLLKSVVYFAIITCCLLMAMVKRKDSRG

SEQ ID NO: 14995 - protein, 870 aa, synthetic construct
MALPVTALLLPLALLLHAARPEVQLVESGGGLVQPGGSLRLSCAASGFSFSDFWMSWVRQAPGKGLEWVATISQAGSEKDYVDSVKGRFTISRDNAKKSLYLQMNSLRAEDTAVYYCASGVYSFDYRGQGTLVTVSSGTGGGGSGGGGSGGGGSEFDIVMTQSPSSLAVSEGETVTINCKSSQSFLSSGDGKNYVAWYQYKPGQSPKLLIYWASTRQSGVPDRFIGSGSGTDFTLTISTVQAEDLAIYYCQQYYDTPLTFGSGTKLEIKLEIQNPDPAVYQLRDSKSSDKSVCLFTDFDSQTNVSQSKDSDVYITDKCVLDMRSMDFKSNSAVAWSNKSDFACANAFNNSIIPEDTFFPSPESSDSTDHVKPKETENTKQPSKSCHKPKAIVHTEKVNMMSLTVLGLRMLFAKTVAVNFLLTAKLFFLLTARAKRSGSGVKQTLNFDLLKLAGDVESNPGPTSMDWIWRILFLVGAATGAHSFEEVKLQESGPSLVQSSQTLSLTCTVSGFSLTSYHIHWVRQTPGKGLEWMGVMWSDGDTSYNSALKSRLSISRDTSQSQVFLKMNSLQTEDTATYYCARGYYSSYLYLWFAYWGQGTLVTVSSTREDLKNVFPPEVAVFEPSEAEISHTQKATLVCLATGFYPDHVELSWWVNGKEVHSGVCTDPQPLKEQPALNDSRYCLSSRLRVSATFWQNPRNHFRCQVQFYGLSENDEWTQDRAKPVTQIVSAEAWGRADDVIKIHWQEKKSNTILGSQEGNTMKTNDTYMKFSWLTVPEKSLDKEHRCIVRHENNKNGVDQEIIFPPIKTDVITMDPKDNCSKDANDTLLLQLTNTSAYYMYLLLLLKSVVYFAIITCCLLMAMVKRKDSRG

SEQ ID NO: 14996 - protein, 874 aa, synthetic construct
MALPVTALLLPLALLLHAARPEVQLVESGGGLVQPGGSLRLSCAASGFSFSDFWMSWVRQAPGKGLEWVATISQAGSEKDYVDSVKGRFTISRDNAKKSLYLQMNSLRAEDTAVYYCASGVYSFDYRGQGTLVTVSSGTGGGGSGGGGSGGGGSEFDVLMTQTPVSLPVSLGGQVSISCRSSQSLVHSDGDTYLHWYLQKPGQSPQLLIYRVSNRFSGVPDRFSGSGSGTDFTLKISRVEPEDLGLYYCLQTTHFPPWTFGGGTKLEMKLEIQNPDPAVYQLRDSKSSDKSVCLFTDFDSQTNVSQSKDSDVYITDKCVLDMRSMDFKSNSAVAWSNKSDFACANAFNNSIIPEDTFFPSPESSDSTDHVKPKETENTKQPSKSCHKPKAIVHTEKVNMMSLTVLGLRMLFAKTVAVNFLLTAKLFFLLTARAKRSGSGVKQTLNFDLLKLAGDVESNPGPTSMDWIWRILFLVGAATGAHSFEQVQLQQSGPELRRPGSSVRLSCKASGYRIKDFLIHWIKNRPEHGLEWIGWIDPEDGETKYAQKFQTKATLTADTSSNTAYMQLSSLTSEDTATYFCARWGDVYYGLMRGHVMDAWGQGTSVTVSSTREDLKNVFPPEVAVFEPSEAEISHTQKATLVCLATGFYPDHVELSWWVNGKEVHSGVCTDPQPLKEQPALNDSRYCLSSRLRVSATFWQNPRNHFRCQVQFYGLSENDEWTQDRAKPVTQIVSAEAWGRADDVIKIHWQEKKSNTILGSQEGNTMKTNDTYMKFSWLTVPEKSLDKEHRCIVRHENNKNGVDQEIIFPPIKTDVITMDPKDNCSKDANDTLLLQLTNTSAYYMYLLLLLKSVVYFAIITCCLLMAMVKRKDSRG

SEQ ID NO: 14997 - protein, 869 aa, synthetic construct
MALPVTALLLPLALLLHAARPEVQLVESGGGLVQPGGSLRLSCAASGFSFSDFWMSWVRQAPGKGLEWVATISQAGSEKDYVDSVKGRFTISRDNAKKSLYLQMNSLRAEDTAVYYCASGVYSFDYRGQGTLVTVSSGTGGGGSGGGGSGGGGSEFDIVMTQSPATLSLSPGERATLSCRSSKSLQNVNGNTYLYWFQQKPGQSPQLLIYRMSNLNSGVPDRFSGSGSGTEFTLTISSLEPEDFAVYYCMQHLEYPITFGAGTKLEIKLEIQNPDPAVYQLRDSKSSDKSVCLFTDFDSQTNVSQSKDSDVYITDKCVLDMRSMDFKSNSAVAWSNKSDFACANAFNNSIIPEDTFFPSPESSDSTDHVKPKETENTKQPSKSCHKPKAIVHTEKVNMMSLTVLGLRMLFAKTVAVNFLLTAKLFFLLTARAKRSGSGVKQTLNFDLLKLAGDVESNPGPTSMDWIWRILFLVGAATGAHSFEEVQLVESGGGLVKPGGSLKLSCAASGYTFTSYVMHWVRQAPGKGLEWIGYINPYNDGTKYNEKFQGRVTISSDKSISTAYMELSSLRSEDTAMYYCARGTYYYGTRVFDYWGQGTLVTVSSTREDLKNVFPPEVAVFEPSEAEISHTQKATLVCLATGFYPDHVELSWWVNGKEVHSGVCTDPQPLKEQPALNDSRYCLSSRLRVSATFWQNPRNHFRCQVQFYGLSENDEWTQDRAKPVTQIVSAEAWGRADDVIKIHWQEKKSNTILGSQEGNTMKTNDTYMKFSWLTVPEKSLDKEHRCIVRHENNKNGVDQEIIFPPIKTDVITMDPKDNCSKDANDTLLLQLTNTSAYYMYLLLLLKSVVYFAIITCCLLMAMVKRKDSRG

SEQ ID NO: 14998 - protein, 865 aa, synthetic construct
MALPVTALLLPLALLLHAARPEVQLVESGGGLVQPGGSLRLSCAASGFSFSDFWMSWVRQAPGKGLEWVATISQAGSEKDYVDSVKGRFTISRDNAKKSLYLQMNSLRAEDTAVYYCASGVYSFDYRGQGTLVTVSSGTGGGGSGGGGSGGGGSEFDIQMTQSPSSLSASVGDRVTITCKASDHINNWLAWYQQKPGQAPKLLIYGATTLETGVPSRFSGSGSGTDYTLTISSLQPEDFATYYCQQSWNTPWTFGQGTKLEIKRLEIQNPDPAVYQLRDSKSSDKSVCLFTDFDSQTNVSQSKDSDVYITDKCVLDMRSMDFKSNSAVAWSNKSDFACANAFNNSIIPEDTFFPSPESSDSTDHVKPKETENTKQPSKSCHKPKAIVHTEKVNMMSLTVLGLRMLFAKTVAVNFLLTAKLFFLLTARAKRSGSGVKQTLNFDLLKLAGDVESNPGPTSMDWIWRILFLVGAATGAHSFEQVQLQQPGAELVKPGASVKMSCKASGYAFSSYWINWMKQKPGQGLEWIGQIYPGDGDTNYNGKFKGRATLTADTSSSTAYMQLSSLTSEDSAVYFCARSITTVVGCAMDYWGQGTSVTVSSTREDLKNVFPPEVAVFEPSEAEISHTQKATLVCLATGFYPDHVELSWWVNGKEVHSGVCTDPQPLKEQPALNDSRYCLSSRLRVSATFWQNPRNHFRCQVQFYGLSENDEWTQDRAKPVTQIVSAEAWGRADDVIKIHWQEKKSNTILGSQEGNTMKTNDTYMKFSWLTVPEKSLDKEHRCIVRHENNKNGVDQEIIFPPIKTDVITMDPKDNCSKDANDTLLLQLTNTSAYYMYLLLLLKSVVYFAIITCCLLMAMVKRKDSRG

SEQ ID NO: 14999 - protein, 867 aa, synthetic construct
MALPVTALLLPLALLLHAARPEVQLVESGGGLVQPGGSLRLSCAASGFSFSDFWMSWVRQAPGKGLEWVATISQAGSEKDYVDSVKGRFTISRDNAKKSLYLQMNSLRAEDTAVYYCASGVYSFDYRGQGTLVTVSSGTGGGGSGGGGSGGGGSEFQIVLSQSPAILSASPGEKVTMTCRASSSVSYMHWYQQKPGSSPKPWIYATSNLASGVPARFSGSGSGTSYSFTISRVEAEDAATYYCQQWTFNPPTFGGGTRLEIKRTVAALEIQNPDPAVYQLRDSKSSDKSVCLFTDFDSQTNVSQSKDSDVYITDKCVLDMRSMDFKSNSAVAWSNKSDFACANAFNNSIIPEDTFFPSPESSDSTDHVKPKETENTKQPSKSCHKPKAIVHTEKVNMMSLTVLGLRMLFAKTVAVNFLLTAKLFFLLTARAKRSGSGVKQTLNFDLLKLAGDVESNPGPTSMDWIWRILFLVGAATGAHSFEQAYLQQSGAELVRPGASVKMSCKASGYTFTSYNMHWVKQTPRQGLEWIGGIYPGNGDTSYNQKFKGKATLTVGKSSSTAYMQLSSLTSEDSAVYFCARYDYNYAMDYWGQGTSVTVSSASTREDLKNVFPPEVAVFEPSEAEISHTQKATLVCLATGFYPDHVELSWWVNGKEVHSGVCTDPQPLKEQPALNDSRYCLSSRLRVSATFWQNPRNHFRCQVQFYGLSENDEWTQDRAKPVTQIVSAEAWGRADDVIKIHWQEKKSNTILGSQEGNTMKTNDTYMKFSWLTVPEKSLDKEHRCIVRHENNKNGVDQEIIFPPIKTDVITMDPKDNCSKDANDTLLLQLTNTSAYYMYLLLLLKSVVYFAIITCCLLMAMVKRKDSRG

SEQ ID NO: 15000 - protein, 865 aa, synthetic construct
MALPVTALLLPLALLLHAARPEVQLVESGGGLVQPGGSLRLSCAASGFSFSDFWMSWVRQAPGKGLEWVATISQAGSEKDYVDSVKGRFTISRDNAKKSLYLQMNSLRAEDTAVYYCASGVYSFDYRGQGTLVTVSSGTGGGGSGGGGSGGGGSEFEIVLTQSPATLSLSPGERATLSCRASQSVSSYLAWYQQKPGQAPRLLIYDASNRATGIPARFSGSGSGTDFTLTISSLEPEDFAVYYCQQRSNWPITFGQGTRLEIKLEIQNPDPAVYQLRDSKSSDKSVCLFTDFDSQTNVSQSKDSDVYITDKCVLDMRSMDFKSNSAVAWSNKSDFACANAFNNSIIPEDTFFPSPESSDSTDHVKPKETENTKQPSKSCHKPKAIVHTEKVNMMSLTVLGLRMLFAKTVAVNFLLTAKLFFLLTARAKRSGSGVKQTLNFDLLKLAGDVESNPGPTSMDWIWRILFLVGAATGAHSFEEVQLVESGGGLVQPDRSLRLSCAASGFTFHDYAMHWVRQAPGKGLEWVSTISWNSGTIGYADSVKGRFTISRDNAKNSLYLQMNSLRAEDTALYYCAKDIQYGNYYYGMDVWGQGTTVTVSSTREDLKNVFPPEVAVFEPSEAEISHTQKATLVCLATGFYPDHVELSWWVNGKEVHSGVCTDPQPLKEQPALNDSRYCLSSRLRVSATFWQNPRNHFRCQVQFYGLSENDEWTQDRAKPVTQIVSAEAWGRADDVIKIHWQEKKSNTILGSQEGNTMKTNDTYMKFSWLTVPEKSLDKEHRCIVRHENNKNGVDQEIIFPPIKTDVITMDPKDNCSKDANDTLLLQLTNTSAYYMYLLLLLKSVVYFAIITCCLLMAMVKRKDSRG

SEQ ID NO: 15001 - protein, 860 aa, synthetic construct
MALPVTALLLPLALLLHAARPEVQLVESGGGLVQPGGSLRLSCAASGFSFSDFWMSWVRQAPGKGLEWVATISQAGSEKDYVDSVKGRFTISRDNAKKSLYLQMNSLRAEDTAVYYCASGVYSFDYRGQGTLVTVSSGTGGGGSGGGGSGGGGSEFDIQMTQSPSSLSASVGDRVTINCKASQDINSYLSWFQQKPGKAPKTLIYRANRLVDGVPSRFSGSGSGQDYTLTISSLQPEDFATYYCLQYDEFPLTFGGGTKVEIKLEIQNPDPAVYQLRDSKSSDKSVCLFTDFDSQTNVSQSKDSDVYITDKCVLDMRSMDFKSNSAVAWSNKSDFACANAFNNSIIPEDTFFPSPESSDSTDHVKPKETENTKQPSKSCHKPKAIVHTEKVNMMSLTVLGLRMLFAKTVAVNFLLTAKLFFLLTARAKRSGSGVKQTLNFDLLKLAGDVESNPGPTSMDWIWRILFLVGAATGAHSFEQVQLVQSGAEVKKPGASVKVSCKASGYTFTNYDINWVRQAPGQGLEWIGWIYPGDGSTKYNEKFKAKATLTADTSTSTAYMELRSLRSDDTAVYYCASGYEDAMDYWGQGTTVTVSSTREDLKNVFPPEVAVFEPSEAEISHTQKATLVCLATGFYPDHVELSWWVNGKEVHSGVCTDPQPLKEQPALNDSRYCLSSRLRVSATFWQNPRNHFRCQVQFYGLSENDEWTQDRAKPVTQIVSAEAWGRADDVIKIHWQEKKSNTILGSQEGNTMKTNDTYMKFSWLTVPEKSLDKEHRCIVRHENNKNGVDQEIIFPPIKTDVITMDPKDNCSKDANDTLLLQLTNTSAYYMYLLLLLKSVVYFAIITCCLLMAMVKRKDSRG

SEQ ID NO: 15002 - protein, 862 aa, synthetic construct
MALPVTALLLPLALLLHAARPEVQLVESGGGLVQPGGSLRLSCAASGFSFSDFWMSWVRQAPGKGLEWVATISQAGSEKDYVDSVKGRFTISRDNAKKSLYLQMNSLRAEDTAVYYCASGVYSFDYRGQGTLVTVSSGTGGGGSGGGGSGGGGSEFDIVMTQTPLSLSVTPGQPASISCKSSQSLLDGDGKTYLNWLLQKPGQSPQRLIYLVSKLDSGVPDRFSGSGSGTDFTLKISRVEAEDVGVYYCWQGTHFPRTFGQGTKLEIKLEIQNPDPAVYQLRDSKSSDKSVCLFTDFDSQTNVSQSKDSDVYITDKCVLDMRSMDFKSNSAVAWSNKSDFACANAFNNSIIPEDTFFPSPESSDSTDHVKPKETENTKQPSKSCHKPKAIVHTEKVNMMSLTVLGLRMLFAKTVAVNFLLTAKLFFLLTARAKRSGSGVKQTLNFDLLKLAGDVESNPGPTSMDWIWRILFLVGAATGAHSFEQVQLVQSGAEVKKPGASVKVSCKASGYTFKDTYIHWVRQAPGQGLEWMGRIDPANGNTKYDPKFQGRVTMTRDTSISTAYMELSRLRSDDTAVYYCARRGGVDWGQGTLVTVSSTREDLKNVFPPEVAVFEPSEAEISHTQKATLVCLATGFYPDHVELSWWVNGKEVHSGVCTDPQPLKEQPALNDSRYCLSSRLRVSATFWQNPRNHFRCQVQFYGLSENDEWTQDRAKPVTQIVSAEAWGRADDVIKIHWQEKKSNTILGSQEGNTMKTNDTYMKFSWLTVPEKSLDKEHRCIVRHENNKNGVDQEIIFPPIKTDVITMDPKDNCSKDANDTLLLQLTNTSAYYMYLLLLLKSVVYFAIITCCLLMAMVKRKDSRG

SEQ ID NO: 15003 - protein, 863 aa, synthetic construct
MALPVTALLLPLALLLHAARPEVQLVESGGGLVQPGGSLRLSCAASGFSFSDFWMSWVRQAPGKGLEWVATISQAGSEKDYVDSVKGRFTISRDNAKKSLYLQMNSLRAEDTAVYYCASGVYSFDYRGQGTLVTVSSGTGGGGSGGGGSGGGGSEFDIQMTQSPSSLSASVGDRVTITCKASQDVSTAVAWFQQKPGKAPKLLIYSPSYRYTGVPSRFSGSGSGTDFTLTISSLQPEDFTYYCQQLYSTPYTFGQGTKVEIKLEIQNPDPAVYQLRDSKSSDKSVCLFTDFDSQTNVSQSKDSDVYITDKCVLDMRSMDFKSNSAVAWSNKSDFACANAFNNSIIPEDTFFPSPESSDSTDHVKPKETENTKQPSKSCHKPKAIVHTEKVNMMSLTVLGLRMLFAKTVAVNFLLTAKLFFLLTARAKRSGSGVKQTLNFDLLKLAGDVESNPGPTSMDWIWRILFLVGAATGAHSFEEVQLVQSGAEVKKPGASVKVSCKASGYTFTDYYLDVVVRQAPGQGLEWIGRVNPYNGGTIYNQKFKGRVTLTRDTSTSTAYLELSSLRSEDTAVYYCARDHYRYDPLLDYWGQGTLVTVSSTREDLKNVFPPEVAVFEPSEAEISHTQKATLVCLATGFYPDHVELSWWVNGKEVHSGVCTDPQPLKEQPALNDSRYCLSSRLRVSATFWQNPRNHFRCQVQFYGLSENDEWTQDRAKPVTQIVSAEAWGRADDVIKIHWQEKKSNTILGSQEGNTMKTNDTYMKFSWLTVPEKSLDKEHRCIVRHENNKNGVDQEIIFPPIKTDVITMDPKDNCSKDANDTLLLQLTNTSAYYMYLLLLLKSVVYFAIITCCLLMAMVKRKDSRG

SEQ ID NO: 15004 - protein, 869 aa, synthetic construct
MALPVTALLLPLALLLHAARPEVQLVESGGGLVQPGGSLRLSCAASGFSFSDFWMSWVRQAPGKGLEWVATISQAGSEKDYVDSVKGRFTISRDNAKKSLYLQMNSLRAEDTAVYYCASGVYSFDYRGQGTLVTVSSGTGGGGSGGGGSGGGGSEFDIQMTQSPSSLSASVGDRVTITCRASQSVSTSSYNYMHWYQQKPGKPPKLLIKYASNLESGVPSRFSGSGSGTDFTLTISSLQPEDFATYYCQHSWEIPLTFGQGTKVEIKLEIQNPDPAVYQLRDSKSSDKSVCLFTDFDSQTNVSQSKDSDVYITDKCVLDMRSMDFKSNSAVAWSNKSDFACANAFNNSIIPEDTFFPSPESSDSTDHVKPKETENTKQPSKSCHKPKAIVHTEKVNMMSLTVLGLRMLFAKTVAVNFLLTAKLFFLLTARAKRSGSGVKQTLNFDLLKLAGDVESNPGPTSMDWIWRILFLVGAATGAHSFEEVQLVQSGAEVKKPGASVKVSCKASGYSFTDYYMHWVRQAPGQGLEWIGRINPYNGAAFYSQNFKDRVTLTVDTSTSTAYLELSSLRSEDTAVYYCAIERGADLEGYAMDYWGQGTLVTVSSTREDLKNVFPPEVAVFEPSEAEISHTQKATLVCLATGFYPDHVELSWWVNGKEVHSGVCTDPQPLKEQPALNDSRYCLSSRLRVSATFWQNPRNHFRCQVQFYGLSENDEWTQDRAKPVTQIVSAEAWGRADDVIKIHWQEKKSNTILGSQEGNTMKTNDTYMKFSWLTVPEKSLDKEHRCIVRHENNKNGVDQEIIFPPIKTDVITMDPKDNCSKDANDTLLLQLTNTSAYYMYLLLLLKSVVYFAIITCCLLMAMVKRKDSRG

SEQ ID NO: 15005 - protein, 867 aa, synthetic construct
MALPVTALLLPLALLLHAARPEVQLVESGGGLVQPGGSLRLSCAASGFSFSDFWMSWVRQAPGKGLEWVATISQAGSEKDYVDSVKGRFTISRDNAKKSLYLQMNSLRAEDTAVYYCASGVYSFDYRGQGTLVTVSSGTGGGGSGGGGSGGGGSEFEIVLTQSPATLSASPGERVTLTCRASSNVISSYVHWYQQKPGSSPRLFLYSTSNLASGVPSRFSGSGSGTDFTFTISSLEAEDAATYYCQQYSGYPLTFGQGTRLEIKLEIQNPDPAVYQLRDSKSSDKSVCLFTDFDSQTNVSQSKDSDVYITDKCVLDMRSMDFKSNSAVAWSNKSDFACANAFNNSIIPEDTFFPSPESSDSTDHVKPKETENTKQPSKSCHKPKAIVHTEKVNMMSLTVLGLRMLFAKTVAVNFLLTAKLFFLLTARAKRSGSGVKQTLNFDLLKLAGDVESNPGPTSMDWIWRILFLVGAATGAHSFEQVQLQESGPGLVKPSETLSLTCAVSGYSITSAYYWNWIRQPPGKGLEWIGYISYDGRNNYNPSLKNRITINPDTSKNQFSLQLNSVTPEDTAVYYCAREGDYDVGNYYAMDYWGQGTLVTVSSTREDLKNVFPPEVAVFEPSEAEISHTQKATLVCLATGFYPDHVELSWWVNGKEVHSGVCTDPQPLKEQPALNDSRYCLSSRLRVSATFWQNPRNHFRCQVQFYGLSENDEWTQDRAKPVTQIVSAEAWGRADDVIKIHWQEKKSNTILGSQEGNTMKTNDTYMKFSWLTVPEKSLDKEHRCIVRHENNKNGVDQEIIFPPIKTDVITMDPKDNCSKDANDTLLLQLTNTSAYYMYLLLLLKSVVYFAIITCCLLMAMVKRKDSRG

SEQ ID NO: 15006 - protein, 867 aa, synthetic construct
MALPVTALLLPLALLLHAARPEVQLVESGGGLVQPGGSLRLSCAASGFSFSDFWMSWVRQAPGKGLEWVATISQAGSEKDYVDSVKGRFTISRDNAKKSLYLQMNSLRAEDTAVYYCASGVYSFDYRGQGTLVTVSSGTGGGGSGGGGSGGGGSEFEIVLTQSPATLSLSPGERATLSCRASSNVISSYVHWYQQKPGQAPRLLIYSTSNLASGIPARFSGSGSGTDFTLTISSLEPEDFAVYYCQQYSGYPLTFGQGTRLEIKLEIQNPDPAVYQLRDSKSSDKSVCLFTDFDSQTNVSQSKDSDVYITDKCVLDMRSMDFKSNSAVAWSNKSDFACANAFNNSIIPEDTFFPSPESSDSTDHVKPKETENTKQPSKSCHKPKAIVHTEKVNMMSLTVLGLRMLFAKTVAVNFLLTAKLFFLLTARAKRSGSGVKQTLNFDLLKLAGDVESNPGPTSMDWIWRILFLVGAATGAHSFEEVQLVESGGGLVQPGRSLRLSCAASGYSITSAYYWNWVRQAPGKGLEWVSYISYDGRNNYNPSLKNRFTISRDNAKKSLYLQMNSLRAEDTALYYCAKEGDYDVGNYYAMDYWGQGTTVTVSSTREDLKNVFPPEVAVFEPSEAEISHTQKATLVCLATGFYPDHVELSWWVNGKEVHSGVCTDPQPLKEQPALNDSRYCLSSRLRVSATFWQNPRNHFRCQVQFYGLSENDEWTQDRAKPVTQIVSAEAWGRADDVIKIHWQEKKSNTILGSQEGNTMKTNDTYMKFSWLTVPEKSLDKEHRCIVRHENNKNGVDQEIIFPPIKTDVITMDPKDNCSKDANDTLLLQLTNTSAYYMYLLLLLKSVVYFAIITCCLLMAMVKRKDSRG

SEQ ID NO: 15007 - protein, 866 aa, synthetic construct
MALPVTALLLPLALLLHAARPEVQLVESGGGLVQPGGSLRLSCAASGFSFSDFWMSWVRQAPGKGLEWVATISQAGSEKDYVDSVKGRFTISRDNAKKSLYLQMNSLRAEDTAVYYCASGVYSFDYRGQGTLVTVSSGTGGGGSGGGGSGGGGSEFDVVMTQTPLSLPVSLGDQASISCRSSQSLVHSNGNTYLRWYLQKPGQSPKVLIYKVSNRVSGVPDRFSGSGSGTDFTLKINRVEAEDLGVYFCSQSTHVPWTFGGGTKLEIKLEIQNPDPAVYQLRDSKSSDKSVCLFTDFDSQTNVSQSKDSDVYITDKCVLDMRSMDFKSNSAVAWSNKSDFACANAFNNSIIPEDTFFPSPESSDSTDHVKPKETENTKQPSKSCHKPKAIVHTEKVNMMSLTVLGLRMLFAKTVAVNFLLTAKLFFLLTARAKRSGSGVKQTLNFDLLKLAGDVESNPGPTSMDWIWRILFLVGAATGAHSFEGVKLDETGGGLVQPGGAMKLSCVTSGFTFGHYWMNWVRQSPEKGLEWVAQFRNKPYNYETYYSDSVKGRFTISRDDSKSSVYLQMNNLRVEDTGIYYCTGASYGMEYLGQGTSVTVSTTREDLKNVFPPEVAVFEPSEAEISHTQKATLVCLATGFYPDHVELSWWVNGKEVHSGVCTDPQPLKEQPALNDSRYCLSSRLRVSATFWQNPRNHFRCQVQFYGLSENDEWTQDRAKPVTQIVSAEAWGRADDVIKIHWQEKKSNTILGSQEGNTMKTNDTYMKFSWLTVPEKSLDKEHRCIVRHENNKNGVDQEIIFPPIKTDVITMDPKDNCSKDANDTLLLQLTNTSAYYMYLLLLLKSVVYFAIITCCLLMAMVKRKDSRG

SEQ ID NO: 15008 - protein, 872 aa, synthetic construct
MALPVTALLLPLALLLHAARPEVQLVESGGGLVQPGGSLRLSCAASGFSFSDFWMSWVRQAPGKGLEWVATISQAGSEKDYVDSVKGRFTISRDNAKKSLYLQMNSLRAEDTAVYYCASGVYSFDYRGQGTLVTVSSGTGGGGSGGGGSGGGGSEFQVQLVESGGNLVQPGGSLRLSCAASGFTFGSFSMSWVRQAPGGGLEWVAGLSARSSLTHYADSVKGRFTISRDNAKNSVYLQMNSLRVEDTAVYYCARRSYDSSGYWGHFYSYMDVWGQGTLVTVSLEIQNPDPAVYQLRDSKSSDKSVCLFTDFDSQTNVSQSKDSDVYITDKCVLDMRSMDFKSNSAVAWSNKSDFACANAFNNSIIPEDTFFPSPESSDSTDHVKPKETENTKQPSKSCHKPKAIVHTEKVNMMSLTVLGLRMLFAKTVAVNFLLTAKLFFLLTARAKRSGSGVKQTLNFDLLKLAGDVESNPGPTSMDWIWRILFLVGAATGAHSFESVLTQPSSVSAAPGQKVTISCSGSTSNIGNNYVSWYQQHPGKAPKLMIYDVSKRPSGVPDRFSGSKSGNSASLDISGLQSEDEADYYCAAWDDSLSEFLFGTGTKLTVLGTREDLKNVFPPEVAVFEPSEAEISHTQKATLVCLATGFYPDHVELSWWVNGKEVHSGVCTDPQPLKEQPALNDSRYCLSSRLRVSATFWQNPRNHFRCQVQFYGLSENDEWTQDRAKPVTQIVSAEAWGRADDVIKIHWQEKKSNTILGSQEGNTMKTNDTYMKFSWLTVPEKSLDKEHRCIVRHENNKNGVDQEIIFPPIKTDVITMDPKDNCSKDANDTLLLQLTNTSAYYMYLLLLLKSVVYFAIITCCLLMAMVKRKDSRG

SEQ ID NO: 15009 - protein, 867 aa, synthetic construct
MALPVTALLLPLALLLHAARPEVQLVESGGGLVQPGGSLRLSCAASGFSFSDFWMSWVRQAPGKGLEWVATISQAGSEKDYVDSVKGRFTISRDNAKKSLYLQMNSLRAEDTAVYYCASGVYSFDYRGQGTLVTVSSGTGGGGSGGGGSGGGGSEFDVVMTQSPSSLSASVGDRVTITCQSSLDISHYLNWYQQKPGKAPKLLIYDASNLETGVPSRFSGSGSGTHFTFTISSLQPEDFATYYCQQYDNLPLTFGGGTKLEIKRLEIQNPDPAVYQLRDSKSSDKSVCLFTDFDSQTNVSQSKDSDVYITDKCVLDMRSMDFKSNSAVAWSNKSDFACANAFNNSIIPEDTFFPSPESSDSTDHVKPKETENTKQPSKSCHKPKAIVHTEKVNMMSLTVLGLRMLFAKTVAVNFLLTAKLFFLLTARAKRSGSGVKQTLNFDLLKLAGDVESNPGPTSMDWIWRILFLVGAATGAHSFEQVQLVQSGGGVVQPGGSLRVSCAASGVTLSDYGMHWVRQAPGKGLEWVAFIRNDGSDKYYADSVKGRFTISRDNSEKTVSLQMSSLRAEDTAVYYCAKNGESGPLDYWYLDLWGRGTLVTVSSTREDLKNVFPPEVAVFEPSEAEISHTQKATLVCLATGFYPDHVELSWWVNGKEVHSGVCTDPQPLKEQPALNDSRYCLSSRLRVSATFWQNPRNHFRCQVQFYGLSENDEWTQDRAKPVTQIVSAEAWGRADDVIKIHWQEKKSNTILGSQEGNTMKTNDTYMKFSWLTVPEKSLDKEHRCIVRHENNKNGVDQEIIFPPIKTDVITMDPKDNCSKDANDTLLLQLTNTSAYYMYLLLLLKSVVYFAIITCCLLMAMVKRKDSRG

SEQ ID NO: 15010 - protein, 871 aa, synthetic construct
MALPVTALLLPLALLLHAARPEVQLVESGGGLVQPGGSLRLSCAASGFSFSDFWMSWVRQAPGKGLEWVATISQAGSEKDYVDSVKGRFTISRDNAKKSLYLQMNSLRAEDTAVYYCASGVYSFDYRGQGTLVTVSSGTGGGGSGGGGSGGGGSEFSYELTQPPSVSGTPGQRVAISCSGSSSNIGTRMVTWYQHVPGTAPKLLIFNNNQRPSGVPDRFSASKSGTSASLAIIGLQSDDEADYYCATWDDNVKSYVFGTGTKVTVLGSRLEIQNPDPAVYQLRDSKSSDKSVCLFTDFDSQTNVSQSKDSDVYITDKCVLDMRSMDFKSNSAVAWSNKSDFACANAFNNSIIPEDTFFPSPESSDSTDHVKPKETENTKQPSKSCHKPKAIVHTEKVNMMSLTVLGLRMLFAKTVAVNFLLTAKLFFLLTARAKRSGSGVKQTLNFDLLKLAGDVESNPGPTSMDWIWRILFLVGAATGAHSFELEMAQVQLQQWGAGLLKPSETLSLTCAVYGGSFSGYYWSWIRQPPGKGLEWIGEINHSGSTNYNPSLKSRVTISVDTSKNQFSLKLSSVTAADTAVYYCARAPQSWYVGDVWGQGTLVTVSSTREDLKNVFPPEVAVFEPSEAEISHTQKATLVCLATGFYPDHVELSWWVNGKEVHSGVCTDPQPLKEQPALNDSRYCLSSRLRVSATFWQNPRNHFRCQVQFYGLSENDEWTQDRAKPVTQIVSAEAWGRADDVIKIHWQEKKSNTILGSQEGNTMKTNDTYMKFSWLTVPEKSLDKEHRCIVRHENNKNGVDQEIIFPPIKTDVITMDPKDNCSKDANDTLLLQLTNTSAYYMYLLLLLKSVVYFAIITCCLLMAMVKRKDSRG

SEQ ID NO: 15011 - protein, 868 aa, synthetic construct
MALPVTALLLPLALLLHAARPEVQLVESGGGLVQPGGSLRLSCAASGFSFSDFWMSWVRQAPGKGLEWVATISQAGSEKDYVDSVKGRFTISRDNAKKSLYLQMNSLRAEDTAVYYCASGVYSFDYRGQGTLVTVSSGTGGGGSGGGGSGGGGSEFQSVLTQPPSLSVAPGKTASITCGGNNIGMKSVHWYQQRPGQAPVLVIYYDSDRPSGIPGRFSGSNSGNTATLTISRVEAGDEADYYCQVWDTTGDHPGYVFGTGTKVTVLLEIQNPDPAVYQLRDSKSSDKSVCLFTDFDSQTNVSQSKDSDVYITDKCVLDMRSMDFKSNSAVAWSNKSDFACANAFNNSIIPEDTFFPSPESSDSTDHVKPKETENTKQPSKSCHKPKAIVHTEKVNMMSLTVLGLRMLFAKTVAVNFLLTAKLFFLLTARAKRSGSGVKQTLNFDLLKLAGDVESNPGPTSMDWIWRILFLVGAATGAHSFEQVQLVQSGAEVKKPGSSVKVSCKASGGTFSSYAISWVRQAPGQGLEWMGGIIPIFGTANYAQKFQGRVTITADESTSTAYMELSSLRSEDTAVYYCARGVYGYSGSAPYDEWGQGTLVTVSSTREDLKNVFPPEVAVFEPSEAEISHTQKATLVCLATGFYPDHVELSWWVNGKEVHSGVCTDPQPLKEQPALNDSRYCLSSRLRVSATFWQNPRNHFRCQVQFYGLSENDEWTQDRAKPVTQIVSAEAWGRADDVIKIHWQEKKSNTILGSQEGNTMKTNDTYMKFSWLTVPEKSLDKEHRCIVRHENNKNGVDQEIIFPPIKTDVITMDPKDNCSKDANDTLLLQLTNTSAYYMYLLLLLKSVVYFAIITCCLLMAMVKRKDSRG

SEQ ID NO: 15012 - protein, 866 aa, synthetic construct
MALPVTALLLPLALLLHAARPEVQLVESGGGLVQPGGSLRLSCAASGFSFSDFWMSWVRQAPGKGLEWVATISQAGSEKDYVDSVKGRFTISRDNAKKSLYLQMNSLRAEDTAVYYCASGVYSFDYRGQGTLVTVSSGTGGGGSGGGGSGGGGSEFEVQLVESGGGLVQPGRSLRLSCAASGFTFDDYAMHWVRQAPGKGLEWVSGISWNSGSIGYADSVKGRFTISRDNAKNSLYLQMNSLRAEDTALYYCAKDKGGGYYDFWSGSDYWGQGTLVTVSSLEIQNPDPAVYQLRDSKSSDKSVCLFTDFDSQTNVSQSKDSDVYITDKCVLDMRSMDFKSNSAVAWSNKSDFACANAFNNSIIPEDTFFPSPESSDSTDHVKPKETENTKQPSKSCHKPKAIVHTEKVNMMSLTVLGLRMLFAKTVAVNFLLTAKLFFLLTARAKRSGSGVKQTLNFDLLKLAGDVESNPGPTSMDWIWRILFLVGAATGAHSFESSELTQDPAVSVALGQTVRITCQGDSLRSYYASWYQQKPGQAPVLVIYGKNNRPSGIPDRFSGSSSGNTASLTITGAQAEDEADYYCNSRDSSGWVFGGGTKLTVLTREDLKNVFPPEVAVFEPSEAEISHTQKATLVCLATGFYPDHVELSWWVNGKEVHSGVCTDPQPLKEQPALNDSRYCLSSRLRVSATFWQNPRNHFRCQVQFYGLSENDEWTQDRAKPVTQIVSAEAWGRADDVIKIHWQEKKSNTILGSQEGNTMKTNDTYMKFSWLTVPEKSLDKEHRCIVRHENNKNGVDQEIIFPPIKTDVITMDPKDNCSKDANDTLLLQLTNTSAYYMYLLLLLKSVVYFAIITCCLLMAMVKRKDSRG

SEQ ID NO: 15013 - protein, 875 aa, synthetic construct
MALPVTALLLPLALLLHAARPEVQLVESGGGLVQPGGSLRLSCAASGFSFSDFWMSWVRQAPGKGLEWVATISQAGSEKDYVDSVKGRFTISRDNAKKSLYLQMNSLRAEDTAVYYCASGVYSFDYRGQGTLVTVSSGTGGGGSGGGGSGGGGSEFEVQLQQSGPGLVKPSQTLSLTCAISGDSVLSNSDTWNWIRQSPSRGLEWLGRTYHRSTWYDDYASSVRGRVSINVDTSKNQYSLQLNAVTPEDTGVYYCARDRLQDGNSWSDAFDVWGQGTMVTVSSLEIQNPDPAVYQLRDSKSSDKSVCLFTDFDSQTNVSQSKDSDVYITDKCVLDMRSMDFKSNSAVAWSNKSDFACANAFNNSIIPEDTFFPSPESSDSTDHVKPKETENTKQPSKSCHKPKAIVHTEKVNMMSLTVLGLRMLFAKTVAVNFLLTAKLFFLLTARAKRSGSGVKQTLNFDLLKLAGDVESNPGPTSMDWIWRILFLVGAATGAHSFEQSALTQPASVSGSPGQSITISCTGTSSDVGGYNYVSWYQQHPGKAPKLMIYDVSNRPSGVSNRFSGSKSGNTASLTISGLQAEDEADYYCSSYTSSSTLVYVFGTGTKVTVLTREDLKNVFPPEVAVFEPSEAEISHTQKATLVCLATGFYPDHVELSWWVNGKEVHSGVCTDPQPLKEQPALNDSRYCLSSRLRVSATFWQNPRNHFRCQVQFYGLSENDEWTQDRAKPVTQIVSAEAWGRADDVIKIHWQEKKSNTILGSQEGNTMKTNDTYMKFSWLTVPEKSLDKEHRCIVRHENNKNGVDQEIIFPPIKTDVITMDPKDNCSKDANDTLLLQLTNTSAYYMYLLLLLKSVVYFAIITCCLLMAMVKRKDSRG

SEQ ID NO: 15014 - protein, 853 aa, synthetic construct
MALPVTALLLPLALLLHAARPEVQLVESGGGLVQPGGSLRLSCAASGFSFSDFWMSWVRQAPGKGLEWVATISQAGSEKDYVDSVKGRFTISRDNAKKSLYLQMNSLRAEDTAVYYCASGVYSFDYRGQGTLVTVSSGTGGGGSGGGGSGGGGSEFQVQLVQSGAEVKKPGASVKVSCKASGYTFTSYDINWVRQATGQGLEWMGWMNPNSGNTGYAQKFQGRVTMTRNTSISTAYMELSSLRSEDTAVYYCARGDSTKVEIKLEIQNPDPAVYQLRDSKSSDKSVCLFTDFDSQTNVSQSKDSDVYITDKCVLDMRSMDFKSNSAVAWSNKSDFACANAFNNSIIPEDTFFPSPESSDSTDHVKPKETENTKQPSKSCHKPKAIVHTEKVNMMSLTVLGLRMLFAKTVAVNFLLTAKLFFLLTARAKRSGSGVKQTLNFDLLKLAGDVESNPGPTSMDWIWRILFLVGAATGAHSFEQSVLTQPRSVSGSPGQSVTISCTGTSSDVGGYNYVSWYQQHPGEAPKLIIYDADKRPSGISNRFSSGKSGNTASLTISGLQVEDEADYYCCSYAGGSTWVFGGGTKVTVLTREDLKNVFPPEVAVFEPSEAEISHTQKATLVCLATGFYPDHVELSWWVNGKEVHSGVCTDPQPLKEQPALNDSRYCLSSRLRVSATFWQNPRNHFRCQVQFYGLSENDEWTQDRAKPVTQIVSAEAWGRADDVIKIHWQEKKSNTILGSQEGNTMKTNDTYMKFSWLTVPEKSLDKEHRCIVRHENNKNGVDQEIIFPPIKTDVITMDPKDNCSKDANDTLLLQLTNTSAYYMYLLLLLKSVVYFAIITCCLLMAMVKRKDSRG

SEQ ID NO: 15015 - protein, 875 aa, synthetic construct
MALPVTALLLPLALLLHAARPEVQLVESGGGLVQPGGSLRLSCAASGFSFSDFWMSWVRQAPGKGLEWVATISQAGSEKDYVDSVKGRFTISRDNAKKSLYLQMNSLRAEDTAVYYCASGVYSFDYRGQGTLVTVSSGTGGGGSGGGGSGGGGSEFEVQLQQSGPGLVKPSQTLSLTCAISGDSVSSNSAAWNWIRQSPSRGLEWLGRTYYRSKWYSDYAVSVKSRITINPDTSKNQFSLQLNSVTPEDTAVYYCARDPYDFWSGYPDAFDIWGQGTMVTVSSLEIQNPDPAVYQLRDSKSSDKSVCLFTDFDSQTNVSQSKDSDVYITDKCVLDMRSMDFKSNSAVAWSNKSDFACANAFNNSIIPEDTFFPSPESSDSTDHVKPKETENTKQPSKSCHKPKAIVHTEKVNMMSLTVLGLRMLFAKTVAVNFLLTAKLFFLLTARAKRSGSGVKQTLNFDLLKLAGDVESNPGPTSMDWIWRILFLVGAATGAHSFEQSALTQPASVSGSPGQSITISCTGTSSDVGGYNYVSWYQQHPGKAPKVIISEVNNRPSGVSHRFSGSKSGNTASLTISGLQAEDEADYFCSSYTSGRTLYVFGTGSKVTVLGTREDLKNVFPPEVAVFEPSEAEISHTQKATLVCLATGFYPDHVELSWWVNGKEVHSGVCTDPQPLKEQPALNDSRYCLSSRLRVSATFWQNPRNHFRCQVQFYGLSENDEWTQDRAKPVTQIVSAEAWGRADDVIKIHWQEKKSNTILGSQEGNTMKTNDTYMKFSWLTVPEKSLDKEHRCIVRHENNKNGVDQEIIFPPIKTDVITMDPKDNCSKDANDTLLLQLTNTSAYYMYLLLLLKSVVYFAIITCCLLMAMVKRKDSRG

SEQ ID NO: 15016 - protein, 874 aa, synthetic construct
MALPVTALLLPLALLLHAARPEVQLVESGGGLVQPGGSLRLSCAASGFSFSDFWMSWVRQAPGKGLEWVATISQAGSEKDYVDSVKGRFTISRDNAKKSLYLQMNSLRAEDTAVYYCASGVYSFDYRGQGTLVTVSSGTGGGGSGGGGSGGGGSEFQSALTQPASASGSPGQSVTISCTGTSSDVGGYNYVSWYQQHPGKAPKLMIYDVSNRPSGVSNRFSGSKSGNTASLTISGLQAEDEADYYCSSYTSSSTLYVFGTGTQLTVLLEIQNPDPAVYQLRDSKSSDKSVCLFTDFDSQTNVSQSKDSDVYITDKCVLDMRSMDFKSNSAVAWSNKSDFACANAFNNSIIPEDTFFPSPESSDSTDHVKPKETENTKQPSKSCHKPKAIVHTEKVNMMSLTVLGLRMLFAKTVAVNFLLTAKLFFLLTARAKRSGSGVKQTLNFDLLKLAGDVESNPGPTSMDWIWRILFLVGAATGAHSFEEVQLQQSGPGLVKPSQTLSLTCAISGDSMLSNSDTWNWIRQSPSRGLEWLGRTYHRSTWYDDYASSVRGRVSINVDTSKNQYSLQLNAVTPEDTGVYYCARVRLQDGNSWSDAFDVWGQGTMVTVSSTREDLKNVFPPEVAVFEPSEAEISHTQKATLVCLATGFYPDHVELSWWVNGKEVHSGVCTDPQPLKEQPALNDSRYCLSSRLRVSATFWQNPRNHFRCQVQFYGLSENDEWTQDRAKPVTQIVSAEAWGRADDVIKIHWQEKKSNTILGSQEGNTMKTNDTYMKFSWLTVPEKSLDKEHRCIVRHENNKNGVDQEIIFPPIKTDVITMDPKDNCSKDANDTLLLQLTNTSAYYMYLLLLLKSVVYFAIITCCLLMAMVKRKDSRG

SEQ ID NO: 15017 - protein, 874 aa, synthetic construct
MALPVTALLLPLALLLHAARPEVQLVESGGGLVQPGGSLRLSCAASGFSFSDFWMSWVRQAPGKGLEWVATISQAGSEKDYVDSVKGRFTISRDNAKKSLYLQMNSLRAEDTAVYYCASGVYSFDYRGQGTLVTVSSGTGGGGSGGGGSGGGGSEFDVMLTQTPLSLPVSLGDQASISCRSSQSILHSTGDTYLEWYLQKPGQSPKLLINKVSNRLSGVPDRFSGSGSGTDFTLKISRVEAEDLGVYYCFQGSHVPWTFGGGTKLEIKRADAAPTVSIFPLEIQNPDPAVYQLRDSKSSDKSVCLFTDFDSQTNVSQSKDSDVYITDKCVLDMRSMDFKSNSAVAWSNKSDFACANAFNNSIIPEDTFFPSPESSDSTDHVKPKETENTKQPSKSCHKPKAIVHTEKVNMMSLTVLGLRMLFAKTVAVNFLLTAKLFFLLTARAKRSGSGVKQTLNFDLLKLAGDVESNPGPTSMDWIWRILFLVGAATGAHSFEQVKLQQSGPSLVKPGASVKMSCKASGYTFTDFYMKWVKQSHGKSLEWIGDINPNIGDTFYNQKFKGKATLTVDKSSSTAYMQLNSLTSEDSAVYFCSVGYFDVWGAGTTVTVSSTREDLKNVFPPEVAVFEPSEAEISHTQKATLVCLATGFYPDHVELSWWVNGKEVHSGVCTDPQPLKEQPALNDSRYCLSSRLRVSATFWQNPRNHFRCQVQFYGLSENDEWTQDRAKPVTQIVSAEAWGRADDVIKIHWQEKKSNTILGSQEGNTMKTNDTYMKFSWLTVPEKSLDKEHRCIVRHENNKNGVDQEIIFPPIKTDVITMDPKDNCSKDANDTLLLQLTNTSAYYMYLLLLLKSVVYFAIITCCLLMAMVKRKDSRG

SEQ ID NO: 15018 - protein, 870 aa, synthetic construct
MALPVTALLLPLALLLHAARPEVQLVESGGGLVQPGGSLRLSCAASGFSFSDFWMSWVRQAPGKGLEWVATISQAGSEKDYVDSVKGRFTISRDNAKKSLYLQMNSLRAEDTAVYYCASGVYSFDYRGQGTLVTVSSGTGGGGSGGGGSGGGGSEFEIVLTQSPATLSLSPGERATLSCRASQSVSIYLAWYQQKPGQAPRLLIYDASNRATGIPARFSGSGSGTDFTLTISSLEPEDFAVYYCQQRSNWPPFTFGPGTKVDIKLEIQNPDPAVYQLRDSKSSDKSVCLFTDFDSQTNVSQSKDSDVYITDKCVLDMRSMDFKSNSAVAWSNKSDFACANAFNNSIIPEDTFFPSPESSDSTDHVKPKETENTKQPSKSCHKPKAIVHTEKVNMMSLTVLGLRMLFAKTVAVNFLLTAKLFFLLTARAKRSGSGVKQTLNFDLLKLAGDVESNPGPTSMDWIWRILFLVGAATGAHSFEQVQLVESGGGVVQPGRSLRLSCAASGFTFSSYGMHWVRQAPGKGLEWVAVIWDDGSNKYYVDSVKGRFTISRDNSKNTLYLQMNSLRAEDTAVYYCARDDYYGSGSFNSYYGTDVWGQGTTVTVSSTREDLKNVFPPEVAVFEPSEAEISHTQKATLVCLATGFYPDHVELSWWVNGKEVHSGVCTDPQPLKEQPALNDSRYCLSSRLRVSATFWQNPRNHFRCQVQFYGLSENDEWTQDRAKPVTQIVSAEAWGRADDVIKIHWQEKKSNTILGSQEGNTMKTNDTYMKFSWLTVPEKSLDKEHRCIVRHENNKNGVDQEIIFPPIKTDVITMDPKDNCSKDANDTLLLQLTNTSAYYMYLLLLLKSVVYFAIITCCLLMAMVKRKDSRG

SEQ ID NO: 15019 - protein, 855 aa, synthetic construct
MALPVTALLLPLALLLHAARPEVQLVESGGGLVQPGGSLRLSCAASGFSFSDFWMSWVRQAPGKGLEWVATISQAGSEKDYVDSVKGRFTISRDNAKKSLYLQMNSLRAEDTAVYYCASGVYSFDYRGQGTLVTVSSGTGGGGSGGGGSGGGGSEFDIQMTQSPSSLSASVGDRVTITCRASQGISSWLAWYQQKPEKAPKSLIYAASSLQSGVPSRFSGSGSGTDFTLTISSLQPEDFATYYCQQYNSYPYTFGQGTKLEIKLEIQNPDPAVYQLRDSKSSDKSVCLFTDFDSQTNVSQSKDSDVYITDKCVLDMRSMDFKSNSAVAWSNKSDFACANAFNNSIIPEDTFFPSPESSDSTDHVKPKETENTKQPSKSCHKPKAIVHTEKVNMMSLTVLGLRMLFAKTVAVNFLLTAKLFFLLTARAKRSGSGVKQTLNFDLLKLAGDVESNPGPTSMDWIWRILFLVGAATGAHSFEEVQLVQSGGGLVHPGGSLRLSCAGSGFTFSTYLMYWVRQAPGKTLEWVSAIGSGGDTYYADSVKGRFTISRDNAKNSLYLQMNSLRAEDMAVYYCARGLGYWGQGTLVTVSSTREDLKNVFPPEVAVFEPSEAEISHTQKATLVCLATGFYPDHVELSWWVNGKEVHSGVCTDPQPLKEQPALNDSRYCLSSRLRVSATFWQNPRNHFRCQVQFYGLSENDEWTQDRAKPVTQIVSAEAWGRADDVIKIHWQEKKSNTILGSQEGNTMKTNDTYMKFSWLTVPEKSLDKEHRCIVRHENNKNGVDQEIIFPPIKTDVITMDPKDNCSKDANDTLLLQLTNTSAYYMYLLLLLKSVVYFAIITCCLLMAMVKRKDSRG

SEQ ID NO: 15020 - protein, 874 aa, synthetic construct
MALPVTALLLPLALLLHAARPEVQLVESGGGLVQPGGSLRLSCAASGFSFSDFWMSWVRQAPGKGLEWVATISQAGSEKDYVDSVKGRFTISRDNAKKSLYLQMNSLRAEDTAVYYCASGVYSFDYRGQGTLVTVSSGTGGGGSGGGGSGGGGSEFLPVLTQPPSVSVAPGKTARITCGGNNIGSKSVHWYQQKPGQAPVLVVYDDSDRPSGIPERFSGSNSGNTATLTISRVEAGDEADYYCQVWDSSSDYVVFGGGTKLTVLLEIQNPDPAVYQLRDSKSSDKSVCLFTDFDSQTNVSQSKDSDVYITDKCVLDMRSMDFKSNSAVAWSNKSDFACANAFNNSIIPEDTFFPSPESSDSTDHVKPKETENTKQPSKSCHKPKAIVHTEKVNMMSLTVLGLRMLFAKTVAVNFLLTAKLFFLLTARAKRSGSGVKQTLNFDLLKLAGDVESNPGPTSMDWIWRILFLVGAATGAHSFEEVQLVQSGAEVKKPGESLKISCKGSGYSFTSYWIGWVRQMPGKGLEWMGIIYPGDSDTRYSPSFQGQVTISADKSISTAYLQWSSLKASDTAMYYCARQVWGWQGGMYPRSNWWYNLDSWGQGTLVTVSSTREDLKNVFPPEVAVFEPSEAEISHTQKATLVCLATGFYPDHVELSWWVNGKEVHSGVCTDPQPLKEQPALNDSRYCLSSRLRVSATFWQNPRNHFRCQVQFYGLSENDEWTQDRAKPVTQIVSAEAWGRADDVIKIHWQEKKSNTILGSQEGNTMKTNDTYMKFSWLTVPEKSLDKEHRCIVRHENNKNGVDQEIIFPPIKTDVITMDPKDNCSKDANDTLLLQLTNTSAYYMYLLLLLKSVVYFAIITCCLLMAMVKRKDSRG

SEQ ID NO: 15021 - protein, 867 aa, synthetic construct
MALPVTALLLPLALLLHAARPEVQLVESGGGLVQPGGSLRLSCAASGFSFSDFWMSWVRQAPGKGLEWVATISQAGSEKDYVDSVKGRFTISRDNAKKSLYLQMNSLRAEDTAVYYCASGVYSFDYRGQGTLVTVSSGTGGGGSGGGGSGGGGSEFELVMTQSPASLAVSLGQRATISCRASESVDSYGKSFMHWYQLKPGQPPKLLIYRASNLESGVPARFSGSGSRTDFTLTIDPVEADDAATYYCQQNNEDPWTFGGGTKLEIKLEIQNPDPAVYQLRDSKSSDKSVCLFTDFDSQTNVSQSKDSDVYITDKCVLDMRSMDFKSNSAVAWSNKSDFACANAFNNSIIPEDTFFPSPESSDSTDHVKPKETENTKQPSKSCHKPKAIVHTEKVNMMSLTVLGLRMLFAKTVAVNFLLTAKLFFLLTARAKRSGSGVKQTLNFDLLKLAGDVESNPGPTSMDWIWRILFLVGAATGAHSFEEVQLEQSGPELVKPGASVKMSCKASGYTFTNYYMKWVKQSHGKSLEWIGDLNPNNGDTFYNQKFKGKATLTVDKSSNTAYMQLNSLTSEDSAVYYCARTGRYEENAMDYWGQGTSVTVSSTREDLKNVFPPEVAVFEPSEAEISHTQKATLVCLATGFYPDHVELSWWVNGKEVHSGVCTDPQPLKEQPALNDSRYCLSSRLRVSATFWQNPRNHFRCQVQFYGLSENDEWTQDRAKPVTQIVSAEAWGRADDVIKIHWQEKKSNTILGSQEGNTMKTNDTYMKFSWLTVPEKSLDKEHRCIVRHENNKNGVDQEIIFPPIKTDVITMDPKDNCSKDANDTLLLQLTNTSAYYMYLLLLLKSVVYFAIITCCLLMAMVKRKDSRG

SEQ ID NO: 15022 - protein, 861 aa, synthetic construct
MALPVTALLLPLALLLHAARPEVQLVESGGGLVQPGGSLRLSCAASGFSFSDFWMSWVRQAPGKGLEWVATISQAGSEKDYVDSVKGRFTISRDNAKKSLYLQMNSLRAEDTAVYYCASGVYSFDYRGQGTLVTVSSGTGGGGSGGGGSGGGGSEFDVVMTQSPSSLSASVGDRVTITCMASEDIYIRLAWYQQKPGNAPKLLIYAATSLETGVPSRFSGSGSGTDFTLTISSLQPEDFATYYCQQYWSSPWTFGGGTKVEIKLEIQNPDPAVYQLRDSKSSDKSVCLFTDFDSQTNVSQSKDSDVYITDKCVLDMRSMDFKSNSAVAWSNKSDFACANAFNNSIIPEDTFFPSPESSDSTDHVKPKETENTKQPSKSCHKPKAIVHTEKVNMMSLTVLGLRMLFAKTVAVNFLLTAKLFFLLTARAKRSGSGVKQTLNFDLLKLAGDVESNPGPTSMDWIWRILFLVGAATGAHSFEQVQLQESGPGLVKPSQTLSLTCTVSGYSITSDYTWNWIRQPPGNGLEWIGYITYSGSTSYNPSLKSRVLISVDTSKNQVSLKLSSVTAADTAVYYCARLGRRYTMDYWGQGTTVTVSSTREDLKNVFPPEVAVFEPSEAEISHTQKATLVCLATGFYPDHVELSWWVNGKEVHSGVCTDPQPLKEQPALNDSRYCLSSRLRVSATFWQNPRNHFRCQVQFYGLSENDEWTQDRAKPVTQIVSAEAWGRADDVIKIHWQEKKSNTILGSQEGNTMKTNDTYMKFSWLTVPEKSLDKEHRCIVRHENNKNGVDQEIIFPPIKTDVITMDPKDNCSKDANDTLLLQLTNTSAYYMYLLLLLKSVVYFAIITCCLLMAMVKRKDSRG

SEQ ID NO: 15023 - protein, 865 aa, synthetic construct; identical to SEQ ID NO: 14886

SEQ ID NO: 15024 - protein, 865 aa, synthetic construct
MALPVTALLLPLALLLHAARPEVQLVESGGGLVQPGGSLRLSCAASGFSFSDFWMSWVRQAPGKGLEWVATISQAGSEKDYVDSVKGRFTISRDNAKKSLYLQMNSLRAEDTAVYYCASGVYSFDYRGQGTLVTVSSGTGGGGSGGGGSGGGGSEFDIVLTQSPATLSLSPGDRATLSCRASESVTILGSHLIYWYQQKPGQAPRLLIQLASNVQTGIPARFSGSGSRTDFTLTISSLEPEDFAVYYCLQSRTIPRTFGQGTKLEIKRLEIQNPDPAVYQLRDSKSSDKSVCLFTDFDSQTNVSQSKDSDVYITDKCVLDMRSMDFKSNSAVAWSNKSDFACANAFNNSIIPEDTFFPSPESSDSTDHVKPKETENTKQPSKSCHKPKAIVHTEKVNMMSLTVLGLRMLFAKTVAVNFLLTAKLFFLLTARAKRSGSGVKQTLNFDLLKLAGDVESNPGPTSMDWIWRILFLVGAATGAHSFEQVQLVQSGSELKKPGESVKISCKASGYTFTHYSMNWVRQAPGQGLEWMGRINTETGEPLYADDFKGRFVFSLDTSASTAYLQISSLKAEDTAVYYCSNDYLYSLDYWGQGTLVTVSSTREDLKNVFPPEVAVFEPSEAEISHTQKATLVCLATGFYPDHVELSWWVNGKEVHSGVCTDPQPLKEQPALNDSRYCLSSRLRVSATFWQNPRNHFRCQVQFYGLSENDEWTQDRAKPVTQIVSAEAWGRADDVIKIHWQEKKSNTILGSQEGNTMKTNDTYMKFSWLTVPEKSLDKEHRCIVRHENNKNGVDQEIIFPPIKTDVITMDPKDNCSKDANDTLLLQLTNTSAYYMYLLLLLKSVVYFAIITCCLLMAMVKRKDSRG

SEQ ID NO: 15025 - protein, 866 aa, synthetic construct
MALPVTALLLPLALLLHAARPEVQLVESGGGLVQPGGSLRLSCAASGFSFSDFWMSWVRQAPGKGLEWVATISQAGSEKDYVDSVKGRFTISRDNAKKSLYLQMNSLRAEDTAVYYCASGVYSFDYRGQGTLVTVSSGTGGGGSGGGGSGGGGSEFDIQLTQSPSFLSASVGDRVTITCRASQGISTDLNWYQQKPGKAPKLLIYAASNLESGVPSRFSGSGSGTEFTLTISSLQPEDFATYYCQQSYNWPYTFGGGTKVEIKRLEIQNPDPAVYQLRDSKSSDKSVCLFTDFDSQTNVSQSKDSDVYITDKCVLDMRSMDFKSNSAVAWSNKSDFACANAFNNSIIPEDTFFPSPESSDSTDHVKPKETENTKQPSKSCHKPKAIVHTEKVNMMSLTVLGLRMLFAKTVAVNFLLTAKLFFLLTARAKRSGSGVKQTLNFDLLKLAGDVESNPGPTSMDWIWRILFLVGAATGAHSFEEVQLVESGGGLVKPGGSLRLSCAASGFTFSNFEMNWVRQAPGKGLEWVSGISSNGRYINYADSVKGRFTISRDNAKNSLYLQMNSLRAEDTAVYYCARVVDFDQDYNGFDYWGQGTLVTVSSTREDLKNVFPPEVAVFEPSEAEISHTQKATLVCLATGFYPDHVELSWWVNGKEVHSGVCTDPQPLKEQPALNDSRYCLSSRLRVSATFWQNPRNHFRCQVQFYGLSENDEWTQDRAKPVTQIVSAEAWGRADDVIKIHWQEKKSNTILGSQEGNTMKTNDTYMKFSWLTVPEKSLDKEHRCIVRHENNKNGVDQEIIFPPIKTDVITMDPKDNCSKDANDTLLLQLTNTSAYYMYLLLLLKSVVYFAIITCCLLMAMVKRKDSRG

SEQ ID NO: 15026 - protein, 864 aa, synthetic construct
MALPVTALLLPLALLLHAARPEVQLVESGGGLVQPGGSLRLSCAASGFSFSDFWMSWVRQAPGKGLEWVATISQAGSEKDYVDSVKGRFTISRDNAKKSLYLQMNSLRAEDTAVYYCASGVYSFDYRGQGTLVTVSSGTGGGGSGGGGSGGGGSEFDIQLTQSPSFLSASVGDRVTITCSLSLGISTWRDWFPPRLGRGLEPLTYAASTLQSGVPSRFSGSGSGTEFTLTISSLQPEDFATYYCQQLNSYPLTFGGGTKVEIKRLEIQNPDPAVYQLRDSKSSDKSVCLFTDFDSQTNVSQSKDSDVYITDKCVLDMRSMDFKSNSAVAWSNKSDFACANAFNNSIIPEDTFFPSPESSDSTDHVKPKETENTKQPSKSCHKPKAIVHTEKVNMMSLTVLGLRMLFAKTVAVNFLLTAKLFFLLTARAKRSGSGVKQTLNFDLLKLAGDVESNPGPTSMDWIWRILFLVGAATGAHSFEEVQLVESGGGLVKPGGSLRLSCAASGFTFSTYGMSWVRQAPGKGLEWVAYINNGSGYIYYADSVKGRFTISRDNAKNSLYLQMNSLRAEDTAVYYCARGQWWSGGDFDYWGQGTLVTVSSTREDLKNVFPPEVAVFEPSEAEISHTQKATLVCLATGFYPDHVELSWWVNGKEVHSGVCTDPQPLKEQPALNDSRYCLSSRLRVSATFWQNPRNHFRCQVQFYGLSENDEWTQDRAKPVTQIVSAEAWGRADDVIKIHWQEKKSNTILGSQEGNTMKTNDTYMKFSWLTVPEKSLDKEHRCIVRHENNKNGVDQEIIFPPIKTDVITMDPKDNCSKDANDTLLLQLTNTSAYYMYLLLLLKSVVYFAIITCCLLMAMVKRKDSRG

SEQ ID NO: 15027 - protein, 865 aa, synthetic construct
MALPVTALLLPLALLLHAARPEVQLVESGGGLVQPGGSLRLSCAASGFSFSDFWMSWVRQAPGKGLEWVATISQAGSEKDYVDSVKGRFTISRDNAKKSLYLQMNSLRAEDTAVYYCASGVYSFDYRGQGTLVTVSSGTGGGGSGGGGSGGGGSEFEIVLTQSPATLSLSPGERATLSCSASSSVSYMYWYQQKPGQAPRLLIYRTSNLASGIPARFSGSGSGTDFTLTISSLEPEDFAVYYCQQYHSYPTTFGQGTKVEIKRTVLEIQNPDPAVYQLRDSKSSDKSVCLFTDFDSQTNVSQSKDSDVYITDKCVLDMRSMDFKSNSAVAWSNKSDFACANAFNNSIIPEDTFFPSPESSDSTDHVKPKETENTKQPSKSCHKPKAIVHTEKVNMMSLTVLGLRMLFAKTVAVNFLLTAKLFFLLTARAKRSGSGVKQTLNFDLLKLAGDVESNPGPTSMDWIWRILFLVGAATGAHSFEEVQLVESGGGLVQPGGSLRLSCAASGFSFNTYAMNWVRQAPGKGLEWVSHIRSKSNNFATYYADSVKDRFTISRDNAKNSLYLQMNSLRAEDTAVYYCARQGGDFPMDYWGQGTLVTVSSTREDLKNVFPPEVAVFEPSEAEISHTQKATLVCLATGFYPDHVELSWWVNGKEVHSGVCTDPQPLKEQPALNDSRYCLSSRLRVSATFWQNPRNHFRCQVQFYGLSENDEWTQDRAKPVTQIVSAEAWGRADDVIKIHWQEKKSNTILGSQEGNTMKTNDTYMKFSWLTVPEKSLDKEHRCIVRHENNKNGVDQEIIFPPIKTDVITMDPKDNCSKDANDTLLLQLTNTSAYYMYLLLLLKSVVYFAIITCCLLMAMVKRKDSRG

SEQ ID NO: 15028 - protein, 861 aa, synthetic construct
MALPVTALLLPLALLLHAARPEVQLVESGGGLVQPGGSLRLSCAASGFSFSDFWMSWVRQAPGKGLEWVATISQAGSEKDYVDSVKGRFTISRDNAKKSLYLQMNSLRAEDTAVYYCASGVYSFDYRGQGTLVTVSSGTGGGGSGGGGSGGGGSEFDVVMTQSPSSLSASVGDRVTITCKASEDIYIRLAWYQQKPGKAPKLLIYAATSLETGVPSRFSGSGSGTDFTLTISSLQPEDFATYYCQQYWTTPWTFGGGTKVEIKLEIQNPDPAVYQLRDSKSSDKSVCLFTDFDSQTNVSQSKDSDVYITDKCVLDMRSMDFKSNSAVAWSNKSDFACANAFNNSIIPEDTFFPSPESSDSTDHVKPKETENTKQPSKSCHKPKAIVHTEKVNMMSLTVLGLRMLFAKTVAVNFLLTAKLFFLLTARAKRSGSGVKQTLNFDLLKLAGDVESNPGPTSMDWIWRILFLVGAATGAHSFEQVQLQESGPGLVKPSQTLSLTCTVSGYSITIDYTWNWIRQPPGKGLEWIGYITYSGSTDYNPSLKSRVLISVDTSKNQVSLKLSSVTAADTAVYYCARLGRRYALDYWGQGTTVTVSSTREDLKNVFPPEVAVFEPSEAEISHTQKATLVCLATGFYPDHVELSWWVNGKEVHSGVCTDPQPLKEQPALNDSRYCLSSRLRVSATFWQNPRNHFRCQVQFYGLSENDEWTQDRAKPVTQIVSAEAWGRADDVIKIHWQEKKSNTILGSQEGNTMKTNDTYMKFSWLTVPEKSLDKEHRCIVRHENNKNGVDQEIIFPPIKTDVITMDPKDNCSKDANDTLLLQLTNTSAYYMYLLLLLKSVVYFAIITCCLLMAMVKRKDSRG

SEQ ID NO: 15029 - protein, 865 aa, synthetic construct
MALPVTALLLPLALLLHAARPEVQLVESGGGLVQPGGSLRLSCAASGFSFSDFWMSWVRQAPGKGLEWVATISQAGSEKDYVDSVKGRFTISRDNAKKSLYLQMNSLRAEDTAVYYCASGVYSFDYRGQGTLVTVSSGTGGGGSGGGGSGGGGSEFDIQMTQTTSSLSASLGDRVTISCRASQDISNYLNWYQQKPDGTVKLLIYYTSILHSGVPSRFSGSGSGTDYSLTISNLEQEDFATYFCQQGNTLPWTFGGGTKLEIKALEIQNPDPAVYQLRDSKSSDKSVCLFTDFDSQTNVSQSKDSDVYITDKCVLDMRSMDFKSNSAVAWSNKSDFACANAFNNSIIPEDTFFPSPESSDSTDHVKPKETENTKQPSKSCHKPKAIVHTEKVNMMSLTVLGLRMLFAKTVAVNFLLTAKLFFLLTARAKRSGSGVKQTLNFDLLKLAGDVESNPGPTSMDWIWRILFLVGAATGAHSFEVQLVESGGGLVKPGGSLKLSCAASGFAFSIYDMSWVRQTPEKRLEWVAYISSGGGTYYPDTVKGRFTISRDNAKNTLYLQMSSLKSEDTAMYYCARHSGYGTHWGVLFAYWGQGTLVTVSATREDLKNVFPPEVAVFEPSEAEISHTQKATLVCLATGFYPDHVELSWWVNGKEVHSGVCTDPQPLKEQPALNDSRYCLSSRLRVSATFWQNPRNHFRCQVQFYGLSENDEWTQDRAKPVTQIVSAEAWGRADDVIKIHWQEKKSNTILGSQEGNTMKTNDTYMKFSWLTVPEKSLDKEHRCIVRHENNKNGVDQEIIFPPIKTDVITMDPKDNCSKDANDTLLLQLTNTSAYYMYLLLLLKSVVYFAIITCCLLMAMVKRKDSRG

SEQ ID NO: 15030 - protein, 876 aa, synthetic construct
MALPVTALLLPLALLLHAARPEVQLVESGGGLVQPGGSLRLSCAASGFSFSDFWMSWVRQAPGKGLEWVATISQAGSEKDYVDSVKGRFTISRDNAKKSLYLQMNSLRAEDTAVYYCASGVYSFDYRGQGTLVTVSSGTGGGGSGGGGSGGGGSEFDIVMTQSPDSLAVSLGERATINCKSSQSLLYRSNQKNYLAWYQQKPGQPPKLLIYWASTRESGVPDRFSGSGSGTDFTLTISSLQAEDVAVYYCQQYYNYPRTFGQGTKVEIKRTVLEIQNPDPAVYQLRDSKSSDKSVCLFTDFDSQTNVSQSKDSDVYITDKCVLDMRSMDFKSNSAVAWSNKSDFACANAFNNSIIPEDTFFPSPESSDSTDHVKPKETENTKQPSKSCHKPKAIVHTEKVNMMSLTVLGLRMLFAKTVAVNFLLTAKLFFLLTARAKRSGSGVKQTLNFDLLKLAGDVESNPGPTSMDWIWRILFLVGAATGAHSFEEVQLLESGGGLVQPGGSLRLSCAASGYSITSDYAWNWVRQAPGKGLEWVSYISNSGSTSYNPSLKSRFTISRDNSKNTLYLQMNSLRAEDTAVYYCAKERNYDYDDYYYAMDYWGQGTLVTVSSTREDLKNVFPPEVAVFEPSEAEISHTQKATLVCLATGFYPDHVELSWWVNGKEVHSGVCTDPQPLKEQPALNDSRYCLSSRLRVSATFWQNPRNHFRCQVQFYGLSENDEWTQDRAKPVTQIVSAEAWGRADDVIKIHWQEKKSNTILGSQEGNTMKTNDTYMKFSWLTVPEKSLDKEHRCIVRHENNKNGVDQEIIFPPIKTDVITMDPKDNCSKDANDTLLLQLTNTSAYYMYLLLLLKSVVYFAIITCCLLMAMVKRKDSRG

SEQ ID NO: 15031 - protein, 869 aa, synthetic construct
MALPVTALLLPLALLLHAARPEVQLVESGGGLVQPGGSLRLSCAASGFSFSDFWMSWVRQAPGKGLEWVATISQAGSEKDYVDSVKGRFTISRDNAKKSLYLQMNSLRAEDTAVYYCASGVYSFDYRGQGTLVTVSSGTGGGGSGGGGSGGGGSEFDVVMTQSPLSLPVTLGQPASISCRSSQSLLHSSGNTYLEWYQQRPGQSPRPLIYKISTRFSGVPDRFSGSGSGTDFTLKISRVEAEDVGVYYCFQGSHVPYTFGGGTKVEIKRLEIQNPDPAVYQLRDSKSSDKSVCLFTDFDSQTNVSQSKDSDVYITDKCVLDMRSMDFKSNSAVAWSNKSDFACANAFNNSIIPEDTFFPSPESSDSTDHVKPKETENTKQPSKSCHKPKAIVHTEKVNMMSLTVLGLRMLFAKTVAVNFLLTAKLFFLLTARAKRSGSGVKQTLNFDLLKLAGDVESNPGPTSMDWIWRILFLVGAATGAHSFEQVQLVQSGAEVKKPGASVKVSCKASGLTIEDYYMHWVRQAPGQGLEWMGWIDPENGDTEYGPKFQGRVTMTRDTSINTAYMELSRLRSDDTAVYYCAVHNAHYGTWFAYWGQGTLVTVSSTREDLKNVFPPEVAVFEPSEAEISHTQKATLVCLATGFYPDHVELSWWVNGKEVHSGVCTDPQPLKEQPALNDSRYCLSSRLRVSATFWQNPRNHFRCQVQFYGLSENDEWTQDRAKPVTQIVSAEAWGRADDVIKIHWQEKKSNTILGSQEGNTMKTNDTYMKFSWLTVPEKSLDKEHRCIVRHENNKNGVDQEIIFPPIKTDVITMDPKDNCSKDANDTLLLQLTNTSAYYMYLLLLLKSVVYFAIITCCLLMAMVKRKDSRG

SEQ ID NO: 15032 - protein, 861 aa, synthetic construct
MALPVTALLLPLALLLHAARPEVQLVESGGGLVQPGGSLRLSCAASGFSFSDFWMSWVRQAPGKGLEWVATISQAGSEKDYVDSVKGRFTISRDNAKKSLYLQMNSLRAEDTAVYYCASGVYSFDYRGQGTLVTVSSGTGGGGSGGGGSGGGGSEFDIQMTQSPSSLSASVGDRVTITCRASENIYSNLAWYQQKPGKAPKLLIYAATNLADGVPSRFSGSGSGTDFTLTISSLQPEDFATYYCQHFWGTPTFGQGTKVEIKRTVLEIQNPDPAVYQLRDSKSSDKSVCLFTDFDSQTNVSQSKDSDVYITDKCVLDMRSMDFKSNSAVAWSNKSDFACANAFNNSIIPEDTFFPSPESSDSTDHVKPKETENTKQPSKSCHKPKAIVHTEKVNMMSLTVLGLRMLFAKTVAVNFLLTAKLFFLLTARAKRSGSGVKQTLNFDLLKLAGDVESNPGPTSMDWIWRILFLVGAATGAHSFEEVQLVESGGGLVQPGGSLRLSCAASGFSLTNYGVHWVRQAPGKGLEWVSVIWSGGSTDYNAAFISRFTISADTSKNTAYLQMNSLRAEDTAVYYCARELIHAMDNWGQGTLVTVSSTREDLKNVFPPEVAVFEPSEAEISHTQKATLVCLATGFYPDHVELSWWVNGKEVHSGVCTDPQPLKEQPALNDSRYCLSSRLRVSATFWQNPRNHFRCQVQFYGLSENDEWTQDRAKPVTQIVSAEAWGRADDVIKIHWQEKKSNTILGSQEGNTMKTNDTYMKFSWLTVPEKSLDKEHRCIVRHENNKNGVDQEIIFPPIKTDVITMDPKDNCSKDANDTLLLQLTNTSAYYMYLLLLLKSVVYFAIITCCLLMAMVKRKDSRG

SEQ ID NO: 15033 - protein, 868 aa, synthetic construct
MALPVTALLLPLALLLHAARPEVQLVESGGGLVQPGGSLRLSCAASGFSFSDFWMSWVRQAPGKGLEWVATISQAGSEKDYVDSVKGRFTISRDNAKKSLYLQMNSLRAEDTAVYYCASGVYSFDYRGQGTLVTVSSGTGGGGSGGGGSGGGGSEFDFVMTQSPLSLPVTPGEPASISCRSSQSIVHSNGNTYLEWYLQKPGQSPQLLIYKVSNRFSGVPDRFSGSGSGTDFTLKISRVEAEDVGVYYCFQGSHVPLTFGQGTKLEIKRLEIQNPDPAVYQLRDSKSSDKSVCLFTDFDSQTNVSQSKDSDVYITDKCVLDMRSMDFKSNSAVAWSNKSDFACANAFNNSIIPEDTFFPSPESSDSTDHVKPKETENTKQPSKSCHKPKAIVHTEKVNMMSLTVLGLRMLFAKTVAVNFLLTAKLFFLLTARAKRSGSGVKQTLNFDLLKLAGDVESNPGPTSMDWIWRILFLVGAATGAHSFEEVQLVESGAEVKKPGASVKVSCKASGYTFTSYWIHWVRQAPGQGLEWMGENDPSNGRTNYNEKFKNRVTLTVDTSISTAYMELSRLRSDDTAVYYCARGPNYFYSMDYWGQGTMVTVSSTREDLKNVFPPEVAVFEPSEAEISHTQKATLVCLATGFYPDHVELSWWVNGKEVHSGVCTDPQPLKEQPALNDSRYCLSSRLRVSATFWQNPRNHFRCQVQFYGLSENDEWTQDRAKPVTQIVSAEAWGRADDVIKIHWQEKKSNTILGSQEGNTMKTNDTYMKFSWLTVPEKSLDKEHRCIVRHENNKNGVDQEIIFPPIKTDVITMDPKDNCSKDANDTLLLQLTNTSAYYMYLLLLLKSVVYFAIITCCLLMAMVKRKDSRG

SEQ ID NO: 15034 - protein, 861 aa, synthetic construct
MALPVTALLLPLALLLHAARPEVQLVESGGGLVQPGGSLRLSCAASGFSFSDFWMSWVRQAPGKGLEWVATISQAGSEKDYVDSVKGRFTISRDNAKKSLYLQMNSLRAEDTAVYYCASGVYSFDYRGQGTLVTVSSGTGGGGSGGGGSGGGGSEFDIQLTQSPSFLSASVGDRVTITCSARSSISFMYWYQQKPGKAPKLLIYDTSNLASGVPSRFSGSGSGTEFTLTISSLEAEDAATYYCQQWSSYPLTFGQGTKLEIKLEIQNPDPAVYQLRDSKSSDKSVCLFTDFDSQTNVSQSKDSDVYITDKCVLDMRSMDFKSNSAVAWSNKSDFACANAFNNSIIPEDTFFPSPESSDSTDHVKPKETENTKQPSKSCHKPKAIVHTEKVNMMSLTVLGLRMLFAKTVAVNFLLTAKLFFLLTARAKRSGSGVKQTLNFDLLKLAGDVESNPGPTSMDWIWRILFLVGAATGAHSFEQVQLVQSGAEVKKPGASVKVSCKASGYTFTGSWMNWVRQAPGQGLEWIGRIYPGDGETNYNGKFKDRVTITADKSTSTAYMELSSLRSEDTAVYYCARIYGNNVYFDVWGQGTTVTVSSTREDLKNVFPPEVAVFEPSEAEISHTQKATLVCLATGFYPDHVELSWWVNGKEVHSGVCTDPQPLKEQPALNDSRYCLSSRLRVSATFWQNPRNHFRCQVQFYGLSENDEWTQDRAKPVTQIVSAEAWGRADDVIKIHWQEKKSNTILGSQEGNTMKTNDTYMKFSWLTVPEKSLDKEHRCIVRHENNKNGVDQEIIFPPIKTDVITMDPKDNCSKDANDTLLLQLTNTSAYYMYLLLLLKSVVYFAIITCCLLMAMVKRKDSRG

SEQ ID NO: 15035 - protein, 869 aa, synthetic construct
MALPVTALLLPLALLLHAARPEVQLVESGGGLVQPGGSLRLSCAASGFSFSDFWMSWVRQAPGKGLEWVATISQAGSEKDYVDSVKGRFTISRDNAKKSLYLQMNSLRAEDTAVYYCASGVYSFDYRGQGTLVTVSSGTGGGGSGGGGSGGGGSEFQLVLTQSPSASASLGSSVKLTCTLSSGHKTDTIDWYQQQPGKAPRYLMKLEGSGSYNKGSGVPDRFSGSSSGADWYLTISSLQSEDEADYYCGTDYPGNYLFGGGTQLTVLGLEIQNPDPAVYQLRDSKSSDKSVCLFTDFDSQTNVSQSKDSDVYITDKCVLDMRSMDFKSNSAVAWSNKSDFACANAFNNSIIPEDTFFPSPESSDSTDHVKPKETENTKQPSKSCHKPKAIVHTEKVNMMSLTVLGLRMLFAKTVAVNFLLTAKLFFLLTARAKRSGSGVKQTLNFDLLKLAGDVESNPGPTSMDWIWRILFLVGAATGAHSFEQEQLVESGGGLVQPGGSLRLSCAASGFTFSDYYMSWIRQAPGKGLEWVATIYPSSGKTYYADSAKGRLTISSDNAKDSLYLQMNSLRAEDTAVYYCTRDSYADDAALFDIWGQGTTVTVSSTREDLKNVFPPEVAVFEPSEAEISHTQKATLVCLATGFYPDHVELSWWVNGKEVHSGVCTDPQPLKEQPALNDSRYCLSSRLRVSATFWQNPRNHFRCQVQFYGLSENDEWTQDRAKPVTQIVSAEAWGRADDVIKIHWQEKKSNTILGSQEGNTMKTNDTYMKFSWLTVPEKSLDKEHRCIVRHENNKNGVDQEIIFPPIKTDVITMDPKDNCSKDANDTLLLQLTNTSAYYMYLLLLLKSVVYFAIITCCLLMAMVKRKDSRG

SEQ ID NO: 15036 - protein, 861 aa, synthetic construct; identical to SEQ ID NO: 15032

SEQ ID NO: 15037 - protein, 868 aa, synthetic construct; identical to SEQ ID NO: 15033

SEQ ID NO: 15038 - protein, 861 aa, synthetic construct; identical to SEQ ID NO: 15034

SEQ ID NO: 15039 - protein, 869 aa, synthetic construct; identical to SEQ ID NO: 15035

SEQ ID NO: 15040 - protein, 868 aa, synthetic construct
MALPVTALLLPLALLLHAARPEVQLVESGGGLVQPGGSLRLSCAASGFSFSDFWMSWVRQAPGKGLEWVATISQAGSEKDYVDSVKGRFTISRDNAKKSLYLQMNSLRAEDTAVYYCASGVYSFDYRGQGTLVTVSSGTGGGGSGGGGSGGGGSEFDIQLTQSPSSLSASVGDRVSFTCQASQDINNFLNWYQQKPGKAPKLLIYDASNLETGVPSRFSGSGSGTDFTFTISSLQPEDIATYYCQQYGNLPFTFGGGTKVEIKRLEIQNPDPAVYQLRDSKSSDKSVCLFTDFDSQTNVSQSKDSDVYITDKCVLDMRSMDFKSNSAVAWSNKSDFACANAFNNSIIPEDTFFPSPESSDSTDHVKPKETENTKQPSKSCHKPKAIVHTEKVNMMSLTVLGLRMLFAKTVAVNFLLTAKLFFLLTARAKRSGSGVKQTLNFDLLKLAGDVESNPGPTSMDWIWRILFLVGAATGAHSFEQVQLQESGPGLVKPSQTLSLTCTVSGGSISSGGFYWSWIRQHPGKGLEWIGYIHHSGSTHYNPSLKSRVTISIDTSKNLFSLRLSSVTAADTAVYYCASLVYCGGDCYSGFDYWGQGTLVTVSSTREDLKNVFPPEVAVFEPSEAEISHTQKATLVCLATGFYPDHVELSWWVNGKEVHSGVCTDPQPLKEQPALNDSRYCLSSRLRVSATFWQNPRNHFRCQVQFYGLSENDEWTQDRAKPVTQIVSAEAWGRADDVIKIHWQEKKSNTILGSQEGNTMKTNDTYMKFSWLTVPEKSLDKEHRCIVRHENNKNGVDQEIIFPPIKTDVITMDPKDNCSKDANDTLLLQLTNTSAYYMYLLLLLKSVVYFAIITCCLLMAMVKRKDSRG

SEQ ID NO: 15041 - protein, 864 aa, synthetic construct
MALPVTALLLPLALLLHAARPEVQLVESGGGLVQPGGSLRLSCAASGFSFSDFWMSWVRQAPGKGLEWVATISQAGSEKDYVDSVKGRFTISRDNAKKSLYLQMNSLRAEDTAVYYCASGVYSFDYRGQGTLVTVSSGTGGGGSGGGGSGGGGSEFDIQMTQSPSSLSASVGDRVTITCKSSQSVLYSSNQKNYLAWFQQKPGKAPKLLIYWASTRESGVPSRFSGSGSGTDFTLTISSLQPEDFATYFCHQYLSSYTFGQGTKVEIKRLEIQNPDPAVYQLRDSKSSDKSVCLFTDFDSQTNVSQSKDSDVYITDKCVLDMRSMDFKSNSAVAWSNKSDFACANAFNNSIIPEDTFFPSPESSDSTDHVKPKETENTKQPSKSCHKPKAIVHTEKVNMMSLTVLGLRMLFAKTVAVNFLLTAKLFFLLTARAKRSGSGVKQTLNFDLLKLAGDVESNPGPTSMDWIWRILFLVGAATGAHSFEEVQLVESGGGLVQPGGSLRLSCAASGYTFTTYWMHWVRQAPGKGLEWVGYIRPSTGYTEYNQKFKDRFTISADTSKNTAYLQMNSLRAEDTAVYYCARSRWLLDYWGQGTLVTVSTREDLKNVFPPEVAVFEPSEAEISHTQKATLVCLATGFYPDHVELSWWVNGKEVHSGVCTDPQPLKEQPALNDSRYCLSSRLRVSATFWQNPRNHFRCQVQFYGLSENDEWTQDRAKPVTQIVSAEAWGRADDVIKIHWQEKKSNTILGSQEGNTMKTNDTYMKFSWLTVPEKSLDKEHRCIVRHENNKNGVDQEIIFPPIKTDVITMDPKDNCSKDANDTLLLQLTNTSAYYMYLLLLLKSVVYFAIITCCLLMAMVKRKDSRG

SEQ ID NO: 15042 - protein, 861 aa, synthetic construct
MALPVTALLLPLALLLHAARPEVQLVESGGGLVQPGGSLRLSCAASGFSFSDFWMSWVRQAPGKGLEWVATISQAGSEKDYVDSVKGRFTISRDNAKKSLYLQMNSLRAEDTAVYYCASGVYSFDYRGQGTLVTVSSGTGGGGSGGGGSGGGGSEFDIQMTQSPSSLSASVGDRVTITCRASQDISNYLNWYQQKPGKAPKLLIYYTSRLHSGVPSRFSGSGSGTDFTLTISSLQPEDFATYYCQQGNTLPYTFGQGTKVEIKRLEIQNPDPAVYQLRDSKSSDKSVCLFTDFDSQTNVSQSKDSDVYITDKCVLDMRSMDFKSNSAVAWSNKSDFACANAFNNSIIPEDTFFPSPESSDSTDHVKPKETENTKQPSKSCHKPKAIVHTEKVNMMSLTVLGLRMLFAKTVAVNFLLTAKLFFLLTARAKRSGSGVKQTLNFDLLKLAGDVESNPGPTSMDWIWRILFLVGAATGAHSFEEVQLVESGGGLVQPGGSLRLSCAASGFTFSDYFMSWVRQAPGKGLEWVATISNGGTYTYYPDSVKGRFTISRDNSKNTLYLQMNSLRAEDTAVYYCARFDGYIFDYWGQGTLVTVSSTREDLKNVFPPEVAVFEPSEAEISHTQKATLVCLATGFYPDHVELSWWVNGKEVHSGVCTDPQPLKEQPALNDSRYCLSSRLRVSATFWQNPRNHFRCQVQFYGLSENDEWTQDRAKPVTQIVSAEAWGRADDVIKIHWQEKKSNTILGSQEGNTMKTNDTYMKFSWLTVPEKSLDKEHRCIVRHENNKNGVDQEIIFPPIKTDVITMDPKDNCSKDANDTLLLQLTNTSAYYMYLLLLLKSVVYFAIITCCLLMAMVKRKDSRG

SEQ ID NO: 15043 - protein, 995 aa, synthetic construct
MALPVTALLLPLALLLHAARPEVQLVESGGGLVQPGGSLRLSCAASGFSFSDFWMSWVRQAPGKGLEWVATISQAGSEKDYVDSVKGRFTISRDNAKKSLYLQMNSLRAEDTAVYYCASGVYSFDYRGQGTLVTVSSGTGGGGSGGGGSGGGGSEFDIQMTQTTSSLSASLGDRVTISCRASQDISKYLNWYQQKPDGTVKLLIYHTSRLHSGVPSRFSGSGSGTDYSLTISNLEQEDIATYFCQQGNTLPYTFGGGTKLEITLEDLKNVFPPEVAVFEPSEAEISHTQKATLVCLATGFYPDHVELSWWVNGKEVHSGVCTDPQPLKEQPALNDSRYCLSSRLRVSATFWQNPRNHFRCQVQFYGLSENDEWTQDRAKPVTQIVSAEAWGRADDVIKIHWQEKKSNTILGSQEGNTMKTNDTYMKFSWLTVPEKSLDKEHRCIVRHENNKNGVDQEIIFPPIKTDVITMDPKDNCSKDANDTLLLQLTNTSAYYMYLLLLLKSVVYFAIITCCLLMAMVKRKDSRGRAKRSGSGATNFSLLKQAGDVEENPGPTSMDWIWRILFLVGAATGAHSGPQLQLQESGPGLVKPSETLSLTCTVSGDSISSGDYYWGWIRQPPGKGLEWIGHIYYSGVTYYNPSLKSRVTISVDTSRNQFSLKLSSVTAADTAVYYCTREDSSNWRSRGQGTLVTVSSGSGGGGSGGGGSGGGGSFEVKLQESGPGLVAPSQSLSVTCTVSGVSLPDYGVSWIRQPPRKGLEWLGVIWGSETTYYNSALKSRLTIIKDNSKSQVFLKMNSLQTDDTAIYYCAKHYYYGGSYAMDYWGQGTSVTVSSTRIQNPDPAVYQLRDSKSSDKSVCLFTDFDSQTNVSQSKDSDVYITDKCVLDMRSMDFKSNSAVAWSNKSDFACANAFNNSIIPEDTFFPSPESSDSTDHVKPKETENTKQPSKSCHKPKAIVHTEKVNMMSLTVLGLRMLFAKTVAVNFLLTAKLFFLLTA

SEQ ID NO: 15044 - protein, 996 aa, synthetic construct
MALPVTALLLPLALLLHAARPEVQLVESGGGLVQPGGSLRLSCAASGFSFSDFWMSWVRQAPGKGLEWVATISQAGSEKDYVDSVKGRFTISRDNAKKSLYLQMNSLRAEDTAVYYCASGVYSFDYRGQGTLVTVSSGTGGGGSGGGGSGGGGSEFEIVMTQSPATLSLSPGERATLSCRASQDISKYLNWYQQKPGQAPRLLIYHTSRLHSGIPARFSGSGSGTDYTLTISSLQPEDFAVYFCQQGNTLPYTFGQGTKLEIKLEDLKNVFPPEVAVFEPSEAEISHTQKATLVCLATGFYPDHVELSWWVNGKEVHSGVCTDPQPLKEQPALNDSRYCLSSRLRVSATFWQNPRNHFRCQVQFYGLSENDEWTQDRAKPVTQIVSAEAWGRADDVIKIHWQEKKSNTILGSQEGNTMKTNDTYMKFSWLTVPEKSLDKEHRCIVRHENNKNGVDQEIIFPPIKTDVITMDPKDNCSKDANDTLLLQLTNTSAYYMYLLLLLKSVVYFAIITCCLLMAMVKRKDSRGRAKRSGSGATNFSLLKQAGDVEENPGPTSMDWIWRILFLVGAATGAHSGPQLQLQESGPGLVKPSETLSLTCTVSGDSISSGDYYWGWIRQPPGKGLEWIGHIYYSGVTYYNPSLKSRVTISVDTSRNQFSLKLSSVTAADTAVYYCTREDSSNWRSRGQGTLVTVSSGSGGGGSGGGGSGGGGSFEQVQLQESGPGLVKPSETLSLTCTVSGVSLPDYGVSWIRQPPGKGLEWIGVIWGSETTYYNSSLKSRVTISKDNSKNQVSLKLSSVTAADTAVYYCAKHYYYGGSYAMDYWGQGTLVTVSSTRIQNPDPAVYQLRDSKSSDKSVCLFTDFDSQTNVSQSKDSDVYITDKCVLDMRSMDFKSNSAVAWSNKSDFACANAFNNSIIPEDTFFPSPESSDSTDHVKPKETENTKQPSKSCHKPKAIVHTEKVNMMSLTVLGLRMLFAKTVAVNFLLTAKLFFLLTA

SEQ ID NO: 15045 - protein, 997 aa, synthetic construct
MALPVTALLLPLALLLHAARPEVQLVESGGGLVQPGGSLRLSCAASGFSFSDFWMSWVRQAPGKGLEWVATISQAGSEKDYVDSVKGRFTISRDNAKKSLYLQMNSLRAEDTAVYYCASGVYSFDYRGQGTLVTVSSGTGGGGSGGGGSGGGGSEFDEIVLTQSPATLSLSPGERATLSCSASSSVSYMHWYQQKPGQAPRLLIYDTSKLASGIPARFSGSGSGTDFTLTISSLEPEDVAVYYCFQGSVYPFTFGQGTKLEIKRLEDLKNVFPPEVAVFEPSEAEISHTQKATLVCLATGFYPDHVELSWWVNGKEVHSGVCTDPQPLKEQPALNDSRYCLSSRLRVSATFWQNPRNHFRCQVQFYGLSENDEWTQDRAKPVTQIVSAEAWGRADDVIKIHWQEKKSNTILGSQEGNTMKTNDTYMKFSWLTVPEKSLDKEHRCIVRHENNKNGVDQEIIFPPIKTDVITMDPKDNCSKDANDTLLLQLTNTSAYYMYLLLLLKSVVYFAIITCCLLMAMVKRKDSRGRAKRSGSGATNFSLLKQAGDVEENPGPTSMDWIWRILFLVGAATGAHSGPQLQLQESGPGLVKPSETLSLTCTVSGDSISSGDYYWGWIRQPPGKGLEWIGHIYYSGVTYYNPSLKSRVTISVDTSRNQFSLKLSSVTAADTAVYYCTREDSSNWRSRGQGTLVTVSSGSGGGGSGGGGSGGGGSFEQVQLQESGPGLVKPSQTLSLTCTVSGGSISTSGMGVGWIRQHPGKGLEWIGHIWWDDDKRYNPALKSRVTISVDTSKNQFSLKLSSVTAADTAVYYCARMELWSYYFDYWGQGTLVTVSSTRIQNPDPAVYQLRDSKSSDKSVCLFTDFDSQTNVSQSKDSDVYITDKCVLDMRSMDFKSNSAVAWSNKSDFACANAFNNSIIPEDTFFPSPESSDSTDHVKPKETENTKQPSKSCHKPKAIVHTEKVNMMSLTVLGLRMLFAKTVAVNFLLTAKLFFLLTA

SEQ ID NO: 15046 - protein, 995 aa, synthetic construct
MALPVTALLLPLALLLHAARPEVQLVESGGGLVQPGGSLRLSCAASGFSFSDFWMSWVRQAPGKGLEWVATISQAGSEKDYVDSVKGRFTISRDNAKKSLYLQMNSLRAEDTAVYYCASGVYSFDYRGQGTLVTVSSGTGGGGSGGGGSGGGGSEFDYIHVTQSPSSLSVSIGDRVTINCQTSQGVGSDLHWYQHKPGRAPKLLIHHASSVEDGVPSRFSGTGFHTSFNLTINDLQADDIGTYYCQVLQSFGRGSRLDTKLEDLKNVFPPEVAVFEPSEAEISHTQKATLVCLATGFYPDHVELSWWVNGKEVHSGVCTDPQPLKEQPALNDSRYCLSSRLRVSATFWQNPRNHFRCQVQFYGLSENDEWTQDRAKPVTQIVSAEAWGRADDVIKIHWQEKKSNTILGSQEGNTMKTNDTYMKFSWLTVPEKSLDKEHRCIVRHENNKNGVDQEIIFPPIKTDVITMDPKDNCSKDANDTLLLQLTNTSAYYMYLLLLLKSVVYFAIITCCLLMAMVKRKDSRGRAKRSGSGATNFSLLKQAGDVEENPGPTSMDWIWRILFLVGAATGAHSGPQLQLQESGPGLVKPSETLSLTCTVSGDSISSGDYYWGWIRQPPGKGLEWIGHIYYSGVTYYNPSLKSRVTISVDTSRNQFSLKLSSVTAADTAVYYCTREDSSNWRSRGQGTLVTVSSGSGGGGSGGGGSGGGGSFERAHLVQSGTAMKKPGASVRVSCQTSGYTFTAHILFWFRQAPGRGLEWVGWIKPQYGAVNFGGGFRDRVTLTRDVYREIAYMDIRGLKPDDTAVYYCARDRSYGDSSWALDAWGQGTTVVVSATRIQNPDPAVYQLRDSKSSDKSVCLFTDFDSQTNVSQSKDSDVYITDKCVLDMRSMDFKSNSAVAWSNKSDFACANAFNNSIIPEDTFFPSPESSDSTDHVKPKETENTKQPSKSCHKPKAIVHTEKVNMMSLTVLGLRMLFAKTVAVNFLLTAKLFFLLTA

SEQ ID NO: 15047 - protein, 1005 aa, synthetic construct
MALPVTALLLPLALLLHAARPEVQLVESGGGLVQPGGSLRLSCAASGFSFSDFWMSWVRQAPGKGLEWVATISQAGSEKDYVDSVKGRFTISRDNAKKSLYLQMNSLRAEDTAVYYCASGVYSFDYRGQGTLVTVSSGTGGGGSGGGGSGGGGSEFDVQMIQTPDSLAVSLGQRATISCRASESVDNYGISFMHWYQQKPGQSPKLLIYRASNLESGIPARFSGSGSRTDFTLTINPVETDDVATYYCQQNNKDPPTFGGGTKLEIKLEDLKNVFPPEVAVFEPSEAEISHTQKATLVCLATGFYPDHVELSWWVNGKEVHSGVCTDPQPLKEQPALNDSRYCLSSRLRVSATFWQNPRNHFRCQVQFYGLSENDEWTQDRAKPVTQIVSAEAWGRADDVIKIHWQEKKSNTILGSQEGNTMKTNDTYMKFSWLTVPEKSLDKEHRCIVRHENNKNGVDQEIIFPPIKTDVITMDPKDNCSKDANDTLLLQLTNTSAYYMYLLLLLKSVVYFAIITCCLLMAMVKRKDSRGRAKRSGSGATNFSLLKQAGDVEENPGPTSMDWIWRILFLVGAATGAHSGPQLQLQESGPGLVKPSETLSLTCTVSGDSISSGDYYWGWIRQPPGKGLEWIGHIYYSGVTYYNPSLKSRVTISVDTSRNQFSLKLSSVTAADTAVYYCTREDSSNWRSRGQGTLVTVSSGSGGGGSGGGGSGGGGSFEGGGGSQVQLQQSGAELVKPGASVKISCKASGYAFSSYWMNWVKQRPGKGLEWIGQIYPGDGDTTYNGKFKGKATLTADKSSSTVYMQLNSLTSEDSAVYFCVRYYYGSSGYFDYWGQGTTLTVSSTRIQNPDPAVYQLRDSKSSDKSVCLFTDFDSQTNVSQSKDSDVYITDKCVLDMRSMDFKSNSAVAWSNKSDFACANAFNNSIIPEDTFFPSPESSDSTDHVKPKETENTKQPSKSCHKPKAIVHTEKVNMMSLTVLGLRMLFAKTVAVNFLLTAKLFFLLTA

SEQ ID NO: 15048 - protein, 996 aa, synthetic construct
MALPVTALLLPLALLLHAARPEVQLVESGGGLVQPGGSLRLSCAASGFSFSDFWMSWVRQAPGKGLEWVATISQAGSEKDYVDSVKGRFTISRDNAKKSLYLQMNSLRAEDTAVYYCASGVYSFDYRGQGTLVTVSSGTGGGGSGGGGSGGGGSEFDVQMIQTPSSLSASLGDRVTISCRASQDIGNYLNWYQQKPDGTVKLLIYYTSRLHSGVPSRFSGSGSGTEYSLTISNLEQEDIATYFCQQGSALPPTFGGGTKLEINLEDLKNVFPPEVAVFEPSEAEISHTQKATLVCLATGFYPDHVELSWWVNGKEVHSGVCTDPQPLKEQPALNDSRYCLSSRLRVSATFWQNPRNHFRCQVQFYGLSENDEWTQDRAKPVTQIVSAEAWGRADDVIKIHWQEKKSNTILGSQEGNTMKTNDTYMKFSWLTVPEKSLDKEHRCIVRHENNKNGVDQEIIFPPIKTDVITMDPKDNCSKDANDTLLLQLTNTSAYYMYLLLLLKSVVYFAIITCCLLMAMVKRKDSRGRAKRSGSGATNFSLLKQAGDVEENPGPTSMDWIWRILFLVGAATGAHSGPQLQLQESGPGLVKPSETLSLTCTVSGDSISSGDYYWGWIRQPPGKGLEWIGHIYYSGVTYYNPSLKSRVTISVDTSRNQFSLKLSSVTAADTAVYYCTREDSSNWRSRGQGTLVTVSSGSGGGGSGGGGSGGGGSFEALQLQQSGAELVRPGASVTLSCKASGYTFTDYEMHWVKQTPVHGLEWIGAIDPETGGTAYNQKFEGKAILTADKSSSTAYMELRSLTSEDSPVYYCARRRYYGSSSFDYWGQGTTLTVSSTRIQNPDPAVYQLRDSKSSDKSVCLFTDFDSQTNVSQSKDSDVYITDKCVLDMRSMDFKSNSAVAWSNKSDFACANAFNNSIIPEDTFFPSPESSDSTDHVKPKETENTKQPSKSCHKPKAIVHTEKVNMMSLTVLGLRMLFAKTVAVNFLLTAKLFFLLTA

SEQ ID NO: 15049 - protein, 1000 aa, synthetic construct
MALPVTALLLPLALLLHAARPEVQLVESGGGLVQPGGSLRLSCAASGFSFSDFWMSWVRQAPGKGLEWVATISQAGSEKDYVDSVKGRFTISRDNAKKSLYLQMNSLRAEDTAVYYCASGVYSFDYRGQGTLVTVSSGTGGGGSGGGGSGGGGSEFDIVLTQSPASLAVSLGQRATISCRASKSVSTSGYSYLHWYQQKPGQPPKLLIYLASNLESGVPARFSGSGSGTDFTLNIHPVEEEDAATYYCQHSRELPFTFGSGTKLEIKLEDLKNVFPPEVAVFEPSEAEISHTQKATLVCLATGFYPDHVELSWWVNGKEVHSGVCTDPQPLKEQPALNDSRYCLSSRLRVSATFWQNPRNHFRCQVQFYGLSENDEWTQDRAKPVTQIVSAEAWGRADDVIKIHWQEKKSNTILGSQEGNTMKTNDTYMKFSWLTVPEKSLDKEHRCIVRHENNKNGVDQEIIFPPIKTDVITMDPKDNCSKDANDTLLLQLTNTSAYYMYLLLLLKSVVYFAIITCCLLMAMVKRKDSRGRAKRSGSGATNFSLLKQAGDVEENPGPTSMDWIWRILFLVGAATGAHSGPQLQLQESGPGLVKPSETLSLTCTVSGDSISSGDYYWGWIRQPPGKGLEWIGHIYYSGVTYYNPSLKSRVTISVDTSRNQFSLKLSSVTAADTAVYYCTREDSSNWRSRGQGTLVTVSSGSGGGGSGGGGSGGGGSFEQVQLVESGGGLVQPGGSLKLSCAASGFDFSRYWMSWVRQAPGKGLEWIGEINPTSSTINFTPSLKDKVFISRDNAKNTLYLQMSKVRSEDTALYYCARGNYYRYGDAMDYWGQGTSVTVSTRIQNPDPAVYQLRDSKSSDKSVCLFTDFDSQTNVSQSKDSDVYITDKCVLDMRSMDFKSNSAVAWSNKSDFACANAFNNSIIPEDTFFPSPESSDSTDHVKPKETENTKQPSKSCHKPKAIVHTEKVNMMSLTVLGLRMLFAKTVAVNFLLTAKLFFLLTA

SEQ ID NO: 15050 - protein, 998 aa, synthetic construct
MALPVTALLLPLALLLHAARPEVQLVESGGGLVQPGGSLRLSCAASGFSFSDFWMSWVRQAPGKGLEWVATISQAGSEKDYVDSVKGRFTISRDNAKKSLYLQMNSLRAEDTAVYYCASGVYSFDYRGQGTLVTVSSGTGGGGSGGGGSGGGGSEFDIQMTQSPSSLSASVGDRVTITCSASQDISNYLNWYQQKPGKAPKLLIYYTSNLHSGVPSRFSGSGSGTDFTLTISSLQPEDFATYYCQQYRKLPWTFGQGTKLEIKRLEDLKNVFPPEVAVFEPSEAEISHTQKATLVCLATGFYPDHVELSWWVNGKEVHSGVCTDPQPLKEQPALNDSRYCLSSRLRVSATFWQNPRNHFRCQVQFYGLSENDEWTQDRAKPVTQIVSAEAWGRADDVIKIHWQEKKSNTILGSQEGNTMKTNDTYMKFSWLTVPEKSLDKEHRCIVRHENNKNGVDQEIIFPPIKTDVITMDPKDNCSKDANDTLLLQLTNTSAYYMYLLLLLKSVVYFAIITCCLLMAMVKRKDSRGRAKRSGSGATNFSLLKQAGDVEENPGPTSMDWIWRILFLVGAATGAHSGPQLQLQESGPGLVKPSETLSLTCTVSGDSISSGDYYWGWIRQPPGKGLEWIGHIYYSGVTYYNPSLKSRVTISVDTSRNQFSLKLSSVTAADTAVYYCTREDSSNWRSRGQGTLVTVSSGSGGGGSGGGGSGGGGSFEQVQLVQSGAEVKKPGSSVKVSCKASGGTFSNYWMHWVRQAPGQGLEWMGATYRGHSDTYYNQKFKGRVTITADKSTSTAYMELSSLRSEDTAVYYCARGAIYDGYDVLDNWGQGTLVTVSSTRIQNPDPAVYQLRDSKSSDKSVCLFTDFDSQTNVSQSKDSDVYITDKCVLDMRSMDFKSNSAVAWSNKSDFACANAFNNSIIPEDTFFPSPESSDSTDHVKPKETENTKQPSKSCHKPKAIVHTEKVNMMSLTVLGLRMLFAKTVAVNFLLTAKLFFLLTA

SEQ ID NO: 15051 - protein, 998 aa, synthetic construct
MALPVTALLLPLALLLHAARPEVQLVESGGGLVQPGGSLRLSCAASGFSFSDFWMSWVRQAPGKGLEWVATISQAGSEKDYVDSVKGRFTISRDNAKKSLYLQMNSLRAEDTAVYYCASGVYSFDYRGQGTLVTVSSGTGGGGSGGGGSGGGGSEFDIVLTQSPATLSLSPGDRATISCRASESVTILGSHLIYWYQQKPGQPPRLLIQLASNVQTGVPARFSGSGSRTDFTLTISSVEPEDFAVYYCLQSRTIPRTFGQGTKLEIKRLEDLKNVFPPEVAVFEPSEAEISHTQKATLVCLATGFYPDHVELSWWVNGKEVHSGVCTDPQPLKEQPALNDSRYCLSSRLRVSATFWQNPRNHFRCQVQFYGLSENDEWTQDRAKPVTQIVSAEAWGRADDVIKIHWQEKKSNTILGSQEGNTMKTNDTYMKFSWLTVPEKSLDKEHRCIVRHENNKNGVDQEIIFPPIKTDVITMDPKDNCSKDANDTLLLQLTNTSAYYMYLLLLLKSVVYFAIITCCLLMAMVKRKDSRGRAKRSGSGATNFSLLKQAGDVEENPGPTSMDWIWRILFLVGAATGAHSGPQLQLQESGPGLVKPSETLSLTCTVSGDSISSGDYYWGWIRQPPGKGLEWIGHIYYSGVTYYNPSLKSRVTISVDTSRNQFSLKLSSVTAADTAVYYCTREDSSNWRSRGQGTLVTVSSGSGGGGSGGGGSGGGGSFEQVQLVQSGPEVKKPGESVKISCKASGYTFRHYSMNWVKQAPGQGLKWMGRINTESGVPIYADDFKGRFSFTVDTSASTAYLEISSLTSEDTAVYFCSNDYLYSLDFWGQGTTLTVSSTRIQNPDPAVYQLRDSKSSDKSVCLFTDFDSQTNVSQSKDSDVYITDKCVLDMRSMDFKSNSAVAWSNKSDFACANAFNNSIIPEDTFFPSPESSDSTDHVKPKETENTKQPSKSCHKPKAIVHTEKVNMMSLTVLGLRMLFAKTVAVNFLLTAKLFFLLTA

SEQ ID NO: 15052 - protein, 999 aa, synthetic construct
MALPVTALLLPLALLLHAARPEVQLVESGGGLVQPGGSLRLSCAASGFSFSDFWMSWVRQAPGKGLEWVATISQAGSEKDYVDSVKGRFTISRDNAKKSLYLQMNSLRAEDTAVYYCASGVYSFDYRGQGTLVTVSSGTGGGGSGGGGSGGGGSEFQSVLTQPPSVSGAPGQRVTISCTGSSSNIGAGFDVHWYQQLPGTAPKLLIYGNSNRPSGVPDRFSGSKSGTSASLAITGLQAEDEADYYCQSYDSSLSGYVFGTGTKVTVLGLEDLKNVFPPEVAVFEPSEAEISHTQKATLVCLATGFYPDHVELSWWVNGKEVHSGVCTDPQPLKEQPALNDSRYCLSSRLRVSATFWQNPRNHFRCQVQFYGLSENDEWTQDRAKPVTQIVSAEAWGRADDVIKIHWQEKKSNTILGSQEGNTMKTNDTYMKFSWLTVPEKSLDKEHRCIVRHENNKNGVDQEIIFPPIKTDVITMDPKDNCSKDANDTLLLQLTNTSAYYMYLLLLLKSVVYFAIITCCLLMAMVKRKDSRGRAKRSGSGATNFSLLKQAGDVEENPGPTSMDWIWRILFLVGAATGAHSGPQLQLQESGPGLVKPSETLSLTCTVSGDSISSGDYYWGWIRQPPGKGLEWIGHIYYSGVTYYNPSLKSRVTISVDTSRNQFSLKLSSVTAADTAVYYCTREDSSNWRSRGQGTLVTVSSGSGGGGSGGGGSGGGGSFEQVQLVQSGAEVKKPGASVKVSCKASGYTFTDYYMHWVRQAPGQRLEWMGWINPNSGGTNYAQKFQDRITVTRDTSSNTGYMELTRLRSDDTAVYYCARSPYSGVLDKWGQGTLVTVSSTRIQNPDPAVYQLRDSKSSDKSVCLFTDFDSQTNVSQSKDSDVYITDKCVLDMRSMDFKSNSAVAWSNKSDFACANAFNNSIIPEDTFFPSPESSDSTDHVKPKETENTKQPSKSCHKPKAIVHTEKVNMMSLTVLGLRMLFAKTVAVNFLLTAKLFFLLTA

SEQ ID NO: 15053 - protein, 996 aa, synthetic construct
MALPVTALLLPLALLLHAARPEVQLVESGGGLVQPGGSLRLSCAASGFSFSDFWMSWVRQAPGKGLEWVATISQAGSEKDYVDSVKGRFTISRDNAKKSLYLQMNSLRAEDTAVYYCASGVYSFDYRGQGTLVTVSSGTGGGGSGGGGSGGGGSEFQAVLTQPPSASGTPGQRVTISCSGSSSNIGSYTVSWYQQLPGTAPKFLIYSNNQRPSGVPDRFSGSKSGTSASLAISGLQSEDEADYYCAAWDDSLNGYVFGTGTKVTVLGLEDLKNVFPPEVAVFEPSEAEISHTQKATLVCLATGFYPDHVELSWWVNGKEVHSGVCTDPQPLKEQPALNDSRYCLSSRLRVSATFWQNPRNHFRCQVQFYGLSENDEWTQDRAKPVTQIVSAEAWGRADDVIKIHWQEKKSNTILGSQEGNTMKTNDTYMKFSWLTVPEKSLDKEHRCIVRHENNKNGVDQEIIFPPIKTDVITMDPKDNCSKDANDTLLLQLTNTSAYYMYLLLLLKSVVYFAIITCCLLMAMVKRKDSRGRAKRSGSGATNFSLLKQAGDVEENPGPTSMDWIWRILFLVGAATGAHSGPQLQLQESGPGLVKPSETLSLTCTVSGDSISSGDYYWGWIRQPPGKGLEWIGHIYYSGVTYYNPSLKSRVTISVDTSRNQFSLKLSSVTAADTAVYYCTREDSSNWRSRGQGTLVTVSSGSGGGGSGGGGSGGGGSFEVQLVQSGAEVKKPGESLKISCKGSGYDFTTYWIGWVRQMPGKGLEWMGIIYPGDSDTRYSPSVRGRVTISADKSINTAYLQWSSLEASDTAMYYCARMWTFSQDGWGQGTLVTVSSTRIQNPDPAVYQLRDSKSSDKSVCLFTDFDSQTNVSQSKDSDVYITDKCVLDMRSMDFKSNSAVAWSNKSDFACANAFNNSIIPEDTFFPSPESSDSTDHVKPKETENTKQPSKSCHKPKAIVHTEKVNMMSLTVLGLRMLFAKTVAVNFLLTAKLFFLLTA

SEQ ID NO: 15054 - protein, 999 aa, synthetic construct
MALPVTALLLPLALLLHAARPEVQLVESGGGLVQPGGSLRLSCAASGFSFSDFWMSWVRQAPGKGLEWVATISQAGSEKDYVDSVKGRFTISRDNAKKSLYLQMNSLRAEDTAVYYCASGVYSFDYRGQGTLVTVSSGTGGGGSGGGGSGGGGSEFDIVMTQSPDSLAVSLGERATINCKSSQSILYSSNQKNYLAWYQQKPGQSPKLLIYWASTRESGVPDRFSGSGSGTDFTLTISSLQAEDVAVYYCHQYISSYTFGQGTKLEIKLEDLKNVFPPEVAVFEPSEAEISHTQKATLVCLATGFYPDHVELSWWVNGKEVHSGVCTDPQPLKEQPALNDSRYCLSSRLRVSATFWQNPRNHFRCQVQFYGLSENDEWTQDRAKPVTQIVSAEAWGRADDVIKIHWQEKKSNTILGSQEGNTMKTNDTYMKFSWLTVPEKSLDKEHRCIVRHENNKNGVDQEIIFPPIKTDVITMDPKDNCSKDANDTLLLQLTNTSAYYMYLLLLLKSVVYFAIITCCLLMAMVKRKDSRGRAKRSGSGATNFSLLKQAGDVEENPGPTSMDWIWRILFLVGAATGAHSGPQLQLQESGPGLVKPSETLSLTCTVSGDSISSGDYYWGWIRQPPGKGLEWIGHIYYSGVTYYNPSLKSRVTISVDTSRNQFSLKLSSVTAADTAVYYCTREDSSNWRSRGQGTLVTVSSGSGGGGSGGGGSGGGGSFEQVQLVQSGAEVKKPGASVKVSCKASGYTFASQWMHWMRQAPGQGLEWIGWINPGNVNTKYNEKFKGRATLTVDTSTNTAYMELSSLRSEDTAVYYCARSTWYRPLDYWGQGTLVTVSSTRIQNPDPAVYQLRDSKSSDKSVCLFTDFDSQTNVSQSKDSDVYITDKCVLDMRSMDFKSNSAVAWSNKSDFACANAFNNSIIPEDTFFPSPESSDSTDHVKPKETENTKQPSKSCHKPKAIVHTEKVNMMSLTVLGLRMLFAKTVAVNFLLTAKLFFLLTA

SEQ ID NO: 15055 - protein, 999 aa, synthetic construct
MALPVTALLLPLALLLHAARPEVQLVESGGGLVQPGGSLRLSCAASGFSFSDFWMSWVRQAPGKGLEWVATISQAGSEKDYVDSVKGRFTISRDNAKKSLYLQMNSLRAEDTAVYYCASGVYSFDYRGQGTLVTVSSGTGGGGSGGGGSGGGGSEFDHIVLTQSPSSLSASLGDRVTISCRASQDISTYLNWYQQKPDGTVKLLIFYTSRLHAGVPSRFSGSGSGTHHSLTISNLEQEDIATYFCQQGNSLPFTFGSGTKLEIKRLEDLKNVFPPEVAVFEPSEAEISHTQKATLVCLATGFYPDHVELSWWVNGKEVHSGVCTDPQPLKEQPALNDSRYCLSSRLRVSATFWQNPRNHFRCQVQFYGLSENDEWTQDRAKPVTQIVSAEAWGRADDVIKIHWQEKKSNTILGSQEGNTMKTNDTYMKFSWLTVPEKSLDKEHRCIVRHENNKNGVDQEIIFPPIKTDVITMDPKDNCSKDANDTLLLQLTNTSAYYMYLLLLLKSVVYFAIITCCLLMAMVKRKDSRGRAKRSGSGATNFSLLKQAGDVEENPGPTSMDWIWRILFLVGAATGAHSGPQLQLQESGPGLVKPSETLSLTCTVSGDSISSGDYYWGWIRQPPGKGLEWIGHIYYSGVTYYNPSLKSRVTISVDTSRNQFSLKLSSVTAADTAVYYCTREDSSNWRSRGQGTLVTVSSGSGGGGSGGGGSGGGGSFEQVQLKESGPELEKPGASVKISCKASGYSFTAYSMNWVKQNNGMSLEWIGSIDPYYGDTKYAQKFKGKATLTVDKASSTAYLQLKSLTSEDSAVYYCARRMITTGDWYFDVWGAGTTVTVSSTRIQNPDPAVYQLRDSKSSDKSVCLFTDFDSQTNVSQSKDSDVYITDKCVLDMRSMDFKSNSAVAWSNKSDFACANAFNNSIIPEDTFFPSPESSDSTDHVKPKETENTKQPSKSCHKPKAIVHTEKVNMMSLTVLGLRMLFAKTVAVNFLLTAKLFFLLTA

SEQ ID NO: 15056 - protein, 999 aa, synthetic construct; identical to SEQ ID NO: 15055

SEQ ID NO: 15057 - protein, 999 aa, synthetic construct
MALPVTALLLPLALLLHAARPEVQLVESGGGLVQPGGSLRLSCAASGFSFSDFWMSWVRQAPGKGLEWVATISQAGSEKDYVDSVKGRFTISRDNAKKSLYLQMNSLRAEDTAVYYCASGVYSFDYRGQGTLVTVSSGTGGGGSGGGGSGGGGSEFDEIVLTQSPATLSLSPGERATLSCRASQSVSSYLAWYQQKPGQAPRLLIYDASNRATGIPARFSGSGSGTDFTLTISSLEPEDFAVYYCQQRSNWPITFGQGTRLEIKLEDLKNVFPPEVAVFEPSEAEISHTQKATLVCLATGFYPDHVELSWWVNGKEVHSGVCTDPQPLKEQPALNDSRYCLSSRLRVSATFWQNPRNHFRCQVQFYGLSENDEWTQDRAKPVTQIVSAEAWGRADDVIKIHWQEKKSNTILGSQEGNTMKTNDTYMKFSWLTVPEKSLDKEHRCIVRHENNKNGVDQEIIFPPIKTDVITMDPKDNCSKDANDTLLLQLTNTSAYYMYLLLLLKSVVYFAIITCCLLMAMVKRKDSRGRAKRSGSGATNFSLLKQAGDVEENPGPTSMDWIWRILFLVGAATGAHSGPQLQLQESGPGLVKPSETLSLTCTVSGDSISSGDYYWGWIRQPPGKGLEWIGHIYYSGVTYYNPSLKSRVTISVDTSRNQFSLKLSSVTAADTAVYYCTREDSSNWRSRGQGTLVTVSSGSGGGGSGGGGSGGGGSFEEVQLVESGGGLVQPGRSLRLSCAASGFTFNDYAMHWVRQAPGKGLEWVSTISWNSGSIGYADSVKGRFTISRDNAKKSLYLQMNSLRAEDTALYYCAKDIQYGNYYYGMDVWGQGTTVTVSSTRIQNPDPAVYQLRDSKSSDKSVCLFTDFDSQTNVSQSKDSDVYITDKCVLDMRSMDFKSNSAVAWSNKSDFACANAFNNSIIPEDTFFPSPESSDSTDHVKPKETENTKQPSKSCHKPKAIVHTEKVNMMSLTVLGLRMLFAKTVAVNFLLTAKLFFLLTA

SEQ ID NO: 15058 - protein, 1001 aa, synthetic construct
MALPVTALLLPLALLLHAARPEVQLVESGGGLVQPGGSLRLSCAASGFSFSDFWMSWVRQAPGKGLEWVATISQAGSEKDYVDSVKGRFTISRDNAKKSLYLQMNSLRAEDTAVYYCASGVYSFDYRGQGTLVTVSSGTGGGGSGGGGSGGGGSEFDIVMTQTPLSLPVTPGEPASISCRSSKSLLHSNGITYLYWYLQKPGQSPQLLIYQMSNLVSGVPDRFSGSGSGTDFTLKISRVEAEDVGVYYCAQNLELPYTFGGGTKVEIKRLEDLKNVFPPEVAVFEPSEAEISHTQKATLVCLATGFYPDHVELSWWVNGKEVHSGVCTDPQPLKEQPALNDSRYCLSSRLRVSATFWQNPRNHFRCQVQFYGLSENDEWTQDRAKPVTQIVSAEAWGRADDVIKIHWQEKKSNTILGSQEGNTMKTNDTYMKFSWLTVPEKSLDKEHRCIVRHENNKNGVDQEIIFPPIKTDVITMDPKDNCSKDANDTLLLQLTNTSAYYMYLLLLLKSVVYFAIITCCLLMAMVKRKDSRGRAKRSGSGATNFSLLKQAGDVEENPGPTSMDWIWRILFLVGAATGAHSGPQLQLQESGPGLVKPSETLSLTCTVSGDSISSGDYYWGWIRQPPGKGLEWIGHIYYSGVTYYNPSLKSRVTISVDTSRNQFSLKLSSVTAADTAVYYCTREDSSNWRSRGQGTLVTVSSGSGGGGSGGGGSGGGGSFEQVQLVQSGAEVKKPGSSVKVSCKASGYAFSYSWINWVRQAPGQGLEWMGRIFPGDGDTDYNGKFKGRVTITADKSTSTAYMELSSLRSEDTAVYYCARNVFDGYWLVYWGQGTLVTVSSTRIQNPDPAVYQLRDSKSSDKSVCLFTDFDSQTNVSQSKDSDVYITDKCVLDMRSMDFKSNSAVAWSNKSDFACANAFNNSIIPEDTFFPSPESSDSTDHVKPKETENTKQPSKSCHKPKAIVHTEKVNMMSLTVLGLRMLFAKTVAVNFLLTAKLFFLLTA

SEQ ID NO: 15059 - protein, 1002 aa, synthetic construct
MALPVTALLLPLALLLHAARPEVQLVESGGGLVQPGGSLRLSCAASGFSFSDFWMSWVRQAPGKGLEWVATISQAGSEKDYVDSVKGRFTISRDNAKKSLYLQMNSLRAEDTAVYYCASGVYSFDYRGQGTLVTVSSGTGGGGSGGGGSGGGGSEFDIQMTQSPSSLSASVGDRVTITCRSSQSIVHSVGNTFLEWYQQKPGKAPKLLIYKVSNRFSGVPSRFSGSGSGTDFTLTISSLQPEDFATYYCFQGSQFPYTFGQGTKVEIKRLEDLKNVFPPEVAVFEPSEAEISHTQKATLVCLATGFYPDHVELSWWVNGKEVHSGVCTDPQPLKEQPALNDSRYCLSSRLRVSATFWQNPRNHFRCQVQFYGLSENDEWTQDRAKPVTQIVSAEAWGRADDVIKIHWQEKKSNTILGSQEGNTMKTNDTYMKFSWLTVPEKSLDKEHRCIVRHENNKNGVDQEIIFPPIKTDVITMDPKDNCSKDANDTLLLQLTNTSAYYMYLLLLLKSVVYFAIITCCLLMAMVKRKDSRGRAKRSGSGATNFSLLKQAGDVEENPGPTSMDWIWRILFLVGAATGAHSGPQLQLQESGPGLVKPSETLSLTCTVSGDSISSGDYYWGWIRQPPGKGLEWIGHIYYSGVTYYNPSLKSRVTISVDTSRNQFSLKLSSVTAADTAVYYCTREDSSNWRSRGQGTLVTVSSGSGGGGSGGGGSGGGGSFEEVQLVESGGGLVQPGGSLRLSCAASGYEFSRSWMNWVRQAPGKGLEWVGRIYPGDGDTNYSGKFKGRFTISADTSKNTAYLQMNSLRAEDTAVYYCARDGSSWDWYFDVWGQGTLVTVSSTRIQNPDPAVYQLRDSKSSDKSVCLFTDFDSQTNVSQSKDSDVYITDKCVLDMRSMDFKSNSAVAWSNKSDFACANAFNNSIIPEDTFFPSPESSDSTDHVKPKETENTKQPSKSCHKPKAIVHTEKVNMMSLTVLGLRMLFAKTVAVNFLLTAKLFFLLTA

SEQ ID NO: 15060 - protein, 1000 aa, synthetic construct
MALPVTALLLPLALLLHAARPEVQLVESGGGLVQPGGSLRLSCAASGFSFSDFWMSWVRQAPGKGLEWVATISQAGSEKDYVDSVKGRFTISRDNAKKSLYLQMNSLRAEDTAVYYCASGVYSFDYRGQGTLVTVSSGTGGGGSGGGGSGGGGSEFDIQMTQSPSSLSASVGDRVTITCRASQTIWSYLNWYQQRPGKAPNLLIYAASSLQSGVPSRFSGRGSGTDFTLTISSLQAEDFATYYCQQSYSIPQIFGQGTKLEIKLEDLKNVFPPEVAVFEPSEAEISHTQKATLVCLATGFYPDHVELSWWVNGKEVHSGVCTDPQPLKEQPALNDSRYCLSSRLRVSATFWQNPRNHFRCQVQFYGLSENDEWTQDRAKPVTQIVSAEAWGRADDVIKIHWQEKKSNTILGSQEGNTMKTNDTYMKFSWLTVPEKSLDKEHRCIVRHENNKNGVDQEIIFPPIKTDVITMDPKDNCSKDANDTLLLQLTNTSAYYMYLLLLLKSVVYFAIITCCLLMAMVKRKDSRGRAKRSGSGATNFSLLKQAGDVEENPGPTSMDWIWRILFLVGAATGAHSGPQLQLQESGPGLVKPSETLSLTCTVSGDSISSGDYYWGWIRQPPGKGLEWIGHIYYSGVTYYNPSLKSRVTISVDTSRNQFSLKLSSVTAADTAVYYCTREDSSNWRSRGQGTLVTVSSGSGGGGSGGGGSGGGGSFEQVQLQQSGPGLVKPSQTLSLTCAISGDSVSSNSAAWNWIRQSPSRGLEWLGRTYYRSKWYNDYAVSVKSRITINPDTSKNQFSLQLNSVTPEDTAVYYCAREVTGDLEDAFDIWGQGTMVTVSSTRIQNPDPAVYQLRDSKSSDKSVCLFTDFDSQTNVSQSKDSDVYITDKCVLDMRSMDFKSNSAVAWSNKSDFACANAFNNSIIPEDTFFPSPESSDSTDHVKPKETENTKQPSKSCHKPKAIVHTEKVNMMSLTVLGLRMLFAKTVAVNFLLTAKLFFLLTA

SEQ ID NO: 15061 - protein, 993 aa, synthetic construct
MALPVTALLLPLALLLHAARPEVQLVESGGGLVQPGGSLRLSCAASGFSFSDFWMSWVRQAPGKGLEWVATISQAGSEKDYVDSVKGRFTISRDNAKKSLYLQMNSLRAEDTAVYYCASGVYSFDYRGQGTLVTVSSGTGGGGSGGGGSGGGGSEFDIQMTQSPATIENTSLSASVGDRVTITCRASQGISSWLTWYQQKPEKAPKSLIYAASSLQSGVPSRFSGSGSGTDFTLTISSLQPEDFATYYCQQYDSYPITFGQGTRLEIKLEDLKNVFPPEVAVFEPSEAEISHTQKATLVCLATGFYPDHVELSWWVNGKEVHSGVCTDPQPLKEQPALNDSRYCLSSRLRVSATFWQNPRNHFRCQVQFYGLSENDEWTQDRAKPVTQIVSAEAWGRADDVIKIHWQEKKSNTILGSQEGNTMKTNDTYMKFSWLTVPEKSLDKEHRCIVRHENNKNGVDQEIIFPPIKTDVITMDPKDNCSKDANDTLLLQLTNTSAYYMYLLLLLKSVVYFAIITCCLLMAMVKRKDSRGRAKRSGSGATNFSLLKQAGDVEENPGPTSMDWIWRILFLVGAATGAHSGPQLQLQESGPGLVKPSETLSLTCTVSGDSISSGDYYWGWIRQPPGKGLEWIGHIYYSGVTYYNPSLKSRVTISVDTSRNQFSLKLSSVTAADTAVYYCTREDSSNWRSRGQGTLVTVSSGSGGGGSGGGGSGGGGSFEQVQLQQWGAGLLKPSETLSLTCAVYGGSFSAYYWSWIRQPPGKGLEWIGDINHGGGTNYNPSLKSRVTISVDTSKNQFSLKLNSVTAADTAVYYCASLTAYWGQGSLVTVSSTRIQNPDPAVYQLRDSKSSDKSVCLFTDFDSQTNVSQSKDSDVYITDKCVLDMRSMDFKSNSAVAWSNKSDFACANAFNNSIIPEDTFFPSPESSDSTDHVKPKETENTKQPSKSCHKPKAIVHTEKVNMMSLTVLGLRMLFAKTVAVNFLLTAKLFFLLTA

SEQ ID NO: 15062 - protein, 998 aa, synthetic construct
MALPVTALLLPLALLLHAARPEVQLVESGGGLVQPGGSLRLSCAASGFSFSDFWMSWVRQAPGKGLEWVATISQAGSEKDYVDSVKGRFTISRDNAKKSLYLQMNSLRAEDTAVYYCASGVYSFDYRGQGTLVTVSSGTGGGGSGGGGSGGGGSEFDEIVLTQSPDSLAVSLGERATINCKASQSVDFDGDSYLNWYQQKPGQPPKVLIYAASTLQSGVPSRFSGSGSGTDFTLTINSLEAEDAATYYCQQSNEDPWTFGGGTKVEIKLEDLKNVFPPEVAVFEPSEAEISHTQKATLVCLATGFYPDHVELSWWVNGKEVHSGVCTDPQPLKEQPALNDSRYCLSSRLRVSATFWQNPRNHFRCQVQFYGLSENDEWTQDRAKPVTQIVSAEAWGRADDVIKIHWQEKKSNTILGSQEGNTMKTNDTYMKFSWLTVPEKSLDKEHRCIVRHENNKNGVDQEIIFPPIKTDVITMDPKDNCSKDANDTLLLQLTNTSAYYMYLLLLLKSVVYFAIITCCLLMAMVKRKDSRGRAKRSGSGATNFSLLKQAGDVEENPGPTSMDWIWRILFLVGAATGAHSGPQLQLQESGPGLVKPSETLSLTCTVSGDSISSGDYYWGWIRQPPGKGLEWIGHIYYSGVTYYNPSLKSRVTISVDTSRNQFSLKLSSVTAADTAVYYCTREDSSNWRSRGQGTLVTVSSGSGGGGSGGGGSGGGGSFEQVQLVQSGAEVKKPGASVKVSCKVSGYTFTDYYITWVRQAPGQALEWMGWIYPGSGNTKYSQKFQGRFVFSVDTSASTAYLQLSSLKAEDTAVYYCANYGNYWFAYWGQGTLVTVSSTRIQNPDPAVYQLRDSKSSDKSVCLFTDFDSQTNVSQSKDSDVYITDKCVLDMRSMDFKSNSAVAWSNKSDFACANAFNNSIIPEDTFFPSPESSDSTDHVKPKETENTKQPSKSCHKPKAIVHTEKVNMMSLTVLGLRMLFAKTVAVNFLLTAKLFFLLTA

SEQ ID NO: 15063 - protein, 995 aa, synthetic construct
MALPVTALLLPLALLLHAARPEVQLVESGGGLVQPGGSLRLSCAASGFSFSDFWMSWVRQAPGKGLEWVATISQAGSEKDYVDSVKGRFTISRDNAKKSLYLQMNSLRAEDTAVYYCASGVYSFDYRGQGTLVTVSSGTGGGGSGGGGSGGGGSEFDIQMTQSPSSLSASVGDRVTITCRASQGISSWLAWYQQKPEKAPKSLIYAASSLQSGVPSRFSGSGSGTDFTLTISSLQPEDFATYYCQQYNSYPPTFGGGTKVEIKLEDLKNVFPPEVAVFEPSEAEISHTQKATLVCLATGFYPDHVELSWWVNGKEVHSGVCTDPQPLKEQPALNDSRYCLSSRLRVSATFWQNPRNHFRCQVQFYGLSENDEWTQDRAKPVTQIVSAEAWGRADDVIKIHWQEKKSNTILGSQEGNTMKTNDTYMKFSWLTVPEKSLDKEHRCIVRHENNKNGVDQEIIFPPIKTDVITMDPKDNCSKDANDTLLLQLTNTSAYYMYLLLLLKSVVYFAIITCCLLMAMVKRKDSRGRAKRSGSGATNFSLLKQAGDVEENPGPTSMDWIWRILFLVGAATGAHSGPQLQLQESGPGLVKPSETLSLTCTVSGDSISSGDYYWGWIRQPPGKGLEWIGHIYYSGVTYYNPSLKSRVTISVDTSRNQFSLKLSSVTAADTAVYYCTREDSSNWRSRGQGTLVTVSSGSGGGGSGGGGSGGGGSFEEVQLVQSGGGLVHPGGSLRLSCAGSGFAFSSSTMHWIRQAPGKGLEWISLIGSGGGIYYGDSVKGRFTISRDNAKNSLYLQMNSLRAEDMAVYYCVRGYFDWVDYFDYWGQGTLVTVSSTRIQNPDPAVYQLRDSKSSDKSVCLFTDFDSQTNVSQSKDSDVYITDKCVLDMRSMDFKSNSAVAWSNKSDFACANAFNNSIIPEDTFFPSPESSDSTDHVKPKETENTKQPSKSCHKPKAIVHTEKVNMMSLTVLGLRMLFAKTVAVNFLLTAKLFFLLTA

SEQ ID NO: 15064 - protein, 1005 aa, synthetic construct
MALPVTALLLPLALLLHAARPEVQLVESGGGLVQPGGSLRLSCAASGFSFSDFWMSWVRQAPGKGLEWVATISQAGSEKDYVDSVKGRFTISRDNAKKSLYLQMNSLRAEDTAVYYCASGVYSFDYRGQGTLVTVSSGTGGGGSGGGGSGGGGSEFDDIVMTQSPDSLTVSLGERTTINCKSSQSVLDSSKNKNSLAWYQQKPGQPPKLLLSWASTRESGIPDRFSGSGSGTDFTLTIDSLQPEDSATYYCQQSAHFPITFGQGTRLEIKLEDLKNVFPPEVAVFEPSEAEISHTQKATLVCLATGFYPDHVELSWWVNGKEVHSGVCTDPQPLKEQPALNDSRYCLSSRLRVSATFWQNPRNHFRCQVQFYGLSENDEWTQDRAKPVTQIVSAEAWGRADDVIKIHWQEKKSNTILGSQEGNTMKTNDTYMKFSWLTVPEKSLDKEHRCIVRHENNKNGVDQEIIFPPIKTDVITMDPKDNCSKDANDTLLLQLTNTSAYYMYLLLLLKSVVYFAIITCCLLMAMVKRKDSRGRAKRSGSGATNFSLLKQAGDVEENPGPTSMDWIWRILFLVGAATGAHSGPQLQLQESGPGLVKPSETLSLTCTVSGDSISSGDYYWGWIRQPPGKGLEWIGHIYYSGVTYYNPSLKSRVTISVDTSRNQFSLKLSSVTAADTAVYYCTREDSSNWRSRGQGTLVTVSSGSGGGGSGGGGSGGGGSFEQVQLVQSGAEVKKPGASVKVSCKASGYTFTNYGMNWVKQAPGQGLKWMGWINTYTGEPTYADDFKGRVTMTSDTSTSTAYLELHNLRSDDTAVYYCARWSWSDGYYVYFDYWGQGTTVTVSSTRIQNPDPAVYQLRDSKSSDKSVCLFTDFDSQTNVSQSKDSDVYITDKCVLDMRSMDFKSNSAVAWSNKSDFACANAFNNSIIPEDTFFPSPESSDSTDHVKPKETENTKQPSKSCHKPKAIVHTEKVNMMSLTVLGLRMLFAKTVAVNFLLTAKLFFLLTA

SEQ ID NO: 15065 - protein, 1001 aa, synthetic construct
MALPVTALLLPLALLLHAARPEVQLVESGGGLVQPGGSLRLSCAASGFSFSDFWMSWVRQAPGKGLEWVATISQAGSEKDYVDSVKGRFTISRDNAKKSLYLQMNSLRAEDTAVYYCASGVYSFDYRGQGTLVTVSSGTGGGGSGGGGSGGGGSEFDEIVLTQSPGSLAVSPGERVTMSCKSSQSVFFSSSQKNYLAWYQQIPGQSPRLLIYWASTRESGVPDRFTGSGSGTDFTLTISSVQPEDLAIYYCHQYLSSRTFGQGTKLEIKRLEDLKNVFPPEVAVFEPSEAEISHTQKATLVCLATGFYPDHVELSWWVNGKEVHSGVCTDPQPLKEQPALNDSRYCLSSRLRVSATFWQNPRNHFRCQVQFYGLSENDEWTQDRAKPVTQIVSAEAWGRADDVIKIHWQEKKSNTILGSQEGNTMKTNDTYMKFSWLTVPEKSLDKEHRCIVRHENNKNGVDQEIIFPPIKTDVITMDPKDNCSKDANDTLLLQLTNTSAYYMYLLLLLKSVVYFAIITCCLLMAMVKRKDSRGRAKRSGSGATNFSLLKQAGDVEENPGPTSMDWIWRILFLVGAATGAHSGPQLQLQESGPGLVKPSETLSLTCTVSGDSISSGDYYWGWIRQPPGKGLEWIGHIYYSGVTYYNPSLKSRVTISVDTSRNQFSLKLSSVTAADTAVYYCTREDSSNWRSRGQGTLVTVSSGSGGGGSGGGGSGGGGSFEQVQLQQPGAEVVKPGASVKMSCKASGYTFTSYYIHWIKQTPGQGLEWVGVIYPGNDDISYNQKFQGKATLTADKSSTTAYMQLSSLTSEDSAVYYCAREVRLRYFDVWGQGTTVTVSSTRIQNPDPAVYQLRDSKSSDKSVCLFTDFDSQTNVSQSKDSDVYITDKCVLDMRSMDFKSNSAVAWSNKSDFACANAFNNSIIPEDTFFPSPESSDSTDHVKPKETENTKQPSKSCHKPKAIVHTEKVNMMSLTVLGLRMLFAKTVAVNFLLTAKLFFLLTA

SEQ ID NO: 15066 - protein, 1005 aa, synthetic construct
MALPVTALLLPLALLLHAARPEVQLVESGGGLVQPGGSLRLSCAASGFSFSDFWMSWVRQAPGKGLEWVATISQAGSEKDYVDSVKGRFTISRDNAKKSLYLQMNSLRAEDTAVYYCASGVYSFDYRGQGTLVTVSSGTGGGGSGGGGSGGGGSEFDVLLTQSPLSLPVTLGQPASISCRSSQTIVHSNGNTYLEWFQQRPGQSPRLLIYQVSNRFSGVPDRFSGSGSGTDFTLKISRVEAEDVGVYYCFQGSHVPRTFGGGTKVEIKRALEDLKNVFPPEVAVFEPSEAEISHTQKATLVCLATGFYPDHVELSWWVNGKEVHSGVCTDPQPLKEQPALNDSRYCLSSRLRVSATFWQNPRNHFRCQVQFYGLSENDEWTQDRAKPVTQIVSAEAWGRADDVIKIHWQEKKSNTILGSQEGNTMKTNDTYMKFSWLTVPEKSLDKEHRCIVRHENNKNGVDQEIIFPPIKTDVITMDPKDNCSKDANDTLLLQLTNTSAYYMYLLLLLKSVVYFAIITCCLLMAMVKRKDSRGRAKRSGSGATNFSLLKQAGDVEENPGPTSMDWIWRILFLVGAATGAHSGPQLQLQESGPGLVKPSETLSLTCTVSGDSISSGDYYWGWIRQPPGKGLEWIGHIYYSGVTYYNPSLKSRVTISVDTSRNQFSLKLSSVTAADTAVYYCTREDSSNWRSRGQGTLVTVSSGSGGGGSGGGGSGGGGSFEQIQLVQSGSELKKPGASVKVSCKASGYTFTNYGMNWVRQAPGQGLKWMGWINTNTGEPKYAEEFKGRFALSLDTSVSTAYLQINSLKAEDTAVYFCARGYGNYARGAWLAYWGQGTLVTVSSTRIQNPDPAVYQLRDSKSSDKSVCLFTDFDSQTNVSQSKDSDVYITDKCVLDMRSMDFKSNSAVAWSNKSDFACANAFNNSIIPEDTFFPSPESSDSTDHVKPKETENTKQPSKSCHKPKAIVHTEKVNMMSLTVLGLRMLFAKTVAVNFLLTAKLFFLLTA

SEQ ID NO: 15067 - protein, 990 aa, synthetic construct
MALPVTALLLPLALLLHAARPEVQLVESGGGLVQPGGSLRLSCAASGFSFSDFWMSWVRQAPGKGLEWVATISQAGSEKDYVDSVKGRFTISRDNAKKSLYLQMNSLRAEDTAVYYCASGVYSFDYRGQGTLVTVSSGTGGGGSGGGGSGGGGSEFDEIVLTQSPATLSLSPGERATLSCSASSSINYIYWLQQKPGQAPRILIYLTSNLASGVPARFSGSGSGTDFTLTISSLEPEDFAVYYCLQWSSNPLTFGGGTKVEIKLEDLKNVFPPEVAVFEPSEAEISHTQKATLVCLATGFYPDHVELSWWVNGKEVHSGVCTDPQPLKEQPALNDSRYCLSSRLRVSATFWQNPRNHFRCQVQFYGLSENDEWTQDRAKPVTQIVSAEAWGRADDVIKIHWQEKKSNTILGSQEGNTMKTNDTYMKFSWLTVPEKSLDKEHRCIVRHENNKNGVDQEIIFPPIKTDVITMDPKDNCSKDANDTLLLQLTNTSAYYMYLLLLLKSVVYFAIITCCLLMAMVKRKDSRGRAKRSGSGATNFSLLKQAGDVEENPGPTSMDWIWRILFLVGAATGAHSGPQLQLQESGPGLVKPSETLSLTCTVSGDSISSGDYYWGWIRQPPGKGLEWIGHIYYSGVTYYNPSLKSRVTISVDTSRNQFSLKLSSVTAADTAVYYCTREDSSNWRSRGQGTLVTVSSGSGGGGSGGGGSGGGGSFEEVQLVESGGGLVKPGGSLRLSCAASGFTFSSYDMSWVRQAPGKGLEWVSTISSGGSYTYYLDSIKGRFTISRDNAKNSLYLQMNSLRAEDTAVYYCARQGLDYWGRGTLVTVSSTRIQNPDPAVYQLRDSKSSDKSVCLFTDFDSQTNVSQSKDSDVYITDKCVLDMRSMDFKSNSAVAWSNKSDFACANAFNNSIIPEDTFFPSPESSDSTDHVKPKETENTKQPSKSCHKPKAIVHTEKVNMMSLTVLGLRMLFAKTVAVNFLLTAKLFFLLTA

SEQ ID NO: 15068 - protein, 999 aa, synthetic construct
MALPVTALLLPLALLLHAARPEVQLVESGGGLVQPGGSLRLSCAASGFSFSDFWMSWVRQAPGKGLEWVATISQAGSEKDYVDSVKGRFTISRDNAKKSLYLQMNSLRAEDTAVYYCASGVYSFDYRGQGTLVTVSSGTGGGGSGGGGSGGGGSEFDIVMTQSPDSLAVSLGERATINCRASKSVSTSGYSFMHWYQQKPGQPPKLLIYLASNLESGVPDRFSGSGSGTDFTLTISSLQAEDVAVYYCQHSREVPWTFGQGTKVEIKRLEDLKNVFPPEVAVFEPSEAEISHTQKATLVCLATGFYPDHVELSWWVNGKEVHSGVCTDPQPLKEQPALNDSRYCLSSRLRVSATFWQNPRNHFRCQVQFYGLSENDEWTQDRAKPVTQIVSAEAWGRADDVIKIHWQEKKSNTILGSQEGNTMKTNDTYMKFSWLTVPEKSLDKEHRCIVRHENNKNGVDQEIIFPPIKTDVITMDPKDNCSKDANDTLLLQLTNTSAYYMYLLLLLKSVVYFAIITCCLLMAMVKRKDSRGRAKRSGSGATNFSLLKQAGDVEENPGPTSMDWIWRILFLVGAATGAHSGPQLQLQESGPGLVKPSETLSLTCTVSGDSISSGDYYWGWIRQPPGKGLEWIGHIYYSGVTYYNPSLKSRVTISVDTSRNQFSLKLSSVTAADTAVYYCTREDSSNWRSRGQGTLVTVSSGSGGGGSGGGGSGGGGSFEQVQLVQSGAEVKKPGASVKVSCKASGYTFTNYGMNWVRQAPGQGLEWMGWINTYTGEPTYADAFKGRFAFSLDTSTSTAYLQINSLRSDDTAVYYCARDYGDYGMDYWGQGTTVTVSSTRIQNPDPAVYQLRDSKSSDKSVCLFTDFDSQTNVSQSKDSDVYITDKCVLDMRSMDFKSNSAVAWSNKSDFACANAFNNSIIPEDTFFPSPESSDSTDHVKPKETENTKQPSKSCHKPKAIVHTEKVNMMSLTVLGLRMLFAKTVAVNFLLTAKLFFLLTA

SEQ ID NO: 15069 - protein, 995 aa, synthetic construct
MALPVTALLLPLALLLHAARPEVQLVESGGGLVQPGGSLRLSCAASGFSFSDFWMSWVRQAPGKGLEWVATISQAGSEKDYVDSVKGRFTISRDNAKKSLYLQMNSLRAEDTAVYYCASGVYSFDYRGQGTLVTVSSGTGGGGSGGGGSGGGGSEFDIVMTQTPLTLSVTIGQPASISCKSSQSLLDSDGKTYLNWLLQRPGQSPERLIYLVSKLDSGVPDRFTGSGSGTDFTLKISRVEAEDLGVYCCWQGTHFPYTFGGGTKVEIKGLEDLKNVFPPEVAVFEPSEAEISHTQKATLVCLATGFYPDHVELSWWVNGKEVHSGVCTDPQPLKEQPALNDSRYCLSSRLRVSATFWQNPRNHFRCQVQFYGLSENDEWTQDRAKPVTQIVSAEAWGRADDVIKIHWQEKKSNTILGSQEGNTMKTNDTYMKFSWLTVPEKSLDKEHRCIVRHENNKNGVDQEIIFPPIKTDVITMDPKDNCSKDANDTLLLQLTNTSAYYMYLLLLLKSVVYFAIITCCLLMAMVKRKDSRGRAKRSGSGATNFSLLKQAGDVEENPGPTSMDWIWRILFLVGAATGAHSGPQLQLQESGPGLVKPSETLSLTCTVSGDSISSGDYYWGWIRQPPGKGLEWIGHIYYSGVTYYNPSLKSRVTISVDTSRNQFSLKLSSVTAADTAVYYCTREDSSNWRSRGQGTLVTVSSGSGGGGSGGGGSGGGGSFEQVQLQQPGAELVRPGASVKLSCKASGYTFTSYWMNWVKQRPGQGLEWIGMIDPSDSETHYNHIFKDKATLTVDKSSSTAYLQLSSLTSEDSAVYYCARNLYLWGQGTSVTVSSTRIQNPDPAVYQLRDSKSSDKSVCLFTDFDSQTNVSQSKDSDVYITDKCVLDMRSMDFKSNSAVAWSNKSDFACANAFNNSIIPEDTFFPSPESSDSTDHVKPKETENTKQPSKSCHKPKAIVHTEKVNMMSLTVLGLRMLFAKTVAVNFLLTAKLFFLLTA

SEQ ID NO: 15070 - protein, 1003 aa, synthetic construct
MALPVTALLLPLALLLHAARPEVQLVESGGGLVQPGGSLRLSCAASGFSFSDFWMSWVRQAPGKGLEWVATISQAGSEKDYVDSVKGRFTISRDNAKKSLYLQMNSLRAEDTAVYYCASGVYSFDYRGQGTLVTVSSGTGGGGSGGGGSGGGGSEFDIVMTQSPDSLAVSLGERATINCESSQSLLNSGNQKNYLTWYQQKPGQPPKPLIYWASTRESGVPDRFSGSGSGTDFTLTISSLQAEDVAVYYCQNDYSYPYTFGQGTKLEIKRLEDLKNVFPPEVAVFEPSEAEISHTQKATLVCLATGFYPDHVELSWWVNGKEVHSGVCTDPQPLKEQPALNDSRYCLSSRLRVSATFWQNPRNHFRCQVQFYGLSENDEWTQDRAKPVTQIVSAEAWGRADDVIKIHWQEKKSNTILGSQEGNTMKTNDTYMKFSWLTVPEKSLDKEHRCIVRHENNKNGVDQEIIFPPIKTDVITMDPKDNCSKDANDTLLLQLTNTSAYYMYLLLLLKSVVYFAIITCCLLMAMVKRKDSRGRAKRSGSGATNFSLLKQAGDVEENPGPTSMDWIWRILFLVGAATGAHSGPQLQLQESGPGLVKPSETLSLTCTVSGDSISSGDYYWGWIRQPPGKGLEWIGHIYYSGVTYYNPSLKSRVTISVDTSRNQFSLKLSSVTAADTAVYYCTREDSSNWRSRGQGTLVTVSSGSGGGGSGGGGSGGGGSFEEVQLVQSGAEVKKPGESLKISCKGSGYSFTDYYMKWARQMPGKGLEWMGDIIPSNGATFYNQKFKGQVTISADKSISTTYLQWSSLKASDTAMYYCARSHLLRASWFAYWGQGTMVTVSSTRIQNPDPAVYQLRDSKSSDKSVCLFTDFDSQTNVSQSKDSDVYITDKCVLDMRSMDFKSNSAVAWSNKSDFACANAFNNSIIPEDTFFPSPESSDSTDHVKPKETENTKQPSKSCHKPKAIVHTEKVNMMSLTVLGLRMLFAKTVAVNFLLTAKLFFLLTA

SEQ ID NO: 15071 - protein, 998 aa, synthetic construct
MALPVTALLLPLALLLHAARPEVQLVESGGGLVQPGGSLRLSCAASGFSFSDFWMSWVRQAPGKGLEWVATISQAGSEKDYVDSVKGRFTISRDNAKKSLYLQMNSLRAEDTAVYYCASGVYSFDYRGQGTLVTVSSGTGGGGSGGGGSGGGGSEFDIQMTQSTSSLSASLGDRVTISCSASQGINNYLNWYQQKPDGTVELLIYYTSTLQSGVPSRFSGSGSGTDYSLTISNLEPEDIGTYYCQQYSKLPRTFGGGTKLEIKLEDLKNVFPPEVAVFEPSEAEISHTQKATLVCLATGFYPDHVELSWWVNGKEVHSGVCTDPQPLKEQPALNDSRYCLSSRLRVSATFWQNPRNHFRCQVQFYGLSENDEWTQDRAKPVTQIVSAEAWGRADDVIKIHWQEKKSNTILGSQEGNTMKTNDTYMKFSWLTVPEKSLDKEHRCIVRHENNKNGVDQEIIFPPIKTDVITMDPKDNCSKDANDTLLLQLTNTSAYYMYLLLLLKSVVYFAIITCCLLMAMVKRKDSRGRAKRSGSGATNFSLLKQAGDVEENPGPTSMDWIWRILFLVGAATGAHSGPQLQLQESGPGLVKPSETLSLTCTVSGDSISSGDYYWGWIRQPPGKGLEWIGHIYYSGVTYYNPSLKSRVTISVDTSRNQFSLKLSSVTAADTAVYYCTREDSSNWRSRGQGTLVTVSSGSGGGGSGGGGSGGGGSFEQVQLQQSGSELMMPGASVKISCKATGYTFSNYWIEWVKQRPGHGLEWIGEILPGTGRTIYNEKFKGKATFTADISSNTVQMQLSSLTSEDSAVYYCARRDYYGNFYYAMDYWGQGTSVTVSSTRIQNPDPAVYQLRDSKSSDKSVCLFTDFDSQTNVSQSKDSDVYITDKCVLDMRSMDFKSNSAVAWSNKSDFACANAFNNSIIPEDTFFPSPESSDSTDHVKPKETENTKQPSKSCHKPKAIVHTEKVNMMSLTVLGLRMLFAKTVAVNFLLTAKLFFLLTA

SEQ ID NO: 15072 - protein, 993 aa, synthetic construct
MALPVTALLLPLALLLHAARPEVQLVESGGGLVQPGGSLRLSCAASGFSFSDFWMSWVRQAPGKGLEWVATISQAGSEKDYVDSVKGRFTISRDNAKKSLYLQMNSLRAEDTAVYYCASGVYSFDYRGQGTLVTVSSGTGGGGSGGGGSGGGGSEFDIQMTQSPASLSVSVGETVTITCRASENIYSNLAWYQQKQGKSPQLLVYAATNLADGVPSRFSGSGSGTQYSLKINSLQSEDFGSYYCQHFWGTWTFGGGTTLEIKLEDLKNVFPPEVAVFEPSEAEISHTQKATLVCLATGFYPDHVELSWWVNGKEVHSGVCTDPQPLKEQPALNDSRYCLSSRLRVSATFWQNPRNHFRCQVQFYGLSENDEWTQDRAKPVTQIVSAEAWGRADDVIKIHWQEKKSNTILGSQEGNTMKTNDTYMKFSWLTVPEKSLDKEHRCIVRHENNKNGVDQEIIFPPIKTDVITMDPKDNCSKDANDTLLLQLTNTSAYYMYLLLLLKSVVYFAIITCCLLMAMVKRKDSRGRAKRSGSGATNFSLLKQAGDVEENPGPTSMDWIWRILFLVGAATGAHSGPQLQLQESGPGLVKPSETLSLTCTVSGDSISSGDYYWGWIRQPPGKGLEWIGHIYYSGVTYYNPSLKSRVTISVDTSRNQFSLKLSSVTAADTAVYYCTREDSSNWRSRGQGTLVTVSSGSGGGGSGGGGSGGGGSFEEVQLQQSGPELVKPGASVKMSCKASGYTFTDYYMKWMKQSHGKSLEWIGDINPNNGGTTYNQKFKGKATLTVDKSSSTAYMQLNSLTSEDSAVYYCARDYGYGYFDYWGQGTTLTVSSTRIQNPDPAVYQLRDSKSSDKSVCLFTDFDSQTNVSQSKDSDVYITDKCVLDMRSMDFKSNSAVAWSNKSDFACANAFNNSIIPEDTFFPSPESSDSTDHVKPKETENTKQPSKSCHKPKAIVHTEKVNMMSLTVLGLRMLFAKTVAVNFLLTAKLFFLLTA

SEQ ID NO: 15073 - protein, 996 aa, synthetic construct
MALPVTALLLPLALLLHAARPEVQLVESGGGLVQPGGSLRLSCAASGFSFSDFWMSWVRQAPGKGLEWVATISQAGSEKDYVDSVKGRFTISRDNAKKSLYLQMNSLRAEDTAVYYCASGVYSFDYRGQGTLVTVSSGTGGGGSGGGGSGGGGSEFEIVLTQSPGTLSLSPGERATLSCRASQSVGGYLAWYQQKPGQAPRLLIYDASNRATGIPARFSGSGSGTDFTLTISSLEPEDFAVYYCQQRNNWPPMYTFGQGTKLEIKRLEDLKNVFPPEVAVFEPSEAEISHTQKATLVCLATGFYPDHVELSWWVNGKEVHSGVCTDPQPLKEQPALNDSRYCLSSRLRVSATFWQNPRNHFRCQVQFYGLSENDEWTQDRAKPVTQIVSAEAWGRADDVIKIHWQEKKSNTILGSQEGNTMKTNDTYMKFSWLTVPEKSLDKEHRCIVRHENNKNGVDQEIIFPPIKTDVITMDPKDNCSKDANDTLLLQLTNTSAYYMYLLLLLKSVVYFAIITCCLLMAMVKRKDSRGRAKRSGSGATNFSLLKQAGDVEENPGPTSMDWIWRILFLVGAATGAHSGPQLQLQESGPGLVKPSETLSLTCTVSGDSISSGDYYWGWIRQPPGKGLEWIGHIYYSGVTYYNPSLKSRVTISVDTSRNQFSLKLSSVTAADTAVYYCTREDSSNWRSRGQGTLVTVSSGSGGGGSGGGGSGGGGSFEQVQLVQSGAEVKKPGSSVKVSCKASGGTFSSYAISWVRQAPGQGLEWMGGIIPILGTANYAQKFQGRVTITADESTSTAYMELSSLRSEDTAVYYCARWGGGAFDIWGQGTMVTVSSTRIQNPDPAVYQLRDSKSSDKSVCLFTDFDSQTNVSQSKDSDVYITDKCVLDMRSMDFKSNSAVAWSNKSDFACANAFNNSIIPEDTFFPSPESSDSTDHVKPKETENTKQPSKSCHKPKAIVHTEKVNMMSLTVLGLRMLFAKTVAVNFLLTAKLFFLLTA

SEQ ID NO: 15074 - protein, 991 aa, synthetic construct
MALPVTALLLPLALLLHAARPEVQLVESGGGLVQPGGSLRLSCAASGFSFSDFWMSWVRQAPGKGLEWVATISQAGSEKDYVDSVKGRFTISRDNAKKSLYLQMNSLRAEDTAVYYCASGVYSFDYRGQGTLVTVSSGTGGGGSGGGGSGGGGSEFQIVLTQSPALMSASPGEKVTMTCSASSSVRYMYWYQQKPRSSPKPWIHLTSNLASGVPARFSGSGSGTSYSLTISSMEAEDAATYYCQQWSSHPFTFGSGTKLEIKLEDLKNVFPPEVAVFEPSEAEISHTQKATLVCLATGFYPDHVELSWWVNGKEVHSGVCTDPQPLKEQPALNDSRYCLSSRLRVSATFWQNPRNHFRCQVQFYGLSENDEWTQDRAKPVTQIVSAEAWGRADDVIKIHWQEKKSNTILGSQEGNTMKTNDTYMKFSWLTVPEKSLDKEHRCIVRHENNKNGVDQEIIFPPIKTDVITMDPKDNCSKDANDTLLLQLTNTSAYYMYLLLLLKSVVYFAIITCCLLMAMVKRKDSRGRAKRSGSGATNFSLLKQAGDVEENPGPTSMDWIWRILFLVGAATGAHSGPQLQLQESGPGLVKPSETLSLTCTVSGDSISSGDYYWGWIRQPPGKGLEWIGHIYYSGVTYYNPSLKSRVTISVDTSRNQFSLKLSSVTAADTAVYYCTREDSSNWRSRGQGTLVTVSSGSGGGGSGGGGSGGGGSFEDVQLQESGPGLVKPSQSLSLTCTVTGFSITSDYSWNWIRQFPGNKLEWMGYISYSGHTSYNPSLESRISITRDTSKNQFFLQLNSVTTEDTATYYCTRGNWDVVYWGQGTLVTVSATRIQNPDPAVYQLRDSKSSDKSVCLFTDFDSQTNVSQSKDSDVYITDKCVLDMRSMDFKSNSAVAWSNKSDFACANAFNNSIIPEDTFFPSPESSDSTDHVKPKETENTKQPSKSCHKPKAIVHTEKVNMMSLTVLGLRMLFAKTVAVNFLLTAKLFFLLTA

SEQ ID NO: 15075 - protein, 1001 aa, synthetic construct
MALPVTALLLPLALLLHAARPEVQLVESGGGLVQPGGSLRLSCAASGFSFSDFWMSWVRQAPGKGLEWVATISQAGSEKDYVDSVKGRFTISRDNAKKSLYLQMNSLRAEDTAVYYCASGVYSFDYRGQGTLVTVSSGTGGGGSGGGGSGGGGSEFDVVMTQSPLSLPVTLGQPASISCRSSQSIVHSDGNTYLEWYQQRPGQSPRRLIYKVSNRFSGVPDRFSGSGSGTDFTLKISRVEAEDVGVYYCFQGSHAPWTFGGGTKVEIKLEDLKNVFPPEVAVFEPSEAEISHTQKATLVCLATGFYPDHVELSWWVNGKEVHSGVCTDPQPLKEQPALNDSRYCLSSRLRVSATFWQNPRNHFRCQVQFYGLSENDEWTQDRAKPVTQIVSAEAWGRADDVIKIHWQEKKSNTILGSQEGNTMKTNDTYMKFSWLTVPEKSLDKEHRCIVRHENNKNGVDQEIIFPPIKTDVITMDPKDNCSKDANDTLLLQLTNTSAYYMYLLLLLKSVVYFAIITCCLLMAMVKRKDSRGRAKRSGSGATNFSLLKQAGDVEENPGPTSMDWIWRILFLVGAATGAHSGPQLQLQESGPGLVKPSETLSLTCTVSGDSISSGDYYWGWIRQPPGKGLEWIGHIYYSGVTYYNPSLKSRVTISVDTSRNQFSLKLSSVTAADTAVYYCTREDSSNWRSRGQGTLVTVSSGSGGGGSGGGGSGGGGSFEEVQLVESGGGLVQPGGSLRLSCAASGFTFSSYGMHWVRQAPGKGLEWVAYITTRSSTIYYADSVKGRFTISRDNAKNSLYLQMNSLRAEDTAVYYCTREPLTGYYAMDYWGQGTSVTVSSTRIQNPDPAVYQLRDSKSSDKSVCLFTDFDSQTNVSQSKDSDVYITDKCVLDMRSMDFKSNSAVAWSNKSDFACANAFNNSIIPEDTFFPSPESSDSTDHVKPKETENTKQPSKSCHKPKAIVHTEKVNMMSLTVLGLRMLFAKTVAVNFLLTAKLFFLLTA

SEQ ID NO: 15076 - protein, 993 aa, synthetic construct
MALPVTALLLPLALLLHAARPEVQLVESGGGLVQPGGSLRLSCAASGFSFSDFWMSWVRQAPGKGLEWVATISQAGSEKDYVDSVKGRFTISRDNAKKSLYLQMNSLRAEDTAVYYCASGVYSFDYRGQGTLVTVSSGTGGGGSGGGGSGGGGSEFDIQMTQSPSSLSASVGDRVTITCRASQSISLWLNWYQQKPGKAPKLLIYAASTLQSGVPSRFSGSGSGTDFTLTISSLQPEDFATYYCQQYYTSPYTFGQGTKVEIKRLEDLKNVFPPEVAVFEPSEAEISHTQKATLVCLATGFYPDHVELSWWVNGKEVHSGVCTDPQPLKEQPALNDSRYCLSSRLRVSATFWQNPRNHFRCQVQFYGLSENDEWTQDRAKPVTQIVSAEAWGRADDVIKIHWQEKKSNTILGSQEGNTMKTNDTYMKFSWLTVPEKSLDKEHRCIVRHENNKNGVDQEIIFPPIKTDVITMDPKDNCSKDANDTLLLQLTNTSAYYMYLLLLLKSVVYFAIITCCLLMAMVKRKDSRGRAKRSGSGATNFSLLKQAGDVEENPGPTSMDWIWRILFLVGAATGAHSGPQLQLQESGPGLVKPSETLSLTCTVSGDSISSGDYYWGWIRQPPGKGLEWIGHIYYSGVTYYNPSLKSRVTISVDTSRNQFSLKLSSVTAADTAVYYCTREDSSNWRSRGQGTLVTVSSGSGGGGSGGGGSGGGGSFEQVQLLESGGGLVQPGGSLRLSCAASGFTFSSYAMSWVRQAPGKGLEWVSVIRSSGSSTYYADSVKGRFTISRDNSKNTLYLQMNSLRAEDTAVYYCARGGGYFDYWGQGTLVTVSSTRIQNPDPAVYQLRDSKSSDKSVCLFTDFDSQTNVSQSKDSDVYITDKCVLDMRSMDFKSNSAVAWSNKSDFACANAFNNSIIPEDTFFPSPESSDSTDHVKPKETENTKQPSKSCHKPKAIVHTEKVNMMSLTVLGLRMLFAKTVAVNFLLTAKLFFLLTA

SEQ ID NO: 15077 - protein, 996 aa, synthetic construct
MALPVTALLLPLALLLHAARPEVQLVESGGGLVQPGGSLRLSCAASGFSFSDFWMSWVRQAPGKGLEWVATISQAGSEKDYVDSVKGRFTISRDNAKKSLYLQMNSLRAEDTAVYYCASGVYSFDYRGQGTLVTVSSGTGGGGSGGGGSGGGGSEFDIQMTQSPSSLSASVGDRVTITCRASQSISSYLNWYQQKPGKAPKLLIYAVSTLQSGVPSRFSGSGSGTDFTLTISSLQPEDFATYYCQQSGTFPPTTFGQGTKVEIKRLEDLKNVFPPEVAVFEPSEAEISHTQKATLVCLATGFYPDHVELSWWVNGKEVHSGVCTDPQPLKEQPALNDSRYCLSSRLRVSATFWQNPRNHFRCQVQFYGLSENDEWTQDRAKPVTQIVSAEAWGRADDVIKIHWQEKKSNTILGSQEGNTMKTNDTYMKFSWLTVPEKSLDKEHRCIVRHENNKNGVDQEIIFPPIKTDVITMDPKDNCSKDANDTLLLQLTNTSAYYMYLLLLLKSVVYFAIITCCLLMAMVKRKDSRGRAKRSGSGATNFSLLKQAGDVEENPGPTSMDWIWRILFLVGAATGAHSGPQLQLQESGPGLVKPSETLSLTCTVSGDSISSGDYYWGWIRQPPGKGLEWIGHIYYSGVTYYNPSLKSRVTISVDTSRNQFSLKLSSVTAADTAVYYCTREDSSNWRSRGQGTLVTVSSGSGGGGSGGGGSGGGGSFEQVQLLESGGGLVQPGGSLRLSCAASGFTFSSHGMHWVRQAPGKGLEWVSVISGSGSNTGYADSVKGRFTISRDNSKNTLYLQMNSLRAEDTAVYYCARQWGSYAFDSWGQGTLVTVSSTRIQNPDPAVYQLRDSKSSDKSVCLFTDFDSQTNVSQSKDSDVYITDKCVLDMRSMDFKSNSAVAWSNKSDFACANAFNNSIIPEDTFFPSPESSDSTDHVKPKETENTKQPSKSCHKPKAIVHTEKVNMMSLTVLGLRMLFAKTVAVNFLLTAKLFFLLTA

SEQ ID NO: 15078 - protein, 1006 aa, synthetic construct
MALPVTALLLPLALLLHAARPEVQLVESGGGLVQPGGSLRLSCAASGFSFSDFWMSWVRQAPGKGLEWVATISQAGSEKDYVDSVKGRFTISRDNAKKSLYLQMNSLRAEDTAVYYCASGVYSFDYRGQGTLVTVSSGTGGGGSGGGGSGGGGSEFDIVMSQSPSSLAVSVGEKVTMSCKSSQSLLHSSNQKNYLAWYQQKPGQSPKVLIYWASTRESGVPDRFTGSGSGTDFTLTITSVKSEDLAVYYCQQYYSYPWTFGGGTRLEIKRLEDLKNVFPPEVAVFEPSEAEISHTQKATLVCLATGFYPDHVELSWWVNGKEVHSGVCTDPQPLKEQPALNDSRYCLSSRLRVSATFWQNPRNHFRCQVQFYGLSENDEWTQDRAKPVTQIVSAEAWGRADDVIKIHWQEKKSNTILGSQEGNTMKTNDTYMKFSWLTVPEKSLDKEHRCIVRHENNKNGVDQEIIFPPIKTDVITMDPKDNCSKDANDTLLLQLTNTSAYYMYLLLLLKSVVYFAIITCCLLMAMVKRKDSRGRAKRSGSGATNFSLLKQAGDVEENPGPTSMDWIWRILFLVGAATGAHSGPQLQLQESGPGLVKPSETLSLTCTVSGDSISSGDYYWGWIRQPPGKGLEWIGHIYYSGVTYYNPSLKSRVTISVDTSRNQFSLKLSSVTAADTAVYYCTREDSSNWRSRGQGTLVTVSSGSGGGGSGGGGSGGGGSFEEVQLQQSVAELVKPGASVKMSCKVSGYTLTDHTIHWMKQRPEQGLEWIGYIYPRDGITGYNEKFKGKATLTADTSSSTAYMQLNSLTSEDSAVYFCARWGYSYRNYAYYYDYWGQGTTLTVSSTRIQNPDPAVYQLRDSKSSDKSVCLFTDFDSQTNVSQSKDSDVYITDKCVLDMRSMDFKSNSAVAWSNKSDFACANAFNNSIIPEDTFFPSPESSDSTDHVKPKETENTKQPSKSCHKPKAIVHTEKVNMMSLTVLGLRMLFAKTVAVNFLLTAKLFFLLTA

SEQ ID NO: 15079 - protein, 1003 aa, synthetic construct
MALPVTALLLPLALLLHAARPEVQLVESGGGLVQPGGSLRLSCAASGFSFSDFWMSWVRQAPGKGLEWVATISQAGSEKDYVDSVKGRFTISRDNAKKSLYLQMNSLRAEDTAVYYCASGVYSFDYRGQGTLVTVSSGTGGGGSGGGGSGGGGSEFEIVLTQSPGTLSLSPGERATLSCRASQSVSSSYLAWYQQKPGQAPRLLIYGTSSRATGIPDRFSGSGSGTDFTLTISRLEPEDFAVYYCQQYGSSPFTFGGGTKVEIKRLEDLKNVFPPEVAVFEPSEAEISHTQKATLVCLATGFYPDHVELSWWVNGKEVHSGVCTDPQPLKEQPALNDSRYCLSSRLRVSATFWQNPRNHFRCQVQFYGLSENDEWTQDRAKPVTQIVSAEAWGRADDVIKIHWQEKKSNTILGSQEGNTMKTNDTYMKFSWLTVPEKSLDKEHRCIVRHENNKNGVDQEIIFPPIKTDVITMDPKDNCSKDANDTLLLQLTNTSAYYMYLLLLLKSVVYFAIITCCLLMAMVKRKDSRGRAKRSGSGATNFSLLKQAGDVEENPGPTSMDWIWRILFLVGAATGAHSGPQLQLQESGPGLVKPSETLSLTCTVSGDSISSGDYYWGWIRQPPGKGLEWIGHIYYSGVTYYNPSLKSRVTISVDTSRNQFSLKLSSVTAADTAVYYCTREDSSNWRSRGQGTLVTVSSGSGGGGSGGGGSGGGGSFEQVQLQESGPGLAKPSETLSLTCTVSGDSITSYYWSWIRQPPGKGLEWIGYIYYSGSTNYNPSLKSRVTISVDTSKNQFSLKLSSVTAADTAVYYCARDQRRIAAAGTHFYGMDVWGQGTTVTVSSTRIQNPDPAVYQLRDSKSSDKSVCLFTDFDSQTNVSQSKDSDVYITDKCVLDMRSMDFKSNSAVAWSNKSDFACANAFNNSIIPEDTFFPSPESSDSTDHVKPKETENTKQPSKSCHKPKAIVHTEKVNMMSLTVLGLRMLFAKTVAVNFLLTAKLFFLLTA

SEQ ID NO: 15080 - protein, 995 aa, synthetic construct
MALPVTALLLPLALLLHAARPEVQLVESGGGLVQPGGSLRLSCAASGFSFSDFWMSWVRQAPGKGLEWVATISQAGSEKDYVDSVKGRFTISRDNAKKSLYLQMNSLRAEDTAVYYCASGVYSFDYRGQGTLVTVSSGTGGGGSGGGGSGGGGSEFDILLTQSPVILSVSPGERVSFSCRASQSIGTNIHWYQQRTNGSPRLLIKYASESISGIPSRFSGSGSGTDFTLSINSVESEDIADYYCQQNNNWPTTFGAGTKLELKLEDLKNVFPPEVAVFEPSEAEISHTQKATLVCLATGFYPDHVELSWWVNGKEVHSGVCTDPQPLKEQPALNDSRYCLSSRLRVSATFWQNPRNHFRCQVQFYGLSENDEWTQDRAKPVTQIVSAEAWGRADDVIKIHWQEKKSNTILGSQEGNTMKTNDTYMKFSWLTVPEKSLDKEHRCIVRHENNKNGVDQEIIFPPIKTDVITMDPKDNCSKDANDTLLLQLTNTSAYYMYLLLLLKSVVYFAIITCCLLMAMVKRKDSRGRAKRSGSGATNFSLLKQAGDVEENPGPTSMDWIWRILFLVGAATGAHSGPQLQLQESGPGLVKPSETLSLTCTVSGDSISSGDYYWGWIRQPPGKGLEWIGHIYYSGVTYYNPSLKSRVTISVDTSRNQFSLKLSSVTAADTAVYYCTREDSSNWRSRGQGTLVTVSSGSGGGGSGGGGSGGGGSFEQVQLKQSGPGLVQPSQSLSITCTVSGFSLTNYGVHWVRQSPGKGLEWLGVIWSGGNTDYNTPFTSRLSINKDNSKSQVFFKMNSLQSNDTAIYYCARALTYYDYEFAYWGQGTLVTVSATRIQNPDPAVYQLRDSKSSDKSVCLFTDFDSQTNVSQSKDSDVYITDKCVLDMRSMDFKSNSAVAWSNKSDFACANAFNNSIIPEDTFFPSPESSDSTDHVKPKETENTKQPSKSCHKPKAIVHTEKVNMMSLTVLGLRMLFAKTVAVNFLLTAKLFFLLTA

SEQ ID NO: 15081 - protein, 988 aa, synthetic construct
MALPVTALLLPLALLLHAARPEVQLVESGGGLVQPGGSLRLSCAASGFSFSDFWMSWVRQAPGKGLEWVATISQAGSEKDYVDSVKGRFTISRDNAKKSLYLQMNSLRAEDTAVYYCASGVYSFDYRGQGTLVTVSSGTGGGGSGGGGSGGGGSEFMTQSPKFLLVSAGDRVTLTCKASQSVNNDVYWYQQEPGQSPKLLIYWASTRESGVPDRFTGSGSGTDFTLTISSVQAEDLAVYYCKQSYNLYTFGGGTKLEIKRLEDLKNVFPPEVAVFEPSEAEISHTQKATLVCLATGFYPDHVELSWWVNGKEVHSGVCTDPQPLKEQPALNDSRYCLSSRLRVSATFWQNPRNHFRCQVQFYGLSENDEWTQDRAKPVTQIVSAEAWGRADDVIKIHWQEKKSNTILGSQEGNTMKTNDTYMKFSWLTVPEKSLDKEHRCIVRHENNKNGVDQEIIFPPIKTDVITMDPKDNCSKDANDTLLLQLTNTSAYYMYLLLLLKSVVYFAIITCCLLMAMVKRKDSRGRAKRSGSGATNFSLLKQAGDVEENPGPTSMDWIWRILFLVGAATGAHSGPQLQLQESGPGLVKPSETLSLTCTVSGDSISSGDYYWGWIRQPPGKGLEWIGHIYYSGVTYYNPSLKSRVTISVDTSRNQFSLKLSSVTAADTAVYYCTREDSSNWRSRGQGTLVTVSSGSGGGGSGGGGSGGGGSFEESGRGLVQPGGSRKLSCAASGFTFSTSGMHWVRQAPEKGLEWVAYISSGSTTIYHADTVKGRFTISRDNPKNTLFLQMTSLRSEDTAMYYCCARSGQFGNYFDYWGQGTTLTVSSTRIQNPDPAVYQLRDSKSSDKSVCLFTDFDSQTNVSQSKDSDVYITDKCVLDMRSMDFKSNSAVAWSNKSDFACANAFNNSIIPEDTFFPSPESSDSTDHVKPKETENTKQPSKSCHKPKAIVHTEKVNMMSLTVLGLRMLFAKTVAVNFLLTAKLFFLLTA

SEQ ID NO: 15082 - protein, 993 aa, synthetic construct
MALPVTALLLPLALLLHAARPEVQLVESGGGLVQPGGSLRLSCAASGFSFSDFWMSWVRQAPGKGLEWVATISQAGSEKDYVDSVKGRFTISRDNAKKSLYLQMNSLRAEDTAVYYCASGVYSFDYRGQGTLVTVSSGTGGGGSGGGGSGGGGSEFQSPSSLAVSAGEKVTMSCKSSQSLLNSRTRKNYLAWYQQKPGQSPKLLIYWASTRESGVPDRFTGSGSGTDFTLTISSVQAEDLAVYYCKQSNLYTFGGGTKLEIKLEDLKNVFPPEVAVFEPSEAEISHTQKATLVCLATGFYPDHVELSWWVNGKEVHSGVCTDPQPLKEQPALNDSRYCLSSRLRVSATFWQNPRNHFRCQVQFYGLSENDEWTQDRAKPVTQIVSAEAWGRADDVIKIHWQEKKSNTILGSQEGNTMKTNDTYMKFSWLTVPEKSLDKEHRCIVRHENNKNGVDQEIIFPPIKTDVITMDPKDNCSKDANDTLLLQLTNTSAYYMYLLLLLKSVVYFAIITCCLLMAMVKRKDSRGRAKRSGSGATNFSLLKQAGDVEENPGPTSMDWIWRILFLVGAATGAHSGPQLQLQESGPGLVKPSETLSLTCTVSGDSISSGDYYWGWIRQPPGKGLEWIGHIYYSGVTYYNPSLKSRVTISVDTSRNQFSLKLSSVTAADTAVYYCTREDSSNWRSRGQGTLVTVSSGSGGGGSGGGGSGGGGSFEQVQLEESGPELVKPGASVKLSCKASGYTFTEYIIHWVKQRSGQGLEWIGWFYPGSGSIKYNEKFKDKATLTADKSSSTVYMELSGLTSEDSAVYFCARHDGYSYFDYWGQGTTLTVSSTRIQNPDPAVYQLRDSKSSDKSVCLFTDFDSQTNVSQSKDSDVYITDKCVLDMRSMDFKSNSAVAWSNKSDFACANAFNNSIIPEDTFFPSPESSDSTDHVKPKETENTKQPSKSCHKPKAIVHTEKVNMMSLTVLGLRMLFAKTVAVNFLLTAKLFFLLTA

SEQ ID NO: 15083 - protein, 996 aa, synthetic construct
MALPVTALLLPLALLLHAARPEVQLVESGGGLVQPGGSLRLSCAASGFSFSDFWMSWVRQAPGKGLEWVATISQAGSEKDYVDSVKGRFTISRDNAKKSLYLQMNSLRAEDTAVYYCASGVYSFDYRGQGTLVTVSSGTGGGGSGGGGSGGGGSEFDIQMTQSPSSLSASLGERVSLTCRATQELSGYLSWLQQKPDGTIKRLIYAASTLDSGVPKRFSGNRSGSDYSLTISSLESEDFADYYCLQYAIYPYTFGGGTKLEIKLEDLKNVFPPEVAVFEPSEAEISHTQKATLVCLATGFYPDHVELSWWVNGKEVHSGVCTDPQPLKEQPALNDSRYCLSSRLRVSATFWQNPRNHFRCQVQFYGLSENDEWTQDRAKPVTQIVSAEAWGRADDVIKIHWQEKKSNTILGSQEGNTMKTNDTYMKFSWLTVPEKSLDKEHRCIVRHENNKNGVDQEIIFPPIKTDVITMDPKDNCSKDANDTLLLQLTNTSAYYMYLLLLLKSVVYFAIITCCLLMAMVKRKDSRGRAKRSGSGATNFSLLKQAGDVEENPGPTSMDWIWRILFLVGAATGAHSGPQLQLQESGPGLVKPSETLSLTCTVSGDSISSGDYYWGWIRQPPGKGLEWIGHIYYSGVTYYNPSLKSRVTISVDTSRNQFSLKLSSVTAADTAVYYCTREDSSNWRSRGQGTLVTVSSGSGGGGSGGGGSGGGGSFEEVQLQQSGPELVKPGASVKMSCKASGYTFTSYFIHWVKQKPGQGLEWIGFINPYNDGSKYNEKFKGKATLTSDKSSSTAYMELSSLTSEDSAVYYCTRDDGYYGYAMDYWGQGTSVTVSSTRIQNPDPAVYQLRDSKSSDKSVCLFTDFDSQTNVSQSKDSDVYITDKCVLDMRSMDFKSNSAVAWSNKSDFACANAFNNSIIPEDTFFPSPESSDSTDHVKPKETENTKQPSKSCHKPKAIVHTEKVNMMSLTVLGLRMLFAKTVAVNFLLTAKLFFLLTA

SEQ ID NO: 15084 - protein, 1001 aa, synthetic construct
MALPVTALLLPLALLLHAARPEVQLVESGGGLVQPGGSLRLSCAASGFSFSDFWMSWVRQAPGKGLEWVATISQAGSEKDYVDSVKGRFTISRDNAKKSLYLQMNSLRAEDTAVYYCASGVYSFDYRGQGTLVTVSSGTGGGGSGGGGSGGGGSEFDTIVLTQSPASLAVSLGQRATISCRASESVDSYGNSFMHWYQQKPGQPPKLLIYLASNLESGVPARFSGSGSRTDFTLTIDPVEADDAATYYCQQNNYDPWTFGGGTKLEIKLEDLKNVFPPEVAVFEPSEAEISHTQKATLVCLATGFYPDHVELSWWVNGKEVHSGVCTDPQPLKEQPALNDSRYCLSSRLRVSATFWQNPRNHFRCQVQFYGLSENDEWTQDRAKPVTQIVSAEAWGRADDVIKIHWQEKKSNTILGSQEGNTMKTNDTYMKFSWLTVPEKSLDKEHRCIVRHENNKNGVDQEIIFPPIKTDVITMDPKDNCSKDANDTLLLQLTNTSAYYMYLLLLLKSVVYFAIITCCLLMAMVKRKDSRGRAKRSGSGATNFSLLKQAGDVEENPGPTSMDWIWRILFLVGAATGAHSGPQLQLQESGPGLVKPSETLSLTCTVSGDSISSGDYYWGWIRQPPGKGLEWIGHIYYSGVTYYNPSLKSRVTISVDTSRNQFSLKLSSVTAADTAVYYCTREDSSNWRSRGQGTLVTVSSGSGGGGSGGGGSGGGGSFEEVQLQQSGPELVKPGASVKMSCKASGYTFTSYVMHWVKQKPGQGLEWIGYINPYNDGTKYNEKFKGKATLTSDTSSSTAYMELNSLTSEDSAVYFCARPIYFDNDYFDYWGQGTTLKVSSTRIQNPDPAVYQLRDSKSSDKSVCLFTDFDSQTNVSQSKDSDVYITDKCVLDMRSMDFKSNSAVAWSNKSDFACANAFNNSIIPEDTFFPSPESSDSTDHVKPKETENTKQPSKSCHKPKAIVHTEKVNMMSLTVLGLRMLFAKTVAVNFLLTAKLFFLLTA

SEQ ID NO: 15085 - protein, 996 aa, synthetic construct
MALPVTALLLPLALLLHAARPEVQLVESGGGLVQPGGSLRLSCAASGFSFSDFWMSWVRQAPGKGLEWVATISQAGSEKDYVDSVKGRFTISRDNAKKSLYLQMNSLRAEDTAVYYCASGVYSFDYRGQGTLVTVSSGTGGGGSGGGGSGGGGSEFDIQMTQSPSSLSASVGDRVTITCKASQDVGIAVAWYQQKPGKVPKLLIYWASTRHTGVPDRFSGSGSGTDFTLTISSLQPEDVATYYCQQYSSYPYTFGQGTKVEIKRLEDLKNVFPPEVAVFEPSEAEISHTQKATLVCLATGFYPDHVELSWWVNGKEVHSGVCTDPQPLKEQPALNDSRYCLSSRLRVSATFWQNPRNHFRCQVQFYGLSENDEWTQDRAKPVTQIVSAEAWGRADDVIKIHWQEKKSNTILGSQEGNTMKTNDTYMKFSWLTVPEKSLDKEHRCIVRHENNKNGVDQEIIFPPIKTDVITMDPKDNCSKDANDTLLLQLTNTSAYYMYLLLLLKSVVYFAIITCCLLMAMVKRKDSRGRAKRSGSGATNFSLLKQAGDVEENPGPTSMDWIWRILFLVGAATGAHSGPQLQLQESGPGLVKPSETLSLTCTVSGDSISSGDYYWGWIRQPPGKGLEWIGHIYYSGVTYYNPSLKSRVTISVDTSRNQFSLKLSSVTAADTAVYYCTREDSSNWRSRGQGTLVTVSSGSGGGGSGGGGSGGGGSFEEVQLVESGGGLVQPGGSLRLSCAASGFDFSRYWMSWVRQAPGKGLEWIGEINPDSSTINYAPSLKDKFIISRDNAKNSLYLQMNSLRAEDTAVYYCARPDGNYWYFDVWGQGTLVTVSSTRIQNPDPAVYQLRDSKSSDKSVCLFTDFDSQTNVSQSKDSDVYITDKCVLDMRSMDFKSNSAVAWSNKSDFACANAFNNSIIPEDTFFPSPESSDSTDHVKPKETENTKQPSKSCHKPKAIVHTEKVNMMSLTVLGLRMLFAKTVAVNFLLTAKLFFLLTA

SEQ ID NO: 15086 - protein, 996 aa, synthetic construct
MALPVTALLLPLALLLHAARPEVQLVESGGGLVQPGGSLRLSCAASGFSFSDFWMSWVRQAPGKGLEWVATISQAGSEKDYVDSVKGRFTISRDNAKKSLYLQMNSLRAEDTAVYYCASGVYSFDYRGQGTLVTVSSGTGGGGSGGGGSGGGGSEFDIVMTQSQKSMSTSVGDRVSITCKASQDVITGVAWYQQKPGQSPKLLIYSASYRYTGVPDRFTGSGSGTDFTFTISNVQAEDLAVYYCQQHYSTPLTFGAGTKLELKLEDLKNVFPPEVAVFEPSEAEISHTQKATLVCLATGFYPDHVELSWWVNGKEVHSGVCTDPQPLKEQPALNDSRYCLSSRLRVSATFWQNPRNHFRCQVQFYGLSENDEWTQDRAKPVTQIVSAEAWGRADDVIKIHWQEKKSNTILGSQEGNTMKTNDTYMKFSWLTVPEKSLDKEHRCIVRHENNKNGVDQEIIFPPIKTDVITMDPKDNCSKDANDTLLLQLTNTSAYYMYLLLLLKSVVYFAIITCCLLMAMVKRKDSRGRAKRSGSGATNFSLLKQAGDVEENPGPTSMDWIWRILFLVGAATGAHSGPQLQLQESGPGLVKPSETLSLTCTVSGDSISSGDYYWGWIRQPPGKGLEWIGHIYYSGVTYYNPSLKSRVTISVDTSRNQFSLKLSSVTAADTAVYYCTREDSSNWRSRGQGTLVTVSSGSGGGGSGGGGSGGGGSFEQVQLQQPGAELVRPGASVKLSCKASGYSFTTYWMNWVKQRPGQGLEWIGMIHPSDSETRLNQKFKDKATLTVDKSSSTAYMQLSSPTSEDSAVYYCARSTMIATRAMDYWGQGTSVTVSSTRIQNPDPAVYQLRDSKSSDKSVCLFTDFDSQTNVSQSKDSDVYITDKCVLDMRSMDFKSNSAVAWSNKSDFACANAFNNSIIPEDTFFPSPESSDSTDHVKPKETENTKQPSKSCHKPKAIVHTEKVNMMSLTVLGLRMLFAKTVAVNFLLTAKLFFLLTA

SEQ ID NO: 15087 - protein, 1002 aa, synthetic construct
MALPVTALLLPLALLLHAARPEVQLVESGGGLVQPGGSLRLSCAASGFSFSDFWMSWVRQAPGKGLEWVATISQAGSEKDYVDSVKGRFTISRDNAKKSLYLQMNSLRAEDTAVYYCASGVYSFDYRGQGTLVTVSSGTGGGGSGGGGSGGGGSEFQSVLTQPPSVSGAPGQRVTISCTGSGSNIGAPYDVSWYQQLPGTAPKLLIYHNNKRPSGVPDRFSGSKSGTSASLAITGLQAEDEADYYCATVEAGLSGSVFGGGTKLTVLGALEDLKNVFPPEVAVFEPSEAEISHTQKATLVCLATGFYPDHVELSWWVNGKEVHSGVCTDPQPLKEQPALNDSRYCLSSRLRVSATFWQNPRNHFRCQVQFYGLSENDEWTQDRAKPVTQIVSAEAWGRADDVIKIHWQEKKSNTILGSQEGNTMKTNDTYMKFSWLTVPEKSLDKEHRCIVRHENNKNGVDQEIIFPPIKTDVITMDPKDNCSKDANDTLLLQLTNTSAYYMYLLLLLKSVVYFAIITCCLLMAMVKRKDSRGRAKRSGSGATNFSLLKQAGDVEENPGPTSMDWIWRILFLVGAATGAHSGPQLQLQESGPGLVKPSETLSLTCTVSGDSISSGDYYWGWIRQPPGKGLEWIGHIYYSGVTYYNPSLKSRVTISVDTSRNQFSLKLSSVTAADTAVYYCTREDSSNWRSRGQGTLVTVSSGSGGGGSGGGGSGGGGSFEQVQLVQSGAEVKKPGASVKVSCKVSGYTLTELSIHWVRQAPGKGLEWMGGFDPEENEIVYAQRFQGRVTMTEDTSTDTAYMELSSLRSEDTAVYYCAIVGSFSPLTLGLWGQGTMVTVSSTRIQNPDPAVYQLRDSKSSDKSVCLFTDFDSQTNVSQSKDSDVYITDKCVLDMRSMDFKSNSAVAWSNKSDFACANAFNNSIIPEDTFFPSPESSDSTDHVKPKETENTKQPSKSCHKPKAIVHTEKVNMMSLTVLGLRMLFAKTVAVNFLLTAKLFFLLTA

SEQ ID NO: 15088 - protein, 1002 aa, synthetic construct
MALPVTALLLPLALLLHAARPEVQLVESGGGLVQPGGSLRLSCAASGFSFSDFWMSWVRQAPGKGLEWVATISQAGSEKDYVDSVKGRFTISRDNAKKSLYLQMNSLRAEDTAVYYCASGVYSFDYRGQGTLVTVSSGTGGGGSGGGGSGGGGSEFQSVLTQPPSVSGAPGQRVTISCTGSGSNIGAPYDVSWYQQLPGTAPKLLIYHNNKRPSGVPDRFSGSKSGTSASLAITGLQAEDEADYYCQSYDSSSISTIFGGGTKLTVLGALEDLKNVFPPEVAVFEPSEAEISHTQKATLVCLATGFYPDHVELSWWVNGKEVHSGVCTDPQPLKEQPALNDSRYCLSSRLRVSATFWQNPRNHFRCQVQFYGLSENDEWTQDRAKPVTQIVSAEAWGRADDVIKIHWQEKKSNTILGSQEGNTMKTNDTYMKFSWLTVPEKSLDKEHRCIVRHENNKNGVDQEIIFPPIKTDVITMDPKDNCSKDANDTLLLQLTNTSAYYMYLLLLLKSVVYFAIITCCLLMAMVKRKDSRGRAKRSGSGATNFSLLKQAGDVEENPGPTSMDWIWRILFLVGAATGAHSGPQLQLQESGPGLVKPSETLSLTCTVSGDSISSGDYYWGWIRQPPGKGLEWIGHIYYSGVTYYNPSLKSRVTISVDTSRNQFSLKLSSVTAADTAVYYCTREDSSNWRSRGQGTLVTVSSGSGGGGSGGGGSGGGGSFEQVQLVQSGAEVKKPGASVKVSCKVSGYTLTELSIHWVRQAPGKGLEWMGGFDPEENEIVYAQRFQGRVTMTEDTSTDTAYMELSSLRSEDTAVYYCAIVGSFSGIAYRPWGQGTMVTVSSTRIQNPDPAVYQLRDSKSSDKSVCLFTDFDSQTNVSQSKDSDVYITDKCVLDMRSMDFKSNSAVAWSNKSDFACANAFNNSIIPEDTFFPSPESSDSTDHVKPKETENTKQPSKSCHKPKAIVHTEKVNMMSLTVLGLRMLFAKTVAVNFLLTAKLFFLLTA

SEQ ID NO: 15089 - protein, 990 aa, synthetic construct
MALPVTALLLPLALLLHAARPEVQLVESGGGLVQPGGSLRLSCAASGFSFSDFWMSWVRQAPGKGLEWVATISQAGSEKDYVDSVKGRFTISRDNAKKSLYLQMNSLRAEDTAVYYCASGVYSFDYRGQGTLVTVSSGTGGGGSGGGGSGGGGSEFDIQMTQSPSSLSASVGDRVTITCRASQGIRNNLAWYQQKPGKAPKRLIYAASNLQSGVPSRFTGSGSGTEFTLIVSSLQPEDFATYYCLQHHSYPLTSGGGTKVELEDLKNVFPPEVAVFEPSEAEISHTQKATLVCLATGFYPDHVELSWWVNGKEVHSGVCTDPQPLKEQPALNDSRYCLSSRLRVSATFWQNPRNHFRCQVQFYGLSENDEWTQDRAKPVTQIVSAEAWGRADDVIKIHWQEKKSNTILGSQEGNTMKTNDTYMKFSWLTVPEKSLDKEHRCIVRHENNKNGVDQEIIFPPIKTDVITMDPKDNCSKDANDTLLLQLTNTSAYYMYLLLLLKSVVYFAIITCCLLMAMVKRKDSRGRAKRSGSGATNFSLLKQAGDVEENPGPTSMDWIWRILFLVGAATGAHSGPQLQLQESGPGLVKPSETLSLTCTVSGDSISSGDYYWGWIRQPPGKGLEWIGHIYYSGVTYYNPSLKSRVTISVDTSRNQFSLKLSSVTAADTAVYYCTREDSSNWRSRGQGTLVTVSSGSGGGGSGGGGSGGGGSFEEVQVLESGGGLVQPGGSLRLSCAASGFTFSSYAMSWVRQAPGKGLEWVSAISGSGGSTNYADSVKGRFTISRDNSKNTLYLQMNSLRAEDTAVYYCAGSSGWSEYWGQGTLVTVSSTRIQNPDPAVYQLRDSKSSDKSVCLFTDFDSQTNVSQSKDSDVYITDKCVLDMRSMDFKSNSAVAWSNKSDFACANAFNNSIIPEDTFFPSPESSDSTDHVKPKETENTKQPSKSCHKPKAIVHTEKVNMMSLTVLGLRMLFAKTVAVNFLLTAKLFFLLTA

SEQ ID NO: 15090 - protein, 996 aa, synthetic construct
MALPVTALLLPLALLLHAARPEVQLVESGGGLVQPGGSLRLSCAASGFSFSDFWMSWVRQAPGKGLEWVATISQAGSEKDYVDSVKGRFTISRDNAKKSLYLQMNSLRAEDTAVYYCASGVYSFDYRGQGTLVTVSSGTGGGGSGGGGSGGGGSEFDEIQLVQSGAEVKKPGESLRISCKGSGFNIEDYYIHWVRQMPGKGLEWMGRIDPENDETKYGPIFQGHVTISADTSINTVYLQWSSLKASDTAMYYCAFRGGVYWGQGTTVTVSSLEDLKNVFPPEVAVFEPSEAEISHTQKATLVCLATGFYPDHVELSWWVNGKEVHSGVCTDPQPLKEQPALNDSRYCLSSRLRVSATFWQNPRNHFRCQVQFYGLSENDEWTQDRAKPVTQIVSAEAWGRADDVIKIHWQEKKSNTILGSQEGNTMKTNDTYMKFSWLTVPEKSLDKEHRCIVRHENNKNGVDQEIIFPPIKTDVITMDPKDNCSKDANDTLLLQLTNTSAYYMYLLLLLKSVVYFAIITCCLLMAMVKRKDSRGRAKRSGSGATNFSLLKQAGDVEENPGPTSMDWIWRILFLVGAATGAHSGPQLQLQESGPGLVKPSETLSLTCTVSGDSISSGDYYWGWIRQPPGKGLEWIGHIYYSGVTYYNPSLKSRVTISVDTSRNQFSLKLSSVTAADTAVYYCTREDSSNWRSRGQGTLVTVSSGSGGGGSGGGGSGGGGSFEDVVMTQSPDSLAVSLGERATINCKSSQSLLDSDGKTYLNWLQQKPGQPPKRLISLVSKLDSGVPDRFSGSGSGTDFTLTISSLQAEDVAVYYCWQGTHFPGTFGGGTKVEIKTRIQNPDPAVYQLRDSKSSDKSVCLFTDFDSQTNVSQSKDSDVYITDKCVLDMRSMDFKSNSAVAWSNKSDFACANAFNNSIIPEDTFFPSPESSDSTDHVKPKETENTKQPSKSCHKPKAIVHTEKVNMMSLTVLGLRMLFAKTVAVNFLLTAKLFFLLTA

SEQ ID NO: 15091 - protein, 1003 aa, synthetic construct
MALPVTALLLPLALLLHAARPEVQLVESGGGLVQPGGSLRLSCAASGFSFSDFWMSWVRQAPGKGLEWVATISQAGSEKDYVDSVKGRFTISRDNAKKSLYLQMNSLRAEDTAVYYCASGVYSFDYRGQGTLVTVSSGTGGGGSGGGGSGGGGSEFDELVMTQSPSSLTVTAGEKVTMSCKSSQSLLNSGNQKNYLTWYQQKPGQPPKLLIYWASTRESGVPDRFTGSGSGTDFTLTISSVQAEDLAVYYCQNDYSYPLTFGAGTKLEIKLEDLKNVFPPEVAVFEPSEAEISHTQKATLVCLATGFYPDHVELSWWVNGKEVHSGVCTDPQPLKEQPALNDSRYCLSSRLRVSATFWQNPRNHFRCQVQFYGLSENDEWTQDRAKPVTQIVSAEAWGRADDVIKIHWQEKKSNTILGSQEGNTMKTNDTYMKFSWLTVPEKSLDKEHRCIVRHENNKNGVDQEIIFPPIKTDVITMDPKDNCSKDANDTLLLQLTNTSAYYMYLLLLLKSVVYFAIITCCLLMAMVKRKDSRGRAKRSGSGATNFSLLKQAGDVEENPGPTSMDWIWRILFLVGAATGAHSGPQLQLQESGPGLVKPSETLSLTCTVSGDSISSGDYYWGWIRQPPGKGLEWIGHIYYSGVTYYNPSLKSRVTISVDTSRNQFSLKLSSVTAADTAVYYCTREDSSNWRSRGQGTLVTVSSGSGGGGSGGGGSGGGGSFEEVQLLEQSGAELVRPGTSVKISCKASGYAFTNYWLGWVKQRPGHGLEWIGDIFPGSGNIHYNEKFKGKATLTADKSSSTAYMQLSSLTFEDSAVYFCARLRNWDEPMDYWGQGTTVTVSSTRIQNPDPAVYQLRDSKSSDKSVCLFTDFDSQTNVSQSKDSDVYITDKCVLDMRSMDFKSNSAVAWSNKSDFACANAFNNSIIPEDTFFPSPESSDSTDHVKPKETENTKQPSKSCHKPKAIVHTEKVNMMSLTVLGLRMLFAKTVAVNFLLTAKLFFLLTA

SEQ ID NO: 15092 - protein, 1004 aa, synthetic construct
MALPVTALLLPLALLLHAARPEVQLVESGGGLVQPGGSLRLSCAASGFSFSDFWMSWVRQAPGKGLEWVATISQAGSEKDYVDSVKGRFTISRDNAKKSLYLQMNSLRAEDTAVYYCASGVYSFDYRGQGTLVTVSSGTGGGGSGGGGSGGGGSEFDELQMTQSPSSLSASVGDRVTITCRASQSISSYLNWYQQKPGQPPKLLIYWASTRESGVPDRFSGSESGTNYTLTISSLQPEDFATYFCQQSDSLPITFGQGTRLDIQLEDLKNVFPPEVAVFEPSEAEISHTQKATLVCLATGFYPDHVELSWWVNGKEVHSGVCTDPQPLKEQPALNDSRYCLSSRLRVSATFWQNPRNHFRCQVQFYGLSENDEWTQDRAKPVTQIVSAEAWGRADDVIKIHWQEKKSNTILGSQEGNTMKTNDTYMKFSWLTVPEKSLDKEHRCIVRHENNKNGVDQEIIFPPIKTDVITMDPKDNCSKDANDTLLLQLTNTSAYYMYLLLLLKSVVYFAIITCCLLMAMVKRKDSRGRAKRSGSGATNFSLLKQAGDVEENPGPTSMDWIWRILFLVGAATGAHSGPQLQLQESGPGLVKPSETLSLTCTVSGDSISSGDYYWGWIRQPPGKGLEWIGHIYYSGVTYYNPSLKSRVTISVDTSRNQFSLKLSSVTAADTAVYYCTREDSSNWRSRGQGTLVTVSSGSGGGGSGGGGSGGGGSFEEVQLLESGGGVVQPGRSLRLSCAASGFTFSSYGMHWVRQAPGKGLEWVAVISYDGSNKYYADSVKGRFTISRDNSKNTLYLQMNSLRAEDTAVYYCAKDMGWGSGWRPYYYYGMDVWGQGTTVTVSSTRIQNPDPAVYQLRDSKSSDKSVCLFTDFDSQTNVSQSKDSDVYITDKCVLDMRSMDFKSNSAVAWSNKSDFACANAFNNSIIPEDTFFPSPESSDSTDHVKPKETENTKQPSKSCHKPKAIVHTEKVNMMSLTVLGLRMLFAKTVAVNFLLTAKLFFLLTA

SEQ ID NO: 15093 - protein, 1001 aa, synthetic construct
MALPVTALLLPLALLLHAARPEVQLVESGGGLVQPGGSLRLSCAASGFSFSDFWMSWVRQAPGKGLEWVATISQAGSEKDYVDSVKGRFTISRDNAKKSLYLQMNSLRAEDTAVYYCASGVYSFDYRGQGTLVTVSSGTGGGGSGGGGSGGGGSEFDDIQMTQSPSSLSASVGDRVTITCRASQSISSYLNWYQQKPGKAPKLLIYAASSLQSGVPSRFSGSGSGTDFTLTISSLQPEDLATYYCQQSYSTPFTFGPGTKVDIKLEDLKNVFPPEVAVFEPSEAEISHTQKATLVCLATGFYPDHVELSWWVNGKEVHSGVCTDPQPLKEQPALNDSRYCLSSRLRVSATFWQNPRNHFRCQVQFYGLSENDEWTQDRAKPVTQIVSAEAWGRADDVIKIHWQEKKSNTILGSQEGNTMKTNDTYMKFSWLTVPEKSLDKEHRCIVRHENNKNGVDQEIIFPPIKTDVITMDPKDNCSKDANDTLLLQLTNTSAYYMYLLLLLKSVVYFAIITCCLLMAMVKRKDSRGRAKRSGSGATNFSLLKQAGDVEENPGPTSMDWIWRILFLVGAATGAHSGPQLQLQESGPGLVKPSETLSLTCTVSGDSISSGDYYWGWIRQPPGKGLEWIGHIYYSGVTYYNPSLKSRVTISVDTSRNQFSLKLSSVTAADTAVYYCTREDSSNWRSRGQGTLVTVSSGSGGGGSGGGGSGGGGSFEVHEVQLVQSGAEVKKPGSSVKVSCKASGGTFSSYAISWVRQAPGQGLEWMGGIIPIFGTANYAQKFQGRVTITADKSTSTAYMELSSLRSEDTAVYYCATFALFGFREQAFDIWGQGTTVTVSSTRIQNPDPAVYQLRDSKSSDKSVCLFTDFDSQTNVSQSKDSDVYITDKCVLDMRSMDFKSNSAVAWSNKSDFACANAFNNSIIPEDTFFPSPESSDSTDHVKPKETENTKQPSKSCHKPKAIVHTEKVNMMSLTVLGLRMLFAKTVAVNFLLTAKLFFLLTA

SEQ ID NO: 15094 - protein, 999 aa, synthetic construct
MALPVTALLLPLALLLHAARPEVQLVESGGGLVQPGGSLRLSCAASGFSFSDFWMSWVRQAPGKGLEWVATISQAGSEKDYVDSVKGRFTISRDNAKKSLYLQMNSLRAEDTAVYYCASGVYSFDYRGQGTLVTVSSGTGGGGSGGGGSGGGGSEFDIVLTQSPLSLAVSLGQPAIISCKASQSVSFAGTSLMHWYHQKPGQQPRLLIYRASNLEAGVPDRFSGSGSKTDFTLTISPVEAEDAATYYCQQSREYPYTFGGGTKLEIKRLEDLKNVFPPEVAVFEPSEAEISHTQKATLVCLATGFYPDHVELSWWVNGKEVHSGVCTDPQPLKEQPALNDSRYCLSSRLRVSATFWQNPRNHFRCQVQFYGLSENDEWTQDRAKPVTQIVSAEAWGRADDVIKIHWQEKKSNTILGSQEGNTMKTNDTYMKFSWLTVPEKSLDKEHRCIVRHENNKNGVDQEIIFPPIKTDVITMDPKDNCSKDANDTLLLQLTNTSAYYMYLLLLLKSVVYFAIITCCLLMAMVKRKDSRGRAKRSGSGATNFSLLKQAGDVEENPGPTSMDWIWRILFLVGAATGAHSGPQLQLQESGPGLVKPSETLSLTCTVSGDSISSGDYYWGWIRQPPGKGLEWIGHIYYSGVTYYNPSLKSRVTISVDTSRNQFSLKLSSVTAADTAVYYCTREDSSNWRSRGQGTLVTVSSGSGGGGSGGGGSGGGGSFEQVQLVQSGAEVVKPGASVKISCKASGYTFTGYFMNWVKQSPGQSLEWIGRIHPYDGDTFYNQKFQGKATLTVDKSSNTAHMELLSLTSEDFAVYYCTRYDGSRAMDYWGQGTTVTVSSTRIQNPDPAVYQLRDSKSSDKSVCLFTDFDSQTNVSQSKDSDVYITDKCVLDMRSMDFKSNSAVAWSNKSDFACANAFNNSIIPEDTFFPSPESSDSTDHVKPKETENTKQPSKSCHKPKAIVHTEKVNMMSLTVLGLRMLFAKTVAVNFLLTAKLFFLLTA

SEQ ID NO: 15095 - protein, 996 aa, synthetic construct
MALPVTALLLPLALLLHAARPEVQLVESGGGLVQPGGSLRLSCAASGFSFSDFWMSWVRQAPGKGLEWVATISQAGSEKDYVDSVKGRFTISRDNAKKSLYLQMNSLRAEDTAVYYCASGVYSFDYRGQGTLVTVSSGTGGGGSGGGGSGGGGSEFDDVVMTQTPLSLPVTPGEPASISCRSSQSLVHRNGNTYLHWYLQKPGQSPKLLIHKVSNRFSGVPDRFSGSGSGTDFTLKISRVEAEDLGVYFCSQSTHVPPLTFGAGTKLELKLEDLKNVFPPEVAVFEPSEAEISHTQKATLVCLATGFYPDHVELSWWVNGKEVHSGVCTDPQPLKEQPALNDSRYCLSSRLRVSATFWQNPRNHFRCQVQFYGLSENDEWTQDRAKPVTQIVSAEAWGRADDVIKIHWQEKKSNTILGSQEGNTMKTNDTYMKFSWLTVPEKSLDKEHRCIVRHENNKNGVDQEIIFPPIKTDVITMDPKDNCSKDANDTLLLQLTNTSAYYMYLLLLLKSVVYFAIITCCLLMAMVKRKDSRGRAKRSGSGATNFSLLKQAGDVEENPGPTSMDWIWRILFLVGAATGAHSGPQLQLQESGPGLVKPSETLSLTCTVSGDSISSGDYYWGWIRQPPGKGLEWIGHIYYSGVTYYNPSLKSRVTISVDTSRNQFSLKLSSVTAADTAVYYCTREDSSNWRSRGQGTLVTVSSGSGGGGSGGGGSGGGGSFEEVQLVQSGAEVEKPGASVKISCKASGSSFTGYNMNWVRQNIGKSLEWIGAIDPYYGGTSYNQKFKGRATLTVDKSTSTAYMHLKSLRSEDTAVYYCVSGMEYWGQGTSVTVSSTRIQNPDPAVYQLRDSKSSDKSVCLFTDFDSQTNVSQSKDSDVYITDKCVLDMRSMDFKSNSAVAWSNKSDFACANAFNNSIIPEDTFFPSPESSDSTDHVKPKETENTKQPSKSCHKPKAIVHTEKVNMMSLTVLGLRMLFAKTVAVNFLLTAKLFFLLTA

SEQ ID NO: 15096 - protein, 994 aa, synthetic construct
MALPVTALLLPLALLLHAARPEVQLVESGGGLVQPGGSLRLSCAASGFSFSDFWMSWVRQAPGKGLEWVATISQAGSEKDYVDSVKGRFTISRDNAKKSLYLQMNSLRAEDTAVYYCASGVYSFDYRGQGTLVTVSSGTGGGGSGGGGSGGGGSEFDEIVMTQTPATLSVSAGERVTITCKASQSVSNDVTWYQQKPGQAPRLLIYSASNRYSGVPARFSGSGYGTEFTFTISSVQSEDFAVYFCQQDYSSFGQGTKLEIKRLEDLKNVFPPEVAVFEPSEAEISHTQKATLVCLATGFYPDHVELSWWVNGKEVHSGVCTDPQPLKEQPALNDSRYCLSSRLRVSATFWQNPRNHFRCQVQFYGLSENDEWTQDRAKPVTQIVSAEAWGRADDVIKIHWQEKKSNTILGSQEGNTMKTNDTYMKFSWLTVPEKSLDKEHRCIVRHENNKNGVDQEIIFPPIKTDVITMDPKDNCSKDANDTLLLQLTNTSAYYMYLLLLLKSVVYFAIITCCLLMAMVKRKDSRGRAKRSGSGATNFSLLKQAGDVEENPGPTSMDWIWRILFLVGAATGAHSGPQLQLQESGPGLVKPSETLSLTCTVSGDSISSGDYYWGWIRQPPGKGLEWIGHIYYSGVTYYNPSLKSRVTISVDTSRNQFSLKLSSVTAADTAVYYCTREDSSNWRSRGQGTLVTVSSGSGGGGSGGGGSGGGGSFEQVQLVESGPGVVQPGRSLRISCAVSGFSVTNYGVHWVRQPPGKGLEWLGVIWAGGITNYNSAFMSRLTISKDNSKNTVYLQMNSLRAEDTAMYYCASRGGHYGYALDYWGQGTLVTVSSTRIQNPDPAVYQLRDSKSSDKSVCLFTDFDSQTNVSQSKDSDVYITDKCVLDMRSMDFKSNSAVAWSNKSDFACANAFNNSIIPEDTFFPSPESSDSTDHVKPKETENTKQPSKSCHKPKAIVHTEKVNMMSLTVLGLRMLFAKTVAVNFLLTAKLFFLLTA

SEQ ID NO: 15097 - protein, 996 aa, synthetic construct
MALPVTALLLPLALLLHAARPEVQLVESGGGLVQPGGSLRLSCAASGFSFSDFWMSWVRQAPGKGLEWVATISQAGSEKDYVDSVKGRFTISRDNAKKSLYLQMNSLRAEDTAVYYCASGVYSFDYRGQGTLVTVSSGTGGGGSGGGGSGGGGSEFDIQMTQTASSLPASLGDRVTISCSASQDISNYLNWYQQKPDGTVKLLIFYSSNLHSGVPSRFSGGGSGTDYSLTISNLEPEDIATYFCHQYSKLPWTFGGGTKLEIKRLEDLKNVFPPEVAVFEPSEAEISHTQKATLVCLATGFYPDHVELSWWVNGKEVHSGVCTDPQPLKEQPALNDSRYCLSSRLRVSATFWQNPRNHFRCQVQFYGLSENDEWTQDRAKPVTQIVSAEAWGRADDVIKIHWQEKKSNTILGSQEGNTMKTNDTYMKFSWLTVPEKSLDKEHRCIVRHENNKNGVDQEIIFPPIKTDVITMDPKDNCSKDANDTLLLQLTNTSAYYMYLLLLLKSVVYFAIITCCLLMAMVKRKDSRGRAKRSGSGATNFSLLKQAGDVEENPGPTSMDWIWRILFLVGAATGAHSGPQLQLQESGPGLVKPSETLSLTCTVSGDSISSGDYYWGWIRQPPGKGLEWIGHIYYSGVTYYNPSLKSRVTISVDTSRNQFSLKLSSVTAADTAVYYCTREDSSNWRSRGQGTLVTVSSGSGGGGSGGGGSGGGGSFEEVTLVESGGDFVKPGGSLKVSCAASGFAFSHYAMSWVRQTPAKRLEWVAYISSGGSGTYYSDSVKGRFTISRDNAKNTLYLQMRSLRSEDSAMYFCTRVKLGTYYFDSWGQGTTLTVSSTRIQNPDPAVYQLRDSKSSDKSVCLFTDFDSQTNVSQSKDSDVYITDKCVLDMRSMDFKSNSAVAWSNKSDFACANAFNNSIIPEDTFFPSPESSDSTDHVKPKETENTKQPSKSCHKPKAIVHTEKVNMMSLTVLGLRMLFAKTVAVNFLLTAKLFFLLTA

SEQ ID NO: 15098 - protein, 998 aa, synthetic construct
MALPVTALLLPLALLLHAARPEVQLVESGGGLVQPGGSLRLSCAASGFSFSDFWMSWVRQAPGKGLEWVATISQAGSEKDYVDSVKGRFTISRDNAKKSLYLQMNSLRAEDTAVYYCASGVYSFDYRGQGTLVTVSSGTGGGGSGGGGSGGGGSEFQFVLTQSPSASAALGASAKLTCTLSSAHKTYTIDWYQQQKGKAPRYLIQVKSDGTYTKATGVPDRFSGSSSGADRYLIIPSVQADDEADYYCGTDYTGGYVFGGGTQLTVTLEDLKNVFPPEVAVFEPSEAEISHTQKATLVCLATGFYPDHVELSWWVNGKEVHSGVCTDPQPLKEQPALNDSRYCLSSRLRVSATFWQNPRNHFRCQVQFYGLSENDEWTQDRAKPVTQIVSAEAWGRADDVIKIHWQEKKSNTILGSQEGNTMKTNDTYMKFSWLTVPEKSLDKEHRCIVRHENNKNGVDQEIIFPPIKTDVITMDPKDNCSKDANDTLLLQLTNTSAYYMYLLLLLKSVVYFAIITCCLLMAMVKRKDSRGRAKRSGSGATNFSLLKQAGDVEENPGPTSMDWIWRILFLVGAATGAHSGPQLQLQESGPGLVKPSETLSLTCTVSGDSISSGDYYWGWIRQPPGKGLEWIGHIYYSGVTYYNPSLKSRVTISVDTSRNQFSLKLSSVTAADTAVYYCTREDSSNWRSRGQGTLVTVSSGSGGGGSGGGGSGGGGSFEEQLKESGGGLFKPTDTLTLTCTVSGFSLSYYGVNWVRQAPGNGLEWIGTIGGSGDTYYASWAKSRSTIIRNTNENTVTLKMTSLTAADTATYFCVRYANIGYEYFNVWGPGTLVTVSSTRIQNPDPAVYQLRDSKSSDKSVCLFTDFDSQTNVSQSKDSDVYITDKCVLDMRSMDFKSNSAVAWSNKSDFACANAFNNSIIPEDTFFPSPESSDSTDHVKPKETENTKQPSKSCHKPKAIVHTEKVNMMSLTVLGLRMLFAKTVAVNFLLTAKLFFLLTA

SEQ ID NO: 15099 - protein, 1003 aa, synthetic construct
MALPVTALLLPLALLLHAARPEVQLVESGGGLVQPGGSLRLSCAASGFSFSDFWMSWVRQAPGKGLEWVATISQAGSEKDYVDSVKGRFTISRDNAKKSLYLQMNSLRAEDTAVYYCASGVYSFDYRGQGTLVTVSSGTGGGGSGGGGSGGGGSEFQFVLTQSPSVSAALGASAKLTCTLSSAHKTYTIDWYQQQQGEAPRYLMQVKSDGSYTKGTGVPDRFSGSSSGADRYLIIPSVQADDEAGYVCGADDNGGYVFGGGTQLTVTLEDLKNVFPPEVAVFEPSEAEISHTQKATLVCLATGFYPDHVELSWWVNGKEVHSGVCTDPQPLKEQPALNDSRYCLSSRLRVSATFWQNPRNHFRCQVQFYGLSENDEWTQDRAKPVTQIVSAEAWGRADDVIKIHWQEKKSNTILGSQEGNTMKTNDTYMKFSWLTVPEKSLDKEHRCIVRHENNKNGVDQEIIFPPIKTDVITMDPKDNCSKDANDTLLLQLTNTSAYYMYLLLLLKSVVYFAIITCCLLMAMVKRKDSRGRAKRSGSGATNFSLLKQAGDVEENPGPTSMDWIWRILFLVGAATGAHSGPQLQLQESGPGLVKPSETLSLTCTVSGDSISSGDYYWGWIRQPPGKGLEWIGHIYYSGVTYYNPSLKSRVTISVDTSRNQFSLKLSSVTAADTAVYYCTREDSSNWRSRGQGTLVTVSSGSGGGGSGGGGSGGGGSFEQSVKESEGGLFKPTDTLTLTCTVSGFSLSRHALTWVRQAPGNGLEWIGAIDNAGTTYYASWAKSRSTITRNTDLHTVTLKMTSLTASDTATYFCARVFYDINSGYYLDGMDLWGPGTLVTVSSTRIQNPDPAVYQLRDSKSSDKSVCLFTDFDSQTNVSQSKDSDVYITDKCVLDMRSMDFKSNSAVAWSNKSDFACANAFNNSIIPEDTFFPSPESSDSTDHVKPKETENTKQPSKSCHKPKAIVHTEKVNMMSLTVLGLRMLFAKTVAVNFLLTAKLFFLLTA

SEQ ID NO: 15100 - protein, 997 aa, synthetic construct
MALPVTALLLPLALLLHAARPEVQLVESGGGLVQPGGSLRLSCAASGFSFSDFWMSWVRQAPGKGLEWVATISQAGSEKDYVDSVKGRFTISRDNAKKSLYLQMNSLRAEDTAVYYCASGVYSFDYRGQGTLVTVSSGTGGGGSGGGGSGGGGSEFDIQMTQSPSSLSASVGDRVTITCRASQGISSWLAWYQQKPEKAPKSLIYAASSLQSGVPSRFSGSGSGTDFTLTISSLQPEDFATYYCQQYNSYPPTFGGGTKVEIKLEDLKNVFPPEVAVFEPSEAEISHTQKATLVCLATGFYPDHVELSWWVNGKEVHSGVCTDPQPLKEQPALNDSRYCLSSRLRVSATFWQNPRNHFRCQVQFYGLSENDEWTQDRAKPVTQIVSAEAWGRADDVIKIHWQEKKSNTILGSQEGNTMKTNDTYMKFSWLTVPEKSLDKEHRCIVRHENNKNGVDQEIIFPPIKTDVITMDPKDNCSKDANDTLLLQLTNTSAYYMYLLLLLKSVVYFAIITCCLLMAMVKRKDSRGRAKRSGSGATNFSLLKQAGDVEENPGPTSMDWIWRILFLVGAATGAHSGPQLQLQESGPGLVKPSETLSLTCTVSGDSISSGDYYWGWIRQPPGKGLEWIGHIYYSGVTYYNPSLKSRVTISVDTSRNQFSLKLSSVTAADTAVYYCTREDSSNWRSRGQGTLVTVSSGSGGGGSGGGGSGGGGSFEEVQLVESGGGLVQPGESLRLSCVASGFTFSRYKMNWVRQAPGKGLEWVSYISRSGRDIYYADSVKGRFTISRDNAKNSLYLQMNSLRDEDTAVYYCAGTVTTYYYFGMDVWGHGTTVTVSSTRIQNPDPAVYQLRDSKSSDKSVCLFTDFDSQTNVSQSKDSDVYITDKCVLDMRSMDFKSNSAVAWSNKSDFACANAFNNSIIPEDTFFPSPESSDSTDHVKPKETENTKQPSKSCHKPKAIVHTEKVNMMSLTVLGLRMLFAKTVAVNFLLTAKLFFLLTA

SEQ ID NO: 15101 - protein, 998 aa, synthetic construct
MALPVTALLLPLALLLHAARPEVQLVESGGGLVQPGGSLRLSCAASGFSFSDFWMSWVRQAPGKGLEWVATISQAGSEKDYVDSVKGRFTISRDNAKKSLYLQMNSLRAEDTAVYYCASGVYSFDYRGQGTLVTVSSGTGGGGSGGGGSGGGGSEFDIQMTQSPSSLSASVGDRVTITCRASQGISSWLAWYQQKPEKAPKSLIYAASSLQSGVPSRFSGSGSGTDFTLTISSLQPEDFATYYCQQYNSYPPTFGGGTKVEIKLEDLKNVFPPEVAVFEPSEAEISHTQKATLVCLATGFYPDHVELSWWVNGKEVHSGVCTDPQPLKEQPALNDSRYCLSSRLRVSATFWQNPRNHFRCQVQFYGLSENDEWTQDRAKPVTQIVSAEAWGRADDVIKIHWQEKKSNTILGSQEGNTMKTNDTYMKFSWLTVPEKSLDKEHRCIVRHENNKNGVDQEIIFPPIKTDVITMDPKDNCSKDANDTLLLQLTNTSAYYMYLLLLLKSVVYFAIITCCLLMAMVKRKDSRGRAKRSGSGATNFSLLKQAGDVEENPGPTSMDWIWRILFLVGAATGAHSGPQLQLQESGPGLVKPSETLSLTCTVSGDSISSGDYYWGWIRQPPGKGLEWIGHIYYSGVTYYNPSLKSRVTISVDTSRNQFSLKLSSVTAADTAVYYCTREDSSNWRSRGQGTLVTVSSGSGGGGSGGGGSGGGGSFEEVQLVESGGGSVQPGESLRLSCVASGFTFSRYKMNWVRQAPGKGLEWVSYISRSGRDIYYADSVKGRFTISRDNAKNSLYLQMNSLRDEDTAVYYCAGTVTTYYYDFGMDVWGQGTTVTVSSTRIQNPDPAVYQLRDSKSSDKSVCLFTDFDSQTNVSQSKDSDVYITDKCVLDMRSMDFKSNSAVAWSNKSDFACANAFNNSIIPEDTFFPSPESSDSTDHVKPKETENTKQPSKSCHKPKAIVHTEKVNMMSLTVLGLRMLFAKTVAVNFLLTAKLFFLLTA

SEQ ID NO: 15102 - protein, 996 aa, synthetic construct
MALPVTALLLPLALLLHAARPEVQLVESGGGLVQPGGSLRLSCAASGFSFSDFWMSWVRQAPGKGLEWVATISQAGSEKDYVDSVKGRFTISRDNAKKSLYLQMNSLRAEDTAVYYCASGVYSFDYRGQGTLVTVSSGTGGGGSGGGGSGGGGSEFQSVLTQPPSASGTPGQRVTISCSGSRSNVGGNYVFWYQQVPGATPKLLIYRSNQRPSGVPDRFAGSKSGSSASLAISGLRSEDEADYYCATWDDSLSGFVFGTGTKVTVLGLEDLKNVFPPEVAVFEPSEAEISHTQKATLVCLATGFYPDHVELSWWVNGKEVHSGVCTDPQPLKEQPALNDSRYCLSSRLRVSATFWQNPRNHFRCQVQFYGLSENDEWTQDRAKPVTQIVSAEAWGRADDVIKIHWQEKKSNTILGSQEGNTMKTNDTYMKFSWLTVPEKSLDKEHRCIVRHENNKNGVDQEIIFPPIKTDVITMDPKDNCSKDANDTLLLQLTNTSAYYMYLLLLLKSVVYFAIITCCLLMAMVKRKDSRGRAKRSGSGATNFSLLKQAGDVEENPGPTSMDWIWRILFLVGAATGAHSGPQLQLQESGPGLVKPSETLSLTCTVSGDSISSGDYYWGWIRQPPGKGLEWIGHIYYSGVTYYNPSLKSRVTISVDTSRNQFSLKLSSVTAADTAVYYCTREDSSNWRSRGQGTLVTVSSGSGGGGSGGGGSGGGGSFEVQLVESGGGLVKPGGSLRLSCAASGFTFSDYYMSWIRQAPGKGLEWVSYISSSGSTIYYADSVKGRFTISRDNAKNSLYLQMNSLRAEDTAVYYCARGYGKAYDQWGQGTLVTVSSTRIQNPDPAVYQLRDSKSSDKSVCLFTDFDSQTNVSQSKDSDVYITDKCVLDMRSMDFKSNSAVAWSNKSDFACANAFNNSIIPEDTFFPSPESSDSTDHVKPKETENTKQPSKSCHKPKAIVHTEKVNMMSLTVLGLRMLFAKTVAVNFLLTAKLFFLLTA

SEQ ID NO: 15103 - protein, 995 aa, synthetic construct
MALPVTALLLPLALLLHAARPEVQLVESGGGLVQPGGSLRLSCAASGFSFSDFWMSWVRQAPGKGLEWVATISQAGSEKDYVDSVKGRFTISRDNAKKSLYLQMNSLRAEDTAVYYCASGVYSFDYRGQGTLVTVSSGTGGGGSGGGGSGGGGSEFQSVVTQPPSMSAAPGQQVTISCSGGNSNIERNYVSWYLQLPGTAPKLVIFDNDRRPSGIPDRFSGSKSGTSATLGITGLQTGDEADYYCGTWDSSLRGWVFGGGTKLTVLGLEDLKNVFPPEVAVFEPSEAEISHTQKATLVCLATGFYPDHVELSWWVNGKEVHSGVCTDPQPLKEQPALNDSRYCLSSRLRVSATFWQNPRNHFRCQVQFYGLSENDEWTQDRAKPVTQIVSAEAWGRADDVIKIHWQEKKSNTILGSQEGNTMKTNDTYMKFSWLTVPEKSLDKEHRCIVRHENNKNGVDQEIIFPPIKTDVITMDPKDNCSKDANDTLLLQLTNTSAYYMYLLLLLKSVVYFAIITCCLLMAMVKRKDSRGRAKRSGSGATNFSLLKQAGDVEENPGPTSMDWIWRILFLVGAATGAHSGPQLQLQESGPGLVKPSETLSLTCTVSGDSISSGDYYWGWIRQPPGKGLEWIGHIYYSGVTYYNPSLKSRVTISVDTSRNQFSLKLSSVTAADTAVYYCTREDSSNWRSRGQGTLVTVSSGSGGGGSGGGGSGGGGSFEVQLVESGGGLIQPGGSLRLSCAASGFTFSNYAMNWVRQAPGKGLEWVSTINGRGSSTIYADSVKGRFTISRDNSKNTLYLQMNSLRAEDTATYYCARYISRGLGDSWGQGTLVTVTRIQNPDPAVYQLRDSKSSDKSVCLFTDFDSQTNVSQSKDSDVYITDKCVLDMRSMDFKSNSAVAWSNKSDFACANAFNNSIIPEDTFFPSPESSDSTDHVKPKETENTKQPSKSCHKPKAIVHTEKVNMMSLTVLGLRMLFAKTVAVNFLLTAKLFFLLTA

SEQ ID NO: 15104 - protein, 996 aa, synthetic construct
MALPVTALLLPLALLLHAARPEVQLVESGGGLVQPGGSLRLSCAASGFSFSDFWMSWVRQAPGKGLEWVATISQAGSEKDYVDSVKGRFTISRDNAKKSLYLQMNSLRAEDTAVYYCASGVYSFDYRGQGTLVTVSSGTGGGGSGGGGSGGGGSEFDVVMTQTPLSLPVSLGDQASISCRSSQSLVHSNGNTYLHWYLQKPGQSPKLLIYKVSNRFSGVPDRFSGSGSGTDFTLKISRVEAEDLGVYFCSQNTPVPPKFGSGTKLEIKLEDLKNVFPPEVAVFEPSEAEISHTQKATLVCLATGFYPDHVELSWWVNGKEVHSGVCTDPQPLKEQPALNDSRYCLSSRLRVSATFWQNPRNHFRCQVQFYGLSENDEWTQDRAKPVTQIVSAEAWGRADDVIKIHWQEKKSNTILGSQEGNTMKTNDTYMKFSWLTVPEKSLDKEHRCIVRHENNKNGVDQEIIFPPIKTDVITMDPKDNCSKDANDTLLLQLTNTSAYYMYLLLLLKSVVYFAIITCCLLMAMVKRKDSRGRAKRSGSGATNFSLLKQAGDVEENPGPTSMDWIWRILFLVGAATGAHSGPQLQLQESGPGLVKPSETLSLTCTVSGDSISSGDYYWGWIRQPPGKGLEWIGHIYYSGVTYYNPSLKSRVTISVDTSRNQFSLKLSSVTAADTAVYYCTREDSSNWRSRGQGTLVTVSSGSGGGGSGGGGSGGGGSFEQVQLQQSGAELVRPGASVKLSCKASGYTFNDYEMHWVKQTPVHGLKWIGALEPKTGDTAYSQKFKGKATLTADKSSSTAYMELRSLTSEDSAVYYCTSCYYYTYSGQGTLVTVSATRIQNPDPAVYQLRDSKSSDKSVCLFTDFDSQTNVSQSKDSDVYITDKCVLDMRSMDFKSNSAVAWSNKSDFACANAFNNSIIPEDTFFPSPESSDSTDHVKPKETENTKQPSKSCHKPKAIVHTEKVNMMSLTVLGLRMLFAKTVAVNFLLTAKLFFLLTA

SEQ ID NO: 15105 - protein, 995 aa, synthetic construct
MALPVTALLLPLALLLHAARPEVQLVESGGGLVQPGGSLRLSCAASGFSFSDFWMSWVRQAPGKGLEWVATISQAGSEKDYVDSVKGRFTISRDNAKKSLYLQMNSLRAEDTAVYYCASGVYSFDYRGQGTLVTVSSGTGGGGSGGGGSGGGGSEFDIQLTQSPSSLSASVGDRVTITCRASQGIRNDLGWYQQKPGKAPKRLIYAASSLQNGVPSRFSGSGSGTEFTLTISSLQPEDFATYYCLQHNTYPAFGQGTKVEIKRLEDLKNVFPPEVAVFEPSEAEISHTQKATLVCLATGFYPDHVELSWWVNGKEVHSGVCTDPQPLKEQPALNDSRYCLSSRLRVSATFWQNPRNHFRCQVQFYGLSENDEWTQDRAKPVTQIVSAEAWGRADDVIKIHWQEKKSNTILGSQEGNTMKTNDTYMKFSWLTVPEKSLDKEHRCIVRHENNKNGVDQEIIFPPIKTDVITMDPKDNCSKDANDTLLLQLTNTSAYYMYLLLLLKSVVYFAIITCCLLMAMVKRKDSRGRAKRSGSGATNFSLLKQAGDVEENPGPTSMDWIWRILFLVGAATGAHSGPQLQLQESGPGLVKPSETLSLTCTVSGDSISSGDYYWGWIRQPPGKGLEWIGHIYYSGVTYYNPSLKSRVTISVDTSRNQFSLKLSSVTAADTAVYYCTREDSSNWRSRGQGTLVTVSSGSGGGGSGGGGSGGGGSFEQVQLQESGPGLVKPSQTLSLTCTVSGGSISSFNYYWSWIRHHPGKGLEWIGYIYYSGSTYSNPSLKSRVTISVDTSKNQFSLTLSSVTAADTAVYYCARGYNWNYFDYWGQGTLVTVSSTRIQNPDPAVYQLRDSKSSDKSVCLFTDFDSQTNVSQSKDSDVYITDKCVLDMRSMDFKSNSAVAWSNKSDFACANAFNNSIIPEDTFFPSPESSDSTDHVKPKETENTKQPSKSCHKPKAIVHTEKVNMMSLTVLGLRMLFAKTVAVNFLLTAKLFFLLTA

SEQ ID NO: 15106 - protein, 997 aa, synthetic construct
MALPVTALLLPLALLLHAARPEVQLVESGGGLVQPGGSLRLSCAASGFSFSDFWMSWVRQAPGKGLEWVATISQAGSEKDYVDSVKGRFTISRDNAKKSLYLQMNSLRAEDTAVYYCASGVYSFDYRGQGTLVTVSSGTGGGGSGGGGSGGGGSEFDDIVLTQSPASLAVSLGQSVTISCRASESVEYYGTSLMQWYQQKPGQPPKLLIYATSNVESGVPARFSGSGSGTDFSLNIHPVEEDDIAMYFCQQSRKLPSTFGGGTKLEIKLEDLKNVFPPEVAVFEPSEAEISHTQKATLVCLATGFYPDHVELSWWVNGKEVHSGVCTDPQPLKEQPALNDSRYCLSSRLRVSATFWQNPRNHFRCQVQFYGLSENDEWTQDRAKPVTQIVSAEAWGRADDVIKIHWQEKKSNTILGSQEGNTMKTNDTYMKFSWLTVPEKSLDKEHRCIVRHENNKNGVDQEIIFPPIKTDVITMDPKDNCSKDANDTLLLQLTNTSAYYMYLLLLLKSVVYFAIITCCLLMAMVKRKDSRGRAKRSGSGATNFSLLKQAGDVEENPGPTSMDWIWRILFLVGAATGAHSGPQLQLQESGPGLVKPSETLSLTCTVSGDSISSGDYYWGWIRQPPGKGLEWIGHIYYSGVTYYNPSLKSRVTISVDTSRNQFSLKLSSVTAADTAVYYCTREDSSNWRSRGQGTLVTVSSGSGGGGSGGGGSGGGGSFEDVRLQESGPGQVKPSQTVSLTCSVTGYSITNGNHWWNWIRQVSGSKLEWIGYISSSGSTDSNPSLKSRISITRDTSKNQLFLQLNSVTTEDIATYYCARGYYFDYWGQGTTLTVSSTRIQNPDPAVYQLRDSKSSDKSVCLFTDFDSQTNVSQSKDSDVYITDKCVLDMRSMDFKSNSAVAWSNKSDFACANAFNNSIIPEDTFFPSPESSDSTDHVKPKETENTKQPSKSCHKPKAIVHTEKVNMMSLTVLGLRMLFAKTVAVNFLLTAKLFFLLTA

SEQ ID NO: 15107 - protein, 996 aa, synthetic construct
MALPVTALLLPLALLLHAARPEVQLVESGGGLVQPGGSLRLSCAASGFSFSDFWMSWVRQAPGKGLEWVATISQAGSEKDYVDSVKGRFTISRDNAKKSLYLQMNSLRAEDTAVYYCASGVYSFDYRGQGTLVTVSSGTGGGGSGGGGSGGGGSEFDIQMTQSPSSLSASVGDRVTITCRASQDVNTAVAWYQQKPGKAPKLLIYSASFLESGVPSRFSGSRSGTDFTLTISSLQPEDFATYYCQQHYTTPPTFGQTKVEIKRLEDLKNVFPPEVAVFEPSEAEISHTQKATLVCLATGFYPDHVELSWWVNGKEVHSGVCTDPQPLKEQPALNDSRYCLSSRLRVSATFWQNPRNHFRCQVQFYGLSENDEWTQDRAKPVTQIVSAEAWGRADDVIKIHWQEKKSNTILGSQEGNTMKTNDTYMKFSWLTVPEKSLDKEHRCIVRHENNKNGVDQEIIFPPIKTDVITMDPKDNCSKDANDTLLLQLTNTSAYYMYLLLLLKSVVYFAIITCCLLMAMVKRKDSRGRAKRSGSGATNFSLLKQAGDVEENPGPTSMDWIWRILFLVGAATGAHSGPQLQLQESGPGLVKPSETLSLTCTVSGDSISSGDYYWGWIRQPPGKGLEWIGHIYYSGVTYYNPSLKSRVTISVDTSRNQFSLKLSSVTAADTAVYYCTREDSSNWRSRGQGTLVTVSSGSGGGGSGGGGSGGGGSFEEVQLVESGGGLVQPGGSLRLSCAASGFNIKDTYIHWVRQAPGKGLEWVARIYPTNGYTRYADSVKGRFTISADTSKNTAYLQMNSLRAEDTAVYYCSRWGGDGFYAMDVWGQGTLVTVSSTRIQNPDPAVYQLRDSKSSDKSVCLFTDFDSQTNVSQSKDSDVYITDKCVLDMRSMDFKSNSAVAWSNKSDFACANAFNNSIIPEDTFFPSPESSDSTDHVKPKETENTKQPSKSCHKPKAIVHTEKVNMMSLTVLGLRMLFAKTVAVNFLLTAKLFFLLTA

SEQ ID NO: 15108 - protein, 995 aa, synthetic construct
MALPVTALLLPLALLLHAARPEVQLVESGGGLVQPGGSLRLSCAASGFSFSDFWMSWVRQAPGKGLEWVATISQAGSEKDYVDSVKGRFTISRDNAKKSLYLQMNSLRAEDTAVYYCASGVYSFDYRGQGTLVTVSSGTGGGGSGGGGSGGGGSEFDQSVLTQPPSVSVAPGKTARIPCEGNYIGSSNVHWYQQKPGQAPVLVIHFDSDRPSGIPDRFSGSNSGNMATLTISRVEAGDEADYYCQVWENHGWVFGGGTKLTVLSLEDLKNVFPPEVAVFEPSEAEISHTQKATLVCLATGFYPDHVELSWWVNGKEVHSGVCTDPQPLKEQPALNDSRYCLSSRLRVSATFWQNPRNHFRCQVQFYGLSENDEWTQDRAKPVTQIVSAEAWGRADDVIKIHWQEKKSNTILGSQEGNTMKTNDTYMKFSWLTVPEKSLDKEHRCIVRHENNKNGVDQEIIFPPIKTDVITMDPKDNCSKDANDTLLLQLTNTSAYYMYLLLLLKSVVYFAIITCCLLMAMVKRKDSRGRAKRSGSGATNFSLLKQAGDVEENPGPTSMDWIWRILFLVGAATGAHSGPQLQLQESGPGLVKPSETLSLTCTVSGDSISSGDYYWGWIRQPPGKGLEWIGHIYYSGVTYYNPSLKSRVTISVDTSRNQFSLKLSSVTAADTAVYYCTREDSSNWRSRGQGTLVTVSSGSGGGGSGGGGSGGGGSFEEVQLVETGGGLVQPGESLRLSCAASGFTFSDYEMNWVRQAPGKGLEWVSYISSSGSTIYYADSVKGRFTIYRDNAKNSLYLQMNSLRAEDTALYYCARAWGVGPPDYWGQGTLVTVSSTRIQNPDPAVYQLRDSKSSDKSVCLFTDFDSQTNVSQSKDSDVYITDKCVLDMRSMDFKSNSAVAWSNKSDFACANAFNNSIIPEDTFFPSPESSDSTDHVKPKETENTKQPSKSCHKPKAIVHTEKVNMMSLTVLGLRMLFAKTVAVNFLLTAKLFFLLTA

SEQ ID NO: 15109 - protein, 1003 aa, synthetic construct
MALPVTALLLPLALLLHAARPEVQLVESGGGLVQPGGSLRLSCAASGFSFSDFWMSWVRQAPGKGLEWVATISQAGSEKDYVDSVKGRFTISRDNAKKSLYLQMNSLRAEDTAVYYCASGVYSFDYRGQGTLVTVSSGTGGGGSGGGGSGGGGSEFDIQMTQSPSSLSASVGDTVTITCQANGYLNWYQQRRGKAPKLLIYDGSKLERGVPSRFSGRRWGQEYNLTINNLQPEDIATYFCQVYEFVVPGTRLDLKRTVAAPLEDLKNVFPPEVAVFEPSEAEISHTQKATLVCLATGFYPDHVELSWWVNGKEVHSGVCTDPQPLKEQPALNDSRYCLSSRLRVSATFWQNPRNHFRCQVQFYGLSENDEWTQDRAKPVTQIVSAEAWGRADDVIKIHWQEKKSNTILGSQEGNTMKTNDTYMKFSWLTVPEKSLDKEHRCIVRHENNKNGVDQEIIFPPIKTDVITMDPKDNCSKDANDTLLLQLTNTSAYYMYLLLLLKSVVYFAIITCCLLMAMVKRKDSRGRAKRSGSGATNFSLLKQAGDVEENPGPTSMDWIWRILFLVGAATGAHSGPQLQLQESGPGLVKPSETLSLTCTVSGDSISSGDYYWGWIRQPPGKGLEWIGHIYYSGVTYYNPSLKSRVTISVDTSRNQFSLKLSSVTAADTAVYYCTREDSSNWRSRGQGTLVTVSSGSGGGGSGGGGSGGGGSFEQVQLLQSGAAVTKPGASVRVSCEASGYNIRDYFIHWWRQAPGQGLQWVGWINPKTGQPNNPRQFQGRVSLTRHASWDFDTFSFYMDLKALRSDDTAVYFCARQRSDYWDFDVWGSGTQVTVSSASTKGPTRIQNPDPAVYQLRDSKSSDKSVCLFTDFDSQTNVSQSKDSDVYITDKCVLDMRSMDFKSNSAVAWSNKSDFACANAFNNSIIPEDTFFPSPESSDSTDHVKPKETENTKQPSKSCHKPKAIVHTEKVNMMSLTVLGLRMLFAKTVAVNFLLTAKLFFLLTA

SEQ ID NO: 15110 - protein, 1009 aa, synthetic construct
MALPVTALLLPLALLLHAARPEVQLVESGGGLVQPGGSLRLSCAASGFSFSDFWMSWVRQAPGKGLEWVATISQAGSEKDYVDSVKGRFTISRDNAKKSLYLQMNSLRAEDTAVYYCASGVYSFDYRGQGTLVTVSSGTGGGGSGGGGSGGGGSEFQSALTQPPSASGSPGQSITISCTGTSNNFVSWYQQHAGKAPKLVIYDVNKRPSGVPDRFSGSKSGNTASLTVSGLQTDDEAVYYCGSLVGNWDVIFGGGTKLTVLLEDLKNVFPPEVAVFEPSEAEISHTQKATLVCLATGFYPDHVELSWWVNGKEVHSGVCTDPQPLKEQPALNDSRYCLSSRLRVSATFWQNPRNHFRCQVQFYGLSENDEWTQDRAKPVTQIVSAEAWGRADDVIKIHWQEKKSNTILGSQEGNTMKTNDTYMKFSWLTVPEKSLDKEHRCIVRHENNKNGVDQEIIFPPIKTDVITMDPKDNCSKDANDTLLLQLTNTSAYYMYLLLLLKSVVYFAIITCCLLMAMVKRKDSRGRAKRSGSGATNFSLLKQAGDVEENPGPTSMDWIWRILFLVGAATGAHSGPQLQLQESGPGLVKPSETLSLTCTVSGDSISSGDYYWGWIRQPPGKGLEWIGHIYYSGVTYYNPSLKSRVTISVDTSRNQFSLKLSSVTAADTAVYYCTREDSSNWRSRGQGTLVTVSSGSGGGGSGGGGSGGGGSFEQPQLQESGPTLVEASETLSLTCAVSGDSTAACNSFWGWVRQPPGKGLEWVGSLSHCASYWNRGWTYHNPSLKSRLTLALDTPKNLVFLKLNSVTAADTATYYCARFGGEVLRYTDWPKPAWVDLWGRGTLVTVSSTRIQNPDPAVYQLRDSKSSDKSVCLFTDFDSQTNVSQSKDSDVYITDKCVLDMRSMDFKSNSAVAWSNKSDFACANAFNNSIIPEDTFFPSPESSDSTDHVKPKETENTKQPSKSCHKPKAIVHTEKVNMMSLTVLGLRMLFAKTVAVNFLLTAKLFFLLTA

SEQ ID NO: 15111 - protein, 994 aa, synthetic construct
MALPVTALLLPLALLLHAARPEVQLVESGGGLVQPGGSLRLSCAASGFSFSDFWMSWVRQAPGKGLEWVATISQAGSEKDYVDSVKGRFTISRDNAKKSLYLQMNSLRAEDTAVYYCASGVYSFDYRGQGTLVTVSSGTGGGGSGGGGSGGGGSEFEIVLTQSPGTLSLSPGETAIISCRTSQYGSLAWYQQRPGQAPRLVIYSGSTRAAGIPDRFSGSRWGPDYNLTISNLESGDFGVYYCQQYEFFGQGTKVQVDIKRLEDLKNVFPPEVAVFEPSEAEISHTQKATLVCLATGFYPDHVELSWWVNGKEVHSGVCTDPQPLKEQPALNDSRYCLSSRLRVSATFWQNPRNHFRCQVQFYGLSENDEWTQDRAKPVTQIVSAEAWGRADDVIKIHWQEKKSNTILGSQEGNTMKTNDTYMKFSWLTVPEKSLDKEHRCIVRHENNKNGVDQEIIFPPIKTDVITMDPKDNCSKDANDTLLLQLTNTSAYYMYLLLLLKSVVYFAIITCCLLMAMVKRKDSRGRAKRSGSGATNFSLLKQAGDVEENPGPTSMDWIWRILFLVGAATGAHSGPQLQLQESGPGLVKPSETLSLTCTVSGDSISSGDYYWGWIRQPPGKGLEWIGHIYYSGVTYYNPSLKSRVTISVDTSRNQFSLKLSSVTAADTAVYYCTREDSSNWRSRGQGTLVTVSSGSGGGGSGGGGSGGGGSFEQVQLVQSGGQMKKPGESMRISCRASGYEFIDCTLNWIRLAPGKRPEWMGWLKPRGGAVNYARPLQGRVTMTRDVYSDTAFLELRSLTVDDTAVYFCTRGKNCDYNWDFEHWGRGTPVIVSSTRIQNPDPAVYQLRDSKSSDKSVCLFTDFDSQTNVSQSKDSDVYITDKCVLDMRSMDFKSNSAVAWSNKSDFACANAFNNSIIPEDTFFPSPESSDSTDHVKPKETENTKQPSKSCHKPKAIVHTEKVNMMSLTVLGLRMLFAKTVAVNFLLTAKLFFLLTA

SEQ ID NO: 15112 - protein, 1004 aa, synthetic construct
MALPVTALLLPLALLLHAARPEVQLVESGGGLVQPGGSLRLSCAASGFSFSDFWMSWVRQAPGKGLEWVATISQAGSEKDYVDSVKGRFTISRDNAKKSLYLQMNSLRAEDTAVYYCASGVYSFDYRGQGTLVTVSSGTGGGGSGGGGSGGGGSEFELVLTQSPGTLSLSAGERATLSCRASQSVSSGSLAWYQQKPGQAPRLLIYGASTRATGIPDRFSGSGSGTDFTLTIGRLEPEDLAVYYCQQYGTSPYTFGQGTKLEILEDLKNVFPPEVAVFEPSEAEISHTQKATLVCLATGFYPDHVELSWWVNGKEVHSGVCTDPQPLKEQPALNDSRYCLSSRLRVSATFWQNPRNHFRCQVQFYGLSENDEWTQDRAKPVTQIVSAEAWGRADDVIKIHWQEKKSNTILGSQEGNTMKTNDTYMKFSWLTVPEKSLDKEHRCIVRHENNKNGVDQEIIFPPIKTDVITMDPKDNCSKDANDTLLLQLTNTSAYYMYLLLLLKSVVYFAIITCCLLMAMVKRKDSRGRAKRSGSGATNFSLLKQAGDVEENPGPTSMDWIWRILFLVGAATGAHSGPQLQLQESGPGLVKPSETLSLTCTVSGDSISSGDYYWGWIRQPPGKGLEWIGHIYYSGVTYYNPSLKSRVTISVDTSRNQFSLKLSSVTAADTAVYYCTREDSSNWRSRGQGTLVTVSSGSGGGGSGGGGSGGGGSFELEQSGAEVKKPGSSVQVSCKASGGTFSMYGFNWVRQAPGHGLEWMGGIIPIFGTSNYAQKFRGRVTFTADQATSTAYMELTNLRSDDTAVYYCARDFGPDWEDGDSYDGSGRGFFDFWGQGTLVTVSSTRIQNPDPAVYQLRDSKSSDKSVCLFTDFDSQTNVSQSKDSDVYITDKCVLDMRSMDFKSNSAVAWSNKSDFACANAFNNSIIPEDTFFPSPESSDSTDHVKPKETENTKQPSKSCHKPKAIVHTEKVNMMSLTVLGLRMLFAKTVAVNFLLTAKLFFLLTA

SEQ ID NO: 15113 - protein, 984 aa, synthetic construct
MALPVTALLLPLALLLHAARPEVQLVESGGGLVQPGGSLRLSCAASGFSFSDFWMSWVRQAPGKGLEWVATISQAGSEKDYVDSVKGRFTISRDNAKKSLYLQMNSLRAEDTAVYYCASGVYSFDYRGQGTLVTVSSGTGGGGSGGGGSGGGGSEFDIQMTQSPSSLSASVGDRVTITCQASQDINNYLNWYQQKPGKAPKLLIYDASNLQTGVPSRFSGSGSGTDFTFTIEDIATYYCQQYTFGPGTKVDIKLEDLKNVFPPEVAVFEPSEAEISHTQKATLVCLATGFYPDHVELSWWVNGKEVHSGVCTDPQPLKEQPALNDSRYCLSSRLRVSATFWQNPRNHFRCQVQFYGLSENDEWTQDRAKPVTQIVSAEAWGRADDVIKIHWQEKKSNTILGSQEGNTMKTNDTYMKFSWLTVPEKSLDKEHRCIVRHENNKNGVDQEIIFPPIKTDVITMDPKDNCSKDANDTLLLQLTNTSAYYMYLLLLLKSVVYFAIITCCLLMAMVKRKDSRGRAKRSGSGATNFSLLKQAGDVEENPGPTSMDWIWRILFLVGAATGAHSGPQLQLQESGPGLVKPSETLSLTCTVSGDSISSGDYYWGWIRQPPGKGLEWIGHIYYSGVTYYNPSLKSRVTISVDTSRNQFSLKLSSVTAADTAVYYCTREDSSNWRSRGQGTLVTVSSGSGGGGSGGGGSGGGGSFEEVQLLESGGGLVQPGGSLRLSCAASGFTFSWYSMTWVRQAPGKGLEWVSSIVPWGDFTQYADSVKGRFTISRDNSKNTLYLQMNSLRAEDTAVYYCAKGPGWGSFDLWGRGTLVTVSSTRIQNPDPAVYQLRDSKSSDKSVCLFTDFDSQTNVSQSKDSDVYITDKCVLDMRSMDFKSNSAVAWSNKSDFACANAFNNSIIPEDTFFPSPESSDSTDHVKPKETENTKQPSKSCHKPKAIVHTEKVNMMSLTVLGLRMLFAKTVAVNFLLTAKLFFLLTA

SEQ ID NO: 15114 - protein, 994 aa, synthetic construct
MALPVTALLLPLALLLHAARPEVQLVESGGGLVQPGGSLRLSCAASGFSFSDFWMSWVRQAPGKGLEWVATISQAGSEKDYVDSVKGRFTISRDNAKKSLYLQMNSLRAEDTAVYYCASGVYSFDYRGQGTLVTVSSGTGGGGSGGGGSGGGGSEFDIQMTQSPSSLSASVGDRVTITCTASLSVSSTYLHWYQQKPGSSPKLWIYSTSNLASGVPSRFSGSGSGTSYTLTISSLQPEDFATYYCHQYHRSPLTFGGGTKVEIKRLEDLKNVFPPEVAVFEPSEAEISHTQKATLVCLATGFYPDHVELSWWVNGKEVHSGVCTDPQPLKEQPALNDSRYCLSSRLRVSATFWQNPRNHFRCQVQFYGLSENDEWTQDRAKPVTQIVSAEAWGRADDVIKIHWQEKKSNTILGSQEGNTMKTNDTYMKFSWLTVPEKSLDKEHRCIVRHENNKNGVDQEIIFPPIKTDVITMDPKDNCSKDANDTLLLQLTNTSAYYMYLLLLLKSVVYFAIITCCLLMAMVKRKDSRGRAKRSGSGATNFSLLKQAGDVEENPGPTSMDWIWRILFLVGAATGAHSGPQLQLQESGPGLVKPSETLSLTCTVSGDSISSGDYYWGWIRQPPGKGLEWIGHIYYSGVTYYNPSLKSRVTISVDTSRNQFSLKLSSVTAADTAVYYCTREDSSNWRSRGQGTLVTVSSGSGGGGSGGGGSGGGGSFEEVQLVESGGGLVQPGGSLRLSCAASGFSLTKYGVHWVRQAPGKGLEWVGVKWAGGSTDYNSALMSRFTISKDNAKNSLYLQMNSLRAEDTAVYYCARDHRDAMDYWGQGTLVTVSSTRIQNPDPAVYQLRDSKSSDKSVCLFTDFDSQTNVSQSKDSDVYITDKCVLDMRSMDFKSNSAVAWSNKSDFACANAFNNSIIPEDTFFPSPESSDSTDHVKPKETENTKQPSKSCHKPKAIVHTEKVNMMSLTVLGLRMLFAKTVAVNFLLTAKLFFLLTA

SEQ ID NO: 15115 - protein, 998 aa, synthetic construct
MALPVTALLLPLALLLHAARPEVQLVESGGGLVQPGGSLRLSCAASGFSFSDFWMSWVRQAPGKGLEWVATISQAGSEKDYVDSVKGRFTISRDNAKKSLYLQMNSLRAEDTAVYYCASGVYSFDYRGQGTLVTVSSGTGGGGSGGGGSGGGGSEFDIQMTQSPSSLSASVGDRVTITCKASQDVGTAVAWYQQKPGKAPKLLIYSASYRSTGVPSRFSGSGSGTDFTLTISSLQPEDFATYYCQHHYSAPWTFGGGTKVEIKLEDLKNVFPPEVAVFEPSEAEISHTQKATLVCLATGFYPDHVELSWWVNGKEVHSGVCTDPQPLKEQPALNDSRYCLSSRLRVSATFWQNPRNHFRCQVQFYGLSENDEWTQDRAKPVTQIVSAEAWGRADDVIKIHWQEKKSNTILGSQEGNTMKTNDTYMKFSWLTVPEKSLDKEHRCIVRHENNKNGVDQEIIFPPIKTDVITMDPKDNCSKDANDTLLLQLTNTSAYYMYLLLLLKSVVYFAIITCCLLMAMVKRKDSRGRAKRSGSGATNFSLLKQAGDVEENPGPTSMDWIWRILFLVGAATGAHSGPQLQLQESGPGLVKPSETLSLTCTVSGDSISSGDYYWGWIRQPPGKGLEWIGHIYYSGVTYYNPSLKSRVTISVDTSRNQFSLKLSSVTAADTAVYYCTREDSSNWRSRGQGTLVTVSSGSGGGGSGGGGSGGGGSFEEVQLVESGGGLVQPGGSLRLSCAASGFTFSRNGMSWVRQAPGKGLEWVATVSSGGSYIYYADSVKGRFTISRDNAKNSLYLQMNSLRAEDTAVYYCARQGTTALATRFFDVWGQGTLVTVSSTRIQNPDPAVYQLRDSKSSDKSVCLFTDFDSQTNVSQSKDSDVYITDKCVLDMRSMDFKSNSAVAWSNKSDFACANAFNNSIIPEDTFFPSPESSDSTDHVKPKETENTKQPSKSCHKPKAIVHTEKVNMMSLTVLGLRMLFAKTVAVNFLLTAKLFFLLTA

SEQ ID NO: 15116 - protein, 994 aa, synthetic construct
MALPVTALLLPLALLLHAARPEVQLVESGGGLVQPGGSLRLSCAASGFSFSDFWMSWVRQAPGKGLEWVATISQAGSEKDYVDSVKGRFTISRDNAKKSLYLQMNSLRAEDTAVYYCASGVYSFDYRGQGTLVTVSSGTGGGGSGGGGSGGGGSEFDIQMTQSPPSLSASVGGKVTITCKASQDIDRYMAWYQDKPGKGPKLLIHDTSTLQPGIPSRFSGSGSGRDYSFSISNLEPEDIATYYCLQYDNLWTFGGGTKLEIKRLEDLKNVFPPEVAVFEPSEAEISHTQKATLVCLATGFYPDHVELSWWVNGKEVHSGVCTDPQPLKEQPALNDSRYCLSSRLRVSATFWQNPRNHFRCQVQFYGLSENDEWTQDRAKPVTQIVSAEAWGRADDVIKIHWQEKKSNTILGSQEGNTMKTNDTYMKFSWLTVPEKSLDKEHRCIVRHENNKNGVDQEIIFPPIKTDVITMDPKDNCSKDANDTLLLQLTNTSAYYMYLLLLLKSVVYFAIITCCLLMAMVKRKDSRGRAKRSGSGATNFSLLKQAGDVEENPGPTSMDWIWRILFLVGAATGAHSGPQLQLQESGPGLVKPSETLSLTCTVSGDSISSGDYYWGWIRQPPGKGLEWIGHIYYSGVTYYNPSLKSRVTISVDTSRNQFSLKLSSVTAADTAVYYCTREDSSNWRSRGQGTLVTVSSGSGGGGSGGGGSGGGGSFEQVQLVQSGAELVKPGASVKMSCKASGYIFTNYNIHWVKKSPGQGLEWIGAIYPGNGDAPYSQKFQDRATLTADTSSSTTYMELSSLTSEDSAVYYCVRANWDVAFAYWGQGTLVSVSSTRIQNPDPAVYQLRDSKSSDKSVCLFTDFDSQTNVSQSKDSDVYITDKCVLDMRSMDFKSNSAVAWSNKSDFACANAFNNSIIPEDTFFPSPESSDSTDHVKPKETENTKQPSKSCHKPKAIVHTEKVNMMSLTVLGLRMLFAKTVAVNFLLTAKLFFLLTA

SEQ ID NO: 15117 - protein, 995 aa, synthetic construct
MALPVTALLLPLALLLHAARPEVQLVESGGGLVQPGGSLRLSCAASGFSFSDFWMSWVRQAPGKGLEWVATISQAGSEKDYVDSVKGRFTISRDNAKKSLYLQMNSLRAEDTAVYYCASGVYSFDYRGQGTLVTVSSGTGGGGSGGGGSGGGGSEFDIQMTQSPASLSASVGETVTITCRVSGNIHNYLAWYQQKQGKSPQLLVYNAKTLADGVPSRFSGSGSGTQYSLKINSLQPEDFGSYYCQHFWSNPYTFGGGTKLEIKLEDLKNVFPPEVAVFEPSEAEISHTQKATLVCLATGFYPDHVELSWWVNGKEVHSGVCTDPQPLKEQPALNDSRYCLSSRLRVSATFWQNPRNHFRCQVQFYGLSENDEWTQDRAKPVTQIVSAEAWGRADDVIKIHWQEKKSNTILGSQEGNTMKTNDTYMKFSWLTVPEKSLDKEHRCIVRHENNKNGVDQEIIFPPIKTDVITMDPKDNCSKDANDTLLLQLTNTSAYYMYLLLLLKSVVYFAIITCCLLMAMVKRKDSRGRAKRSGSGATNFSLLKQAGDVEENPGPTSMDWIWRILFLVGAATGAHSGPQLQLQESGPGLVKPSETLSLTCTVSGDSISSGDYYWGWIRQPPGKGLEWIGHIYYSGVTYYNPSLKSRVTISVDTSRNQFSLKLSSVTAADTAVYYCTREDSSNWRSRGQGTLVTVSSGSGGGGSGGGGSGGGGSFEQVQLQQSGASVKVSCKASELVRPGTGYAFTNYLIEWVKQRPGQGLEWIGVINPGSGGTNYNEKFKGKATLTADKSSSTAYMQLSSLTSDDSAVYFCARYRSYDWYFDVWGAGTTVTVSSTRIQNPDPAVYQLRDSKSSDKSVCLFTDFDSQTNVSQSKDSDVYITDKCVLDMRSMDFKSNSAVAWSNKSDFACANAFNNSIIPEDTFFPSPESSDSTDHVKPKETENTKQPSKSCHKPKAIVHTEKVNMMSLTVLGLRMLFAKTVAVNFLLTAKLFFLLTA

SEQ ID NO: 15118 - protein, 994 aa, synthetic construct
MALPVTALLLPLALLLHAARPEVQLVESGGGLVQPGGSLRLSCAASGFSFSDFWMSWVRQAPGKGLEWVATISQAGSEKDYVDSVKGRFTISRDNAKKSLYLQMNSLRAEDTAVYYCASGVYSFDYRGQGTLVTVSSGTGGGGSGGGGSGGGGSEFDIQMTQSFSSLSASVGDRVTITCRASQDISNYLNWYQQKPGKAPKLLIYYTSRLHSGVPSRFSGSGSGTDYTLTISSLQPEDFATYFCQQGNTLPWTFGGGTKLEIKRLEDLKNVFPPEVAVFEPSEAEISHTQKATLVCLATGFYPDHVELSWWVNGKEVHSGVCTDPQPLKEQPALNDSRYCLSSRLRVSATFWQNPRNHFRCQVQFYGLSENDEWTQDRAKPVTQIVSAEAWGRADDVIKIHWQEKKSNTILGSQEGNTMKTNDTYMKFSWLTVPEKSLDKEHRCIVRHENNKNGVDQEIIFPPIKTDVITMDPKDNCSKDANDTLLLQLTNTSAYYMYLLLLLKSVVYFAIITCCLLMAMVKRKDSRGRAKRSGSGATNFSLLKQAGDVEENPGPTSMDWIWRILFLVGAATGAHSGPQLQLQESGPGLVKPSETLSLTCTVSGDSISSGDYYWGWIRQPPGKGLEWIGHIYYSGVTYYNPSLKSRVTISVDTSRNQFSLKLSSVTAADTAVYYCTREDSSNWRSRGQGTLVTVSSGSGGGGSGGGGSGGGGSFEEVQLVQSGGGLVQSGGSLRLSCRASGYTFTRYWMLWVRQRPGKGLEWVAEINPRNDRTNYNEKFKTRFTISVDRSKNTLYLQMDSLRAEDTAVYFCALGGGYAMDYWGQGTLVTVSSTRIQNPDPAVYQLRDSKSSDKSVCLFTDFDSQTNVSQSKDSDVYITDKCVLDMRSMDFKSNSAVAWSNKSDFACANAFNNSIIPEDTFFPSPESSDSTDHVKPKETENTKQPSKSCHKPKAIVHTEKVNMMSLTVLGLRMLFAKTVAVNFLLTAKLFFLLTA

SEQ ID NO: 15119 - protein, 995 aa, synthetic construct
MALPVTALLLPLALLLHAARPEVQLVESGGGLVQPGGSLRLSCAASGFSFSDFWMSWVRQAPGKGLEWVATISQAGSEKDYVDSVKGRFTISRDNAKKSLYLQMNSLRAEDTAVYYCASGVYSFDYRGQGTLVTVSSGTGGGGSGGGGSGGGGSEFDIQMTQSPASLSASVGETVTIICRASVNIYSYLAWYQQKQGKSPQLLVYNAKILAEGVPSRFSGSGSGTQFSLKINSLQPEDFGSYYCQHHYGTFTFGSGTKLEIKRLEDLKNVFPPEVAVFEPSEAEISHTQKATLVCLATGFYPDHVELSWWVNGKEVHSGVCTDPQPLKEQPALNDSRYCLSSRLRVSATFWQNPRNHFRCQVQFYGLSENDEWTQDRAKPVTQIVSAEAWGRADDVIKIHWQEKKSNTILGSQEGNTMKTNDTYMKFSWLTVPEKSLDKEHRCIVRHENNKNGVDQEIIFPPIKTDVITMDPKDNCSKDANDTLLLQLTNTSAYYMYLLLLLKSVVYFAIITCCLLMAMVKRKDSRGRAKRSGSGATNFSLLKQAGDVEENPGPTSMDWIWRILFLVGAATGAHSGPQLQLQESGPGLVKPSETLSLTCTVSGDSISSGDYYWGWIRQPPGKGLEWIGHIYYSGVTYYNPSLKSRVTISVDTSRNQFSLKLSSVTAADTAVYYCTREDSSNWRSRGQGTLVTVSSGSGGGGSGGGGSGGGGSFEQVQLKESGPGLVAPSQSLSITCTISGFSLTSYGVHWVRQPPGKGLEWLVVIWSDGSTTYNSALKSRLSISKDNSKSQVFLKMNSLQTDDTAIYYCASHYGSTLAFASWGHGTLVTVSAATRIQNPDPAVYQLRDSKSSDKSVCLFTDFDSQTNVSQSKDSDVYITDKCVLDMRSMDFKSNSAVAWSNKSDFACANAFNNSIIPEDTFFPSPESSDSTDHVKPKETENTKQPSKSCHKPKAIVHTEKVNMMSLTVLGLRMLFAKTVAVNFLLTAKLFFLLTA

SEQ ID NO: 15120 - protein, 1003 aa, synthetic construct
MALPVTALLLPLALLLHAARPEVQLVESGGGLVQPGGSLRLSCAASGFSFSDFWMSWVRQAPGKGLEWVATISQAGSEKDYVDSVKGRFTISRDNAKKSLYLQMNSLRAEDTAVYYCASGVYSFDYRGQGTLVTVSSGTGGGGSGGGGSGGGGSEFDIVMTQSHKFMSTSVGDRVSVTCKASQNVGNNVAWYQQKPGQSPKVLIYSASYRYSGVPDRFTGSGSGTDFTLTISNVQSEDLAEYFCQQYNTYPFTFGSGTKLEIKLEDLKNVFPPEVAVFEPSEAEISHTQKATLVCLATGFYPDHVELSWWVNGKEVHSGVCTDPQPLKEQPALNDSRYCLSSRLRVSATFWQNPRNHFRCQVQFYGLSENDEWTQDRAKPVTQIVSAEAWGRADDVIKIHWQEKKSNTILGSQEGNTMKTNDTYMKFSWLTVPEKSLDKEHRCIVRHENNKNGVDQEIIFPPIKTDVITMDPKDNCSKDANDTLLLQLTNTSAYYMYLLLLLKSVVYFAIITCCLLMAMVKRKDSRGRAKRSGSGATNFSLLKQAGDVEENPGPTSMDWIWRILFLVGAATGAHSGPQLQLQESGPGLVKPSETLSLTCTVSGDSISSGDYYWGWIRQPPGKGLEWIGHIYYSGVTYYNPSLKSRVTISVDTSRNQFSLKLSSVTAADTAVYYCTREDSSNWRSRGQGTLVTVSSGSGGGGSGGGGSGGGGSFEEVQLEESGGGLVQPGGSMKLSCVASGFTFSNYWMNWVRQSPEKGLEWVAEIRFKSHNYATHFAESVKGRFTISRDDSKSSVYLQMNNLRAEDTGIYYCTRRIGNSDYDWWYFDVWGAGTSVTVSSASTRIQNPDPAVYQLRDSKSSDKSVCLFTDFDSQTNVSQSKDSDVYITDKCVLDMRSMDFKSNSAVAWSNKSDFACANAFNNSIIPEDTFFPSPESSDSTDHVKPKETENTKQPSKSCHKPKAIVHTEKVNMMSLTVLGLRMLFAKTVAVNFLLTAKLFFLLTA

SEQ ID NO: 15121 - protein, 996 aa, synthetic construct
MALPVTALLLPLALLLHAARPEVQLVESGGGLVQPGGSLRLSCAASGFSFSDFWMSWVRQAPGKGLEWVATISQAGSEKDYVDSVKGRFTISRDNAKKSLYLQMNSLRAEDTAVYYCASGVYSFDYRGQGTLVTVSSGTGGGGSGGGGSGGGGSEFDQIVLTQSPAIMSASPGEKVTISCSASSSVSYMYWYQQKPGSSPKPWIYRTSNLASGVPARFSGSGSGTSYSLTISNMEAEDAAAYYCQQYHSYPTTFGGGTKLEVKLEDLKNVFPPEVAVFEPSEAEISHTQKATLVCLATGFYPDHVELSWWVNGKEVHSGVCTDPQPLKEQPALNDSRYCLSSRLRVSATFWQNPRNHFRCQVQFYGLSENDEWTQDRAKPVTQIVSAEAWGRADDVIKIHWQEKKSNTILGSQEGNTMKTNDTYMKFSWLTVPEKSLDKEHRCIVRHENNKNGVDQEIIFPPIKTDVITMDPKDNCSKDANDTLLLQLTNTSAYYMYLLLLLKSVVYFAIITCCLLMAMVKRKDSRGRAKRSGSGATNFSLLKQAGDVEENPGPTSMDWIWRILFLVGAATGAHSGPQLQLQESGPGLVKPSETLSLTCTVSGDSISSGDYYWGWIRQPPGKGLEWIGHIYYSGVTYYNPSLKSRVTISVDTSRNQFSLKLSSVTAADTAVYYCTREDSSNWRSRGQGTLVTVSSGSGGGGSGGGGSGGGGSFEEVQLVESGGGLVQPKGSLKLSCAASGFSFNTYAMNWVRQAPGKGLEWIAHIRSKSNNFATYYADSVKDRFSISRDASENILFLQMNNLKTEDTAMYYCVRQGGDFPMDYWGQGTSVTVSSTRIQNPDPAVYQLRDSKSSDKSVCLFTDFDSQTNVSQSKDSDVYITDKCVLDMRSMDFKSNSAVAWSNKSDFACANAFNNSIIPEDTFFPSPESSDSTDHVKPKETENTKQPSKSCHKPKAIVHTEKVNMMSLTVLGLRMLFAKTVAVNFLLTAKLFFLLTA

SEQ ID NO: 15122 - protein, 995 aa, synthetic construct
MALPVTALLLPLALLLHAARPEVQLVESGGGLVQPGGSLRLSCAASGFSFSDFWMSWVRQAPGKGLEWVATISQAGSEKDYVDSVKGRFTISRDNAKKSLYLQMNSLRAEDTAVYYCASGVYSFDYRGQGTLVTVSSGTGGGGSGGGGSGGGGSEFDDIQMTQSSSSFSVSLGDRVTITCMASEDIYIRLAWYQQKPGNAPRLLISAATSLETGVPSRFSGSGSGKDYTLSITSLQTEDVGTYYCQQYWSSPWTFGGGTKLEINLEDLKNVFPPEVAVFEPSEAEISHTQKATLVCLATGFYPDHVELSWWVNGKEVHSGVCTDPQPLKEQPALNDSRYCLSSRLRVSATFWQNPRNHFRCQVQFYGLSENDEWTQDRAKPVTQIVSAEAWGRADDVIKIHWQEKKSNTILGSQEGNTMKTNDTYMKFSWLTVPEKSLDKEHRCIVRHENNKNGVDQEIIFPPIKTDVITMDPKDNCSKDANDTLLLQLTNTSAYYMYLLLLLKSVVYFAIITCCLLMAMVKRKDSRGRAKRSGSGATNFSLLKQAGDVEENPGPTSMDWIWRILFLVGAATGAHSGPQLQLQESGPGLVKPSETLSLTCTVSGDSISSGDYYWGWIRQPPGKGLEWIGHIYYSGVTYYNPSLKSRVTISVDTSRNQFSLKLSSVTAADTAVYYCTREDSSNWRSRGQGTLVTVSSGSGGGGSGGGGSGGGGSFEDVQLQESGPGLVKPSQSLSLTCTVTGYSITSDYTWNWIRQFPGNKLEWMGYITYSGSTSYNPSLKSRNSITRDTSKNQFFLQLNSVTTEDTATYYCARLGRRYTMDYWGQGTSVTVSSTRIQNPDPAVYQLRDSKSSDKSVCLFTDFDSQTNVSQSKDSDVYITDKCVLDMRSMDFKSNSAVAWSNKSDFACANAFNNSIIPEDTFFPSPESSDSTDHVKPKETENTKQPSKSCHKPKAIVHTEKVNMMSLTVLGLRMLFAKTVAVNFLLTAKLFFLLTA

SEQ ID NO: 15123 - protein, 998 aa, synthetic construct
MALPVTALLLPLALLLHAARPEVQLVESGGGLVQPGGSLRLSCAASGFSFSDFWMSWVRQAPGKGLEWVATISQAGSEKDYVDSVKGRFTISRDNAKKSLYLQMNSLRAEDTAVYYCASGVYSFDYRGQGTLVTVSSGTGGGGSGGGGSGGGGSEFDDIQMTQSPSSLSASVGDRVTITCRASQSISSYLNWYQQKPGKAPKLLIYDASNLETGVPSRFSGSGSGTDFTFTISSLQPEDIATYYCQQYDNLPLTFGGGTKVDIKRLEDLKNVFPPEVAVFEPSEAEISHTQKATLVCLATGFYPDHVELSWWVNGKEVHSGVCTDPQPLKEQPALNDSRYCLSSRLRVSATFWQNPRNHFRCQVQFYGLSENDEWTQDRAKPVTQIVSAEAWGRADDVIKIHWQEKKSNTILGSQEGNTMKTNDTYMKFSWLTVPEKSLDKEHRCIVRHENNKNGVDQEIIFPPIKTDVITMDPKDNCSKDANDTLLLQLTNTSAYYMYLLLLLKSVVYFAIITCCLLMAMVKRKDSRGRAKRSGSGATNFSLLKQAGDVEENPGPTSMDWIWRILFLVGAATGAHSGPQLQLQESGPGLVKPSETLSLTCTVSGDSISSGDYYWGWIRQPPGKGLEWIGHIYYSGVTYYNPSLKSRVTISVDTSRNQFSLKLSSVTAADTAVYYCTREDSSNWRSRGQGTLVTVSSGSGGGGSGGGGSGGGGSFEQVQLVESGGGVVQPGRSLRLSCAASGFTFSSYAMHWVRQAPGKGLEWVAVISYDGSNKYYADSVKGRFTISRDNSKNTLYLQMNSLRAEDTAVYYCARAHNSSSWSFDYWGQGTLVTVSSTRIQNPDPAVYQLRDSKSSDKSVCLFTDFDSQTNVSQSKDSDVYITDKCVLDMRSMDFKSNSAVAWSNKSDFACANAFNNSIIPEDTFFPSPESSDSTDHVKPKETENTKQPSKSCHKPKAIVHTEKVNMMSLTVLGLRMLFAKTVAVNFLLTAKLFFLLTA

SEQ ID NO: 15124 - protein, 1007 aa, synthetic construct
MALPVTALLLPLALLLHAARPEVQLVESGGGLVQPGGSLRLSCAASGFSFSDFWMSWVRQAPGKGLEWVATISQAGSEKDYVDSVKGRFTISRDNAKKSLYLQMNSLRAEDTAVYYCASGVYSFDYRGQGTLVTVSSGTGGGGSGGGGSGGGGSEFDDVVMTQSPLSLPVSLGDQASISCRSSQRLVHSNGNTYLHWYLQKPGQSPKLLIYRVSNRFPGVPDRFSGSGSGTDFTLKISRVEAEDLGIYFCSQSTHVPYTFGGGTKLEIKRLEDLKNVFPPEVAVFEPSEAEISHTQKATLVCLATGFYPDHVELSWWVNGKEVHSGVCTDPQPLKEQPALNDSRYCLSSRLRVSATFWQNPRNHFRCQVQFYGLSENDEWTQDRAKPVTQIVSAEAWGRADDVIKIHWQEKKSNTILGSQEGNTMKTNDTYMKFSWLTVPEKSLDKEHRCIVRHENNKNGVDQEIIFPPIKTDVITMDPKDNCSKDANDTLLLQLTNTSAYYMYLLLLLKSVVYFAIITCCLLMAMVKRKDSRGRAKRSGSGATNFSLLKQAGDVEENPGPTSMDWIWRILFLVGAATGAHSGPQLQLQESGPGLVKPSETLSLTCTVSGDSISSGDYYWGWIRQPPGKGLEWIGHIYYSGVTYYNPSLKSRVTISVDTSRNQFSLKLSSVTAADTAVYYCTREDSSNWRSRGQGTLVTVSSGSGGGGSGGGGSGGGGSFEEVRLQQSGPDLIKPGASVKMSCKASGYTFTGYVMHWVKQRPGQGLEWIGFINPYNDDIQSNERFRGKATLTSDKSSTTAYMELSSLTSEDSAVYYCARGAGYNFDGAYRFFDFWGQGTTLTVSSTRIQNPDPAVYQLRDSKSSDKSVCLFTDFDSQTNVSQSKDSDVYITDKCVLDMRSMDFKSNSAVAWSNKSDFACANAFNNSIIPEDTFFPSPESSDSTDHVKPKETENTKQPSKSCHKPKAIVHTEKVNMMSLTVLGLRMLFAKTVAVNFLLTAKLFFLLTA

SEQ ID NO: 15125 - protein, 998 aa, synthetic construct
MALPVTALLLPLALLLHAARPEVQLVESGGGLVQPGGSLRLSCAASGFSFSDFWMSWVRQAPGKGLEWVATISQAGSEKDYVDSVKGRFTISRDNAKKSLYLQMNSLRAEDTAVYYCASGVYSFDYRGQGTLVTVSSGTGGGGSGGGGSGGGGSEFDSYELTQPPSVSVSPGQTATISCSGDQLGGKYGHWYQKKPGQSPVLVLYQDRKRPAGIPERFSGSSSGNTITLTISGTQAVDEADYYCQAWDTNLGGVFGGGTKVTVLGQLEDLKNVFPPEVAVFEPSEAEISHTQKATLVCLATGFYPDHVELSWWVNGKEVHSGVCTDPQPLKEQPALNDSRYCLSSRLRVSATFWQNPRNHFRCQVQFYGLSENDEWTQDRAKPVTQIVSAEAWGRADDVIKIHWQEKKSNTILGSQEGNTMKTNDTYMKFSWLTVPEKSLDKEHRCIVRHENNKNGVDQEIIFPPIKTDVITMDPKDNCSKDANDTLLLQLTNTSAYYMYLLLLLKSVVYFAIITCCLLMAMVKRKDSRGRAKRSGSGATNFSLLKQAGDVEENPGPTSMDWIWRILFLVGAATGAHSGPQLQLQESGPGLVKPSETLSLTCTVSGDSISSGDYYWGWIRQPPGKGLEWIGHIYYSGVTYYNPSLKSRVTISVDTSRNQFSLKLSSVTAADTAVYYCTREDSSNWRSRGQGTLVTVSSGSGGGGSGGGGSGGGGSFEQVQLVESGAEVKKPGASVKVSCKASGYTFTGYYMHWVRQAPGQGLEWMGRINPNSGGTNYAQKFQGRVTMTRDTSISTAYMELSRLRSDDTAVYYCASPRGRGSAFDIWGQGTLVTVSSTRIQNPDPAVYQLRDSKSSDKSVCLFTDFDSQTNVSQSKDSDVYITDKCVLDMRSMDFKSNSAVAWSNKSDFACANAFNNSIIPEDTFFPSPESSDSTDHVKPKETENTKQPSKSCHKPKAIVHTEKVNMMSLTVLGLRMLFAKTVAVNFLLTAKLFFLLTA

SEQ ID NO: 15126 - protein, 1001 aa, synthetic construct
MALPVTALLLPLALLLHAARPEVQLVESGGGLVQPGGSLRLSCAASGFSFSDFWMSWVRQAPGKGLEWVATISQAGSEKDYVDSVKGRFTISRDNAKKSLYLQMNSLRAEDTAVYYCASGVYSFDYRGQGTLVTVSSGTGGGGSGGGGSGGGGSEFDNFMLTQPHSVSESPGKTVTISCTRSSGSIASKYVQWYQQRPGSSPTTVIYEDNQRPSGVPDRFSGSIDTSSNSASLTISGLRTEDEADYYCHSYDSNNHSVFGGGTKVTVLGQLEDLKNVFPPEVAVFEPSEAEISHTQKATLVCLATGFYPDHVELSWWVNGKEVHSGVCTDPQPLKEQPALNDSRYCLSSRLRVSATFWQNPRNHFRCQVQFYGLSENDEWTQDRAKPVTQIVSAEAWGRADDVIKIHWQEKKSNTILGSQEGNTMKTNDTYMKFSWLTVPEKSLDKEHRCIVRHENNKNGVDQEIIFPPIKTDVITMDPKDNCSKDANDTLLLQLTNTSAYYMYLLLLLKSVVYFAIITCCLLMAMVKRKDSRGRAKRSGSGATNFSLLKQAGDVEENPGPTSMDWIWRILFLVGAATGAHSGPQLQLQESGPGLVKPSETLSLTCTVSGDSISSGDYYWGWIRQPPGKGLEWIGHIYYSGVTYYNPSLKSRVTISVDTSRNQFSLKLSSVTAADTAVYYCTREDSSNWRSRGQGTLVTVSSGSGGGGSGGGGSGGGGSFEEVQLVESGGGVVQPGGSLRLSCAASGFTFSSYAMSWVRQAPGKGLEWVSAISGSGGSTYYADSVKGRFSISRDNSKNTLYLQMNSLRAEDTAVYYCARTRSSGAFDIWGQGTLVTVSSTRIQNPDPAVYQLRDSKSSDKSVCLFTDFDSQTNVSQSKDSDVYITDKCVLDMRSMDFKSNSAVAWSNKSDFACANAFNNSIIPEDTFFPSPESSDSTDHVKPKETENTKQPSKSCHKPKAIVHTEKVNMMSLTVLGLRMLFAKTVAVNFLLTAKLFFLLTA

SEQ ID NO: 15127 - protein, 996 aa, synthetic construct
MALPVTALLLPLALLLHAARPEVQLVESGGGLVQPGGSLRLSCAASGFSFSDFWMSWVRQAPGKGLEWVATISQAGSEKDYVDSVKGRFTISRDNAKKSLYLQMNSLRAEDTAVYYCASGVYSFDYRGQGTLVTVSSGTGGGGSGGGGSGGGGSEFDIQMNQSPSSLSASLGDTITITCHASQNINVWLSWYQQKPGNIPKLLIYKASNLHTGVPSRFSGSGSGTGFTITISSLQPEDIATYYCQQGQSYPWTFGGGTKLEIKRLEDLKNVFPPEVAVFEPSEAEISHTQKATLVCLATGFYPDHVELSWWVNGKEVHSGVCTDPQPLKEQPALNDSRYCLSSRLRVSATFWQNPRNHFRCQVQFYGLSENDEWTQDRAKPVTQIVSAEAWGRADDVIKIHWQEKKSNTILGSQEGNTMKTNDTYMKFSWLTVPEKSLDKEHRCIVRHENNKNGVDQEIIFPPIKTDVITMDPKDNCSKDANDTLLLQLTNTSAYYMYLLLLLKSVVYFAIITCCLLMAMVKRKDSRGRAKRSGSGATNFSLLKQAGDVEENPGPTSMDWIWRILFLVGAATGAHSGPQLQLQESGPGLVKPSETLSLTCTVSGDSISSGDYYWGWIRQPPGKGLEWIGHIYYSGVTYYNPSLKSRVTISVDTSRNQFSLKLSSVTAADTAVYYCTREDSSNWRSRGQGTLVTVSSGSGGGGSGGGGSGGGGSFEEVQLQQSGPELVKPGASVKISCKASGYSFTGYFMNWVKQSHGKSLEYIGRFNPYNGETLYNQKFKGKATLTVDKSSSTVHMELLSVTSEDSAVYYCGRSGNDDAMDYWGQGTSVTVSSATRIQNPDPAVYQLRDSKSSDKSVCLFTDFDSQTNVSQSKDSDVYITDKCVLDMRSMDFKSNSAVAWSNKSDFACANAFNNSIIPEDTFFPSPESSDSTDHVKPKETENTKQPSKSCHKPKAIVHTEKVNMMSLTVLGLRMLFAKTVAVNFLLTAKLFFLLTA

SEQ ID NO: 15128 - protein, 997 aa, synthetic construct
MALPVTALLLPLALLLHAARPEVQLVESGGGLVQPGGSLRLSCAASGFSFSDFWMSWVRQAPGKGLEWVATISQAGSEKDYVDSVKGRFTISRDNAKKSLYLQMNSLRAEDTAVYYCASGVYSFDYRGQGTLVTVSSGTGGGGSGGGGSGGGGSEFEIVLTQSPATLSLSPGERATLSCRASQSVRSYLAWYQQKPGQAPRLLIYDASNRATGIPARFSGSGSGTDFTLTISSLEPEDFAVYYCQQRSNWPPTFGQGTKVEIKLEDLKNVFPPEVAVFEPSEAEISHTQKATLVCLATGFYPDHVELSWWVNGKEVHSGVCTDPQPLKEQPALNDSRYCLSSRLRVSATFWQNPRNHFRCQVQFYGLSENDEWTQDRAKPVTQIVSAEAWGRADDVIKIHWQEKKSNTILGSQEGNTMKTNDTYMKFSWLTVPEKSLDKEHRCIVRHENNKNGVDQEIIFPPIKTDVITMDPKDNCSKDANDTLLLQLTNTSAYYMYLLLLLKSVVYFAIITCCLLMAMVKRKDSRGRAKRSGSGATNFSLLKQAGDVEENPGPTSMDWIWRILFLVGAATGAHSGPQLQLQESGPGLVKPSETLSLTCTVSGDSISSGDYYWGWIRQPPGKGLEWIGHIYYSGVTYYNPSLKSRVTISVDTSRNQFSLKLSSVTAADTAVYYCTREDSSNWRSRGQGTLVTVSSGSGGGGSGGGGSGGGGSFEQLQVQESGPGLVKPSETLSLTCTVSGGSISNSYFSWGWIRQPPGKGLEWIGSFYYGEKTYYNPSLKSRATISIDTSKSQFSLKLSSVTAADTAVYYCPRGPTMIRGVIDSWGQGTLVTVSSTRIQNPDPAVYQLRDSKSSDKSVCLFTDFDSQTNVSQSKDSDVYITDKCVLDMRSMDFKSNSAVAWSNKSDFACANAFNNSIIPEDTFFPSPESSDSTDHVKPKETENTKQPSKSCHKPKAIVHTEKVNMMSLTVLGLRMLFAKTVAVNFLLTAKLFFLLTA

SEQ ID NO: 15129 - protein, 1006 aa, synthetic construct
MALPVTALLLPLALLLHAARPEVQLVESGGGLVQPGGSLRLSCAASGFSFSDFWMSWVRQAPGKGLEWVATISQAGSEKDYVDSVKGRFTISRDNAKKSLYLQMNSLRAEDTAVYYCASGVYSFDYRGQGTLVTVSSGTGGGGSGGGGSGGGGSEFDIVMTQTPLSLPVTPGEPASISCRSSRSLLDSDDGNTYLDWYLQKPGQSPQLLIYTLSYRASGVPDRFSGSGSGTDFTLKISRVEAEDVGVYYCMQRVEFPITFGQGTRLEIKRLEDLKNVFPPEVAVFEPSEAEISHTQKATLVCLATGFYPDHVELSWWVNGKEVHSGVCTDPQPLKEQPALNDSRYCLSSRLRVSATFWQNPRNHFRCQVQFYGLSENDEWTQDRAKPVTQIVSAEAWGRADDVIKIHWQEKKSNTILGSQEGNTMKTNDTYMKFSWLTVPEKSLDKEHRCIVRHENNKNGVDQEIIFPPIKTDVITMDPKDNCSKDANDTLLLQLTNTSAYYMYLLLLLKSVVYFAIITCCLLMAMVKRKDSRGRAKRSGSGATNFSLLKQAGDVEENPGPTSMDWIWRILFLVGAATGAHSGPQLQLQESGPGLVKPSETLSLTCTVSGDSISSGDYYWGWIRQPPGKGLEWIGHIYYSGVTYYNPSLKSRVTISVDTSRNQFSLKLSSVTAADTAVYYCTREDSSNWRSRGQGTLVTVSSGSGGGGSGGGGSGGGGSFEQVQLVESGGGVVQPGRSLRLSCAASGFIFSRYGMHWVRQAPGKGLKWVAVIWYDGSNKLYADSVKGRFTISRDNSKNTLYLQMNSLRAEDTAVYYCARDYYDNSRHHWGFDYWGQGTLVTVSSTRIQNPDPAVYQLRDSKSSDKSVCLFTDFDSQTNVSQSKDSDVYITDKCVLDMRSMDFKSNSAVAWSNKSDFACANAFNNSIIPEDTFFPSPESSDSTDHVKPKETENTKQPSKSCHKPKAIVHTEKVNMMSLTVLGLRMLFAKTVAVNFLLTAKLFFLLTA

SEQ ID NO: 15130 - protein, 996 aa, synthetic construct
MALPVTALLLPLALLLHAARPEVQLVESGGGLVQPGGSLRLSCAASGFSFSDFWMSWVRQAPGKGLEWVATISQAGSEKDYVDSVKGRFTISRDNAKKSLYLQMNSLRAEDTAVYYCASGVYSFDYRGQGTLVTVSSGTGGGGSGGGGSGGGGSEFEIQMTQSPSSMSASLGDTITITCQATQDIFKNLNWYQQKPGKPPSLLIYYATELAEGVPSRFSGSGSGSDYSLTISNLESEDFAAYYCLQFFEFPFTFGSGTKLEMKLEDLKNVFPPEVAVFEPSEAEISHTQKATLVCLATGFYPDHVELSWWVNGKEVHSGVCTDPQPLKEQPALNDSRYCLSSRLRVSATFWQNPRNHFRCQVQFYGLSENDEWTQDRAKPVTQIVSAEAWGRADDVIKIHWQEKKSNTILGSQEGNTMKTNDTYMKFSWLTVPEKSLDKEHRCIVRHENNKNGVDQEIIFPPIKTDVITMDPKDNCSKDANDTLLLQLTNTSAYYMYLLLLLKSVVYFAIITCCLLMAMVKRKDSRGRAKRSGSGATNFSLLKQAGDVEENPGPTSMDWIWRILFLVGAATGAHSGPQLQLQESGPGLVKPSETLSLTCTVSGDSISSGDYYWGWIRQPPGKGLEWIGHIYYSGVTYYNPSLKSRVTISVDTSRNQFSLKLSSVTAADTAVYYCTREDSSNWRSRGQGTLVTVSSGSGGGGSGGGGSGGGGSFEQVQLQQSGAELVRPGTSVKVSCKASGYVFTNYWIEWIKQRPGQGLEWIGVMNPGSGETTYNEKFKGKATLTADKSSSTAYMQLSSLTSVDSAVYFCARDHDRDYYAMDYWGQGTSVTVSSTRIQNPDPAVYQLRDSKSSDKSVCLFTDFDSQTNVSQSKDSDVYITDKCVLDMRSMDFKSNSAVAWSNKSDFACANAFNNSIIPEDTFFPSPESSDSTDHVKPKETENTKQPSKSCHKPKAIVHTEKVNMMSLTVLGLRMLFAKTVAVNFLLTAKLFFLLTA

SEQ ID NO: 15131 - protein, 993 aa, synthetic construct
MALPVTALLLPLALLLHAARPEVQLVESGGGLVQPGGSLRLSCAASGFSFSDFWMSWVRQAPGKGLEWVATISQAGSEKDYVDSVKGRFTISRDNAKKSLYLQMNSLRAEDTAVYYCASGVYSFDYRGQGTLVTVSSGTGGGGSGGGGSGGGGSEFDILLTQSPAILSVSPGERVSFSCRASQNIGTSIHWYQQRTNGSPRLLIKYASESVSGIPSRFSGSGSGTDFTLSINSVESEDIADYYCQHTNSWPTTFGGGTKLEIKRLEDLKNVFPPEVAVFEPSEAEISHTQKATLVCLATGFYPDHVELSWWVNGKEVHSGVCTDPQPLKEQPALNDSRYCLSSRLRVSATFWQNPRNHFRCQVQFYGLSENDEWTQDRAKPVTQIVSAEAWGRADDVIKIHWQEKKSNTILGSQEGNTMKTNDTYMKFSWLTVPEKSLDKEHRCIVRHENNKNGVDQEIIFPPIKTDVITMDPKDNCSKDANDTLLLQLTNTSAYYMYLLLLLKSVVYFAIITCCLLMAMVKRKDSRGRAKRSGSGATNFSLLKQAGDVEENPGPTSMDWIWRILFLVGAATGAHSGPQLQLQESGPGLVKPSETLSLTCTVSGDSISSGDYYWGWIRQPPGKGLEWIGHIYYSGVTYYNPSLKSRVTISVDTSRNQFSLKLSSVTAADTAVYYCTREDSSNWRSRGQGTLVTVSSGSGGGGSGGGGSGGGGSFEQVQLQQSDAELVKPGASVKISCKASGYTFTDHAIHWVKQKPEQGLEWIGYFSPGNGDIKYNEKFKGKATLTADKSSSTAYMQLNSLTSEDSAVYFCKRSYGNYDYWGQGTTLTVSSTRIQNPDPAVYQLRDSKSSDKSVCLFTDFDSQTNVSQSKDSDVYITDKCVLDMRSMDFKSNSAVAWSNKSDFACANAFNNSIIPEDTFFPSPESSDSTDHVKPKETENTKQPSKSCHKPKAIVHTEKVNMMSLTVLGLRMLFAKTVAVNFLLTAKLFFLLTA

SEQ ID NO: 15132 - protein, 998 aa, synthetic construct
MALPVTALLLPLALLLHAARPEVQLVESGGGLVQPGGSLRLSCAASGFSFSDFWMSWVRQAPGKGLEWVATISQAGSEKDYVDSVKGRFTISRDNAKKSLYLQMNSLRAEDTAVYYCASGVYSFDYRGQGTLVTVSSGTGGGGSGGGGSGGGGSEFDIVMTQSPDSLAVSLGERATINCKSSQSLLNSGDQKNYLTWYQQKPGQPPKLLIYWASTRESGVPDRFSGSGSGTDFTLTISSLQAEDVAVYYCQNDYSYPLTFGQGTKVEIKLEDLKNVFPPEVAVFEPSEAEISHTQKATLVCLATGFYPDHVELSWWVNGKEVHSGVCTDPQPLKEQPALNDSRYCLSSRLRVSATFWQNPRNHFRCQVQFYGLSENDEWTQDRAKPVTQIVSAEAWGRADDVIKIHWQEKKSNTILGSQEGNTMKTNDTYMKFSWLTVPEKSLDKEHRCIVRHENNKNGVDQEIIFPPIKTDVITMDPKDNCSKDANDTLLLQLTNTSAYYMYLLLLLKSVVYFAIITCCLLMAMVKRKDSRGRAKRSGSGATNFSLLKQAGDVEENPGPTSMDWIWRILFLVGAATGAHSGPQLQLQESGPGLVKPSETLSLTCTVSGDSISSGDYYWGWIRQPPGKGLEWIGHIYYSGVTYYNPSLKSRVTISVDTSRNQFSLKLSSVTAADTAVYYCTREDSSNWRSRGQGTLVTVSSGSGGGGSGGGGSGGGGSFEQVQLVQSGAEVKKTGSSVKVSCKASGYTFTDHAIHVWRQAPGQALEWMGHFSPGNTDIKYNDKFKGRVTLTVDRSMSTAYMELSSLRSEDTAMYYCKTSTFFFDYWGQGTMVTVSSTRIQNPDPAVYQLRDSKSSDKSVCLFTDFDSQTNVSQSKDSDVYITDKCVLDMRSMDFKSNSAVAWSNKSDFACANAFNNSIIPEDTFFPSPESSDSTDHVKPKETENTKQPSKSCHKPKAIVHTEKVNMMSLTVLGLRMLFAKTVAVNFLLTAKLFFLLTA

SEQ ID NO: 15133 - protein, 997 aa, synthetic construct
MALPVTALLLPLALLLHAARPEVQLVESGGGLVQPGGSLRLSCAASGFSFSDFWMSWVRQAPGKGLEWVATISQAGSEKDYVDSVKGRFTISRDNAKKSLYLQMNSLRAEDTAVYYCASGVYSFDYRGQGTLVTVSSGTGGGGSGGGGSGGGGSEFDIQMTQSPSSLSASVGDRVTITCKASQDVSIAVAWYQQKPGKAPKVLIYSASYRYTGVPDRFSGSGSGTDFTFTISSLQPEDIAVYYCQQHYITPLTFGGGTKVEIKLEDLKNVFPPEVAVFEPSEAEISHTQKATLVCLATGFYPDHVELSWWVNGKEVHSGVCTDPQPLKEQPALNDSRYCLSSRLRVSATFWQNPRNHFRCQVQFYGLSENDEWTQDRAKPVTQIVSAEAWGRADDVIKIHWQEKKSNTILGSQEGNTMKTNDTYMKFSWLTVPEKSLDKEHRCIVRHENNKNGVDQEIIFPPIKTDVITMDPKDNCSKDANDTLLLQLTNTSAYYMYLLLLLKSVVYFAIITCCLLMAMVKRKDSRGRAKRSGSGATNFSLLKQAGDVEENPGPTSMDWIWRILFLVGAATGAHSGPQLQLQESGPGLVKPSETLSLTCTVSGDSISSGDYYWGWIRQPPGKGLEWIGHIYYSGVTYYNPSLKSRVTISVDTSRNQFSLKLSSVTAADTAVYYCTREDSSNWRSRGQGTLVTVSSGSGGGGSGGGGSGGGGSFEQIQLVQSGHEVKKPGASVKVSCKASGYTFTNYGMNWVRQAPGQGLEWMGWINTKTGEPTYAEEFKGRFVFSLETSASTAYLQISSLKAEDTAMYFCGRGGYGSSYWYFDVWGQGTTVTVSSTRIQNPDPAVYQLRDSKSSDKSVCLFTDFDSQTNVSQSKDSDVYITDKCVLDMRSMDFKSNSAVAWSNKSDFACANAFNNSIIPEDTFFPSPESSDSTDHVKPKETENTKQPSKSCHKPKAIVHTEKVNMMSLTVLGLRMLFAKTVAVNFLLTAKLFFLLTA

SEQ ID NO: 15134 - protein, 999 aa, synthetic construct
MALPVTALLLPLALLLHAARPEVQLVESGGGLVQPGGSLRLSCAASGFSFSDFWMSWVRQAPGKGLEWVATISQAGSEKDYVDSVKGRFTISRDNAKKSLYLQMNSLRAEDTAVYYCASGVYSFDYRGQGTLVTVSSGTGGGGSGGGGSGGGGSEFDIVMTQSPDSLAVSLGERATINCRASKSVSTSGYSYMHWYQQKPGQPPKLLIYLASNLESGVPDRFSGSGSGTDFTLTISSLQAEDVAVYYCQHSRELPYTFGQGTKLEIKLEDLKNVFPPEVAVFEPSEAEISHTQKATLVCLATGFYPDHVELSWWVNGKEVHSGVCTDPQPLKEQPALNDSRYCLSSRLRVSATFWQNPRNHFRCQVQFYGLSENDEWTQDRAKPVTQIVSAEAWGRADDVIKIHWQEKKSNTILGSQEGNTMKTNDTYMKFSWLTVPEKSLDKEHRCIVRHENNKNGVDQEIIFPPIKTDVITMDPKDNCSKDANDTLLLQLTNTSAYYMYLLLLLKSVVYFAIITCCLLMAMVKRKDSRGRAKRSGSGATNFSLLKQAGDVEENPGPTSMDWIWRILFLVGAATGAHSGPQLQLQESGPGLVKPSETLSLTCTVSGDSISSGDYYWGWIRQPPGKGLEWIGHIYYSGVTYYNPSLKSRVTISVDTSRNQFSLKLSSVTAADTAVYYCTREDSSNWRSRGQGTLVTVSSGSGGGGSGGGGSGGGGSFEQVQLQESGPGLVKPSETLSLTCTVSGGSISSYGVHWIRQPPGKGLEWIGVIWTSGVTDYNSALMGRVTISVDTSKNQFSLKLSSVTAADTAVYYCARDGDYDRYTMDYWGQGTLVTVSSTRIQNPDPAVYQLRDSKSSDKSVCLFTDFDSQTNVSQSKDSDVYITDKCVLDMRSMDFKSNSAVAWSNKSDFACANAFNNSIIPEDTFFPSPESSDSTDHVKPKETENTKQPSKSCHKPKAIVHTEKVNMMSLTVLGLRMLFAKTVAVNFLLTAKLFFLLTA

SEQ ID NO: 15135 - protein, 999 aa, synthetic construct
MALPVTALLLPLALLLHAARPEVQLVESGGGLVQPGGSLRLSCAASGFSFSDFWMSWVRQAPGKGLEWVATISQAGSEKDYVDSVKGRFTISRDNAKKSLYLQMNSLRAEDTAVYYCASGVYSFDYRGQGTLVTVSSGTGGGGSGGGGSGGGGSEFDIQMTQSPSSLSASVGDRVTITCRASQSIGTSLHWYQQKPGKAPKLLIKFASRLQSGVPSRFSGSGSGTDFTLTISSLQPEDFATYYCQQSPGFPPTFGQGTKLEIKRLEDLKNVFPPEVAVFEPSEAEISHTQKATLVCLATGFYPDHVELSWWVNGKEVHSGVCTDPQPLKEQPALNDSRYCLSSRLRVSATFWQNPRNHFRCQVQFYGLSENDEWTQDRAKPVTQIVSAEAWGRADDVIKIHWQEKKSNTILGSQEGNTMKTNDTYMKFSWLTVPEKSLDKEHRCIVRHENNKNGVDQEIIFPPIKTDVITMDPKDNCSKDANDTLLLQLTNTSAYYMYLLLLLKSVVYFAIITCCLLMAMVKRKDSRGRAKRSGSGATNFSLLKQAGDVEENPGPTSMDWIWRILFLVGAATGAHSGPQLQLQESGPGLVKPSETLSLTCTVSGDSISSGDYYWGWIRQPPGKGLEWIGHIYYSGVTYYNPSLKSRVTISVDTSRNQFSLKLSSVTAADTAVYYCTREDSSNWRSRGQGTLVTVSSGSGGGGSGGGGSGGGGSFEQVQLVESGGGLVKPGGSLRLSCAASGFSITTSGYYWTWIRQFPGKGLEWMGYIGYNSKTYYNPALKSRITISRDNAKNSLYLQMNSLRAEDTAVYYCARSLYGGYKDAFDSWGQGTLVTVSSTRIQNPDPAVYQLRDSKSSDKSVCLFTDFDSQTNVSQSKDSDVYITDKCVLDMRSMDFKSNSAVAWSNKSDFACANAFNNSIIPEDTFFPSPESSDSTDHVKPKETENTKQPSKSCHKPKAIVHTEKVNMMSLTVLGLRMLFAKTVAVNFLLTAKLFFLLTA

SEQ ID NO: 15136 - protein, 1004 aa, synthetic construct
MALPVTALLLPLALLLHAARPEVQLVESGGGLVQPGGSLRLSCAASGFSFSDFWMSWVRQAPGKGLEWVATISQAGSEKDYVDSVKGRFTISRDNAKKSLYLQMNSLRAEDTAVYYCASGVYSFDYRGQGTLVTVSSGTGGGGSGGGGSGGGGSEFDEIVLTQSPLSLPVTPGEPASISCRSSQSLLHSIGYNYLDWYLQKPGQSPQLLIYLGSNRASGVPDRFSGSGSGTDFTLKISRVEAEDVGVYYCMQALQTPLTFGGGTKVEIKRLEDLKNVFPPEVAVFEPSEAEISHTQKATLVCLATGFYPDHVELSWWVNGKEVHSGVCTDPQPLKEQPALNDSRYCLSSRLRVSATFWQNPRNHFRCQVQFYGLSENDEWTQDRAKPVTQIVSAEAWGRADDVIKIHWQEKKSNTILGSQEGNTMKTNDTYMKFSWLTVPEKSLDKEHRCIVRHENNKNGVDQEIIFPPIKTDVITMDPKDNCSKDANDTLLLQLTNTSAYYMYLLLLLKSVVYFAIITCCLLMAMVKRKDSRGRAKRSGSGATNFSLLKQAGDVEENPGPTSMDWIWRILFLVGAATGAHSGPQLQLQESGPGLVKPSETLSLTCTVSGDSISSGDYYWGWIRQPPGKGLEWIGHIYYSGVTYYNPSLKSRVTISVDTSRNQFSLKLSSVTAADTAVYYCTREDSSNWRSRGQGTLVTVSSGSGGGGSGGGGSGGGGSFEEVQLVESGGGVVQPGRSLRLSCAASGFTFRSYGMHWVRQAPGKGLEWVAVISYDGSNKYYTDSVNGRFTISRDNSKNTLYLQMNSLRAEDTAVYYCARGGGYYETSGPDYWGQGTLVTVSSTRIQNPDPAVYQLRDSKSSDKSVCLFTDFDSQTNVSQSKDSDVYITDKCVLDMRSMDFKSNSAVAWSNKSDFACANAFNNSIIPEDTFFPSPESSDSTDHVKPKETENTKQPSKSCHKPKAIVHTEKVNMMSLTVLGLRMLFAKTVAVNFLLTAKLFFLLTA

SEQ ID NO: 15137 - protein, 1002 aa, synthetic construct
MALPVTALLLPLALLLHAARPEVQLVESGGGLVQPGGSLRLSCAASGFSFSDFWMSWVRQAPGKGLEWVATISQAGSEKDYVDSVKGRFTISRDNAKKSLYLQMNSLRAEDTAVYYCASGVYSFDYRGQGTLVTVSSGTGGGGSGGGGSGGGGSEFDDVVMTQSPLSLPVTPGEPASISCRSSQSLLHSIGYNYLHWFLQKPGQSPQLLIYLGSNRASGVPDRFSGSGSGTDFTLKISRVEAEDVGVYYCMQALQTPPTFGQGTRLEIKRLEDLKNVFPPEVAVFEPSEAEISHTQKATLVCLATGFYPDHVELSWWVNGKEVHSGVCTDPQPLKEQPALNDSRYCLSSRLRVSATFWQNPRNHFRCQVQFYGLSENDEWTQDRAKPVTQIVSAEAWGRADDVIKIHWQEKKSNTILGSQEGNTMKTNDTYMKFSWLTVPEKSLDKEHRCIVRHENNKNGVDQEIIFPPIKTDVITMDPKDNCSKDANDTLLLQLTNTSAYYMYLLLLLKSVVYFAIITCCLLMAMVKRKDSRGRAKRSGSGATNFSLLKQAGDVEENPGPTSMDWIWRILFLVGAATGAHSGPQLQLQESGPGLVKPSETLSLTCTVSGDSISSGDYYWGWIRQPPGKGLEWIGHIYYSGVTYYNPSLKSRVTISVDTSRNQFSLKLSSVTAADTAVYYCTREDSSNWRSRGQGTLVTVSSGSGGGGSGGGGSGGGGSFEQLQLQESGPGLVKPSGTLSLTCAVSGGSISSSNWWSWVRQPPGKGLEWIGEIYHSGSTNYNPSLKSRVTISVDKSKNQFSLKLSSVTAADTAVYYCVGSPYGDYVLDYWGQGTLVTVSSTRIQNPDPAVYQLRDSKSSDKSVCLFTDFDSQTNVSQSKDSDVYITDKCVLDMRSMDFKSNSAVAWSNKSDFACANAFNNSIIPEDTFFPSPESSDSTDHVKPKETENTKQPSKSCHKPKAIVHTEKVNMMSLTVLGLRMLFAKTVAVNFLLTAKLFFLLTA

SEQ ID NO: 15138 - protein, 1000 aa, synthetic construct
MALPVTALLLPLALLLHAARPEVQLVESGGGLVQPGGSLRLSCAASGFSFSDFWMSWVRQAPGKGLEWVATISQAGSEKDYVDSVKGRFTISRDNAKKSLYLQMNSLRAEDTAVYYCASGVYSFDYRGQGTLVTVSSGTGGGGSGGGGSGGGGSEFDEIVLTQSPGTLSLSLGERATLSCRASQSISSSFLAWYQQKPGQAPKLLIYAASTRATGIPDRFSGSGSGTDFTLTISRLEPEDFAVYYCQQYGRSLSFGGGTKVEVKLEDLKNVFPPEVAVFEPSEAEISHTQKATLVCLATGFYPDHVELSWWVNGKEVHSGVCTDPQPLKEQPALNDSRYCLSSRLRVSATFWQNPRNHFRCQVQFYGLSENDEWTQDRAKPVTQIVSAEAWGRADDVIKIHWQEKKSNTILGSQEGNTMKTNDTYMKFSWLTVPEKSLDKEHRCIVRHENNKNGVDQEIIFPPIKTDVITMDPKDNCSKDANDTLLLQLTNTSAYYMYLLLLLKSVVYFAIITCCLLMAMVKRKDSRGRAKRSGSGATNFSLLKQAGDVEENPGPTSMDWIWRILFLVGAATGAHSGPQLQLQESGPGLVKPSETLSLTCTVSGDSISSGDYYWGWIRQPPGKGLEWIGHIYYSGVTYYNPSLKSRVTISVDTSRNQFSLKLSSVTAADTAVYYCTREDSSNWRSRGQGTLVTVSSGSGGGGSGGGGSGGGGSFEQVQLQQSGPGLVKPSQTLSLTCAISGDSVSGNSATWNWIRQSPSRGLEWLGRTYYRSKWNHDYAESVKSRITINPDTSKNQFSLQLNSVTPEDTAVYYCARGDSSSWYAFDYWGQGTLVTVSSTRIQNPDPAVYQLRDSKSSDKSVCLFTDFDSQTNVSQSKDSDVYITDKCVLDMRSMDFKSNSAVAWSNKSDFACANAFNNSIIPEDTFFPSPESSDSTDHVKPKETENTKQPSKSCHKPKAIVHTEKVNMMSLTVLGLRMLFAKTVAVNFLLTAKLFFLLTA

SEQ ID NO: 15139 - protein, 999 aa, synthetic construct
MALPVTALLLPLALLLHAARPEVQLVESGGGLVQPGGSLRLSCAASGFSFSDFWMSWVRQAPGKGLEWVATISQAGSEKDYVDSVKGRFTISRDNAKKSLYLQMNSLRAEDTAVYYCASGVYSFDYRGQGTLVTVSSGTGGGGSGGGGSGGGGSEFDQSVVTQPPSVSVAPGKTARITCGRNNIGSKSVHWYQQKPGQAPVLVVYDDSDRPSGIPERFSGSNSGNTATLTISRVEAGDEADYYCQVWDSSSDHVVFGGGTKLTVLGLEDLKNVFPPEVAVFEPSEAEISHTQKATLVCLATGFYPDHVELSWWVNGKEVHSGVCTDPQPLKEQPALNDSRYCLSSRLRVSATFWQNPRNHFRCQVQFYGLSENDEWTQDRAKPVTQIVSAEAWGRADDVIKIHWQEKKSNTILGSQEGNTMKTNDTYMKFSWLTVPEKSLDKEHRCIVRHENNKNGVDQEIIFPPIKTDVITMDPKDNCSKDANDTLLLQLTNTSAYYMYLLLLLKSVVYFAIITCCLLMAMVKRKDSRGRAKRSGSGATNFSLLKQAGDVEENPGPTSMDWIWRILFLVGAATGAHSGPQLQLQESGPGLVKPSETLSLTCTVSGDSISSGDYYWGWIRQPPGKGLEWIGHIYYSGVTYYNPSLKSRVTISVDTSRNQFSLKLSSVTAADTAVYYCTREDSSNWRSRGQGTLVTVSSGSGGGGSGGGGSGGGGSFEVQLVQSGGGVMRPGGSLRLSCAASGFTFDDYGMSWVRQAPGKGLEWVSGINWNGGSTGYADSVRGRFTISRDNAKNSLYLQMNSLRAEDTALYYCARERGYGYHDPHDYWGQGTLVTVSSTRIQNPDPAVYQLRDSKSSDKSVCLFTDFDSQTNVSQSKDSDVYITDKCVLDMRSMDFKSNSAVAWSNKSDFACANAFNNSIIPEDTFFPSPESSDSTDHVKPKETENTKQPSKSCHKPKAIVHTEKVNMMSLTVLGLRMLFAKTVAVNFLLTAKLFFLLTA

SEQ ID NO: 15140 - protein, 1012 aa, synthetic construct
MALPVTALLLPLALLLHAARPEVQLVESGGGLVQPGGSLRLSCAASGFSFSDFWMSWVRQAPGKGLEWVATISQAGSEKDYVDSVKGRFTISRDNAKKSLYLQMNSLRAEDTAVYYCASGVYSFDYRGQGTLVTVSSGTGGGGSGGGGSGGGGSEFEQKLISEEDLEFQAVVTQPPSASGTPGQRVTISCSGSSSNIGSNTVNWYQQVPGTAPKLLIYSNNQRPSGVPDRFSGSKSGTSASLAISGLQSEDEADYYCAAWDDSLNGWVFGGGTKLTVLLEDLKNVFPPEVAVFEPSEAEISHTQKATLVCLATGFYPDHVELSWWVNGKEVHSGVCTDPQPLKEQPALNDSRYCLSSRLRVSATFWQNPRNHFRCQVQFYGLSENDEWTQDRAKPVTQIVSAEAWGRADDVIKIHWQEKKSNTILGSQEGNTMKTNDTYMKFSWLTVPEKSLDKEHRCIVRHENNKNGVDQEIIFPPIKTDVITMDPKDNCSKDANDTLLLQLTNTSAYYMYLLLLLKSVVYFAIITCCLLMAMVKRKDSRGRAKRSGSGATNFSLLKQAGDVEENPGPTSMDWIWRILFLVGAATGAHSGPQLQLQESGPGLVKPSETLSLTCTVSGDSISSGDYYWGWIRQPPGKGLEWIGHIYYSGVTYYNPSLKSRVTISVDTSRNQFSLKLSSVTAADTAVYYCTREDSSNWRSRGQGTLVTVSSGSGGGGSGGGGSGGGGSFEQMQLVQSGAEVKEPGESLRISCKGSGYSFTNFWISWVRQMPGKGLEWMGRVDPGYSYSTYSPSFQGHVTISADKSTSTAYLQWNSLKASDTAMYYCARVQYSGYYDWFDPWGQGTLVTVSSTRIQNPDPAVYQLRDSKSSDKSVCLFTDFDSQTNVSQSKDSDVYITDKCVLDMRSMDFKSNSAVAWSNKSDFACANAFNNSIIPEDTFFPSPESSDSTDHVKPKETENTKQPSKSCHKPKAIVHTEKVNMMSLTVLGLRMLFAKTVAVNFLLTAKLFFLLTA

SEQ ID NO: 15141 - protein, 1006 aa, synthetic construct
MALPVTALLLPLALLLHAARPEVQLVESGGGLVQPGGSLRLSCAASGFSFSDFWMSWVRQAPGKGLEWVATISQAGSEKDYVDSVKGRFTISRDNAKKSLYLQMNSLRAEDTAVYYCASGVYSFDYRGQGTLVTVSSGTGGGGSGGGGSGGGGSEFEQKLISEEDLEFDIQMTQSPSTLSASVGDRVTITCRASQNINKWLAWYQQRPGKAPQLLIYKASSLESGVPSRFSGSGSGTEYTLTISSLQPDDFATYYCQQYNSYATFGQGTKVEIKRLEDLKNVFPPEVAVFEPSEAEISHTQKATLVCLATGFYPDHVELSWWVNGKEVHSGVCTDPQPLKEQPALNDSRYCLSSRLRVSATFWQNPRNHFRCQVQFYGLSENDEWTQDRAKPVTQIVSAEAWGRADDVIKIHWQEKKSNTILGSQEGNTMKTNDTYMKFSWLTVPEKSLDKEHRCIVRHENNKNGVDQEIIFPPIKTDVITMDPKDNCSKDANDTLLLQLTNTSAYYMYLLLLLKSVVYFAIITCCLLMAMVKRKDSRGRAKRSGSGATNFSLLKQAGDVEENPGPTSMDWIWRILFLVGAATGAHSGPQLQLQESGPGLVKPSETLSLTCTVSGDSISSGDYYWGWIRQPPGKGLEWIGHIYYSGVTYYNPSLKSRVTISVDTSRNQFSLKLSSVTAADTAVYYCTREDSSNWRSRGQGTLVTVSSGSGGGGSGGGGSGGGGSFEQVQLVQSGAEVKKPGESLKISCKGSGYNFSNKWIGWVRQLPGRGLEWIAIIYPGYSDITYSPSFQGRVTISADTSINTAYLHWHSLKASDTAMYYCVRHTALAGFDYWGLGTLVTVSSTRIQNPDPAVYQLRDSKSSDKSVCLFTDFDSQTNVSQSKDSDVYITDKCVLDMRSMDFKSNSAVAWSNKSDFACANAFNNSIIPEDTFFPSPESSDSTDHVKPKETENTKQPSKSCHKPKAIVHTEKVNMMSLTVLGLRMLFAKTVAVNFLLTAKLFFLLTA

SEQ ID NO: 15142 - protein, 997 aa, synthetic construct
MALPVTALLLPLALLLHAARPEVQLVESGGGLVQPGGSLRLSCAASGFSFSDFWMSWVRQAPGKGLEWVATISQAGSEKDYVDSVKGRFTISRDNAKKSLYLQMNSLRAEDTAVYYCASGVYSFDYRGQGTLVTVSSGTGGGGSGGGGSGGGGSEFIVLTQSPASLAVSLGQRATISCRASESVDNYGNTFMHWYQQKPGQPPKLLIYRASNLESGIPARFSGSGSRTDFTLTINPVEADDVATYYCQQSNEDPPTFGAGTKLELKLEDLKNVFPPEVAVFEPSEAEISHTQKATLVCLATGFYPDHVELSWWVNGKEVHSGVCTDPQPLKEQPALNDSRYCLSSRLRVSATFWQNPRNHFRCQVQFYGLSENDEWTQDRAKPVTQIVSAEAWGRADDVIKIHWQEKKSNTILGSQEGNTMKTNDTYMKFSWLTVPEKSLDKEHRCIVRHENNKNGVDQEIIFPPIKTDVITMDPKDNCSKDANDTLLLQLTNTSAYYMYLLLLLKSVVYFAIITCCLLMAMVKRKDSRGRAKRSGSGATNFSLLKQAGDVEENPGPTSMDWIWRILFLVGAATGAHSGPQLQLQESGPGLVKPSETLSLTCTVSGDSISSGDYYWGWIRQPPGKGLEWIGHIYYSGVTYYNPSLKSRVTISVDTSRNQFSLKLSSVTAADTAVYYCTREDSSNWRSRGQGTLVTVSSGSGGGGSGGGGSGGGGSFEQIQLVQSGPELKKPGETVKISCKASGYIFTNYGMNWVKQAPGKSFKWMGWINTYTGESTYSADFKGRFAFSLETSASTAYLHINDLKNEDTATYFCARSGGYDPMDYWGQGTSVTVSSTRIQNPDPAVYQLRDSKSSDKSVCLFTDFDSQTNVSQSKDSDVYITDKCVLDMRSMDFKSNSAVAWSNKSDFACANAFNNSIIPEDTFFPSPESSDSTDHVKPKETENTKQPSKSCHKPKAIVHTEKVNMMSLTVLGLRMLFAKTVAVNFLLTAKLFFLLTA

SEQ ID NO: 15143 - protein, 996 aa, synthetic construct
MALPVTALLLPLALLLHAARPEVQLVESGGGLVQPGGSLRLSCAASGFSFSDFWMSWVRQAPGKGLEWVATISQAGSEKDYVDSVKGRFTISRDNAKKSLYLQMNSLRAEDTAVYYCASGVYSFDYRGQGTLVTVSSGTGGGGSGGGGSGGGGSEFEIVLTQSPGTLSLSPGERATLSCRASQSVSNTYLAWYHQRPGQAPRLLIYGASSRATGIPDRFSGSGSGTDFALTISSLEPEDFAVYYCQQYSNSWTFGQGTKVEIKRLEDLKNVFPPEVAVFEPSEAEISHTQKATLVCLATGFYPDHVELSWWVNGKEVHSGVCTDPQPLKEQPALNDSRYCLSSRLRVSATFWQNPRNHFRCQVQFYGLSENDEWTQDRAKPVTQIVSAEAWGRADDVIKIHWQEKKSNTILGSQEGNTMKTNDTYMKFSWLTVPEKSLDKEHRCIVRHENNKNGVDQEIIFPPIKTDVITMDPKDNCSKDANDTLLLQLTNTSAYYMYLLLLLKSVVYFAIITCCLLMAMVKRKDSRGRAKRSGSGATNFSLLKQAGDVEENPGPTSMDWIWRILFLVGAATGAHSGPQLQLQESGPGLVKPSETLSLTCTVSGDSISSGDYYWGWIRQPPGKGLEWIGHIYYSGVTYYNPSLKSRVTISVDTSRNQFSLKLSSVTAADTAVYYCTREDSSNWRSRGQGTLVTVSSGSGGGGSGGGGSGGGGSFEQVQLVESGGGVVQPGRSLRLSCAASGFTFSSYDMHWVRQAPGKGLEWVAVISYDGTNEYYADSVKGRFTISRDTSKNTLYLQMNSLRAEDTAVYYCARERYFDWSFDYWGQGTLVSVSSTRIQNPDPAVYQLRDSKSSDKSVCLFTDFDSQTNVSQSKDSDVYITDKCVLDMRSMDFKSNSAVAWSNKSDFACANAFNNSIIPEDTFFPSPESSDSTDHVKPKETENTKQPSKSCHKPKAIVHTEKVNMMSLTVLGLRMLFAKTVAVNFLLTAKLFFLLTA

SEQ ID NO: 15144 - protein, 995 aa, synthetic construct
MALPVTALLLPLALLLHAARPEVQLVESGGGLVQPGGSLRLSCAASGFSFSDFWMSWVRQAPGKGLEWVATISQAGSEKDYVDSVKGRFTISRDNAKKSLYLQMNSLRAEDTAVYYCASGVYSFDYRGQGTLVTVSSGTGGGGSGGGGSGGGGSEFELTQDPAVSVALGQTVRITCQGDSLRSNYANWYQQKPGQAPVLVIYGQNNRPSGIPDRFSGSSSGNTASLTITGAQAADEADYYCDSRVSTGNHVVFGGGTKLTVLGQLEDLKNVFPPEVAVFEPSEAEISHTQKATLVCLATGFYPDHVELSWWVNGKEVHSGVCTDPQPLKEQPALNDSRYCLSSRLRVSATFWQNPRNHFRCQVQFYGLSENDEWTQDRAKPVTQIVSAEAWGRADDVIKIHWQEKKSNTILGSQEGNTMKTNDTYMKFSWLTVPEKSLDKEHRCIVRHENNKNGVDQEIIFPPIKTDVITMDPKDNCSKDANDTLLLQLTNTSAYYMYLLLLLKSVVYFAIITCCLLMAMVKRKDSRGRAKRSGSGATNFSLLKQAGDVEENPGPTSMDWIWRILFLVGAATGAHSGPQLQLQESGPGLVKPSETLSLTCTVSGDSISSGDYYWGWIRQPPGKGLEWIGHIYYSGVTYYNPSLKSRVTISVDTSRNQFSLKLSSVTAADTAVYYCTREDSSNWRSRGQGTLVTVSSGSGGGGSGGGGSGGGGSFEEVQLVQSGAEVKKPGASVKVSCKASGYTFTSYAMHWVRQAPGQRLEWMGWINAGNGNTKYSQKFQGRVTITRDTSASTAYMELSSLRSEDTAVYYCARDISYGSFDYWGQGTLVTVSSTRIQNPDPAVYQLRDSKSSDKSVCLFTDFDSQTNVSQSKDSDVYITDKCVLDMRSMDFKSNSAVAWSNKSDFACANAFNNSIIPEDTFFPSPESSDSTDHVKPKETENTKQPSKSCHKPKAIVHTEKVNMMSLTVLGLRMLFAKTVAVNFLLTAKLFFLLTA

SEQ ID NO: 15145 - protein, 997 aa, synthetic construct
MALPVTALLLPLALLLHAARPEVQLVESGGGLVQPGGSLRLSCAASGFSFSDFWMSWVRQAPGKGLEWVATISQAGSEKDYVDSVKGRFTISRDNAKKSLYLQMNSLRAEDTAVYYCASGVYSFDYRGQGTLVTVSSGTGGGGSGGGGSGGGGSEFDIVLTQTPATLSVTPGDSVSLSCRASQSISNNLHWYQQKSHESPRLLIKNASQSISGIPSKFSGSGSGTDFTLRINSVETEDFGMYFCQQSNSWPYTFGSGTKLEIKLEDLKNVFPPEVAVFEPSEAEISHTQKATLVCLATGFYPDHVELSWWVNGKEVHSGVCTDPQPLKEQPALNDSRYCLSSRLRVSATFWQNPRNHFRCQVQFYGLSENDEWTQDRAKPVTQIVSAEAWGRADDVIKIHWQEKKSNTILGSQEGNTMKTNDTYMKFSWLTVPEKSLDKEHRCIVRHENNKNGVDQEIIFPPIKTDVITMDPKDNCSKDANDTLLLQLTNTSAYYMYLLLLLKSVVYFAIITCCLLMAMVKRKDSRGRAKRSGSGATNFSLLKQAGDVEENPGPTSMDWIWRILFLVGAATGAHSGPQLQLQESGPGLVKPSETLSLTCTVSGDSISSGDYYWGWIRQPPGKGLEWIGHIYYSGVTYYNPSLKSRVTISVDTSRNQFSLKLSSVTAADTAVYYCTREDSSNWRSRGQGTLVTVSSGSGGGGSGGGGSGGGGSFEQVKLQQSGPELVKPGASVKISCKASGYSFTGYYMHWVKQSHGNILDWIGYIYPYNGVSSYNQKFKGKATLTVDKSSSTAYMELRSLTSEDSAVYYCARERGLYQLRAMDYWGQGTSVTVSSTRIQNPDPAVYQLRDSKSSDKSVCLFTDFDSQTNVSQSKDSDVYITDKCVLDMRSMDFKSNSAVAWSNKSDFACANAFNNSIIPEDTFFPSPESSDSTDHVKPKETENTKQPSKSCHKPKAIVHTEKVNMMSLTVLGLRMLFAKTVAVNFLLTAKLFFLLTA

SEQ ID NO: 15146 - protein, 988 aa, synthetic construct
MALPVTALLLPLALLLHAARPEVQLVESGGGLVQPGGSLRLSCAASGFSFSDFWMSWVRQAPGKGLEWVATISQAGSEKDYVDSVKGRFTISRDNAKKSLYLQMNSLRAEDTAVYYCASGVYSFDYRGQGTLVTVSSGTGGGGSGGGGSGGGGSEFDIVMTQTPAIMSASPGQKVTITCSASSSVNYMHWYQQKLGSSPKLWIYDTSKLAPGVPARFSGSGSGTSYSLTISSMEAEDAASYFCHQWSSYPYTFGSGTKLEIKLEDLKNVFPPEVAVFEPSEAEISHTQKATLVCLATGFYPDHVELSWWVNGKEVHSGVCTDPQPLKEQPALNDSRYCLSSRLRVSATFWQNPRNHFRCQVQFYGLSENDEWTQDRAKPVTQIVSAEAWGRADDVIKIHWQEKKSNTILGSQEGNTMKTNDTYMKFSWLTVPEKSLDKEHRCIVRHENNKNGVDQEIIFPPIKTDVITMDPKDNCSKDANDTLLLQLTNTSAYYMYLLLLLKSVVYFAIITCCLLMAMVKRKDSRGRAKRSGSGATNFSLLKQAGDVEENPGPTSMDWIWRILFLVGAATGAHSGPQLQLQESGPGLVKPSETLSLTCTVSGDSISSGDYYWGWIRQPPGKGLEWIGHIYYSGVTYYNPSLKSRVTISVDTSRNQFSLKLSSVTAADTAVYYCTREDSSNWRSRGQGTLVTVSSGSGGGGSGGGGSGGGGSFEEVQLQESGPDLVKPSQSLSLTCTVTGYSITSGYGWHWIRQFPGNKLEWMGYIHYSGSTTYNPSLKSRISISRDTSKNQFFLQLNSVTTEDTATYYCARSLRYWGQGTTLTVSSTRIQNPDPAVYQLRDSKSSDKSVCLFTDFDSQTNVSQSKDSDVYITDKCVLDMRSMDFKSNSAVAWSNKSDFACANAFNNSIIPEDTFFPSPESSDSTDHVKPKETENTKQPSKSCHKPKAIVHTEKVNMMSLTVLGLRMLFAKTVAVNFLLTAKLFFLLTA

SEQ ID NO: 15147 - protein, 991 aa, synthetic construct
MALPVTALLLPLALLLHAARPEVQLVESGGGLVQPGGSLRLSCAASGFSFSDFWMSWVRQAPGKGLEWVATISQAGSEKDYVDSVKGRFTISRDNAKKSLYLQMNSLRAEDTAVYYCASGVYSFDYRGQGTLVTVSSGTGGGGSGGGGSGGGGSEFDIQMTQSPSSLSASVGDRVTITCSATSSISYMHWYQQKPGKAPKGWIYDTSKLAHGVPSRFSGSGSGTDFTLTISSLQPEDFATYYCHQRRSYPFTFGQGTKVEIKLEDLKNVFPPEVAVFEPSEAEISHTQKATLVCLATGFYPDHVELSWWVNGKEVHSGVCTDPQPLKEQPALNDSRYCLSSRLRVSATFWQNPRNHFRCQVQFYGLSENDEWTQDRAKPVTQIVSAEAWGRADDVIKIHWQEKKSNTILGSQEGNTMKTNDTYMKFSWLTVPEKSLDKEHRCIVRHENNKNGVDQEIIFPPIKTDVITMDPKDNCSKDANDTLLLQLTNTSAYYMYLLLLLKSVVYFAIITCCLLMAMVKRKDSRGRAKRSGSGATNFSLLKQAGDVEENPGPTSMDWIWRILFLVGAATGAHSGPQLQLQESGPGLVKPSETLSLTCTVSGDSISSGDYYWGWIRQPPGKGLEWIGHIYYSGVTYYNPSLKSRVTISVDTSRNQFSLKLSSVTAADTAVYYCTREDSSNWRSRGQGTLVTVSSGSGGGGSGGGGSGGGGSFEEVQLVQSGAEVKKPGASVKVSCKASGYTFTNFWIHWVRQAPGQGLEWIGEIDPSDSYTNYNQKFKGRVTITRDTSTSTAYLELSSLRSEDTAVYYCAREITTVDYWGQGTLVTVSSTRIQNPDPAVYQLRDSKSSDKSVCLFTDFDSQTNVSQSKDSDVYITDKCVLDMRSMDFKSNSAVAWSNKSDFACANAFNNSIIPEDTFFPSPESSDSTDHVKPKETENTKQPSKSCHKPKAIVHTEKVNMMSLTVLGLRMLFAKTVAVNFLLTAKLFFLLTA

SEQ ID NO: 15148 - protein, 998 aa, synthetic construct
MALPVTALLLPLALLLHAARPEVQLVESGGGLVQPGGSLRLSCAASGFSFSDFWMSWVRQAPGKGLEWVATISQAGSEKDYVDSVKGRFTISRDNAKKSLYLQMNSLRAEDTAVYYCASGVYSFDYRGQGTLVTVSSGTGGGGSGGGGSGGGGSEFDIQMTQSPSSLSASVGDRVTITCKASQGFNKYVAWYQQKPGKAPKLLIYYTSTLQPGVPSRFSGSGSGRDYTLTISSLQPEDFATYYCLQYGNLLYAFGQGTKVEIKRLEDLKNVFPPEVAVFEPSEAEISHTQKATLVCLATGFYPDHVELSWWVNGKEVHSGVCTDPQPLKEQPALNDSRYCLSSRLRVSATFWQNPRNHFRCQVQFYGLSENDEWTQDRAKPVTQIVSAEAWGRADDVIKIHWQEKKSNTILGSQEGNTMKTNDTYMKFSWLTVPEKSLDKEHRCIVRHENNKNGVDQEIIFPPIKTDVITMDPKDNCSKDANDTLLLQLTNTSAYYMYLLLLLKSVVYFAIITCCLLMAMVKRKDSRGRAKRSGSGATNFSLLKQAGDVEENPGPTSMDWIWRILFLVGAATGAHSGPQLQLQESGPGLVKPSETLSLTCTVSGDSISSGDYYWGWIRQPPGKGLEWIGHIYYSGVTYYNPSLKSRVTISVDTSRNQFSLKLSSVTAADTAVYYCTREDSSNWRSRGQGTLVTVSSGSGGGGSGGGGSGGGGSFEEVQLVQSGAEVKKPGASVKVSCKASGYTFTSYWIGWVRQAPGQGLEWIGDIYPGGGYTNYNEKFKGRVTITRDTSTSTAYLELSSLRSEDTAVYYCARLDGSSYRGAMDSWGQGTLVTVSSTRIQNPDPAVYQLRDSKSSDKSVCLFTDFDSQTNVSQSKDSDVYITDKCVLDMRSMDFKSNSAVAWSNKSDFACANAFNNSIIPEDTFFPSPESSDSTDHVKPKETENTKQPSKSCHKPKAIVHTEKVNMMSLTVLGLRMLFAKTVAVNFLLTAKLFFLLTA

SEQ ID NO: 15149 - protein, 994 aa, synthetic construct
MALPVTALLLPLALLLHAARPEVQLVESGGGLVQPGGSLRLSCAASGFSFSDFWMSWVRQAPGKGLEWVATISQAGSEKDYVDSVKGRFTISRDNAKKSLYLQMNSLRAEDTAVYYCASGVYSFDYRGQGTLVTVSSGTGGGGSGGGGSGGGGSEFDIQMTQSPSSLSASVGDRVTITCRASQDIRYYLNWYQQKPGKAPKLLIYVASSLQSGVPSRFSGSGSGTEFTLTVSSLQPEDFATYYCLQVYSTPRTFGQGTKVEIKLEDLKNVFPPEVAVFEPSEAEISHTQKATLVCLATGFYPDHVELSWWVNGKEVHSGVCTDPQPLKEQPALNDSRYCLSSRLRVSATFWQNPRNHFRCQVQFYGLSENDEWTQDRAKPVTQIVSAEAWGRADDVIKIHWQEKKSNTILGSQEGNTMKTNDTYMKFSWLTVPEKSLDKEHRCIVRHENNKNGVDQEIIFPPIKTDVITMDPKDNCSKDANDTLLLQLTNTSAYYMYLLLLLKSVVYFAIITCCLLMAMVKRKDSRGRAKRSGSGATNFSLLKQAGDVEENPGPTSMDWIWRILFLVGAATGAHSGPQLQLQESGPGLVKPSETLSLTCTVSGDSISSGDYYWGWIRQPPGKGLEWIGHIYYSGVTYYNPSLKSRVTISVDTSRNQFSLKLSSVTAADTAVYYCTREDSSNWRSRGQGTLVTVSSGSGGGGSGGGGSGGGGSFEEVQLVESGGGLAKPGGSLRLSCAASGFRFTFNNYYMDWVRQAPGQGLEWVSRISSSGDPTWYADSVKGRFTISRENAKNTLFLQMNSLRAEDTAVYYCASLTTGSDSWGQGVLVTVSSTRIQNPDPAVYQLRDSKSSDKSVCLFTDFDSQTNVSQSKDSDVYITDKCVLDMRSMDFKSNSAVAWSNKSDFACANAFNNSIIPEDTFFPSPESSDSTDHVKPKETENTKQPSKSCHKPKAIVHTEKVNMMSLTVLGLRMLFAKTVAVNFLLTAKLFFLLTA

SEQ ID NO: 15150 - protein, 995 aa, synthetic construct
MALPVTALLLPLALLLHAARPEVQLVESGGGLVQPGGSLRLSCAASGFSFSDFWMSWVRQAPGKGLEWVATISQAGSEKDYVDSVKGRFTISRDNAKKSLYLQMNSLRAEDTAVYYCASGVYSFDYRGQGTLVTVSSGTGGGGSGGGGSGGGGSEFEIVMTQSPATLSVSPGERATLSCRASQSVSRNLAWYQQKPGQAPRLLIYGASTRATGIPARFSGSGSGTEFTLTIGSLQSEDFAVYYCQQYKTWPRTFGQGTNVEIKLEDLKNVFPPEVAVFEPSEAEISHTQKATLVCLATGFYPDHVELSWWVNGKEVHSGVCTDPQPLKEQPALNDSRYCLSSRLRVSATFWQNPRNHFRCQVQFYGLSENDEWTQDRAKPVTQIVSAEAWGRADDVIKIHWQEKKSNTILGSQEGNTMKTNDTYMKFSWLTVPEKSLDKEHRCIVRHENNKNGVDQEIIFPPIKTDVITMDPKDNCSKDANDTLLLQLTNTSAYYMYLLLLLKSVVYFAIITCCLLMAMVKRKDSRGRAKRSGSGATNFSLLKQAGDVEENPGPTSMDWIWRILFLVGAATGAHSGPQLQLQESGPGLVKPSETLSLTCTVSGDSISSGDYYWGWIRQPPGKGLEWIGHIYYSGVTYYNPSLKSRVTISVDTSRNQFSLKLSSVTAADTAVYYCTREDSSNWRSRGQGTLVTVSSGSGGGGSGGGGSGGGGSFEQVQLQQWGAGLLKPSETLSLTCAVFGGSFSGYYWSWIRQPPGKGLEWIGEINHRGNTNDNPSLKSRVTISVDTSKNQFALKLSSVTAADTAVYYCARERGYTYGNFDHWGQGTLVTVSSTRIQNPDPAVYQLRDSKSSDKSVCLFTDFDSQTNVSQSKDSDVYITDKCVLDMRSMDFKSNSAVAWSNKSDFACANAFNNSIIPEDTFFPSPESSDSTDHVKPKETENTKQPSKSCHKPKAIVHTEKVNMMSLTVLGLRMLFAKTVAVNFLLTAKLFFLLTA

SEQ ID NO: 15151 - protein, 996 aa, synthetic construct
MALPVTALLLPLALLLHAARPEVQLVESGGGLVQPGGSLRLSCAASGFSFSDFWMSWVRQAPGKGLEWVATISQAGSEKDYVDSVKGRFTISRDNAKKSLYLQMNSLRAEDTAVYYCASGVYSFDYRGQGTLVTVSSGTGGGGSGGGGSGGGGSEFEIVMTPSSATLSVSPGERATLSCRASQSVSRNLAWYQQKPGQAPRLLIYGASTRATGIPARFSGSGSGTEFTLTISSLQSEDFAVYYCHQYSNWMCSFGQGTKLEIKLEDLKNVFPPEVAVFEPSEAEISHTQKATLVCLATGFYPDHVELSWWVNGKEVHSGVCTDPQPLKEQPALNDSRYCLSSRLRVSATFWQNPRNHFRCQVQFYGLSENDEWTQDRAKPVTQIVSAEAWGRADDVIKIHWQEKKSNTILGSQEGNTMKTNDTYMKFSWLTVPEKSLDKEHRCIVRHENNKNGVDQEIIFPPIKTDVITMDPKDNCSKDANDTLLLQLTNTSAYYMYLLLLLKSVVYFAIITCCLLMAMVKRKDSRGRAKRSGSGATNFSLLKQAGDVEENPGPTSMDWIWRILFLVGAATGAHSGPQLQLQESGPGLVKPSETLSLTCTVSGDSISSGDYYWGWIRQPPGKGLEWIGHIYYSGVTYYNPSLKSRVTISVDTSRNQFSLKLSSVTAADTAVYYCTREDSSNWRSRGQGTLVTVSSGSGGGGSGGGGSGGGGSFEEVQLLESGGGLVQPGGSLRLSCAASGFTFSRYAMNWVRQAPGKGLEWVSGISGSGGRTYYADSVKGRFTISRDNSKNTLYLQMNSLRAEDTAVYYCAKDRDFWSGPFDYWGQGTLVTVSSTRIQNPDPAVYQLRDSKSSDKSVCLFTDFDSQTNVSQSKDSDVYITDKCVLDMRSMDFKSNSAVAWSNKSDFACANAFNNSIIPEDTFFPSPESSDSTDHVKPKETENTKQPSKSCHKPKAIVHTEKVNMMSLTVLGLRMLFAKTVAVNFLLTAKLFFLLTA

SEQ ID NO: 15152 - protein, 1001 aa, synthetic construct
MALPVTALLLPLALLLHAARPEVQLVESGGGLVQPGGSLRLSCAASGFSFSDFWMSWVRQAPGKGLEWVATISQAGSEKDYVDSVKGRFTISRDNAKKSLYLQMNSLRAEDTAVYYCASGVYSFDYRGQGTLVTVSSGTGGGGSGGGGSGGGGSEFDIQMTQSPSSLSASVGDRVTITCKASKNIRSYLAWYQQKPGKAPKLLIYSGSTLHSGVPSRFSGSGSGTDFTLTISSLQPEDFATYYCQQHHEYPLTFGQGTKVEIKRLEDLKNVFPPEVAVFEPSEAEISHTQKATLVCLATGFYPDHVELSWWVNGKEVHSGVCTDPQPLKEQPALNDSRYCLSSRLRVSATFWQNPRNHFRCQVQFYGLSENDEWTQDRAKPVTQIVSAEAWGRADDVIKIHWQEKKSNTILGSQEGNTMKTNDTYMKFSWLTVPEKSLDKEHRCIVRHENNKNGVDQEIIFPPIKTDVITMDPKDNCSKDANDTLLLQLTNTSAYYMYLLLLLKSVVYFAIITCCLLMAMVKRKDSRGRAKRSGSGATNFSLLKQAGDVEENPGPTSMDWIWRILFLVGAATGAHSGPQLQLQESGPGLVKPSETLSLTCTVSGDSISSGDYYWGWIRQPPGKGLEWIGHIYYSGVTYYNPSLKSRVTISVDTSRNQFSLKLSSVTAADTAVYYCTREDSSNWRSRGQGTLVTVSSGSGGGGSGGGGSGGGGSFEQVQLQESGPGLVKPSETLSLTCTVSGYTITSGYDWSWIRQPPGKGLEWIGYINYGGSTNYKPSLGSRVTISVDTSKNQFSLKLSSVTAADTAVYYCARYNEYKSYIYDWYFDFWGQGTLVTVSSTRIQNPDPAVYQLRDSKSSDKSVCLFTDFDSQTNVSQSKDSDVYITDKCVLDMRSMDFKSNSAVAWSNKSDFACANAFNNSIIPEDTFFPSPESSDSTDHVKPKETENTKQPSKSCHKPKAIVHTEKVNMMSLTVLGLRMLFAKTVAVNFLLTAKLFFLLTA

SEQ ID NO: 15153 - protein, 1003 aa, synthetic construct
MALPVTALLLPLALLLHAARPEVQLVESGGGLVQPGGSLRLSCAASGFSFSDFWMSWVRQAPGKGLEWVATISQAGSEKDYVDSVKGRFTISRDNAKKSLYLQMNSLRAEDTAVYYCASGVYSFDYRGQGTLVTVSSGTGGGGSGGGGSGGGGSEFQSVVTQPPSVSAAPGQKVTISCSGSSSNIGNNYVSWYQQLPGTAPKLLIYDNNKRPSGIPDRFSGSKSGTSATLGITGLQTGDEADYYCGTWDGSLYTMLFGGGTKLTVLLEDLKNVFPPEVAVFEPSEAEISHTQKATLVCLATGFYPDHVELSWWVNGKEVHSGVCTDPQPLKEQPALNDSRYCLSSRLRVSATFWQNPRNHFRCQVQFYGLSENDEWTQDRAKPVTQIVSAEAWGRADDVIKIHWQEKKSNTILGSQEGNTMKTNDTYMKFSWLTVPEKSLDKEHRCIVRHENNKNGVDQEIIFPPIKTDVITMDPKDNCSKDANDTLLLQLTNTSAYYMYLLLLLKSVVYFAIITCCLLMAMVKRKDSRGRAKRSGSGATNFSLLKQAGDVEENPGPTSMDWIWRILFLVGAATGAHSGPQLQLQESGPGLVKPSETLSLTCTVSGDSISSGDYYWGWIRQPPGKGLEWIGHIYYSGVTYYNPSLKSRVTISVDTSRNQFSLKLSSVTAADTAVYYCTREDSSNWRSRGQGTLVTVSSGSGGGGSGGGGSGGGGSFEEVQLVESGGGLVKPGGSLRLSCAASGFTFSNAWMSWVRQAPGKGLEWVGFIRSKAYGGTTEYAASVKGRFTISRDDSKSIAYLQMNNLKTEDTAVYYCARDGLYSSSWYDSDYWGQGTLVTVSSTRIQNPDPAVYQLRDSKSSDKSVCLFTDFDSQTNVSQSKDSDVYITDKCVLDMRSMDFKSNSAVAWSNKSDFACANAFNNSIIPEDTFFPSPESSDSTDHVKPKETENTKQPSKSCHKPKAIVHTEKVNMMSLTVLGLRMLFAKTVAVNFLLTAKLFFLLTA

SEQ ID NO: 15154 - protein, 1008 aa, synthetic construct
MALPVTALLLPLALLLHAARPEVQLVESGGGLVQPGGSLRLSCAASGFSFSDFWMSWVRQAPGKGLEWVATISQAGSEKDYVDSVKGRFTISRDNAKKSLYLQMNSLRAEDTAVYYCASGVYSFDYRGQGTLVTVSSGTGGGGSGGGGSGGGGSEFQSVLTQPPSVSGAPGQRVTISCTGSSSNIGAGYDVHWYQQLPGTAPKLLIFGNSNRPSGVPDRFSGFKSGTSASLAITGLQAEDEADYFCQSYDSSLSGSGVFGTGTKVTVLGLEDLKNVFPPEVAVFEPSEAEISHTQKATLVCLATGFYPDHVELSWWVNGKEVHSGVCTDPQPLKEQPALNDSRYCLSSRLRVSATFWQNPRNHFRCQVQFYGLSENDEWTQDRAKPVTQIVSAEAWGRADDVIKIHWQEKKSNTILGSQEGNTMKTNDTYMKFSWLTVPEKSLDKEHRCIVRHENNKNGVDQEIIFPPIKTDVITMDPKDNCSKDANDTLLLQLTNTSAYYMYLLLLLKSVVYFAIITCCLLMAMVKRKDSRGRAKRSGSGATNFSLLKQAGDVEENPGPTSMDWIWRILFLVGAATGAHSGPQLQLQESGPGLVKPSETLSLTCTVSGDSISSGDYYWGWIRQPPGKGLEWIGHIYYSGVTYYNPSLKSRVTISVDTSRNQFSLKLSSVTAADTAVYYCTREDSSNWRSRGQGTLVTVSSGSGGGGSGGGGSGGGGSFEQMQLVQSGGGLVQPGRSLRLSCAASGFTFDDYAMHWVRQAPGKGLEWVSGISWNSGSIGYADSVKGRFTISRDNAKNSLYLQMNSLRAEDTALYYCAKDIHSGSYYGLLYYAMDVWGQGTTVTVSSTRIQNPDPAVYQLRDSKSSDKSVCLFTDFDSQTNVSQSKDSDVYITDKCVLDMRSMDFKSNSAVAWSNKSDFACANAFNNSIIPEDTFFPSPESSDSTDHVKPKETENTKQPSKSCHKPKAIVHTEKVNMMSLTVLGLRMLFAKTVAVNFLLTAKLFFLLTA

SEQ ID NO: 15155 - protein, 1008 aa, synthetic construct
MALPVTALLLPLALLLHAARPEVQLVESGGGLVQPGGSLRLSCAASGFSFSDFWMSWVRQAPGKGLEWVATISQAGSEKDYVDSVKGRFTISRDNAKKSLYLQMNSLRAEDTAVYYCASGVYSFDYRGQGTLVTVSSGTGGGGSGGGGSGGGGSEFLPVLTQPPSASGTPGQRVTISCSGRSSNIGSNSVNWYRQLPGAAPKLLIYSNNQRPPGVPVRFSGSKSGTSASLAISGLQSEDEATYYCATWDDNLNVHYVFGTGTKVTVLGSRLEDLKNVFPPEVAVFEPSEAEISHTQKATLVCLATGFYPDHVELSWWVNGKEVHSGVCTDPQPLKEQPALNDSRYCLSSRLRVSATFWQNPRNHFRCQVQFYGLSENDEWTQDRAKPVTQIVSAEAWGRADDVIKIHWQEKKSNTILGSQEGNTMKTNDTYMKFSWLTVPEKSLDKEHRCIVRHENNKNGVDQEIIFPPIKTDVITMDPKDNCSKDANDTLLLQLTNTSAYYMYLLLLLKSVVYFAIITCCLLMAMVKRKDSRGRAKRSGSGATNFSLLKQAGDVEENPGPTSMDWIWRILFLVGAATGAHSGPQLQLQESGPGLVKPSETLSLTCTVSGDSISSGDYYWGWIRQPPGKGLEWIGHIYYSGVTYYNPSLKSRVTISVDTSRNQFSLKLSSVTAADTAVYYCTREDSSNWRSRGQGTLVTVSSGSGGGGSGGGGSGGGGSFELEMAQVQLVQSGAEVKKPGSSVKVSCKASGGTFSSYAISWVRQAPGQGLEWMGRIIPILGIANYAQKFQGRVTITADKSTSTAYMELSSLRSEDTAVYYCARGGYYSHDMWSEDWGQGTLVTVSSTRIQNPDPAVYQLRDSKSSDKSVCLFTDFDSQTNVSQSKDSDVYITDKCVLDMRSMDFKSNSAVAWSNKSDFACANAFNNSIIPEDTFFPSPESSDSTDHVKPKETENTKQPSKSCHKPKAIVHTEKVNMMSLTVLGLRMLFAKTVAVNFLLTAKLFFLLTA

SEQ ID NO: 15156 - protein, 1002 aa, synthetic construct
MALPVTALLLPLALLLHAARPEVQLVESGGGLVQPGGSLRLSCAASGFSFSDFWMSWVRQAPGKGLEWVATISQAGSEKDYVDSVKGRFTISRDNAKKSLYLQMNSLRAEDTAVYYCASGVYSFDYRGQGTLVTVSSGTGGGGSGGGGSGGGGSEFDFVMTQSPDSLAVSLGERVTMSCKSSQSLLNSGNQKNYLTWYQQKPGQPPKLLIYWASTRESGVPDRFSGSGSGTDFTLTISSLQAEDVAVYYCQNDYSYPYTFGQGTKLEIKLEDLKNVFPPEVAVFEPSEAEISHTQKATLVCLATGFYPDHVELSWWVNGKEVHSGVCTDPQPLKEQPALNDSRYCLSSRLRVSATFWQNPRNHFRCQVQFYGLSENDEWTQDRAKPVTQIVSAEAWGRADDVIKIHWQEKKSNTILGSQEGNTMKTNDTYMKFSWLTVPEKSLDKEHRCIVRHENNKNGVDQEIIFPPIKTDVITMDPKDNCSKDANDTLLLQLTNTSAYYMYLLLLLKSVVYFAIITCCLLMAMVKRKDSRGRAKRSGSGATNFSLLKQAGDVEENPGPTSMDWIWRILFLVGAATGAHSGPQLQLQESGPGLVKPSETLSLTCTVSGDSISSGDYYWGWIRQPPGKGLEWIGHIYYSGVTYYNPSLKSRVTISVDTSRNQFSLKLSSVTAADTAVYYCTREDSSNWRSRGQGTLVTVSSGSGGGGSGGGGSGGGGSFEEVQLVQSGAELKKPGASVKVSCKASGYTFTDYYMKWVRQAPGQGLEWIGDIIPSNGATFYNQKFKGRVTITVDKSTSTAYMELSSLRSEDTAVYYCARSHLLRASWFAYWGQGTLVTVSSTRIQNPDPAVYQLRDSKSSDKSVCLFTDFDSQTNVSQSKDSDVYITDKCVLDMRSMDFKSNSAVAWSNKSDFACANAFNNSIIPEDTFFPSPESSDSTDHVKPKETENTKQPSKSCHKPKAIVHTEKVNMMSLTVLGLRMLFAKTVAVNFLLTAKLFFLLTA

SEQ ID NO: 15157 - protein, 1002 aa, synthetic construct
MALPVTALLLPLALLLHAARPEVQLVESGGGLVQPGGSLRLSCAASGFSFSDFWMSWVRQAPGKGLEWVATISQAGSEKDYVDSVKGRFTISRDNAKKSLYLQMNSLRAEDTAVYYCASGVYSFDYRGQGTLVTVSSGTGGGGSGGGGSGGGGSEFDFVMTQSPDSLAVSLGERVTMSCKSSQSLLNSGNQKNYLTWYQQKPGQPPKLLIYWASTRESGVPDRFSGSGSGTDFTLTISSLQAEDVAVYYCQNDYSYPYTFGQGTKLEIKLEDLKNVFPPEVAVFEPSEAEISHTQKATLVCLATGFYPDHVELSWWVNGKEVHSGVCTDPQPLKEQPALNDSRYCLSSRLRVSATFWQNPRNHFRCQVQFYGLSENDEWTQDRAKPVTQIVSAEAWGRADDVIKIHWQEKKSNTILGSQEGNTMKTNDTYMKFSWLTVPEKSLDKEHRCIVRHENNKNGVDQEIIFPPIKTDVITMDPKDNCSKDANDTLLLQLTNTSAYYMYLLLLLKSVVYFAIITCCLLMAMVKRKDSRGRAKRSGSGATNFSLLKQAGDVEENPGPTSMDWIWRILFLVGAATGAHSGPQLQLQESGPGLVKPSETLSLTCTVSGDSISSGDYYWGWIRQPPGKGLEWIGHIYYSGVTYYNPSLKSRVTISVDTSRNQFSLKLSSVTAADTAVYYCTREDSSNWRSRGQGTLVTVSSGSGGGGSGGGGSGGGGSFEQVQLVQSGAELKKPGASVKVSCKASGYTFTDYYMKWVRQAPGQGLEWIGDIIPSNGATFYNQKFKGRVTITVDKSTSTAYMELSSLRSEDTAVYYCARSHLLRASWFAYWGQGTLVTVSSTRIQNPDPAVYQLRDSKSSDKSVCLFTDFDSQTNVSQSKDSDVYITDKCVLDMRSMDFKSNSAVAWSNKSDFACANAFNNSIIPEDTFFPSPESSDSTDHVKPKETENTKQPSKSCHKPKAIVHTEKVNMMSLTVLGLRMLFAKTVAVNFLLTAKLFFLLTA

SEQ ID NO: 15158 - protein, 992 aa, synthetic construct
MALPVTALLLPLALLLHAARPEVQLVESGGGLVQPGGSLRLSCAASGFSFSDFWMSWVRQAPGKGLEWVATISQAGSEKDYVDSVKGRFTISRDNAKKSLYLQMNSLRAEDTAVYYCASGVYSFDYRGQGTLVTVSSGTGGGGSGGGGSGGGGSEFDVQITQSPSYLAASPGETITINCRASKSISKDLAWYQEKPGKTNKLLIYSGSTLQSGIPSRFSGSGSGTDFTLTISSLEPEDFAMYYCQQHNKYPYTFGGGTKLEIKRLEDLKNVFPPEVAVFEPSEAEISHTQKATLVCLATGFYPDHVELSWWVNGKEVHSGVCTDPQPLKEQPALNDSRYCLSSRLRVSATFWQNPRNHFRCQVQFYGLSENDEWTQDRAKPVTQIVSAEAWGRADDVIKIHWQEKKSNTILGSQEGNTMKTNDTYMKFSWLTVPEKSLDKEHRCIVRHENNKNGVDQEIIFPPIKTDVITMDPKDNCSKDANDTLLLQLTNTSAYYMYLLLLLKSVVYFAIITCCLLMAMVKRKDSRGRAKRSGSGATNFSLLKQAGDVEENPGPTSMDWIWRILFLVGAATGAHSGPQLQLQESGPGLVKPSETLSLTCTVSGDSISSGDYYWGWIRQPPGKGLEWIGHIYYSGVTYYNPSLKSRVTISVDTSRNQFSLKLSSVTAADTAVYYCTREDSSNWRSRGQGTLVTVSSGSGGGGSGGGGSGGGGSFEQVQLQQPGAELVRPGASVKLSCKASGYTFTSYWMNWVKQRPDQGLEWIGRIDPYDSETHYNQKFKDKAILTVDKSSSTAYMQLSSLTSEDSAVYYCARGNWDDYWGQGTTLTVSSTRIQNPDPAVYQLRDSKSSDKSVCLFTDFDSQTNVSQSKDSDVYITDKCVLDMRSMDFKSNSAVAWSNKSDFACANAFNNSIIPEDTFFPSPESSDSTDHVKPKETENTKQPSKSCHKPKAIVHTEKVNMMSLTVLGLRMLFAKTVAVNFLLTAKLFFLLTA

SEQ ID NO: 15159 - protein, 994 aa, synthetic construct
MALPVTALLLPLALLLHAARPEVQLVESGGGLVQPGGSLRLSCAASGFSFSDFWMSWVRQAPGKGLEWVATISQAGSEKDYVDSVKGRFTISRDNAKKSLYLQMNSLRAEDTAVYYCASGVYSFDYRGQGTLVTVSSGTGGGGSGGGGSGGGGSEFEIVLTQSPTSMTASPGEQVTITCRASSSINYMHWYQQKPGASPRPWIYETSKLASGVPDRFSGSASGTSYSLTINNMEAEDAATYYCQQWNYPSWTFGGGTKLELKLEDLKNVFPPEVAVFEPSEAEISHTQKATLVCLATGFYPDHVELSWWVNGKEVHSGVCTDPQPLKEQPALNDSRYCLSSRLRVSATFWQNPRNHFRCQVQFYGLSENDEWTQDRAKPVTQIVSAEAWGRADDVIKIHWQEKKSNTILGSQEGNTMKTNDTYMKFSWLTVPEKSLDKEHRCIVRHENNKNGVDQEIIFPPIKTDVITMDPKDNCSKDANDTLLLQLTNTSAYYMYLLLLLKSVVYFAIITCCLLMAMVKRKDSRGRAKRSGSGATNFSLLKQAGDVEENPGPTSMDWIWRILFLVGAATGAHSGPQLQLQESGPGLVKPSETLSLTCTVSGDSISSGDYYWGWIRQPPGKGLEWIGHIYYSGVTYYNPSLKSRVTISVDTSRNQFSLKLSSVTAADTAVYYCTREDSSNWRSRGQGTLVTVSSGSGGGGSGGGGSGGGGSFEEVQLVESGGGLVQPGRSLKLSCAASGFTFSDYNMAWVRQAPKKGLEWVATILYDGGRTYYRGSVKGRFTISRDNAKSTLYLRMDSLRSEDTATYYCATHSRGTDYFDYWGQGVMVTVSSTRIQNPDPAVYQLRDSKSSDKSVCLFTDFDSQTNVSQSKDSDVYITDKCVLDMRSMDFKSNSAVAWSNKSDFACANAFNNSIIPEDTFFPSPESSDSTDHVKPKETENTKQPSKSCHKPKAIVHTEKVNMMSLTVLGLRMLFAKTVAVNFLLTAKLFFLLTA

SEQ ID NO: 15160 - protein, 1003 aa, synthetic construct
MALPVTALLLPLALLLHAARPEVQLVESGGGLVQPGGSLRLSCAASGFSFSDFWMSWVRQAPGKGLEWVATISQAGSEKDYVDSVKGRFTISRDNAKKSLYLQMNSLRAEDTAVYYCASGVYSFDYRGQGTLVTVSSGTGGGGSGGGGSGGGGSEFDIVMTQSPSSLAVSEGETVTINCKSSQSFLSSGDGKNYVAWYQYKPGQSPKLLIYWASTRQSGVPDRFIGSGSGTDFTLTISTVQAEDLAIYYCQQYYDTPLTFGSGTKLEIKLEDLKNVFPPEVAVFEPSEAEISHTQKATLVCLATGFYPDHVELSWWVNGKEVHSGVCTDPQPLKEQPALNDSRYCLSSRLRVSATFWQNPRNHFRCQVQFYGLSENDEWTQDRAKPVTQIVSAEAWGRADDVIKIHWQEKKSNTILGSQEGNTMKTNDTYMKFSWLTVPEKSLDKEHRCIVRHENNKNGVDQEIIFPPIKTDVITMDPKDNCSKDANDTLLLQLTNTSAYYMYLLLLLKSVVYFAIITCCLLMAMVKRKDSRGRAKRSGSGATNFSLLKQAGDVEENPGPTSMDWIWRILFLVGAATGAHSGPQLQLQESGPGLVKPSETLSLTCTVSGDSISSGDYYWGWIRQPPGKGLEWIGHIYYSGVTYYNPSLKSRVTISVDTSRNQFSLKLSSVTAADTAVYYCTREDSSNWRSRGQGTLVTVSSGSGGGGSGGGGSGGGGSFEEVKLQESGPSLVQSSQTLSLTCTVSGFSLTSYHIHWVRQTPGKGLEWMGVMWSDGDTSYNSALKSRLSISRDTSQSQVFLKMNSLQTEDTATYYCARGYYSSYLYLWFAYWGQGTLVTVSSTRIQNPDPAVYQLRDSKSSDKSVCLFTDFDSQTNVSQSKDSDVYITDKCVLDMRSMDFKSNSAVAWSNKSDFACANAFNNSIIPEDTFFPSPESSDSTDHVKPKETENTKQPSKSCHKPKAIVHTEKVNMMSLTVLGLRMLFAKTVAVNFLLTAKLFFLLTA

SEQ ID NO: 15161 - protein, 1007 aa, synthetic construct
MALPVTALLLPLALLLHAARPEVQLVESGGGLVQPGGSLRLSCAASGFSFSDFWMSWVRQAPGKGLEWVATISQAGSEKDYVDSVKGRFTISRDNAKKSLYLQMNSLRAEDTAVYYCASGVYSFDYRGQGTLVTVSSGTGGGGSGGGGSGGGGSEFDVLMTQTPVSLPVSLGGQVSISCRSSQSLVHSDGDTYLHWYLQKPGQSPQLLIYRVSNRFSGVPDRFSGSGSGTDFTLKISRVEPEDLGLYYCLQTTHFPPWTFGGGTKLEMKLEDLKNVFPPEVAVFEPSEAEISHTQKATLVCLATGFYPDHVELSWWVNGKEVHSGVCTDPQPLKEQPALNDSRYCLSSRLRVSATFWQNPRNHFRCQVQFYGLSENDEWTQDRAKPVTQIVSAEAWGRADDVIKIHWQEKKSNTILGSQEGNTMKTNDTYMKFSWLTVPEKSLDKEHRCIVRHENNKNGVDQEIIFPPIKTDVITMDPKDNCSKDANDTLLLQLTNTSAYYMYLLLLLKSVVYFAIITCCLLMAMVKRKDSRGRAKRSGSGATNFSLLKQAGDVEENPGPTSMDWIWRILFLVGAATGAHSGPQLQLQESGPGLVKPSETLSLTCTVSGDSISSGDYYWGWIRQPPGKGLEWIGHIYYSGVTYYNPSLKSRVTISVDTSRNQFSLKLSSVTAADTAVYYCTREDSSNWRSRGQGTLVTVSSGSGGGGSGGGGSGGGGSFEQVQLQQSGPELRRPGSSVRLSCKASGYRIKDFLIHWIKNRPEHGLEWIGWIDPEDGETKYAQKFQTKATLTADTSSNTAYMQLSSLTSEDTATYFCARWGDVYYGLMRGHVMDAWGQGTSVTVSSTRIQNPDPAVYQLRDSKSSDKSVCLFTDFDSQTNVSQSKDSDVYITDKCVLDMRSMDFKSNSAVAWSNKSDFACANAFNNSIIPEDTFFPSPESSDSTDHVKPKETENTKQPSKSCHKPKAIVHTEKVNMMSLTVLGLRMLFAKTVAVNFLLTAKLFFLLTA

SEQ ID NO: 15162 - protein, 1002 aa, synthetic construct
MALPVTALLLPLALLLHAARPEVQLVESGGGLVQPGGSLRLSCAASGFSFSDFWMSWVRQAPGKGLEWVATISQAGSEKDYVDSVKGRFTISRDNAKKSLYLQMNSLRAEDTAVYYCASGVYSFDYRGQGTLVTVSSGTGGGGSGGGGSGGGGSEFDIVMTQSPATLSLSPGERATLSCRSSKSLQNVNGNTYLYWFQQKPGQSPQLLIYRMSNLNSGVPDRFSGSGSGTEFTLTISSLEPEDFAVYYCMQHLEYPITFGAGTKLEIKLEDLKNVFPPEVAVFEPSEAEISHTQKATLVCLATGFYPDHVELSWWVNGKEVHSGVCTDPQPLKEQPALNDSRYCLSSRLRVSATFWQNPRNHFRCQVQFYGLSENDEWTQDRAKPVTQIVSAEAWGRADDVIKIHWQEKKSNTILGSQEGNTMKTNDTYMKFSWLTVPEKSLDKEHRCIVRHENNKNGVDQEIIFPPIKTDVITMDPKDNCSKDANDTLLLQLTNTSAYYMYLLLLLKSVVYFAIITCCLLMAMVKRKDSRGRAKRSGSGATNFSLLKQAGDVEENPGPTSMDWIWRILFLVGAATGAHSGPQLQLQESGPGLVKPSETLSLTCTVSGDSISSGDYYWGWIRQPPGKGLEWIGHIYYSGVTYYNPSLKSRVTISVDTSRNQFSLKLSSVTAADTAVYYCTREDSSNWRSRGQGTLVTVSSGSGGGGSGGGGSGGGGSFEEVQLVESGGGLVKPGGSLKLSCAASGYTFTSYVMHWVRQAPGKGLEWIGYINPYNDGTKYNEKFQGRVTISSDKSISTAYMELSSLRSEDTAMYYCARGTYYYGTRVFDYWGQGTLVTVSSTRIQNPDPAVYQLRDSKSSDKSVCLFTDFDSQTNVSQSKDSDVYITDKCVLDMRSMDFKSNSAVAWSNKSDFACANAFNNSIIPEDTFFPSPESSDSTDHVKPKETENTKQPSKSCHKPKAIVHTEKVNMMSLTVLGLRMLFAKTVAVNFLLTAKLFFLLTA

SEQ ID NO: 15163 - protein, 998 aa, synthetic construct
MALPVTALLLPLALLLHAARPEVQLVESGGGLVQPGGSLRLSCAASGFSFSDFWMSWVRQAPGKGLEWVATISQAGSEKDYVDSVKGRFTISRDNAKKSLYLQMNSLRAEDTAVYYCASGVYSFDYRGQGTLVTVSSGTGGGGSGGGGSGGGGSEFDIQMTQSPSSLSASVGDRVTITCKASDHINNWLAWYQQKPGQAPKLLIYGATTLETGVPSRFSGSGSGTDYTLTISSLQPEDFATYYCQQSWNTPWTFGQGTKLEIKRLEDLKNVFPPEVAVFEPSEAEISHTQKATLVCLATGFYPDHVELSWWVNGKEVHSGVCTDPQPLKEQPALNDSRYCLSSRLRVSATFWQNPRNHFRCQVQFYGLSENDEWTQDRAKPVTQIVSAEAWGRADDVIKIHWQEKKSNTILGSQEGNTMKTNDTYMKFSWLTVPEKSLDKEHRCIVRHENNKNGVDQEIIFPPIKTDVITMDPKDNCSKDANDTLLLQLTNTSAYYMYLLLLLKSVVYFAIITCCLLMAMVKRKDSRGRAKRSGSGATNFSLLKQAGDVEENPGPTSMDWIWRILFLVGAATGAHSGPQLQLQESGPGLVKPSETLSLTCTVSGDSISSGDYYWGWIRQPPGKGLEWIGHIYYSGVTYYNPSLKSRVTISVDTSRNQFSLKLSSVTAADTAVYYCTREDSSNWRSRGQGTLVTVSSGSGGGGSGGGGSGGGGSFEQVQLQQPGAELVKPGASVKMSCKASGYAFSSYWINWMKQKPGQGLEWIGQIYPGDGDTNYNGKFKGRATLTADTSSSTAYMQLSSLTSEDSAVYFCARSITTVVGCAMDYWGQGTSVTVSSTRIQNPDPAVYQLRDSKSSDKSVCLFTDFDSQTNVSQSKDSDVYITDKCVLDMRSMDFKSNSAVAWSNKSDFACANAFNNSIIPEDTFFPSPESSDSTDHVKPKETENTKQPSKSCHKPKAIVHTEKVNMMSLTVLGLRMLFAKTVAVNFLLTAKLFFLLTA

SEQ ID NO: 15164 - protein, 1000 aa, synthetic construct
MALPVTALLLPLALLLHAARPEVQLVESGGGLVQPGGSLRLSCAASGFSFSDFWMSWVRQAPGKGLEWVATISQAGSEKDYVDSVKGRFTISRDNAKKSLYLQMNSLRAEDTAVYYCASGVYSFDYRGQGTLVTVSSGTGGGGSGGGGSGGGGSEFQIVLSQSPAILSASPGEKVTMTCRASSSVSYMHWYQQKPGSSPKPWIYATSNLASGVPARFSGSGSGTSYSFTISRVEAEDAATYYCQQWTFNPPTFGGGTRLEIKRTVAALEDLKNVFPPEVAVFEPSEAEISHTQKATLVCLATGFYPDHVELSWWVNGKEVHSGVCTDPQPLKEQPALNDSRYCLSSRLRVSATFWQNPRNHFRCQVQFYGLSENDEWTQDRAKPVTQIVSAEAWGRADDVIKIHWQEKKSNTILGSQEGNTMKTNDTYMKFSWLTVPEKSLDKEHRCIVRHENNKNGVDQEIIFPPIKTDVITMDPKDNCSKDANDTLLLQLTNTSAYYMYLLLLLKSVVYFAIITCCLLMAMVKRKDSRGRAKRSGSGATNFSLLKQAGDVEENPGPTSMDWIWRILFLVGAATGAHSGPQLQLQESGPGLVKPSETLSLTCTVSGDSISSGDYYWGWIRQPPGKGLEWIGHIYYSGVTYYNPSLKSRVTISVDTSRNQFSLKLSSVTAADTAVYYCTREDSSNWRSRGQGTLVTVSSGSGGGGSGGGGSGGGGSFEQAYLQQSGAELVRPGASVKMSCKASGYTFTSYNMHWVKQTPRQGLEWIGGIYPGNGDTSYNQKFKGKATLTVGKSSSTAYMQLSSLTSEDSAVYFCARYDYNYAMDYWGQGTSVTVSSASTRIQNPDPAVYQLRDSKSSDKSVCLFTDFDSQTNVSQSKDSDVYITDKCVLDMRSMDFKSNSAVAWSNKSDFACANAFNNSIIPEDTFFPSPESSDSTDHVKPKETENTKQPSKSCHKPKAIVHTEKVNMMSLTVLGLRMLFAKTVAVNFLLTAKLFFLLTA

SEQ ID NO: 15165 - protein, 998 aa, synthetic construct
MALPVTALLLPLALLLHAARPEVQLVESGGGLVQPGGSLRLSCAASGFSFSDFWMSWVRQAPGKGLEWVATISQAGSEKDYVDSVKGRFTISRDNAKKSLYLQMNSLRAEDTAVYYCASGVYSFDYRGQGTLVTVSSGTGGGGSGGGGSGGGGSEFEIVLTQSPATLSLSPGERATLSCRASQSVSSYLAWYQQKPGQAPRLLIYDASNRATGIPARFSGSGSGTDFTLTISSLEPEDFAVYYCQQRSNWPITFGQGTRLEIKLEDLKNVFPPEVAVFEPSEAEISHTQKATLVCLATGFYPDHVELSWWVNGKEVHSGVCTDPQPLKEQPALNDSRYCLSSRLRVSATFWQNPRNHFRCQVQFYGLSENDEWTQDRAKPVTQIVSAEAWGRADDVIKIHWQEKKSNTILGSQEGNTMKTNDTYMKFSWLTVPEKSLDKEHRCIVRHENNKNGVDQEIIFPPIKTDVITMDPKDNCSKDANDTLLLQLTNTSAYYMYLLLLLKSVVYFAIITCCLLMAMVKRKDSRGRAKRSGSGATNFSLLKQAGDVEENPGPTSMDWIWRILFLVGAATGAHSGPQLQLQESGPGLVKPSETLSLTCTVSGDSISSGDYYWGWIRQPPGKGLEWIGHIYYSGVTYYNPSLKSRVTISVDTSRNQFSLKLSSVTAADTAVYYCTREDSSNWRSRGQGTLVTVSSGSGGGGSGGGGSGGGGSFEEVQLVESGGGLVQPDRSLRLSCAASGFTFHDYAMHWVRQAPGKGLEWVSTISWNSGTIGYADSVKGRFTISRDNAKNSLYLQMNSLRAEDTALYYCAKDIQYGNYYYGMDVWGQGTTVTVSSTRIQNPDPAVYQLRDSKSSDKSVCLFTDFDSQTNVSQSKDSDVYITDKCVLDMRSMDFKSNSAVAWSNKSDFACANAFNNSIIPEDTFFPSPESSDSTDHVKPKETENTKQPSKSCHKPKAIVHTEKVNMMSLTVLGLRMLFAKTVAVNFLLTAKLFFLLTA

SEQ ID NO: 15166 - protein, 993 aa, synthetic construct
MALPVTALLLPLALLLHAARPEVQLVESGGGLVQPGGSLRLSCAASGFSFSDFWMSWVRQAPGKGLEWVATISQAGSEKDYVDSVKGRFTISRDNAKKSLYLQMNSLRAEDTAVYYCASGVYSFDYRGQGTLVTVSSGTGGGGSGGGGSGGGGSEFDIQMTQSPSSLSASVGDRVTINCKASQDINSYLSWFQQKPGKAPKTLIYRANRLVDGVPSRFSGSGSGQDYTLTISSLQPEDFATYYCLQYDEFPLTFGGGTKVEIKLEDLKNVFPPEVAVFEPSEAEISHTQKATLVCLATGFYPDHVELSWWVNGKEVHSGVCTDPQPLKEQPALNDSRYCLSSRLRVSATFWQNPRNHFRCQVQFYGLSENDEWTQDRAKPVTQIVSAEAWGRADDVIKIHWQEKKSNTILGSQEGNTMKTNDTYMKFSWLTVPEKSLDKEHRCIVRHENNKNGVDQEIIFPPIKTDVITMDPKDNCSKDANDTLLLQLTNTSAYYMYLLLLLKSVVYFAIITCCLLMAMVKRKDSRGRAKRSGSGATNFSLLKQAGDVEENPGPTSMDWIWRILFLVGAATGAHSGPQLQLQESGPGLVKPSETLSLTCTVSGDSISSGDYYWGWIRQPPGKGLEWIGHIYYSGVTYYNPSLKSRVTISVDTSRNQFSLKLSSVTAADTAVYYCTREDSSNWRSRGQGTLVTVSSGSGGGGSGGGGSGGGGSFEQVQLVQSGAEVKKPGASVKVSCKASGYTFTNYDINWVRQAPGQGLEWIGWIYPGDGSTKYNEKFKAKATLTADTSTSTAYMELRSLRSDDTAVYYCASGYEDAMDYWGQGTTVTVSSTRIQNPDPAVYQLRDSKSSDKSVCLFTDFDSQTNVSQSKDSDVYITDKCVLDMRSMDFKSNSAVAWSNKSDFACANAFNNSIIPEDTFFPSPESSDSTDHVKPKETENTKQPSKSCHKPKAIVHTEKVNMMSLTVLGLRMLFAKTVAVNFLLTAKLFFLLTA

SEQ ID NO: 15167 - protein, 995 aa, synthetic construct
MALPVTALLLPLALLLHAARPEVQLVESGGGLVQPGGSLRLSCAASGFSFSDFWMSWVRQAPGKGLEWVATISQAGSEKDYVDSVKGRFTISRDNAKKSLYLQMNSLRAEDTAVYYCASGVYSFDYRGQGTLVTVSSGTGGGGSGGGGSGGGGSEFDIVMTQTPLSLSVTPGQPASISCKSSQSLLDGDGKTYLNWLLQKPGQSPQRLIYLVSKLDSGVPDRFSGSGSGTDFTLKISRVEAEDVGVYYCWQGTHFPRTFGQGTKLEIKLEDLKNVFPPEVAVFEPSEAEISHTQKATLVCLATGFYPDHVELSWWVNGKEVHSGVCTDPQPLKEQPALNDSRYCLSSRLRVSATFWQNPRNHFRCQVQFYGLSENDEWTQDRAKPVTQIVSAEAWGRADDVIKIHWQEKKSNTILGSQEGNTMKTNDTYMKFSWLTVPEKSLDKEHRCIVRHENNKNGVDQEIIFPPIKTDVITMDPKDNCSKDANDTLLLQLTNTSAYYMYLLLLLKSVVYFAIITCCLLMAMVKRKDSRGRAKRSGSGATNFSLLKQAGDVEENPGPTSMDWIWRILFLVGAATGAHSGPQLQLQESGPGLVKPSETLSLTCTVSGDSISSGDYYWGWIRQPPGKGLEWIGHIYYSGVTYYNPSLKSRVTISVDTSRNQFSLKLSSVTAADTAVYYCTREDSSNWRSRGQGTLVTVSSGSGGGGSGGGGSGGGGSFEQVQLVQSGAEVKKPGASVKVSCKASGYTFKDTYIHWVRQAPGQGLEWMGRIDPANGNTKYDPKFQGRVTMTRDTSISTAYMELSRLRSDDTAVYYCARRGGVDWGQGTLVTVSSTRIQNPDPAVYQLRDSKSSDKSVCLFTDFDSQTNVSQSKDSDVYITDKCVLDMRSMDFKSNSAVAWSNKSDFACANAFNNSIIPEDTFFPSPESSDSTDHVKPKETENTKQPSKSCHKPKAIVHTEKVNMMSLTVLGLRMLFAKTVAVNFLLTAKLFFLLTA

SEQ ID NO: 15168 - protein, 996 aa, synthetic construct
MALPVTALLLPLALLLHAARPEVQLVESGGGLVQPGGSLRLSCAASGFSFSDFWMSWVRQAPGKGLEWVATISQAGSEKDYVDSVKGRFTISRDNAKKSLYLQMNSLRAEDTAVYYCASGVYSFDYRGQGTLVTVSSGTGGGGSGGGGSGGGGSEFDIQMTQSPSSLSASVGDRVTITCKASQDVSTAVAWFQQKPGKAPKLLIYSPSYRYTGVPSRFSGSGSGTDFTLTISSLQPEDFTYYCQQLYSTPYTFGQGTKVEIKLEDLKNVFPPEVAVFEPSEAEISHTQKATLVCLATGFYPDHVELSWWVNGKEVHSGVCTDPQPLKEQPALNDSRYCLSSRLRVSATFWQNPRNHFRCQVQFYGLSENDEWTQDRAKPVTQIVSAEAWGRADDVIKIHWQEKKSNTILGSQEGNTMKTNDTYMKFSWLTVPEKSLDKEHRCIVRHENNKNGVDQEIIFPPIKTDVITMDPKDNCSKDANDTLLLQLTNTSAYYMYLLLLLKSVVYFAIITCCLLMAMVKRKDSRGRAKRSGSGATNFSLLKQAGDVEENPGPTSMDWIWRILFLVGAATGAHSGPQLQLQESGPGLVKPSETLSLTCTVSGDSISSGDYYWGWIRQPPGKGLEWIGHIYYSGVTYYNPSLKSRVTISVDTSRNQFSLKLSSVTAADTAVYYCTREDSSNWRSRGQGTLVTVSSGSGGGGSGGGGSGGGGSFEEVQLVQSGAEVKKPGASVKVSCKASGYTFTDYYLDVVVRQAPGQGLEWIGRVNPYNGGTIYNQKFKGRVTLTRDTSTSTAYLELSSLRSEDTAVYYCARDHYRYDPLLDYWGQGTLVTVSSTRIQNPDPAVYQLRDSKSSDKSVCLFTDFDSQTNVSQSKDSDVYITDKCVLDMRSMDFKSNSAVAWSNKSDFACANAFNNSIIPEDTFFPSPESSDSTDHVKPKETENTKQPSKSCHKPKAIVHTEKVNMMSLTVLGLRMLFAKTVAVNFLLTAKLFFLLTA

SEQ ID NO: 15169 - protein, 1002 aa, synthetic construct
MALPVTALLLPLALLLHAARPEVQLVESGGGLVQPGGSLRLSCAASGFSFSDFWMSWVRQAPGKGLEWVATISQAGSEKDYVDSVKGRFTISRDNAKKSLYLQMNSLRAEDTAVYYCASGVYSFDYRGQGTLVTVSSGTGGGGSGGGGSGGGGSEFDIQMTQSPSSLSASVGDRVTITCRASQSVSTSSYNYMHWYQQKPGKPPKLLIKYASNLESGVPSRFSGSGSGTDFTLTISSLQPEDFATYYCQHSWEIPLTFGQGTKVEIKLEDLKNVFPPEVAVFEPSEAEISHTQKATLVCLATGFYPDHVELSWWVNGKEVHSGVCTDPQPLKEQPALNDSRYCLSSRLRVSATFWQNPRNHFRCQVQFYGLSENDEWTQDRAKPVTQIVSAEAWGRADDVIKIHWQEKKSNTILGSQEGNTMKTNDTYMKFSWLTVPEKSLDKEHRCIVRHENNKNGVDQEIIFPPIKTDVITMDPKDNCSKDANDTLLLQLTNTSAYYMYLLLLLKSVVYFAIITCCLLMAMVKRKDSRGRAKRSGSGATNFSLLKQAGDVEENPGPTSMDWIWRILFLVGAATGAHSGPQLQLQESGPGLVKPSETLSLTCTVSGDSISSGDYYWGWIRQPPGKGLEWIGHIYYSGVTYYNPSLKSRVTISVDTSRNQFSLKLSSVTAADTAVYYCTREDSSNWRSRGQGTLVTVSSGSGGGGSGGGGSGGGGSFEEVQLVQSGAEVKKPGASVKVSCKASGYSFTDYYMHWVRQAPGQGLEWIGRINPYNGAAFYSQNFKDRVTLTVDTSTSTAYLELSSLRSEDTAVYYCAIERGADLEGYAMDYWGQGTLVTVSSTRIQNPDPAVYQLRDSKSSDKSVCLFTDFDSQTNVSQSKDSDVYITDKCVLDMRSMDFKSNSAVAWSNKSDFACANAFNNSIIPEDTFFPSPESSDSTDHVKPKETENTKQPSKSCHKPKAIVHTEKVNMMSLTVLGLRMLFAKTVAVNFLLTAKLFFLLTA

SEQ ID NO: 15170 - protein, 1000 aa, synthetic construct
MALPVTALLLPLALLLHAARPEVQLVESGGGLVQPGGSLRLSCAASGFSFSDFWMSWVRQAPGKGLEWVATISQAGSEKDYVDSVKGRFTISRDNAKKSLYLQMNSLRAEDTAVYYCASGVYSFDYRGQGTLVTVSSGTGGGGSGGGGSGGGGSEFEIVLTQSPATLSASPGERVTLTCRASSNVISSYVHWYQQKPGSSPRLFLYSTSNLASGVPSRFSGSGSGTDFTFTISSLEAEDAATYYCQQYSGYPLTFGQGTRLEIKLEDLKNVFPPEVAVFEPSEAEISHTQKATLVCLATGFYPDHVELSWWVNGKEVHSGVCTDPQPLKEQPALNDSRYCLSSRLRVSATFWQNPRNHFRCQVQFYGLSENDEWTQDRAKPVTQIVSAEAWGRADDVIKIHWQEKKSNTILGSQEGNTMKTNDTYMKFSWLTVPEKSLDKEHRCIVRHENNKNGVDQEIIFPPIKTDVITMDPKDNCSKDANDTLLLQLTNTSAYYMYLLLLLKSVVYFAIITCCLLMAMVKRKDSRGRAKRSGSGATNFSLLKQAGDVEENPGPTSMDWIWRILFLVGAATGAHSGPQLQLQESGPGLVKPSETLSLTCTVSGDSISSGDYYWGWIRQPPGKGLEWIGHIYYSGVTYYNPSLKSRVTISVDTSRNQFSLKLSSVTAADTAVYYCTREDSSNWRSRGQGTLVTVSSGSGGGGSGGGGSGGGGSFEQVQLQESGPGLVKPSETLSLTCAVSGYSITSAYYWNWIRQPPGKGLEWIGYISYDGRNNYNPSLKNRITINPDTSKNQFSLQLNSVTPEDTAVYYCAREGDYDVGNYYAMDYWGQGTLVTVSSTRIQNPDPAVYQLRDSKSSDKSVCLFTDFDSQTNVSQSKDSDVYITDKCVLDMRSMDFKSNSAVAWSNKSDFACANAFNNSIIPEDTFFPSPESSDSTDHVKPKETENTKQPSKSCHKPKAIVHTEKVNMMSLTVLGLRMLFAKTVAVNFLLTAKLFFLLTA

SEQ ID NO: 15171 - protein, 1000 aa, synthetic construct
MALPVTALLLPLALLLHAARPEVQLVESGGGLVQPGGSLRLSCAASGFSFSDFWMSWVRQAPGKGLEWVATISQAGSEKDYVDSVKGRFTISRDNAKKSLYLQMNSLRAEDTAVYYCASGVYSFDYRGQGTLVTVSSGTGGGGSGGGGSGGGGSEFEIVLTQSPATLSLSPGERATLSCRASSNVISSYVHWYQQKPGQAPRLLIYSTSNLASGIPARFSGSGSGTDFTLTISSLEPEDFAVYYCQQYSGYPLTFGQGTRLEIKLEDLKNVFPPEVAVFEPSEAEISHTQKATLVCLATGFYPDHVELSWWVNGKEVHSGVCTDPQPLKEQPALNDSRYCLSSRLRVSATFWQNPRNHFRCQVQFYGLSENDEWTQDRAKPVTQIVSAEAWGRADDVIKIHWQEKKSNTILGSQEGNTMKTNDTYMKFSWLTVPEKSLDKEHRCIVRHENNKNGVDQEIIFPPIKTDVITMDPKDNCSKDANDTLLLQLTNTSAYYMYLLLLLKSVVYFAIITCCLLMAMVKRKDSRGRAKRSGSGATNFSLLKQAGDVEENPGPTSMDWIWRILFLVGAATGAHSGPQLQLQESGPGLVKPSETLSLTCTVSGDSISSGDYYWGWIRQPPGKGLEWIGHIYYSGVTYYNPSLKSRVTISVDTSRNQFSLKLSSVTAADTAVYYCTREDSSNWRSRGQGTLVTVSSGSGGGGSGGGGSGGGGSFEEVQLVESGGGLVQPGRSLRLSCAASGYSITSAYYWNWVRQAPGKGLEWVSYISYDGRNNYNPSLKNRFTISRDNAKKSLYLQMNSLRAEDTALYYCAKEGDYDVGNYYAMDYWGQGTTVTVSSTRIQNPDPAVYQLRDSKSSDKSVCLFTDFDSQTNVSQSKDSDVYITDKCVLDMRSMDFKSNSAVAWSNKSDFACANAFNNSIIPEDTFFPSPESSDSTDHVKPKETENTKQPSKSCHKPKAIVHTEKVNMMSLTVLGLRMLFAKTVAVNFLLTAKLFFLLTA

SEQ ID NO: 15172 - protein, 999 aa, synthetic construct
MALPVTALLLPLALLLHAARPEVQLVESGGGLVQPGGSLRLSCAASGFSFSDFWMSWVRQAPGKGLEWVATISQAGSEKDYVDSVKGRFTISRDNAKKSLYLQMNSLRAEDTAVYYCASGVYSFDYRGQGTLVTVSSGTGGGGSGGGGSGGGGSEFDVVMTQTPLSLPVSLGDQASISCRSSQSLVHSNGNTYLRWYLQKPGQSPKVLIYKVSNRVSGVPDRFSGSGSGTDFTLKINRVEAEDLGVYFCSQSTHVPWTFGGGTKLEIKLEDLKNVFPPEVAVFEPSEAEISHTQKATLVCLATGFYPDHVELSWWVNGKEVHSGVCTDPQPLKEQPALNDSRYCLSSRLRVSATFWQNPRNHFRCQVQFYGLSENDEWTQDRAKPVTQIVSAEAWGRADDVIKIHWQEKKSNTILGSQEGNTMKTNDTYMKFSWLTVPEKSLDKEHRCIVRHENNKNGVDQEIIFPPIKTDVITMDPKDNCSKDANDTLLLQLTNTSAYYMYLLLLLKSVVYFAIITCCLLMAMVKRKDSRGRAKRSGSGATNFSLLKQAGDVEENPGPTSMDWIWRILFLVGAATGAHSGPQLQLQESGPGLVKPSETLSLTCTVSGDSISSGDYYWGWIRQPPGKGLEWIGHIYYSGVTYYNPSLKSRVTISVDTSRNQFSLKLSSVTAADTAVYYCTREDSSNWRSRGQGTLVTVSSGSGGGGSGGGGSGGGGSFEGVKLDETGGGLVQPGGAMKLSCVTSGFTFGHYWMNWVRQSPEKGLEWVAQFRNKPYNYETYYSDSVKGRFTISRDDSKSSVYLQMNNLRVEDTGIYYCTGASYGMEYLGQGTSVTVSTTRIQNPDPAVYQLRDSKSSDKSVCLFTDFDSQTNVSQSKDSDVYITDKCVLDMRSMDFKSNSAVAWSNKSDFACANAFNNSIIPEDTFFPSPESSDSTDHVKPKETENTKQPSKSCHKPKAIVHTEKVNMMSLTVLGLRMLFAKTVAVNFLLTAKLFFLLTA

SEQ ID NO: 15173 - protein, 1005 aa, synthetic construct
MALPVTALLLPLALLLHAARPEVQLVESGGGLVQPGGSLRLSCAASGFSFSDFWMSWVRQAPGKGLEWVATISQAGSEKDYVDSVKGRFTISRDNAKKSLYLQMNSLRAEDTAVYYCASGVYSFDYRGQGTLVTVSSGTGGGGSGGGGSGGGGSEFQVQLVESGGNLVQPGGSLRLSCAASGFTFGSFSMSWVRQAPGGGLEWVAGLSARSSLTHYADSVKGRFTISRDNAKNSVYLQMNSLRVEDTAVYYCARRSYDSSGYWGHFYSYMDVWGQGTLVTVSLEDLKNVFPPEVAVFEPSEAEISHTQKATLVCLATGFYPDHVELSWWVNGKEVHSGVCTDPQPLKEQPALNDSRYCLSSRLRVSATFWQNPRNHFRCQVQFYGLSENDEWTQDRAKPVTQIVSAEAWGRADDVIKIHWQEKKSNTILGSQEGNTMKTNDTYMKFSWLTVPEKSLDKEHRCIVRHENNKNGVDQEIIFPPIKTDVITMDPKDNCSKDANDTLLLQLTNTSAYYMYLLLLLKSVVYFAIITCCLLMAMVKRKDSRGRAKRSGSGATNFSLLKQAGDVEENPGPTSMDWIWRILFLVGAATGAHSGPQLQLQESGPGLVKPSETLSLTCTVSGDSISSGDYYWGWIRQPPGKGLEWIGHIYYSGVTYYNPSLKSRVTISVDTSRNQFSLKLSSVTAADTAVYYCTREDSSNWRSRGQGTLVTVSSGSGGGGSGGGGSGGGGSFESVLTQPSSVSAAPGQKVTISCSGSTSNIGNNYVSWYQQHPGKAPKLMIYDVSKRPSGVPDRFSGSKSGNSASLDISGLQSEDEADYYCAAWDDSLSEFLFGTGTKLTVLGTRIQNPDPAVYQLRDSKSSDKSVCLFTDFDSQTNVSQSKDSDVYITDKCVLDMRSMDFKSNSAVAWSNKSDFACANAFNNSIIPEDTFFPSPESSDSTDHVKPKETENTKQPSKSCHKPKAIVHTEKVNMMSLTVLGLRMLFAKTVAVNFLLTAKLFFLLTA

SEQ ID NO: 15174 - protein, 1000 aa, synthetic construct
MALPVTALLLPLALLLHAARPEVQLVESGGGLVQPGGSLRLSCAASGFSFSDFWMSWVRQAPGKGLEWVATISQAGSEKDYVDSVKGRFTISRDNAKKSLYLQMNSLRAEDTAVYYCASGVYSFDYRGQGTLVTVSSGTGGGGSGGGGSGGGGSEFDVVMTQSPSSLSASVGDRVTITCQSSLDISHYLNWYQQKPGKAPKLLIYDASNLETGVPSRFSGSGSGTHFTFTISSLQPEDFATYYCQQYDNLPLTFGGGTKLEIKRLEDLKNVFPPEVAVFEPSEAEISHTQKATLVCLATGFYPDHVELSWWVNGKEVHSGVCTDPQPLKEQPALNDSRYCLSSRLRVSATFWQNPRNHFRCQVQFYGLSENDEWTQDRAKPVTQIVSAEAWGRADDVIKIHWQEKKSNTILGSQEGNTMKTNDTYMKFSWLTVPEKSLDKEHRCIVRHENNKNGVDQEIIFPPIKTDVITMDPKDNCSKDANDTLLLQLTNTSAYYMYLLLLLKSVVYFAIITCCLLMAMVKRKDSRGRAKRSGSGATNFSLLKQAGDVEENPGPTSMDWIWRILFLVGAATGAHSGPQLQLQESGPGLVKPSETLSLTCTVSGDSISSGDYYWGWIRQPPGKGLEWIGHIYYSGVTYYNPSLKSRVTISVDTSRNQFSLKLSSVTAADTAVYYCTREDSSNWRSRGQGTLVTVSSGSGGGGSGGGGSGGGGSFEQVQLVQSGGGVVQPGGSLRVSCAASGVTLSDYGMHWVRQAPGKGLEWVAFIRNDGSDKYYADSVKGRFTISRDNSEKTVSLQMSSLRAEDTAVYYCAKNGESGPLDYWYLDLWGRGTLVTVSSTRIQNPDPAVYQLRDSKSSDKSVCLFTDFDSQTNVSQSKDSDVYITDKCVLDMRSMDFKSNSAVAWSNKSDFACANAFNNSIIPEDTFFPSPESSDSTDHVKPKETENTKQPSKSCHKPKAIVHTEKVNMMSLTVLGLRMLFAKTVAVNFLLTAKLFFLLTA

SEQ ID NO: 15175 - protein, 1004 aa, synthetic construct
MALPVTALLLPLALLLHAARPEVQLVESGGGLVQPGGSLRLSCAASGFSFSDFWMSWVRQAPGKGLEWVATISQAGSEKDYVDSVKGRFTISRDNAKKSLYLQMNSLRAEDTAVYYCASGVYSFDYRGQGTLVTVSSGTGGGGSGGGGSGGGGSEFSYELTQPPSVSGTPGQRVAISCSGSSSNIGTRMVTWYQHVPGTAPKLLIFNNNQRPSGVPDRFSASKSGTSASLAIIGLQSDDEADYYCATWDDNVKSYVFGTGTKVTVLGSRLEDLKNVFPPEVAVFEPSEAEISHTQKATLVCLATGFYPDHVELSWWVNGKEVHSGVCTDPQPLKEQPALNDSRYCLSSRLRVSATFWQNPRNHFRCQVQFYGLSENDEWTQDRAKPVTQIVSAEAWGRADDVIKIHWQEKKSNTILGSQEGNTMKTNDTYMKFSWLTVPEKSLDKEHRCIVRHENNKNGVDQEIIFPPIKTDVITMDPKDNCSKDANDTLLLQLTNTSAYYMYLLLLLKSVVYFAIITCCLLMAMVKRKDSRGRAKRSGSGATNFSLLKQAGDVEENPGPTSMDWIWRILFLVGAATGAHSGPQLQLQESGPGLVKPSETLSLTCTVSGDSISSGDYYWGWIRQPPGKGLEWIGHIYYSGVTYYNPSLKSRVTISVDTSRNQFSLKLSSVTAADTAVYYCTREDSSNWRSRGQGTLVTVSSGSGGGGSGGGGSGGGGSFELEMAQVQLQQWGAGLLKPSETLSLTCAVYGGSFSGYYWSWIRQPPGKGLEWIGEINHSGSTNYNPSLKSRVTISVDTSKNQFSLKLSSVTAADTAVYYCARAPQSWYVGDVWGQGTLVTVSSTRIQNPDPAVYQLRDSKSSDKSVCLFTDFDSQTNVSQSKDSDVYITDKCVLDMRSMDFKSNSAVAWSNKSDFACANAFNNSIIPEDTFFPSPESSDSTDHVKPKETENTKQPSKSCHKPKAIVHTEKVNMMSLTVLGLRMLFAKTVAVNFLLTAKLFFLLTA

SEQ ID NO: 15176 - protein, 1001 aa, synthetic construct
MALPVTALLLPLALLLHAARPEVQLVESGGGLVQPGGSLRLSCAASGFSFSDFWMSWVRQAPGKGLEWVATISQAGSEKDYVDSVKGRFTISRDNAKKSLYLQMNSLRAEDTAVYYCASGVYSFDYRGQGTLVTVSSGTGGGGSGGGGSGGGGSEFQSVLTQPPSLSVAPGKTASITCGGNNIGMKSVHWYQQRPGQAPVLVIYYDSDRPSGIPGRFSGSNSGNTATLTISRVEAGDEADYYCQVWDTTGDHPGYVFGTGTKVTVLLEDLKNVFPPEVAVFEPSEAEISHTQKATLVCLATGFYPDHVELSWWVNGKEVHSGVCTDPQPLKEQPALNDSRYCLSSRLRVSATFWQNPRNHFRCQVQFYGLSENDEWTQDRAKPVTQIVSAEAWGRADDVIKIHWQEKKSNTILGSQEGNTMKTNDTYMKFSWLTVPEKSLDKEHRCIVRHENNKNGVDQEIIFPPIKTDVITMDPKDNCSKDANDTLLLQLTNTSAYYMYLLLLLKSVVYFAIITCCLLMAMVKRKDSRGRAKRSGSGATNFSLLKQAGDVEENPGPTSMDWIWRILFLVGAATGAHSGPQLQLQESGPGLVKPSETLSLTCTVSGDSISSGDYYWGWIRQPPGKGLEWIGHIYYSGVTYYNPSLKSRVTISVDTSRNQFSLKLSSVTAADTAVYYCTREDSSNWRSRGQGTLVTVSSGSGGGGSGGGGSGGGGSFEQVQLVQSGAEVKKPGSSVKVSCKASGGTFSSYAISWVRQAPGQGLEWMGGIIPIFGTANYAQKFQGRVTITADESTSTAYMELSSLRSEDTAVYYCARGVYGYSGSAPYDEWGQGTLVTVSSTRIQNPDPAVYQLRDSKSSDKSVCLFTDFDSQTNVSQSKDSDVYITDKCVLDMRSMDFKSNSAVAWSNKSDFACANAFNNSIIPEDTFFPSPESSDSTDHVKPKETENTKQPSKSCHKPKAIVHTEKVNMMSLTVLGLRMLFAKTVAVNFLLTAKLFFLLTA

SEQ ID NO: 15177 - protein, 999 aa, synthetic construct
MALPVTALLLPLALLLHAARPEVQLVESGGGLVQPGGSLRLSCAASGFSFSDFWMSWVRQAPGKGLEWVATISQAGSEKDYVDSVKGRFTISRDNAKKSLYLQMNSLRAEDTAVYYCASGVYSFDYRGQGTLVTVSSGTGGGGSGGGGSGGGGSEFEVQLVESGGGLVQPGRSLRLSCAASGFTFDDYAMHWVRQAPGKGLEWVSGISWNSGSIGYADSVKGRFTISRDNAKNSLYLQMNSLRAEDTALYYCAKDKGGGYYDFWSGSDYWGQGTLVTVSSLEDLKNVFPPEVAVFEPSEAEISHTQKATLVCLATGFYPDHVELSWWVNGKEVHSGVCTDPQPLKEQPALNDSRYCLSSRLRVSATFWQNPRNHFRCQVQFYGLSENDEWTQDRAKPVTQIVSAEAWGRADDVIKIHWQEKKSNTILGSQEGNTMKTNDTYMKFSWLTVPEKSLDKEHRCIVRHENNKNGVDQEIIFPPIKTDVITMDPKDNCSKDANDTLLLQLTNTSAYYMYLLLLLKSVVYFAIITCCLLMAMVKRKDSRGRAKRSGSGATNFSLLKQAGDVEENPGPTSMDWIWRILFLVGAATGAHSGPQLQLQESGPGLVKPSETLSLTCTVSGDSISSGDYYWGWIRQPPGKGLEWIGHIYYSGVTYYNPSLKSRVTISVDTSRNQFSLKLSSVTAADTAVYYCTREDSSNWRSRGQGTLVTVSSGSGGGGSGGGGSGGGGSFESSELTQDPAVSVALGQTVRITCQGDSLRSYYASWYQQKPGQAPVLVIYGKNNRPSGIPDRFSGSSSGNTASLTITGAQAEDEADYYCNSRDSSGWVFGGGTKLTVLTRIQNPDPAVYQLRDSKSSDKSVCLFTDFDSQTNVSQSKDSDVYITDKCVLDMRSMDFKSNSAVAWSNKSDFACANAFNNSIIPEDTFFPSPESSDSTDHVKPKETENTKQPSKSCHKPKAIVHTEKVNMMSLTVLGLRMLFAKTVAVNFLLTAKLFFLLTA

SEQ ID NO: 15178 - protein, 1008 aa, synthetic construct
MALPVTALLLPLALLLHAARPEVQLVESGGGLVQPGGSLRLSCAASGFSFSDFWMSWVRQAPGKGLEWVATISQAGSEKDYVDSVKGRFTISRDNAKKSLYLQMNSLRAEDTAVYYCASGVYSFDYRGQGTLVTVSSGTGGGGSGGGGSGGGGSEFEVQLQQSGPGLVKPSQTLSLTCAISGDSVLSNSDTWNWIRQSPSRGLEWLGRTYHRSTWYDDYASSVRGRVSINVDTSKNQYSLQLNAVTPEDTGVYYCARDRLQDGNSWSDAFDVWGQGTMVTVSSLEDLKNVFPPEVAVFEPSEAEISHTQKATLVCLATGFYPDHVELSWWVNGKEVHSGVCTDPQPLKEQPALNDSRYCLSSRLRVSATFWQNPRNHFRCQVQFYGLSENDEWTQDRAKPVTQIVSAEAWGRADDVIKIHWQEKKSNTILGSQEGNTMKTNDTYMKFSWLTVPEKSLDKEHRCIVRHENNKNGVDQEIIFPPIKTDVITMDPKDNCSKDANDTLLLQLTNTSAYYMYLLLLLKSVVYFAIITCCLLMAMVKRKDSRGRAKRSGSGATNFSLLKQAGDVEENPGPTSMDWIWRILFLVGAATGAHSGPQLQLQESGPGLVKPSETLSLTCTVSGDSISSGDYYWGWIRQPPGKGLEWIGHIYYSGVTYYNPSLKSRVTISVDTSRNQFSLKLSSVTAADTAVYYCTREDSSNWRSRGQGTLVTVSSGSGGGGSGGGGSGGGGSFEQSALTQPASVSGSPGQSITISCTGTSSDVGGYNYVSWYQQHPGKAPKLMIYDVSNRPSGVSNRFSGSKSGNTASLTISGLQAEDEADYYCSSYTSSSTLVYVFGTGTKVTVLTRIQNPDPAVYQLRDSKSSDKSVCLFTDFDSQTNVSQSKDSDVYITDKCVLDMRSMDFKSNSAVAWSNKSDFACANAFNNSIIPEDTFFPSPESSDSTDHVKPKETENTKQPSKSCHKPKAIVHTEKVNMMSLTVLGLRMLFAKTVAVNFLLTAKLFFLLTA

SEQ ID NO: 15179 - protein, 986 aa, synthetic construct
MALPVTALLLPLALLLHAARPEVQLVESGGGLVQPGGSLRLSCAASGFSFSDFWMSWVRQAPGKGLEWVATISQAGSEKDYVDSVKGRFTISRDNAKKSLYLQMNSLRAEDTAVYYCASGVYSFDYRGQGTLVTVSSGTGGGGSGGGGSGGGGSEFQVQLVQSGAEVKKPGASVKVSCKASGYTFTSYDINWVRQATGQGLEWMGWMNPNSGNTGYAQKFQGRVTMTRNTSISTAYMELSSLRSEDTAVYYCARGDSTKVEIKLEDLKNVFPPEVAVFEPSEAEISHTQKATLVCLATGFYPDHVELSWWVNGKEVHSGVCTDPQPLKEQPALNDSRYCLSSRLRVSATFWQNPRNHFRCQVQFYGLSENDEWTQDRAKPVTQIVSAEAWGRADDVIKIHWQEKKSNTILGSQEGNTMKTNDTYMKFSWLTVPEKSLDKEHRCIVRHENNKNGVDQEIIFPPIKTDVITMDPKDNCSKDANDTLLLQLTNTSAYYMYLLLLLKSVVYFAIITCCLLMAMVKRKDSRGRAKRSGSGATNFSLLKQAGDVEENPGPTSMDWIWRILFLVGAATGAHSGPQLQLQESGPGLVKPSETLSLTCTVSGDSISSGDYYWGWIRQPPGKGLEWIGHIYYSGVTYYNPSLKSRVTISVDTSRNQFSLKLSSVTAADTAVYYCTREDSSNWRSRGQGTLVTVSSGSGGGGSGGGGSGGGGSFEQSVLTQPRSVSGSPGQSVTISCTGTSSDVGGYNYVSWYQQHPGEAPKLIIYDADKRPSGISNRFSSGKSGNTASLTISGLQVEDEADYYCCSYAGGSTWVFGGGTKVTVLTRIQNPDPAVYQLRDSKSSDKSVCLFTDFDSQTNVSQSKDSDVYITDKCVLDMRSMDFKSNSAVAWSNKSDFACANAFNNSIIPEDTFFPSPESSDSTDHVKPKETENTKQPSKSCHKPKAIVHTEKVNMMSLTVLGLRMLFAKTVAVNFLLTAKLFFLLTA

SEQ ID NO: 15180 - protein, 1008 aa, synthetic construct
MALPVTALLLPLALLLHAARPEVQLVESGGGLVQPGGSLRLSCAASGFSFSDFWMSWVRQAPGKGLEWVATISQAGSEKDYVDSVKGRFTISRDNAKKSLYLQMNSLRAEDTAVYYCASGVYSFDYRGQGTLVTVSSGTGGGGSGGGGSGGGGSEFEVQLQQSGPGLVKPSQTLSLTCAISGDSVSSNSAAWNWIRQSPSRGLEWLGRTYYRSKWYSDYAVSVKSRITINPDTSKNQFSLQLNSVTPEDTAVYYCARDPYDFWSGYPDAFDIWGQGTMVTVSSLEDLKNVFPPEVAVFEPSEAEISHTQKATLVCLATGFYPDHVELSWWVNGKEVHSGVCTDPQPLKEQPALNDSRYCLSSRLRVSATFWQNPRNHFRCQVQFYGLSENDEWTQDRAKPVTQIVSAEAWGRADDVIKIHWQEKKSNTILGSQEGNTMKTNDTYMKFSWLTVPEKSLDKEHRCIVRHENNKNGVDQEIIFPPIKTDVITMDPKDNCSKDANDTLLLQLTNTSAYYMYLLLLLKSVVYFAIITCCLLMAMVKRKDSRGRAKRSGSGATNFSLLKQAGDVEENPGPTSMDWIWRILFLVGAATGAHSGPQLQLQESGPGLVKPSETLSLTCTVSGDSISSGDYYWGWIRQPPGKGLEWIGHIYYSGVTYYNPSLKSRVTISVDTSRNQFSLKLSSVTAADTAVYYCTREDSSNWRSRGQGTLVTVSSGSGGGGSGGGGSGGGGSFEQSALTQPASVSGSPGQSITISCTGTSSDVGGYNYVSWYQQHPGKAPKVIISEVNNRPSGVSHRFSGSKSGNTASLTISGLQAEDEADYFCSSYTSGRTLYVFGTGSKVTVLGTRIQNPDPAVYQLRDSKSSDKSVCLFTDFDSQTNVSQSKDSDVYITDKCVLDMRSMDFKSNSAVAWSNKSDFACANAFNNSIIPEDTFFPSPESSDSTDHVKPKETENTKQPSKSCHKPKAIVHTEKVNMMSLTVLGLRMLFAKTVAVNFLLTAKLFFLLTA

SEQ ID NO: 15181 - protein, 1007 aa, synthetic construct
MALPVTALLLPLALLLHAARPEVQLVESGGGLVQPGGSLRLSCAASGFSFSDFWMSWVRQAPGKGLEWVATISQAGSEKDYVDSVKGRFTISRDNAKKSLYLQMNSLRAEDTAVYYCASGVYSFDYRGQGTLVTVSSGTGGGGSGGGGSGGGGSEFQSALTQPASASGSPGQSVTISCTGTSSDVGGYNYVSWYQQHPGKAPKLMIYDVSNRPSGVSNRFSGSKSGNTASLTISGLQAEDEADYYCSSYTSSSTLYVFGTGTQLTVLLEDLKNVFPPEVAVFEPSEAEISHTQKATLVCLATGFYPDHVELSWWVNGKEVHSGVCTDPQPLKEQPALNDSRYCLSSRLRVSATFWQNPRNHFRCQVQFYGLSENDEWTQDRAKPVTQIVSAEAWGRADDVIKIHWQEKKSNTILGSQEGNTMKTNDTYMKFSWLTVPEKSLDKEHRCIVRHENNKNGVDQEIIFPPIKTDVITMDPKDNCSKDANDTLLLQLTNTSAYYMYLLLLLKSVVYFAIITCCLLMAMVKRKDSRGRAKRSGSGATNFSLLKQAGDVEENPGPTSMDWIWRILFLVGAATGAHSGPQLQLQESGPGLVKPSETLSLTCTVSGDSISSGDYYWGWIRQPPGKGLEWIGHIYYSGVTYYNPSLKSRVTISVDTSRNQFSLKLSSVTAADTAVYYCTREDSSNWRSRGQGTLVTVSSGSGGGGSGGGGSGGGGSFEEVQLQQSGPGLVKPSQTLSLTCAISGDSMLSNSDTWNWIRQSPSRGLEWLGRTYHRSTWYDDYASSVRGRVSINVDTSKNQYSLQLNAVTPEDTGVYYCARVRLQDGNSWSDAFDVWGQGTMVTVSSTRIQNPDPAVYQLRDSKSSDKSVCLFTDFDSQTNVSQSKDSDVYITDKCVLDMRSMDFKSNSAVAWSNKSDFACANAFNNSIIPEDTFFPSPESSDSTDHVKPKETENTKQPSKSCHKPKAIVHTEKVNMMSLTVLGLRMLFAKTVAVNFLLTAKLFFLLTA

SEQ ID NO: 15182 - protein, 1007 aa, synthetic construct
MALPVTALLLPLALLLHAARPEVQLVESGGGLVQPGGSLRLSCAASGFSFSDFWMSWVRQAPGKGLEWVATISQAGSEKDYVDSVKGRFTISRDNAKKSLYLQMNSLRAEDTAVYYCASGVYSFDYRGQGTLVTVSSGTGGGGSGGGGSGGGGSEFDVMLTQTPLSLPVSLGDQASISCRSSQSILHSTGDTYLEWYLQKPGQSPKLLINKVSNRLSGVPDRFSGSGSGTDFTLKISRVEAEDLGVYYCFQGSHVPWTFGGGTKLEIKRADAAPTVSIFPLEDLKNVFPPEVAVFEPSEAEISHTQKATLVCLATGFYPDHVELSWWVNGKEVHSGVCTDPQPLKEQPALNDSRYCLSSRLRVSATFWQNPRNHFRCQVQFYGLSENDEWTQDRAKPVTQIVSAEAWGRADDVIKIHWQEKKSNTILGSQEGNTMKTNDTYMKFSWLTVPEKSLDKEHRCIVRHENNKNGVDQEIIFPPIKTDVITMDPKDNCSKDANDTLLLQLTNTSAYYMYLLLLLKSVVYFAIITCCLLMAMVKRKDSRGRAKRSGSGATNFSLLKQAGDVEENPGPTSMDWIWRILFLVGAATGAHSGPQLQLQESGPGLVKPSETLSLTCTVSGDSISSGDYYWGWIRQPPGKGLEWIGHIYYSGVTYYNPSLKSRVTISVDTSRNQFSLKLSSVTAADTAVYYCTREDSSNWRSRGQGTLVTVSSGSGGGGSGGGGSGGGGSFEQVKLQQSGPSLVKPGASVKMSCKASGYTFTDFYMKWVKQSHGKSLEWIGDINPNIGDTFYNQKFKGKATLTVDKSSSTAYMQLNSLTSEDSAVYFCSVGYFDVWGAGTTVTVSSTRIQNPDPAVYQLRDSKSSDKSVCLFTDFDSQTNVSQSKDSDVYITDKCVLDMRSMDFKSNSAVAWSNKSDFACANAFNNSIIPEDTFFPSPESSDSTDHVKPKETENTKQPSKSCHKPKAIVHTEKVNMMSLTVLGLRMLFAKTVAVNFLLTAKLFFLLTA

SEQ ID NO: 15183 - protein, 1003 aa, synthetic construct
MALPVTALLLPLALLLHAARPEVQLVESGGGLVQPGGSLRLSCAASGFSFSDFWMSWVRQAPGKGLEWVATISQAGSEKDYVDSVKGRFTISRDNAKKSLYLQMNSLRAEDTAVYYCASGVYSFDYRGQGTLVTVSSGTGGGGSGGGGSGGGGSEFEIVLTQSPATLSLSPGERATLSCRASQSVSIYLAWYQQKPGQAPRLLIYDASNRATGIPARFSGSGSGTDFTLTISSLEPEDFAVYYCQQRSNWPPFTFGPGTKVDIKLEDLKNVFPPEVAVFEPSEAEISHTQKATLVCLATGFYPDHVELSWWVNGKEVHSGVCTDPQPLKEQPALNDSRYCLSSRLRVSATFWQNPRNHFRCQVQFYGLSENDEWTQDRAKPVTQIVSAEAWGRADDVIKIHWQEKKSNTILGSQEGNTMKTNDTYMKFSWLTVPEKSLDKEHRCIVRHENNKNGVDQEIIFPPIKTDVITMDPKDNCSKDANDTLLLQLTNTSAYYMYLLLLLKSVVYFAIITCCLLMAMVKRKDSRGRAKRSGSGATNFSLLKQAGDVEENPGPTSMDWIWRILFLVGAATGAHSGPQLQLQESGPGLVKPSETLSLTCTVSGDSISSGDYYWGWIRQPPGKGLEWIGHIYYSGVTYYNPSLKSRVTISVDTSRNQFSLKLSSVTAADTAVYYCTREDSSNWRSRGQGTLVTVSSGSGGGGSGGGGSGGGGSFEQVQLVESGGGVVQPGRSLRLSCAASGFTFSSYGMHWVRQAPGKGLEWVAVIWDDGSNKYYVDSVKGRFTISRDNSKNTLYLQMNSLRAEDTAVYYCARDDYYGSGSFNSYYGTDVWGQGTTVTVSSTRIQNPDPAVYQLRDSKSSDKSVCLFTDFDSQTNVSQSKDSDVYITDKCVLDMRSMDFKSNSAVAWSNKSDFACANAFNNSIIPEDTFFPSPESSDSTDHVKPKETENTKQPSKSCHKPKAIVHTEKVNMMSLTVLGLRMLFAKTVAVNFLLTAKLFFLLTA

SEQ ID NO: 15184 - protein, 988 aa, synthetic construct
MALPVTALLLPLALLLHAARPEVQLVESGGGLVQPGGSLRLSCAASGFSFSDFWMSWVRQAPGKGLEWVATISQAGSEKDYVDSVKGRFTISRDNAKKSLYLQMNSLRAEDTAVYYCASGVYSFDYRGQGTLVTVSSGTGGGGSGGGGSGGGGSEFDIQMTQSPSSLSASVGDRVTITCRASQGISSWLAWYQQKPEKAPKSLIYAASSLQSGVPSRFSGSGSGTDFTLTISSLQPEDFATYYCQQYNSYPYTFGQGTKLEIKLEDLKNVFPPEVAVFEPSEAEISHTQKATLVCLATGFYPDHVELSWWVNGKEVHSGVCTDPQPLKEQPALNDSRYCLSSRLRVSATFWQNPRNHFRCQVQFYGLSENDEWTQDRAKPVTQIVSAEAWGRADDVIKIHWQEKKSNTILGSQEGNTMKTNDTYMKFSWLTVPEKSLDKEHRCIVRHENNKNGVDQEIIFPPIKTDVITMDPKDNCSKDANDTLLLQLTNTSAYYMYLLLLLKSVVYFAIITCCLLMAMVKRKDSRGRAKRSGSGATNFSLLKQAGDVEENPGPTSMDWIWRILFLVGAATGAHSGPQLQLQESGPGLVKPSETLSLTCTVSGDSISSGDYYWGWIRQPPGKGLEWIGHIYYSGVTYYNPSLKSRVTISVDTSRNQFSLKLSSVTAADTAVYYCTREDSSNWRSRGQGTLVTVSSGSGGGGSGGGGSGGGGSFEEVQLVQSGGGLVHPGGSLRLSCAGSGFTFSTYLMYWVRQAPGKTLEWVSAIGSGGDTYYADSVKGRFTISRDNAKNSLYLQMNSLRAEDMAVYYCARGLGYWGQGTLVTVSSTRIQNPDPAVYQLRDSKSSDKSVCLFTDFDSQTNVSQSKDSDVYITDKCVLDMRSMDFKSNSAVAWSNKSDFACANAFNNSIIPEDTFFPSPESSDSTDHVKPKETENTKQPSKSCHKPKAIVHTEKVNMMSLTVLGLRMLFAKTVAVNFLLTAKLFFLLTA

SEQ ID NO: 15185 - protein, 1007 aa, synthetic construct
MALPVTALLLPLALLLHAARPEVQLVESGGGLVQPGGSLRLSCAASGFSFSDFWMSWVRQAPGKGLEWVATISQAGSEKDYVDSVKGRFTISRDNAKKSLYLQMNSLRAEDTAVYYCASGVYSFDYRGQGTLVTVSSGTGGGGSGGGGSGGGGSEFLPVLTQPPSVSVAPGKTARITCGGNNIGSKSVHWYQQKPGQAPVLVVYDDSDRPSGIPERFSGSNSGNTATLTISRVEAGDEADYYCQVWDSSSDYVVFGGGTKLTVLLEDLKNVFPPEVAVFEPSEAEISHTQKATLVCLATGFYPDHVELSWWVNGKEVHSGVCTDPQPLKEQPALNDSRYCLSSRLRVSATFWQNPRNHFRCQVQFYGLSENDEWTQDRAKPVTQIVSAEAWGRADDVIKIHWQEKKSNTILGSQEGNTMKTNDTYMKFSWLTVPEKSLDKEHRCIVRHENNKNGVDQEIIFPPIKTDVITMDPKDNCSKDANDTLLLQLTNTSAYYMYLLLLLKSVVYFAIITCCLLMAMVKRKDSRGRAKRSGSGATNFSLLKQAGDVEENPGPTSMDWIWRILFLVGAATGAHSGPQLQLQESGPGLVKPSETLSLTCTVSGDSISSGDYYWGWIRQPPGKGLEWIGHIYYSGVTYYNPSLKSRVTISVDTSRNQFSLKLSSVTAADTAVYYCTREDSSNWRSRGQGTLVTVSSGSGGGGSGGGGSGGGGSFEEVQLVQSGAEVKKPGESLKISCKGSGYSFTSYWIGWVRQMPGKGLEWMGIIYPGDSDTRYSPSFQGQVTISADKSISTAYLQWSSLKASDTAMYYCARQVWGWQGGMYPRSNWWYNLDSWGQGTLVTVSSTRIQNPDPAVYQLRDSKSSDKSVCLFTDFDSQTNVSQSKDSDVYITDKCVLDMRSMDFKSNSAVAWSNKSDFACANAFNNSIIPEDTFFPSPESSDSTDHVKPKETENTKQPSKSCHKPKAIVHTEKVNMMSLTVLGLRMLFAKTVAVNFLLTAKLFFLLTA

SEQ ID NO: 15186 - protein, 1000 aa, synthetic construct
MALPVTALLLPLALLLHAARPEVQLVESGGGLVQPGGSLRLSCAASGFSFSDFWMSWVRQAPGKGLEWVATISQAGSEKDYVDSVKGRFTISRDNAKKSLYLQMNSLRAEDTAVYYCASGVYSFDYRGQGTLVTVSSGTGGGGSGGGGSGGGGSEFELVMTQSPASLAVSLGQRATISCRASESVDSYGKSFMHWYQLKPGQPPKLLIYRASNLESGVPARFSGSGSRTDFTLTIDPVEADDAATYYCQQNNEDPWTFGGGTKLEIKLEDLKNVFPPEVAVFEPSEAEISHTQKATLVCLATGFYPDHVELSWWVNGKEVHSGVCTDPQPLKEQPALNDSRYCLSSRLRVSATFWQNPRNHFRCQVQFYGLSENDEWTQDRAKPVTQIVSAEAWGRADDVIKIHWQEKKSNTILGSQEGNTMKTNDTYMKFSWLTVPEKSLDKEHRCIVRHENNKNGVDQEIIFPPIKTDVITMDPKDNCSKDANDTLLLQLTNTSAYYMYLLLLLKSVVYFAIITCCLLMAMVKRKDSRGRAKRSGSGATNFSLLKQAGDVEENPGPTSMDWIWRILFLVGAATGAHSGPQLQLQESGPGLVKPSETLSLTCTVSGDSISSGDYYWGWIRQPPGKGLEWIGHIYYSGVTYYNPSLKSRVTISVDTSRNQFSLKLSSVTAADTAVYYCTREDSSNWRSRGQGTLVTVSSGSGGGGSGGGGSGGGGSFEEVQLEQSGPELVKPGASVKMSCKASGYTFTNYYMKWVKQSHGKSLEWIGDLNPNNGDTFYNQKFKGKATLTVDKSSNTAYMQLNSLTSEDSAVYYCARTGRYEENAMDYWGQGTSVTVSSTRIQNPDPAVYQLRDSKSSDKSVCLFTDFDSQTNVSQSKDSDVYITDKCVLDMRSMDFKSNSAVAWSNKSDFACANAFNNSIIPEDTFFPSPESSDSTDHVKPKETENTKQPSKSCHKPKAIVHTEKVNMMSLTVLGLRMLFAKTVAVNFLLTAKLFFLLTA

SEQ ID NO: 15187 - protein, 994 aa, synthetic construct
MALPVTALLLPLALLLHAARPEVQLVESGGGLVQPGGSLRLSCAASGFSFSDFWMSWVRQAPGKGLEWVATISQAGSEKDYVDSVKGRFTISRDNAKKSLYLQMNSLRAEDTAVYYCASGVYSFDYRGQGTLVTVSSGTGGGGSGGGGSGGGGSEFDVVMTQSPSSLSASVGDRVTITCMASEDIYIRLAWYQQKPGNAPKLLIYAATSLETGVPSRFSGSGSGTDFTLTISSLQPEDFATYYCQQYWSSPWTFGGGTKVEIKLEDLKNVFPPEVAVFEPSEAEISHTQKATLVCLATGFYPDHVELSWWVNGKEVHSGVCTDPQPLKEQPALNDSRYCLSSRLRVSATFWQNPRNHFRCQVQFYGLSENDEWTQDRAKPVTQIVSAEAWGRADDVIKIHWQEKKSNTILGSQEGNTMKTNDTYMKFSWLTVPEKSLDKEHRCIVRHENNKNGVDQEIIFPPIKTDVITMDPKDNCSKDANDTLLLQLTNTSAYYMYLLLLLKSVVYFAIITCCLLMAMVKRKDSRGRAKRSGSGATNFSLLKQAGDVEENPGPTSMDWIWRILFLVGAATGAHSGPQLQLQESGPGLVKPSETLSLTCTVSGDSISSGDYYWGWIRQPPGKGLEWIGHIYYSGVTYYNPSLKSRVTISVDTSRNQFSLKLSSVTAADTAVYYCTREDSSNWRSRGQGTLVTVSSGSGGGGSGGGGSGGGGSFEQVQLQESGPGLVKPSQTLSLTCTVSGYSITSDYTWNWIRQPPGNGLEWIGYITYSGSTSYNPSLKSRVLISVDTSKNQVSLKLSSVTAADTAVYYCARLGRRYTMDYWGQGTTVTVSSTRIQNPDPAVYQLRDSKSSDKSVCLFTDFDSQTNVSQSKDSDVYITDKCVLDMRSMDFKSNSAVAWSNKSDFACANAFNNSIIPEDTFFPSPESSDSTDHVKPKETENTKQPSKSCHKPKAIVHTEKVNMMSLTVLGLRMLFAKTVAVNFLLTAKLFFLLTA

SEQ ID NO: 15188 - protein, 998 aa, synthetic construct; identical to SEQ ID NO: 15051

SEQ ID NO: 15189 - protein, 998 aa, synthetic construct
MALPVTALLLPLALLLHAARPEVQLVESGGGLVQPGGSLRLSCAASGFSFSDFWMSWVRQAPGKGLEWVATISQAGSEKDYVDSVKGRFTISRDNAKKSLYLQMNSLRAEDTAVYYCASGVYSFDYRGQGTLVTVSSGTGGGGSGGGGSGGGGSEFDIVLTQSPATLSLSPGDRATLSCRASESVTILGSHLIYWYQQKPGQAPRLLIQLASNVQTGIPARFSGSGSRTDFTLTISSLEPEDFAVYYCLQSRTIPRTFGQGTKLEIKRLEDLKNVFPPEVAVFEPSEAEISHTQKATLVCLATGFYPDHVELSWWVNGKEVHSGVCTDPQPLKEQPALNDSRYCLSSRLRVSATFWQNPRNHFRCQVQFYGLSENDEWTQDRAKPVTQIVSAEAWGRADDVIKIHWQEKKSNTILGSQEGNTMKTNDTYMKFSWLTVPEKSLDKEHRCIVRHENNKNGVDQEIIFPPIKTDVITMDPKDNCSKDANDTLLLQLTNTSAYYMYLLLLLKSVVYFAIITCCLLMAMVKRKDSRGRAKRSGSGATNFSLLKQAGDVEENPGPTSMDWIWRILFLVGAATGAHSGPQLQLQESGPGLVKPSETLSLTCTVSGDSISSGDYYWGWIRQPPGKGLEWIGHIYYSGVTYYNPSLKSRVTISVDTSRNQFSLKLSSVTAADTAVYYCTREDSSNWRSRGQGTLVTVSSGSGGGGSGGGGSGGGGSFEQVQLVQSGSELKKPGESVKISCKASGYTFTHYSMNWVRQAPGQGLEWMGRINTETGEPLYADDFKGRFVFSLDTSASTAYLQISSLKAEDTAVYYCSNDYLYSLDYWGQGTLVTVSSTRIQNPDPAVYQLRDSKSSDKSVCLFTDFDSQTNVSQSKDSDVYITDKCVLDMRSMDFKSNSAVAWSNKSDFACANAFNNSIIPEDTFFPSPESSDSTDHVKPKETENTKQPSKSCHKPKAIVHTEKVNMMSLTVLGLRMLFAKTVAVNFLLTAKLFFLLTA

SEQ ID NO: 15190 - protein, 999 aa, synthetic construct
MALPVTALLLPLALLLHAARPEVQLVESGGGLVQPGGSLRLSCAASGFSFSDFWMSWVRQAPGKGLEWVATISQAGSEKDYVDSVKGRFTISRDNAKKSLYLQMNSLRAEDTAVYYCASGVYSFDYRGQGTLVTVSSGTGGGGSGGGGSGGGGSEFDIQLTQSPSFLSASVGDRVTITCRASQGISTDLNWYQQKPGKAPKLLIYAASNLESGVPSRFSGSGSGTEFTLTISSLQPEDFATYYCQQSYNWPYTFGGGTKVEIKRLEDLKNVFPPEVAVFEPSEAEISHTQKATLVCLATGFYPDHVELSWWVNGKEVHSGVCTDPQPLKEQPALNDSRYCLSSRLRVSATFWQNPRNHFRCQVQFYGLSENDEWTQDRAKPVTQIVSAEAWGRADDVIKIHWQEKKSNTILGSQEGNTMKTNDTYMKFSWLTVPEKSLDKEHRCIVRHENNKNGVDQEIIFPPIKTDVITMDPKDNCSKDANDTLLLQLTNTSAYYMYLLLLLKSVVYFAIITCCLLMAMVKRKDSRGRAKRSGSGATNFSLLKQAGDVEENPGPTSMDWIWRILFLVGAATGAHSGPQLQLQESGPGLVKPSETLSLTCTVSGDSISSGDYYWGWIRQPPGKGLEWIGHIYYSGVTYYNPSLKSRVTISVDTSRNQFSLKLSSVTAADTAVYYCTREDSSNWRSRGQGTLVTVSSGSGGGGSGGGGSGGGGSFEEVQLVESGGGLVKPGGSLRLSCAASGFTFSNFEMNWVRQAPGKGLEWVSGISSNGRYINYADSVKGRFTISRDNAKNSLYLQMNSLRAEDTAVYYCARVVDFDQDYNGFDYWGQGTLVTVSSTRIQNPDPAVYQLRDSKSSDKSVCLFTDFDSQTNVSQSKDSDVYITDKCVLDMRSMDFKSNSAVAWSNKSDFACANAFNNSIIPEDTFFPSPESSDSTDHVKPKETENTKQPSKSCHKPKAIVHTEKVNMMSLTVLGLRMLFAKTVAVNFLLTAKLFFLLTA

SEQ ID NO: 15191 - protein, 997 aa, synthetic construct
MALPVTALLLPLALLLHAARPEVQLVESGGGLVQPGGSLRLSCAASGFSFSDFWMSWVRQAPGKGLEWVATISQAGSEKDYVDSVKGRFTISRDNAKKSLYLQMNSLRAEDTAVYYCASGVYSFDYRGQGTLVTVSSGTGGGGSGGGGSGGGGSEFDIQLTQSPSFLSASVGDRVTITCSLSLGISTWRDWFPPRLGRGLEPLTYAASTLQSGVPSRFSGSGSGTEFTLTISSLQPEDFATYYCQQLNSYPLTFGGGTKVEIKRLEDLKNVFPPEVAVFEPSEAEISHTQKATLVCLATGFYPDHVELSWWVNGKEVHSGVCTDPQPLKEQPALNDSRYCLSSRLRVSATFWQNPRNHFRCQVQFYGLSENDEWTQDRAKPVTQIVSAEAWGRADDVIKIHWQEKKSNTILGSQEGNTMKTNDTYMKFSWLTVPEKSLDKEHRCIVRHENNKNGVDQEIIFPPIKTDVITMDPKDNCSKDANDTLLLQLTNTSAYYMYLLLLLKSVVYFAIITCCLLMAMVKRKDSRGRAKRSGSGATNFSLLKQAGDVEENPGPTSMDWIWRILFLVGAATGAHSGPQLQLQESGPGLVKPSETLSLTCTVSGDSISSGDYYWGWIRQPPGKGLEWIGHIYYSGVTYYNPSLKSRVTISVDTSRNQFSLKLSSVTAADTAVYYCTREDSSNWRSRGQGTLVTVSSGSGGGGSGGGGSGGGGSFEEVQLVESGGGLVKPGGSLRLSCAASGFTFSTYGMSWVRQAPGKGLEWVAYINNGSGYIYYADSVKGRFTISRDNAKNSLYLQMNSLRAEDTAVYYCARGQWWSGGDFDYWGQGTLVTVSSTRIQNPDPAVYQLRDSKSSDKSVCLFTDFDSQTNVSQSKDSDVYITDKCVLDMRSMDFKSNSAVAWSNKSDFACANAFNNSIIPEDTFFPSPESSDSTDHVKPKETENTKQPSKSCHKPKAIVHTEKVNMMSLTVLGLRMLFAKTVAVNFLLTAKLFFLLTA

SEQ ID NO: 15192 - protein, 998 aa, synthetic construct
MALPVTALLLPLALLLHAARPEVQLVESGGGLVQPGGSLRLSCAASGFSFSDFWMSWVRQAPGKGLEWVATISQAGSEKDYVDSVKGRFTISRDNAKKSLYLQMNSLRAEDTAVYYCASGVYSFDYRGQGTLVTVSSGTGGGGSGGGGSGGGGSEFEIVLTQSPATLSLSPGERATLSCSASSSVSYMYWYQQKPGQAPRLLIYRTSNLASGIPARFSGSGSGTDFTLTISSLEPEDFAVYYCQQYHSYPTTFGQGTKVEIKRTVLEDLKNVFPPEVAVFEPSEAEISHTQKATLVCLATGFYPDHVELSWWVNGKEVHSGVCTDPQPLKEQPALNDSRYCLSSRLRVSATFWQNPRNHFRCQVQFYGLSENDEWTQDRAKPVTQIVSAEAWGRADDVIKIHWQEKKSNTILGSQEGNTMKTNDTYMKFSWLTVPEKSLDKEHRCIVRHENNKNGVDQEIIFPPIKTDVITMDPKDNCSKDANDTLLLQLTNTSAYYMYLLLLLKSVVYFAIITCCLLMAMVKRKDSRGRAKRSGSGATNFSLLKQAGDVEENPGPTSMDWIWRILFLVGAATGAHSGPQLQLQESGPGLVKPSETLSLTCTVSGDSISSGDYYWGWIRQPPGKGLEWIGHIYYSGVTYYNPSLKSRVTISVDTSRNQFSLKLSSVTAADTAVYYCTREDSSNWRSRGQGTLVTVSSGSGGGGSGGGGSGGGGSFEEVQLVESGGGLVQPGGSLRLSCAASGFSFNTYAMNWVRQAPGKGLEWVSHIRSKSNNFATYYADSVKDRFTISRDNAKNSLYLQMNSLRAEDTAVYYCARQGGDFPMDYWGQGTLVTVSSTRIQNPDPAVYQLRDSKSSDKSVCLFTDFDSQTNVSQSKDSDVYITDKCVLDMRSMDFKSNSAVAWSNKSDFACANAFNNSIIPEDTFFPSPESSDSTDHVKPKETENTKQPSKSCHKPKAIVHTEKVNMMSLTVLGLRMLFAKTVAVNFLLTAKLFFLLTA

SEQ ID NO: 15193 - protein, 994 aa, synthetic construct
MALPVTALLLPLALLLHAARPEVQLVESGGGLVQPGGSLRLSCAASGFSFSDFWMSWVRQAPGKGLEWVATISQAGSEKDYVDSVKGRFTISRDNAKKSLYLQMNSLRAEDTAVYYCASGVYSFDYRGQGTLVTVSSGTGGGGSGGGGSGGGGSEFDVVMTQSPSSLSASVGDRVTITCKASEDIYIRLAWYQQKPGKAPKLLIYAATSLETGVPSRFSGSGSGTDFTLTISSLQPEDFATYYCQQYWTTPWTFGGGTKVEIKLEDLKNVFPPEVAVFEPSEAEISHTQKATLVCLATGFYPDHVELSWWVNGKEVHSGVCTDPQPLKEQPALNDSRYCLSSRLRVSATFWQNPRNHFRCQVQFYGLSENDEWTQDRAKPVTQIVSAEAWGRADDVIKIHWQEKKSNTILGSQEGNTMKTNDTYMKFSWLTVPEKSLDKEHRCIVRHENNKNGVDQEIIFPPIKTDVITMDPKDNCSKDANDTLLLQLTNTSAYYMYLLLLLKSVVYFAIITCCLLMAMVKRKDSRGRAKRSGSGATNFSLLKQAGDVEENPGPTSMDWIWRILFLVGAATGAHSGPQLQLQESGPGLVKPSETLSLTCTVSGDSISSGDYYWGWIRQPPGKGLEWIGHIYYSGVTYYNPSLKSRVTISVDTSRNQFSLKLSSVTAADTAVYYCTREDSSNWRSRGQGTLVTVSSGSGGGGSGGGGSGGGGSFEQVQLQESGPGLVKPSQTLSLTCTVSGYSITIDYTWNWIRQPPGKGLEWIGYITYSGSTDYNPSLKSRVLISVDTSKNQVSLKLSSVTAADTAVYYCARLGRRYALDYWGQGTTVTVSSTRIQNPDPAVYQLRDSKSSDKSVCLFTDFDSQTNVSQSKDSDVYITDKCVLDMRSMDFKSNSAVAWSNKSDFACANAFNNSIIPEDTFFPSPESSDSTDHVKPKETENTKQPSKSCHKPKAIVHTEKVNMMSLTVLGLRMLFAKTVAVNFLLTAKLFFLLTA

SEQ ID NO: 15194 - protein, 999 aa, synthetic construct
MALPVTALLLPLALLLHAARPEVQLVESGGGLVQPGGSLRLSCAASGFSFSDFWMSWVRQAPGKGLEWVATISQAGSEKDYVDSVKGRFTISRDNAKKSLYLQMNSLRAEDTAVYYCASGVYSFDYRGQGTLVTVSSGTGGGGSGGGGSGGGGSEFDIQMTQTTSSLSASLGDRVTISCRASQDISNYLNWYQQKPDGTVKLLIYYTSILHSGVPSRFSGSGSGTDYSLTISNLEQEDFATYFCQQGNTLPWTFGGGTKLEIKALEDLKNVFPPEVAVFEPSEAEISHTQKATLVCLATGFYPDHVELSWWVNGKEVHSGVCTDPQPLKEQPALNDSRYCLSSRLRVSATFWQNPRNHFRCQVQFYGLSENDEWTQDRAKPVTQIVSAEAWGRADDVIKIHWQEKKSNTILGSQEGNTMKTNDTYMKFSWLTVPEKSLDKEHRCIVRHENNKNGVDQEIIFPPIKTDVITMDPKDNCSKDANDTLLLQLTNTSAYYMYLLLLLKSVVYFAIITCCLLMAMVKRKDSRGRAKRSGSGATNFSLLKQAGDVEENPGPTSMDWIWRILFLVGAATGAHSGPQLQLQESGPGLVKPSETLSLTCTVSGDSISSGDYYWGWIRQPPGKGLEWIGHIYYSGVTYYNPSLKSRVTISVDTSRNQFSLKLSSVTAADTAVYYCTREDSSNWRSRGQGTLVTVSSGSGGGGSGGGGSGGGGSFEEVQLVESGGGLVKPGGSLKLSCAASGFAFSIYDMSWVRQTPEKRLEWVAYISSGGGTYYPDTVKGRFTISRDNAKNTLYLQMSSLKSEDTAMYYCARHSGYGTHWGVLFAYWGQGTLVTVSATRIQNPDPAVYQLRDSKSSDKSVCLFTDFDSQTNVSQSKDSDVYITDKCVLDMRSMDFKSNSAVAWSNKSDFACANAFNNSIIPEDTFFPSPESSDSTDHVKPKETENTKQPSKSCHKPKAIVHTEKVNMMSLTVLGLRMLFAKTVAVNFLLTAKLFFLLTA

SEQ ID NO: 15195 - protein, 1009 aa, synthetic construct
MALPVTALLLPLALLLHAARPEVQLVESGGGLVQPGGSLRLSCAASGFSFSDFWMSWVRQAPGKGLEWVATISQAGSEKDYVDSVKGRFTISRDNAKKSLYLQMNSLRAEDTAVYYCASGVYSFDYRGQGTLVTVSSGTGGGGSGGGGSGGGGSEFDIVMTQSPDSLAVSLGERATINCKSSQSLLYRSNQKNYLAWYQQKPGQPPKLLIYWASTRESGVPDRFSGSGSGTDFTLTISSLQAEDVAVYYCQQYYNYPRTFGQGTKVEIKRTVLEDLKNVFPPEVAVFEPSEAEISHTQKATLVCLATGFYPDHVELSWWVNGKEVHSGVCTDPQPLKEQPALNDSRYCLSSRLRVSATFWQNPRNHFRCQVQFYGLSENDEWTQDRAKPVTQIVSAEAWGRADDVIKIHWQEKKSNTILGSQEGNTMKTNDTYMKFSWLTVPEKSLDKEHRCIVRHENNKNGVDQEIIFPPIKTDVITMDPKDNCSKDANDTLLLQLTNTSAYYMYLLLLLKSVVYFAIITCCLLMAMVKRKDSRGRAKRSGSGATNFSLLKQAGDVEENPGPTSMDWIWRILFLVGAATGAHSGPQLQLQESGPGLVKPSETLSLTCTVSGDSISSGDYYWGWIRQPPGKGLEWIGHIYYSGVTYYNPSLKSRVTISVDTSRNQFSLKLSSVTAADTAVYYCTREDSSNWRSRGQGTLVTVSSGSGGGGSGGGGSGGGGSFEEVQLLESGGGLVQPGGSLRLSCAASGYSITSDYAWNWVRQAPGKGLEWVSYISNSGSTSYNPSLKSRFTISRDNSKNTLYLQMNSLRAEDTAVYYCAKERNYDYDDYYYAMDYWGQGTLVTVSSTRIQNPDPAVYQLRDSKSSDKSVCLFTDFDSQTNVSQSKDSDVYITDKCVLDMRSMDFKSNSAVAWSNKSDFACANAFNNSIIPEDTFFPSPESSDSTDHVKPKETENTKQPSKSCHKPKAIVHTEKVNMMSLTVLGLRMLFAKTVAVNFLLTAKLFFLLTA

SEQ ID NO: 15196 - protein, 1002 aa, synthetic construct
MALPVTALLLPLALLLHAARPEVQLVESGGGLVQPGGSLRLSCAASGFSFSDFWMSWVRQAPGKGLEWVATISQAGSEKDYVDSVKGRFTISRDNAKKSLYLQMNSLRAEDTAVYYCASGVYSFDYRGQGTLVTVSSGTGGGGSGGGGSGGGGSEFDVVMTQSPLSLPVTLGQPASISCRSSQSLLHSSGNTYLEWYQQRPGQSPRPLIYKISTRFSGVPDRFSGSGSGTDFTLKISRVEAEDVGVYYCFQGSHVPYTFGGGTKVEIKRLEDLKNVFPPEVAVFEPSEAEISHTQKATLVCLATGFYPDHVELSWWVNGKEVHSGVCTDPQPLKEQPALNDSRYCLSSRLRVSATFWQNPRNHFRCQVQFYGLSENDEWTQDRAKPVTQIVSAEAWGRADDVIKIHWQEKKSNTILGSQEGNTMKTNDTYMKFSWLTVPEKSLDKEHRCIVRHENNKNGVDQEIIFPPIKTDVITMDPKDNCSKDANDTLLLQLTNTSAYYMYLLLLLKSVVYFAIITCCLLMAMVKRKDSRGRAKRSGSGATNFSLLKQAGDVEENPGPTSMDWIWRILFLVGAATGAHSGPQLQLQESGPGLVKPSETLSLTCTVSGDSISSGDYYWGWIRQPPGKGLEWIGHIYYSGVTYYNPSLKSRVTISVDTSRNQFSLKLSSVTAADTAVYYCTREDSSNWRSRGQGTLVTVSSGSGGGGSGGGGSGGGGSFEQVQLVQSGAEVKKPGASVKVSCKASGLTIEDYYMHWVRQAPGQGLEWMGWIDPENGDTEYGPKFQGRVTMTRDTSINTAYMELSRLRSDDTAVYYCAVHNAHYGTWFAYWGQGTLVTVSSTRIQNPDPAVYQLRDSKSSDKSVCLFTDFDSQTNVSQSKDSDVYITDKCVLDMRSMDFKSNSAVAWSNKSDFACANAFNNSIIPEDTFFPSPESSDSTDHVKPKETENTKQPSKSCHKPKAIVHTEKVNMMSLTVLGLRMLFAKTVAVNFLLTAKLFFLLTA

SEQ ID NO: 15197 - protein, 994 aa, synthetic construct
MALPVTALLLPLALLLHAARPEVQLVESGGGLVQPGGSLRLSCAASGFSFSDFWMSWVRQAPGKGLEWVATISQAGSEKDYVDSVKGRFTISRDNAKKSLYLQMNSLRAEDTAVYYCASGVYSFDYRGQGTLVTVSSGTGGGGSGGGGSGGGGSEFDIQMTQSPSSLSASVGDRVTITCRASENIYSNLAWYQQKPGKAPKLLIYAATNLADGVPSRFSGSGSGTDFTLTISSLQPEDFATYYCQHFWGTPTFGQGTKVEIKRTVLEDLKNVFPPEVAVFEPSEAEISHTQKATLVCLATGFYPDHVELSWWVNGKEVHSGVCTDPQPLKEQPALNDSRYCLSSRLRVSATFWQNPRNHFRCQVQFYGLSENDEWTQDRAKPVTQIVSAEAWGRADDVIKIHWQEKKSNTILGSQEGNTMKTNDTYMKFSWLTVPEKSLDKEHRCIVRHENNKNGVDQEIIFPPIKTDVITMDPKDNCSKDANDTLLLQLTNTSAYYMYLLLLLKSVVYFAIITCCLLMAMVKRKDSRGRAKRSGSGATNFSLLKQAGDVEENPGPTSMDWIWRILFLVGAATGAHSGPQLQLQESGPGLVKPSETLSLTCTVSGDSISSGDYYWGWIRQPPGKGLEWIGHIYYSGVTYYNPSLKSRVTISVDTSRNQFSLKLSSVTAADTAVYYCTREDSSNWRSRGQGTLVTVSSGSGGGGSGGGGSGGGGSFEEVQLVESGGGLVQPGGSLRLSCAASGFSLTNYGVHWVRQAPGKGLEWVSVIWSGGSTDYNAAFISRFTISADTSKNTAYLQMNSLRAEDTAVYYCARELIHAMDNWGQGTLVTVSSTRIQNPDPAVYQLRDSKSSDKSVCLFTDFDSQTNVSQSKDSDVYITDKCVLDMRSMDFKSNSAVAWSNKSDFACANAFNNSIIPEDTFFPSPESSDSTDHVKPKETENTKQPSKSCHKPKAIVHTEKVNMMSLTVLGLRMLFAKTVAVNFLLTAKLFFLLTA

SEQ ID NO: 15198 - protein, 1001 aa, synthetic construct
MALPVTALLLPLALLLHAARPEVQLVESGGGLVQPGGSLRLSCAASGFSFSDFWMSWVRQAPGKGLEWVATISQAGSEKDYVDSVKGRFTISRDNAKKSLYLQMNSLRAEDTAVYYCASGVYSFDYRGQGTLVTVSSGTGGGGSGGGGSGGGGSEFDFVMTQSPLSLPVTPGEPASISCRSSQSIVHSNGNTYLEWYLQKPGQSPQLLIYKVSNRFSGVPDRFSGSGSGTDFTLKISRVEAEDVGVYYCFQGSHVPLTFGQGTKLEIKRLEDLKNVFPPEVAVFEPSEAEISHTQKATLVCLATGFYPDHVELSWWVNGKEVHSGVCTDPQPLKEQPALNDSRYCLSSRLRVSATFWQNPRNHFRCQVQFYGLSENDEWTQDRAKPVTQIVSAEAWGRADDVIKIHWQEKKSNTILGSQEGNTMKTNDTYMKFSWLTVPEKSLDKEHRCIVRHENNKNGVDQEIIFPPIKTDVITMDPKDNCSKDANDTLLLQLTNTSAYYMYLLLLLKSVVYFAIITCCLLMAMVKRKDSRGRAKRSGSGATNFSLLKQAGDVEENPGPTSMDWIWRILFLVGAATGAHSGPQLQLQESGPGLVKPSETLSLTCTVSGDSISSGDYYWGWIRQPPGKGLEWIGHIYYSGVTYYNPSLKSRVTISVDTSRNQFSLKLSSVTAADTAVYYCTREDSSNWRSRGQGTLVTVSSGSGGGGSGGGGSGGGGSFEEVQLVESGAEVKKPGASVKVSCKASGYTFTSYWIHWVRQAPGQGLEWMGENDPSNGRTNYNEKFKNRVTLTVDTSISTAYMELSRLRSDDTAVYYCARGPNYFYSMDYWGQGTMVTVSSTRIQNPDPAVYQLRDSKSSDKSVCLFTDFDSQTNVSQSKDSDVYITDKCVLDMRSMDFKSNSAVAWSNKSDFACANAFNNSIIPEDTFFPSPESSDSTDHVKPKETENTKQPSKSCHKPKAIVHTEKVNMMSLTVLGLRMLFAKTVAVNFLLTAKLFFLLTA

SEQ ID NO: 15199 - protein, 994 aa, synthetic construct
MALPVTALLLPLALLLHAARPEVQLVESGGGLVQPGGSLRLSCAASGFSFSDFWMSWVRQAPGKGLEWVATISQAGSEKDYVDSVKGRFTISRDNAKKSLYLQMNSLRAEDTAVYYCASGVYSFDYRGQGTLVTVSSGTGGGGSGGGGSGGGGSEFDIQLTQSPSFLSASVGDRVTITCSARSSISFMYWYQQKPGKAPKLLIYDTSNLASGVPSRFSGSGSGTEFTLTISSLEAEDAATYYCQQWSSYPLTFGQGTKLEIKLEDLKNVFPPEVAVFEPSEAEISHTQKATLVCLATGFYPDHVELSWWVNGKEVHSGVCTDPQPLKEQPALNDSRYCLSSRLRVSATFWQNPRNHFRCQVQFYGLSENDEWTQDRAKPVTQIVSAEAWGRADDVIKIHWQEKKSNTILGSQEGNTMKTNDTYMKFSWLTVPEKSLDKEHRCIVRHENNKNGVDQEIIFPPIKTDVITMDPKDNCSKDANDTLLLQLTNTSAYYMYLLLLLKSVVYFAIITCCLLMAMVKRKDSRGRAKRSGSGATNFSLLKQAGDVEENPGPTSMDWIWRILFLVGAATGAHSGPQLQLQESGPGLVKPSETLSLTCTVSGDSISSGDYYWGWIRQPPGKGLEWIGHIYYSGVTYYNPSLKSRVTISVDTSRNQFSLKLSSVTAADTAVYYCTREDSSNWRSRGQGTLVTVSSGSGGGGSGGGGSGGGGSFEQVQLVQSGAEVKKPGASVKVSCKASGYTFTGSWMNWVRQAPGQGLEWIGRIYPGDGETNYNGKFKDRVTITADKSTSTAYMELSSLRSEDTAVYYCARIYGNNVYFDVWGQGTTVTVSSTRIQNPDPAVYQLRDSKSSDKSVCLFTDFDSQTNVSQSKDSDVYITDKCVLDMRSMDFKSNSAVAWSNKSDFACANAFNNSIIPEDTFFPSPESSDSTDHVKPKETENTKQPSKSCHKPKAIVHTEKVNMMSLTVLGLRMLFAKTVAVNFLLTAKLFFLLTA

SEQ ID NO: 15200 - protein, 1002 aa, synthetic construct
MALPVTALLLPLALLLHAARPEVQLVESGGGLVQPGGSLRLSCAASGFSFSDFWMSWVRQAPGKGLEWVATISQAGSEKDYVDSVKGRFTISRDNAKKSLYLQMNSLRAEDTAVYYCASGVYSFDYRGQGTLVTVSSGTGGGGSGGGGSGGGGSEFQLVLTQSPSASASLGSSVKLTCTLSSGHKTDTIDWYQQQPGKAPRYLMKLEGSGSYNKGSGVPDRFSGSSSGADWYLTISSLQSEDEADYYCGTDYPGNYLFGGGTQLTVLGLEDLKNVFPPEVAVFEPSEAEISHTQKATLVCLATGFYPDHVELSWWVNGKEVHSGVCTDPQPLKEQPALNDSRYCLSSRLRVSATFWQNPRNHFRCQVQFYGLSENDEWTQDRAKPVTQIVSAEAWGRADDVIKIHWQEKKSNTILGSQEGNTMKTNDTYMKFSWLTVPEKSLDKEHRCIVRHENNKNGVDQEIIFPPIKTDVITMDPKDNCSKDANDTLLLQLTNTSAYYMYLLLLLKSVVYFAIITCCLLMAMVKRKDSRGRAKRSGSGATNFSLLKQAGDVEENPGPTSMDWIWRILFLVGAATGAHSGPQLQLQESGPGLVKPSETLSLTCTVSGDSISSGDYYWGWIRQPPGKGLEWIGHIYYSGVTYYNPSLKSRVTISVDTSRNQFSLKLSSVTAADTAVYYCTREDSSNWRSRGQGTLVTVSSGSGGGGSGGGGSGGGGSFEQEQLVESGGGLVQPGGSLRLSCAASGFTFSDYYMSWIRQAPGKGLEWVATIYPSSGKTYYADSAKGRLTISSDNAKDSLYLQMNSLRAEDTAVYYCTRDSYADDAALFDIWGQGTTVTVSSTRIQNPDPAVYQLRDSKSSDKSVCLFTDFDSQTNVSQSKDSDVYITDKCVLDMRSMDFKSNSAVAWSNKSDFACANAFNNSIIPEDTFFPSPESSDSTDHVKPKETENTKQPSKSCHKPKAIVHTEKVNMMSLTVLGLRMLFAKTVAVNFLLTAKLFFLLTA

SEQ ID NO: 15201 - protein, 994 aa, synthetic construct; identical to SEQ ID NO: 15197

SEQ ID NO: 15202 - protein, 1001 aa, synthetic construct; identical to SEQ ID NO: 15198

SEQ ID NO: 15203 - protein, 994 aa, synthetic construct; identical to SEQ ID NO: 15199

SEQ ID NO: 15204 - protein, 1002 aa, synthetic construct; identical to SEQ ID NO: 15200

SEQ ID NO: 15205 - protein, 1001 aa, synthetic construct
MALPVTALLLPLALLLHAARPEVQLVESGGGLVQPGGSLRLSCAASGFSFSDFWMSWVRQAPGKGLEWVATISQAGSEKDYVDSVKGRFTISRDNAKKSLYLQMNSLRAEDTAVYYCASGVYSFDYRGQGTLVTVSSGTGGGGSGGGGSGGGGSEFDIQLTQSPSSLSASVGDRVSFTCQASQDINNFLNWYQQKPGKAPKLLIYDASNLETGVPSRFSGSGSGTDFTFTISSLQPEDIATYYCQQYGNLPFTFGGGTKVEIKRLEDLKNVFPPEVAVFEPSEAEISHTQKATLVCLATGFYPDHVELSWWVNGKEVHSGVCTDPQPLKEQPALNDSRYCLSSRLRVSATFWQNPRNHFRCQVQFYGLSENDEWTQDRAKPVTQIVSAEAWGRADDVIKIHWQEKKSNTILGSQEGNTMKTNDTYMKFSWLTVPEKSLDKEHRCIVRHENNKNGVDQEIIFPPIKTDVITMDPKDNCSKDANDTLLLQLTNTSAYYMYLLLLLKSVVYFAIITCCLLMAMVKRKDSRGRAKRSGSGATNFSLLKQAGDVEENPGPTSMDWIWRILFLVGAATGAHSGPQLQLQESGPGLVKPSETLSLTCTVSGDSISSGDYYWGWIRQPPGKGLEWIGHIYYSGVTYYNPSLKSRVTISVDTSRNQFSLKLSSVTAADTAVYYCTREDSSNWRSRGQGTLVTVSSGSGGGGSGGGGSGGGGSFEQVQLQESGPGLVKPSQTLSLTCTVSGGSISSGGFYWSWIRQHPGKGLEWIGYIHHSGSTHYNPSLKSRVTISIDTSKNLFSLRLSSVTAADTAVYYCASLVYCGGDCYSGFDYWGQGTLVTVSSTRIQNPDPAVYQLRDSKSSDKSVCLFTDFDSQTNVSQSKDSDVYITDKCVLDMRSMDFKSNSAVAWSNKSDFACANAFNNSIIPEDTFFPSPESSDSTDHVKPKETENTKQPSKSCHKPKAIVHTEKVNMMSLTVLGLRMLFAKTVAVNFLLTAKLFFLLTA

SEQ ID NO: 15206 - protein, 997 aa, synthetic construct
MALPVTALLLPLALLLHAARPEVQLVESGGGLVQPGGSLRLSCAASGFSFSDFWMSWVRQAPGKGLEWVATISQAGSEKDYVDSVKGRFTISRDNAKKSLYLQMNSLRAEDTAVYYCASGVYSFDYRGQGTLVTVSSGTGGGGSGGGGSGGGGSEFDIQMTQSPSSLSASVGDRVTITCKSSQSVLYSSNQKNYLAWFQQKPGKAPKLLIYWASTRESGVPSRFSGSGSGTDFTLTISSLQPEDFATYFCHQYLSSYTFGQGTKVEIKRLEDLKNVFPPEVAVFEPSEAEISHTQKATLVCLATGFYPDHVELSWWVNGKEVHSGVCTDPQPLKEQPALNDSRYCLSSRLRVSATFWQNPRNHFRCQVQFYGLSENDEWTQDRAKPVTQIVSAEAWGRADDVIKIHWQEKKSNTILGSQEGNTMKTNDTYMKFSWLTVPEKSLDKEHRCIVRHENNKNGVDQEIIFPPIKTDVITMDPKDNCSKDANDTLLLQLTNTSAYYMYLLLLLKSVVYFAIITCCLLMAMVKRKDSRGRAKRSGSGATNFSLLKQAGDVEENPGPTSMDWIWRILFLVGAATGAHSGPQLQLQESGPGLVKPSETLSLTCTVSGDSISSGDYYWGWIRQPPGKGLEWIGHIYYSGVTYYNPSLKSRVTISVDTSRNQFSLKLSSVTAADTAVYYCTREDSSNWRSRGQGTLVTVSSGSGGGGSGGGGSGGGGSFEEVQLVESGGGLVQPGGSLRLSCAASGYTFTTYWMHWVRQAPGKGLEWVGYIRPSTGYTEYNQKFKDRFTISADTSKNTAYLQMNSLRAEDTAVYYCARSRWLLDYWGQGTLVTVSTRIQNPDPAVYQLRDSKSSDKSVCLFTDFDSQTNVSQSKDSDVYITDKCVLDMRSMDFKSNSAVAWSNKSDFACANAFNNSIIPEDTFFPSPESSDSTDHVKPKETENTKQPSKSCHKPKAIVHTEKVNMMSLTVLGLRMLFAKTVAVNFLLTAKLFFLLTA

SEQ ID NO: 15207 - protein, 994 aa, synthetic construct
MALPVTALLLPLALLLHAARPEVQLVESGGGLVQPGGSLRLSCAASGFSFSDFWMSWVRQAPGKGLEWVATISQAGSEKDYVDSVKGRFTISRDNAKKSLYLQMNSLRAEDTAVYYCASGVYSFDYRGQGTLVTVSSGTGGGGSGGGGSGGGGSEFDIQMTQSPSSLSASVGDRVTITCRASQDISNYLNWYQQKPGKAPKLLIYYTSRLHSGVPSRFSGSGSGTDFTLTISSLQPEDFATYYCQQGNTLPYTFGQGTKVEIKRLEDLKNVFPPEVAVFEPSEAEISHTQKATLVCLATGFYPDHVELSWWVNGKEVHSGVCTDPQPLKEQPALNDSRYCLSSRLRVSATFWQNPRNHFRCQVQFYGLSENDEWTQDRAKPVTQIVSAEAWGRADDVIKIHWQEKKSNTILGSQEGNTMKTNDTYMKFSWLTVPEKSLDKEHRCIVRHENNKNGVDQEIIFPPIKTDVITMDPKDNCSKDANDTLLLQLTNTSAYYMYLLLLLKSVVYFAIITCCLLMAMVKRKDSRGRAKRSGSGATNFSLLKQAGDVEENPGPTSMDWIWRILFLVGAATGAHSGPQLQLQESGPGLVKPSETLSLTCTVSGDSISSGDYYWGWIRQPPGKGLEWIGHIYYSGVTYYNPSLKSRVTISVDTSRNQFSLKLSSVTAADTAVYYCTREDSSNWRSRGQGTLVTVSSGSGGGGSGGGGSGGGGSFEEVQLVESGGGLVQPGGSLRLSCAASGFTFSDYFMSWVRQAPGKGLEWVATISNGGTYTYYPDSVKGRFTISRDNSKNTLYLQMNSLRAEDTAVYYCARFDGYIFDYWGQGTLVTVSSTRIQNPDPAVYQLRDSKSSDKSVCLFTDFDSQTNVSQSKDSDVYITDKCVLDMRSMDFKSNSAVAWSNKSDFACANAFNNSIIPEDTFFPSPESSDSTDHVKPKETENTKQPSKSCHKPKAIVHTEKVNMMSLTVLGLRMLFAKTVAVNFLLTAKLFFLLTA

SEQ ID NO: 15208 - protein, 999 aa, synthetic construct
MALPVTALLLPLALLLHAARPEVQLVESGGGLVQPGGSLRLSCAASGFSFSDFWMSWVRQAPGKGLEWVATISQAGSEKDYVDSVKGRFTISRDNAKKSLYLQMNSLRAEDTAVYYCASGVYSFDYRGQGTLVTVSSGTGGGGSGGGGSGGGGSEFDIQMTQTTSSLSASLGDRVTISCRASQDISKYLNWYQQKPDGTVKLLIYHTSRLHSGVPSRFSGSGSGTDYSLTISNLEQEDIATYFCQQGNTLPYTFGGGTKLEITLEIQNPDPAVYQLRDSKSSDKSVCLFTDFDSQTNVSQSKDSDVYITDKCVLDMRSMDFKSNSAVAWSNKSDFACANAFNNSIIPEDTFFPSPESSDSTDHVKPKETENTKQPSKSCHKPKAIVHTEKVNMMSLTVLGLRMLFAKTVAVNFLLTAKLFFLLTARAKRSGSGVKQTLNFDLLKLAGDVESNPGPTSMDWIWRILFLVGAATGAHSGPQLQLQESGPGLVKPSETLSLTCTVSGDSISSGDYYWGWIRQPPGKGLEWIGHIYYSGVTYYNPSLKSRVTISVDTSRNQFSLKLSSVTAADTAVYYCTREDSSNWRSRGQGTLVTVSSGSGGGGSGGGGSGGGGSFEVKLQESGPGLVAPSQSLSVTCTVSGVSLPDYGVSWIRQPPRKGLEWLGVIWGSETTYYNSALKSRLTIIKDNSKSQVFLKMNSLQTDDTAIYYCAKHYYYGGSYAMDYWGQGTSVTVSSTREDLKNVFPPEVAVFEPSEAEISHTQKATLVCLATGFYPDHVELSWWVNGKEVHSGVCTDPQPLKEQPALNDSRYCLSSRLRVSATFWQNPRNHFRCQVQFYGLSENDEWTQDRAKPVTQIVSAEAWGRADDVIKIHWQEKKSNTILGSQEGNTMKTNDTYMKFSWLTVPEKSLDKEHRCIVRHENNKNGVDQEIIFPPIKTDVITMDPKDNCSKDANDTLLLQLTNTSAYYMYLLLLLKSVVYFAIITCCLLMAMVKRKDSRG

SEQ ID NO: 15209 - protein, 1000 aa, synthetic construct
MALPVTALLLPLALLLHAARPEVQLVESGGGLVQPGGSLRLSCAASGFSFSDFWMSWVRQAPGKGLEWVATISQAGSEKDYVDSVKGRFTISRDNAKKSLYLQMNSLRAEDTAVYYCASGVYSFDYRGQGTLVTVSSGTGGGGSGGGGSGGGGSEFEIVMTQSPATLSLSPGERATLSCRASQDISKYLNWYQQKPGQAPRLLIYHTSRLHSGIPARFSGSGSGTDYTLTISSLQPEDFAVYFCQQGNTLPYTFGQGTKLEIKLEIQNPDPAVYQLRDSKSSDKSVCLFTDFDSQTNVSQSKDSDVYITDKCVLDMRSMDFKSNSAVAWSNKSDFACANAFNNSIIPEDTFFPSPESSDSTDHVKPKETENTKQPSKSCHKPKAIVHTEKVNMMSLTVLGLRMLFAKTVAVNFLLTAKLFFLLTARAKRSGSGVKQTLNFDLLKLAGDVESNPGPTSMDWIWRILFLVGAATGAHSGPQLQLQESGPGLVKPSETLSLTCTVSGDSISSGDYYWGWIRQPPGKGLEWIGHIYYSGVTYYNPSLKSRVTISVDTSRNQFSLKLSSVTAADTAVYYCTREDSSNWRSRGQGTLVTVSSGSGGGGSGGGGSGGGGSFEQVQLQESGPGLVKPSETLSLTCTVSGVSLPDYGVSWIRQPPGKGLEWIGVIWGSETTYYNSSLKSRVTISKDNSKNQVSLKLSSVTAADTAVYYCAKHYYYGGSYAMDYWGQGTLVTVSSTREDLKNVFPPEVAVFEPSEAEISHTQKATLVCLATGFYPDHVELSWWVNGKEVHSGVCTDPQPLKEQPALNDSRYCLSSRLRVSATFWQNPRNHFRCQVQFYGLSENDEWTQDRAKPVTQIVSAEAWGRADDVIKIHWQEKKSNTILGSQEGNTMKTNDTYMKFSWLTVPEKSLDKEHRCIVRHENNKNGVDQEIIFPPIKTDVITMDPKDNCSKDANDTLLLQLTNTSAYYMYLLLLLKSVVYFAIITCCLLMAMVKRKDSRG

SEQ ID NO: 15210 - protein, 1001 aa, synthetic construct
MALPVTALLLPLALLLHAARPEVQLVESGGGLVQPGGSLRLSCAASGFSFSDFWMSWVRQAPGKGLEWVATISQAGSEKDYVDSVKGRFTISRDNAKKSLYLQMNSLRAEDTAVYYCASGVYSFDYRGQGTLVTVSSGTGGGGSGGGGSGGGGSEFDEIVLTQSPATLSLSPGERATLSCSASSSVSYMHWYQQKPGQAPRLLIYDTSKLASGIPARFSGSGSGTDFTLTISSLEPEDVAVYYCFQGSVYPFTFGQGTKLEIKRLEIQNPDPAVYQLRDSKSSDKSVCLFTDFDSQTNVSQSKDSDVYITDKCVLDMRSMDFKSNSAVAWSNKSDFACANAFNNSIIPEDTFFPSPESSDSTDHVKPKETENTKQPSKSCHKPKAIVHTEKVNMMSLTVLGLRMLFAKTVAVNFLLTAKLFFLLTARAKRSGSGVKQTLNFDLLKLAGDVESNPGPTSMDWIWRILFLVGAATGAHSGPQLQLQESGPGLVKPSETLSLTCTVSGDSISSGDYYWGWIRQPPGKGLEWIGHIYYSGVTYYNPSLKSRVTISVDTSRNQFSLKLSSVTAADTAVYYCTREDSSNWRSRGQGTLVTVSSGSGGGGSGGGGSGGGGSFEQVQLQESGPGLVKPSQTLSLTCTVSGGSISTSGMGVGWIRQHPGKGLEWIGHIWWDDDKRYNPALKSRVTISVDTSKNQFSLKLSSVTAADTAVYYCARMELWSYYFDYWGQGTLVTVSSTREDLKNVFPPEVAVFEPSEAEISHTQKATLVCLATGFYPDHVELSWWVNGKEVHSGVCTDPQPLKEQPALNDSRYCLSSRLRVSATFWQNPRNHFRCQVQFYGLSENDEWTQDRAKPVTQIVSAEAWGRADDVIKIHWQEKKSNTILGSQEGNTMKTNDTYMKFSWLTVPEKSLDKEHRCIVRHENNKNGVDQEIIFPPIKTDVITMDPKDNCSKDANDTLLLQLTNTSAYYMYLLLLLKSVVYFAIITCCLLMAMVKRKDSRG

SEQ ID NO: 15211 - protein, 999 aa, synthetic construct
MALPVTALLLPLALLLHAARPEVQLVESGGGLVQPGGSLRLSCAASGFSFSDFWMSWVRQAPGKGLEWVATISQAGSEKDYVDSVKGRFTISRDNAKKSLYLQMNSLRAEDTAVYYCASGVYSFDYRGQGTLVTVSSGTGGGGSGGGGSGGGGSEFDYIHVTQSPSSLSVSIGDRVTINCQTSQGVGSDLHWYQHKPGRAPKLLIHHASSVEDGVPSRFSGTGFHTSFNLTINDLQADDIGTYYCQVLQSFGRGSRLDTKLEIQNPDPAVYQLRDSKSSDKSVCLFTDFDSQTNVSQSKDSDVYITDKCVLDMRSMDFKSNSAVAWSNKSDFACANAFNNSIIPEDTFFPSPESSDSTDHVKPKETENTKQPSKSCHKPKAIVHTEKVNMMSLTVLGLRMLFAKTVAVNFLLTAKLFFLLTARAKRSGSGVKQTLNFDLLKLAGDVESNPGPTSMDWIWRILFLVGAATGAHSGPQLQLQESGPGLVKPSETLSLTCTVSGDSISSGDYYWGWIRQPPGKGLEWIGHIYYSGVTYYNPSLKSRVTISVDTSRNQFSLKLSSVTAADTAVYYCTREDSSNWRSRGQGTLVTVSSGSGGGGSGGGGSGGGGSFERAHLVQSGTAMKKPGASVRVSCQTSGYTFTAHILFWFRQAPGRGLEWVGWIKPQYGAVNFGGGFRDRVTLTRDVYREIAYMDIRGLKPDDTAVYYCARDRSYGDSSWALDAWGQGTTVVVSATREDLKNVFPPEVAVFEPSEAEISHTQKATLVCLATGFYPDHVELSWWVNGKEVHSGVCTDPQPLKEQPALNDSRYCLSSRLRVSATFWQNPRNHFRCQVQFYGLSENDEWTQDRAKPVTQIVSAEAWGRADDVIKIHWQEKKSNTILGSQEGNTMKTNDTYMKFSWLTVPEKSLDKEHRCIVRHENNKNGVDQEIIFPPIKTDVITMDPKDNCSKDANDTLLLQLTNTSAYYMYLLLLLKSVVYFAIITCCLLMAMVKRKDSRG

SEQ ID NO: 15212 - protein, 1009 aa, synthetic construct
MALPVTALLLPLALLLHAARPEVQLVESGGGLVQPGGSLRLSCAASGFSFSDFWMSWVRQAPGKGLEWVATISQAGSEKDYVDSVKGRFTISRDNAKKSLYLQMNSLRAEDTAVYYCASGVYSFDYRGQGTLVTVSSGTGGGGSGGGGSGGGGSEFDVQMIQTPDSLAVSLGQRATISCRASESVDNYGISFMHWYQQKPGQSPKLLIYRASNLESGIPARFSGSGSRTDFTLTINPVETDDVATYYCQQNNKDPPTFGGGTKLEIKLEIQNPDPAVYQLRDSKSSDKSVCLFTDFDSQTNVSQSKDSDVYITDKCVLDMRSMDFKSNSAVAWSNKSDFACANAFNNSIIPEDTFFPSPESSDSTDHVKPKETENTKQPSKSCHKPKAIVHTEKVNMMSLTVLGLRMLFAKTVAVNFLLTAKLFFLLTARAKRSGSGVKQTLNFDLLKLAGDVESNPGPTSMDWIWRILFLVGAATGAHSGPQLQLQESGPGLVKPSETLSLTCTVSGDSISSGDYYWGWIRQPPGKGLEWIGHIYYSGVTYYNPSLKSRVTISVDTSRNQFSLKLSSVTAADTAVYYCTREDSSNWRSRGQGTLVTVSSGSGGGGSGGGGSGGGGSFEGGGGSQVQLQQSGAELVKPGASVKISCKASGYAFSSYWMNWVKQRPGKGLEWIGQIYPGDGDTTYNGKFKGKATLTADKSSSTVYMQLNSLTSEDSAVYFCVRYYYGSSGYFDYWGQGTTLTVSSTREDLKNVFPPEVAVFEPSEAEISHTQKATLVCLATGFYPDHVELSWWVNGKEVHSGVCTDPQPLKEQPALNDSRYCLSSRLRVSATFWQNPRNHFRCQVQFYGLSENDEWTQDRAKPVTQIVSAEAWGRADDVIKIHWQEKKSNTILGSQEGNTMKTNDTYMKFSWLTVPEKSLDKEHRCIVRHENNKNGVDQEIIFPPIKTDVITMDPKDNCSKDANDTLLLQLTNTSAYYMYLLLLLKSVVYFAIITCCLLMAMVKRKDSRG

SEQ ID NO: 15213 - protein, 1000 aa, synthetic construct
MALPVTALLLPLALLLHAARPEVQLVESGGGLVQPGGSLRLSCAASGFSFSDFWMSWVRQAPGKGLEWVATISQAGSEKDYVDSVKGRFTISRDNAKKSLYLQMNSLRAEDTAVYYCASGVYSFDYRGQGTLVTVSSGTGGGGSGGGGSGGGGSEFDVQMIQTPSSLSASLGDRVTISCRASQDIGNYLNWYQQKPDGTVKLLIYYTSRLHSGVPSRFSGSGSGTEYSLTISNLEQEDIATYFCQQGSALPPTFGGGTKLEINLEIQNPDPAVYQLRDSKSSDKSVCLFTDFDSQTNVSQSKDSDVYITDKCVLDMRSMDFKSNSAVAWSNKSDFACANAFNNSIIPEDTFFPSPESSDSTDHVKPKETENTKQPSKSCHKPKAIVHTEKVNMMSLTVLGLRMLFAKTVAVNFLLTAKLFFLLTARAKRSGSGVKQTLNFDLLKLAGDVESNPGPTSMDWIWRILFLVGAATGAHSGPQLQLQESGPGLVKPSETLSLTCTVSGDSISSGDYYWGWIRQPPGKGLEWIGHIYYSGVTYYNPSLKSRVTISVDTSRNQFSLKLSSVTAADTAVYYCTREDSSNWRSRGQGTLVTVSSGSGGGGSGGGGSGGGGSFEALQLQQSGAELVRPGASVTLSCKASGYTFTDYEMHWVKQTPVHGLEWIGAIDPETGGTAYNQKFEGKAILTADKSSSTAYMELRSLTSEDSPVYYCARRRYYGSSSFDYWGQGTTLTVSSTREDLKNVFPPEVAVFEPSEAEISHTQKATLVCLATGFYPDHVELSWWVNGKEVHSGVCTDPQPLKEQPALNDSRYCLSSRLRVSATFWQNPRNHFRCQVQFYGLSENDEWTQDRAKPVTQIVSAEAWGRADDVIKIHWQEKKSNTILGSQEGNTMKTNDTYMKFSWLTVPEKSLDKEHRCIVRHENNKNGVDQEIIFPPIKTDVITMDPKDNCSKDANDTLLLQLTNTSAYYMYLLLLLKSVVYFAIITCCLLMAMVKRKDSRG

SEQ ID NO: 15214 - protein, 1004 aa, synthetic construct
MALPVTALLLPLALLLHAARPEVQLVESGGGLVQPGGSLRLSCAASGFSFSDFWMSWVRQAPGKGLEWVATISQAGSEKDYVDSVKGRFTISRDNAKKSLYLQMNSLRAEDTAVYYCASGVYSFDYRGQGTLVTVSSGTGGGGSGGGGSGGGGSEFDIVLTQSPASLAVSLGQRATISCRASKSVSTSGYSYLHWYQQKPGQPPKLLIYLASNLESGVPARFSGSGSGTDFTLNIHPVEEEDAATYYCQHSRELPFTFGSGTKLEIKLEIQNPDPAVYQLRDSKSSDKSVCLFTDFDSQTNVSQSKDSDVYITDKCVLDMRSMDFKSNSAVAWSNKSDFACANAFNNSIIPEDTFFPSPESSDSTDHVKPKETENTKQPSKSCHKPKAIVHTEKVNMMSLTVLGLRMLFAKTVAVNFLLTAKLFFLLTARAKRSGSGVKQTLNFDLLKLAGDVESNPGPTSMDWIWRILFLVGAATGAHSGPQLQLQESGPGLVKPSETLSLTCTVSGDSISSGDYYWGWIRQPPGKGLEWIGHIYYSGVTYYNPSLKSRVTISVDTSRNQFSLKLSSVTAADTAVYYCTREDSSNWRSRGQGTLVTVSSGSGGGGSGGGGSGGGGSFEQVQLVESGGGLVQPGGSLKLSCAASGFDFSRYWMSWVRQAPGKGLEWIGEINPTSSTINFTPSLKDKVFISRDNAKNTLYLQMSKVRSEDTALYYCARGNYYRYGDAMDYWGQGTSVTVSTREDLKNVFPPEVAVFEPSEAEISHTQKATLVCLATGFYPDHVELSWWVNGKEVHSGVCTDPQPLKEQPALNDSRYCLSSRLRVSATFWQNPRNHFRCQVQFYGLSENDEWTQDRAKPVTQIVSAEAWGRADDVIKIHWQEKKSNTILGSQEGNTMKTNDTYMKFSWLTVPEKSLDKEHRCIVRHENNKNGVDQEIIFPPIKTDVITMDPKDNCSKDANDTLLLQLTNTSAYYMYLLLLLKSVVYFAIITCCLLMAMVKRKDSRG

SEQ ID NO: 15215 - protein, 1002 aa, synthetic construct
MALPVTALLLPLALLLHAARPEVQLVESGGGLVQPGGSLRLSCAASGFSFSDFWMSWVRQAPGKGLEWVATISQAGSEKDYVDSVKGRFTISRDNAKKSLYLQMNSLRAEDTAVYYCASGVYSFDYRGQGTLVTVSSGTGGGGSGGGGSGGGGSEFDIQMTQSPSSLSASVGDRVTITCSASQDISNYLNWYQQKPGKAPKLLIYYTSNLHSGVPSRFSGSGSGTDFTLTISSLQPEDFATYYCQQYRKLPWTFGQGTKLEIKRLEIQNPDPAVYQLRDSKSSDKSVCLFTDFDSQTNVSQSKDSDVYITDKCVLDMRSMDFKSNSAVAWSNKSDFACANAFNNSIIPEDTFFPSPESSDSTDHVKPKETENTKQPSKSCHKPKAIVHTEKVNMMSLTVLGLRMLFAKTVAVNFLLTAKLFFLLTARAKRSGSGVKQTLNFDLLKLAGDVESNPGPTSMDWIWRILFLVGAATGAHSGPQLQLQESGPGLVKPSETLSLTCTVSGDSISSGDYYWGWIRQPPGKGLEWIGHIYYSGVTYYNPSLKSRVTISVDTSRNQFSLKLSSVTAADTAVYYCTREDSSNWRSRGQGTLVTVSSGSGGGGSGGGGSGGGGSFEQVQLVQSGAEVKKPGSSVKVSCKASGGTFSNYWMHWVRQAPGQGLEWMGATYRGHSDTYYNQKFKGRVTITADKSTSTAYMELSSLRSEDTAVYYCARGAIYDGYDVLDNWGQGTLVTVSSTREDLKNVFPPEVAVFEPSEAEISHTQKATLVCLATGFYPDHVELSWWVNGKEVHSGVCTDPQPLKEQPALNDSRYCLSSRLRVSATFWQNPRNHFRCQVQFYGLSENDEWTQDRAKPVTQIVSAEAWGRADDVIKIHWQEKKSNTILGSQEGNTMKTNDTYMKFSWLTVPEKSLDKEHRCIVRHENNKNGVDQEIIFPPIKTDVITMDPKDNCSKDANDTLLLQLTNTSAYYMYLLLLLKSVVYFAIITCCLLMAMVKRKDSRG

SEQ ID NO: 15216 - protein, 1002 aa, synthetic construct
MALPVTALLLPLALLLHAARPEVQLVESGGGLVQPGGSLRLSCAASGFSFSDFWMSWVRQAPGKGLEWVATISQAGSEKDYVDSVKGRFTISRDNAKKSLYLQMNSLRAEDTAVYYCASGVYSFDYRGQGTLVTVSSGTGGGGSGGGGSGGGGSEFDIVLTQSPATLSLSPGDRATISCRASESVTILGSHLIYWYQQKPGQPPRLLIQLASNVQTGVPARFSGSGSRTDFTLTISSVEPEDFAVYYCLQSRTIPRTFGQGTKLEIKRLEIQNPDPAVYQLRDSKSSDKSVCLFTDFDSQTNVSQSKDSDVYITDKCVLDMRSMDFKSNSAVAWSNKSDFACANAFNNSIIPEDTFFPSPESSDSTDHVKPKETENTKQPSKSCHKPKAIVHTEKVNMMSLTVLGLRMLFAKTVAVNFLLTAKLFFLLTARAKRSGSGVKQTLNFDLLKLAGDVESNPGPTSMDWIWRILFLVGAATGAHSGPQLQLQESGPGLVKPSETLSLTCTVSGDSISSGDYYWGWIRQPPGKGLEWIGHIYYSGVTYYNPSLKSRVTISVDTSRNQFSLKLSSVTAADTAVYYCTREDSSNWRSRGQGTLVTVSSGSGGGGSGGGGSGGGGSFEQVQLVQSGPEVKKPGESVKISCKASGYTFRHYSMNWVKQAPGQGLKWMGRINTESGVPIYADDFKGRFSFTVDTSASTAYLEISSLTSEDTAVYFCSNDYLYSLDFWGQGTTLTVSSTREDLKNVFPPEVAVFEPSEAEISHTQKATLVCLATGFYPDHVELSWWVNGKEVHSGVCTDPQPLKEQPALNDSRYCLSSRLRVSATFWQNPRNHFRCQVQFYGLSENDEWTQDRAKPVTQIVSAEAWGRADDVIKIHWQEKKSNTILGSQEGNTMKTNDTYMKFSWLTVPEKSLDKEHRCIVRHENNKNGVDQEIIFPPIKTDVITMDPKDNCSKDANDTLLLQLTNTSAYYMYLLLLLKSVVYFAIITCCLLMAMVKRKDSRG

SEQ ID NO: 15217 - protein, 1003 aa, synthetic construct
MALPVTALLLPLALLLHAARPEVQLVESGGGLVQPGGSLRLSCAASGFSFSDFWMSWVRQAPGKGLEWVATISQAGSEKDYVDSVKGRFTISRDNAKKSLYLQMNSLRAEDTAVYYCASGVYSFDYRGQGTLVTVSSGTGGGGSGGGGSGGGGSEFQSVLTQPPSVSGAPGQRVTISCTGSSSNIGAGFDVHWYQQLPGTAPKLLIYGNSNRPSGVPDRFSGSKSGTSASLAITGLQAEDEADYYCQSYDSSLSGYVFGTGTKVTVLGLEIQNPDPAVYQLRDSKSSDKSVCLFTDFDSQTNVSQSKDSDVYITDKCVLDMRSMDFKSNSAVAWSNKSDFACANAFNNSIIPEDTFFPSPESSDSTDHVKPKETENTKQPSKSCHKPKAIVHTEKVNMMSLTVLGLRMLFAKTVAVNFLLTAKLFFLLTARAKRSGSGVKQTLNFDLLKLAGDVESNPGPTSMDWIWRILFLVGAATGAHSGPQLQLQESGPGLVKPSETLSLTCTVSGDSISSGDYYWGWIRQPPGKGLEWIGHIYYSGVTYYNPSLKSRVTISVDTSRNQFSLKLSSVTAADTAVYYCTREDSSNWRSRGQGTLVTVSSGSGGGGSGGGGSGGGGSFEQVQLVQSGAEVKKPGASVKVSCKASGYTFTDYYMHWVRQAPGQRLEWMGWINPNSGGTNYAQKFQDRITVTRDTSSNTGYMELTRLRSDDTAVYYCARSPYSGVLDKWGQGTLVTVSSTREDLKNVFPPEVAVFEPSEAEISHTQKATLVCLATGFYPDHVELSWWVNGKEVHSGVCTDPQPLKEQPALNDSRYCLSSRLRVSATFWQNPRNHFRCQVQFYGLSENDEWTQDRAKPVTQIVSAEAWGRADDVIKIHWQEKKSNTILGSQEGNTMKTNDTYMKFSWLTVPEKSLDKEHRCIVRHENNKNGVDQEIIFPPIKTDVITMDPKDNCSKDANDTLLLQLTNTSAYYMYLLLLLKSVVYFAIITCCLLMAMVKRKDSRG

SEQ ID NO: 15218 - protein, 1000 aa, synthetic construct
MALPVTALLLPLALLLHAARPEVQLVESGGGLVQPGGSLRLSCAASGFSFSDFWMSWVRQAPGKGLEWVATISQAGSEKDYVDSVKGRFTISRDNAKKSLYLQMNSLRAEDTAVYYCASGVYSFDYRGQGTLVTVSSGTGGGGSGGGGSGGGGSEFQAVLTQPPSASGTPGQRVTISCSGSSSNIGSYTVSWYQQLPGTAPKFLIYSNNQRPSGVPDRFSGSKSGTSASLAISGLQSEDEADYYCAAWDDSLNGYVFGTGTKVTVLGLEIQNPDPAVYQLRDSKSSDKSVCLFTDFDSQTNVSQSKDSDVYITDKCVLDMRSMDFKSNSAVAWSNKSDFACANAFNNSIIPEDTFFPSPESSDSTDHVKPKETENTKQPSKSCHKPKAIVHTEKVNMMSLTVLGLRMLFAKTVAVNFLLTAKLFFLLTARAKRSGSGVKQTLNFDLLKLAGDVESNPGPTSMDWIWRILFLVGAATGAHSGPQLQLQESGPGLVKPSETLSLTCTVSGDSISSGDYYWGWIRQPPGKGLEWIGHIYYSGVTYYNPSLKSRVTISVDTSRNQFSLKLSSVTAADTAVYYCTREDSSNWRSRGQGTLVTVSSGSGGGGSGGGGSGGGGSFEVQLVQSGAEVKKPGESLKISCKGSGYDFTTYWIGWVRQMPGKGLEWMGIIYPGDSDTRYSPSVRGRVTISADKSINTAYLQWSSLEASDTAMYYCARMWTFSQDGWGQGTLVTVSSTREDLKNVFPPEVAVFEPSEAEISHTQKATLVCLATGFYPDHVELSWWVNGKEVHSGVCTDPQPLKEQPALNDSRYCLSSRLRVSATFWQNPRNHFRCQVQFYGLSENDEWTQDRAKPVTQIVSAEAWGRADDVIKIHWQEKKSNTILGSQEGNTMKTNDTYMKFSWLTVPEKSLDKEHRCIVRHENNKNGVDQEIIFPPIKTDVITMDPKDNCSKDANDTLLLQLTNTSAYYMYLLLLLKSVVYFAIITCCLLMAMVKRKDSRG

SEQ ID NO: 15219 - protein, 1003 aa, synthetic construct
MALPVTALLLPLALLLHAARPEVQLVESGGGLVQPGGSLRLSCAASGFSFSDFWMSWVRQAPGKGLEWVATISQAGSEKDYVDSVKGRFTISRDNAKKSLYLQMNSLRAEDTAVYYCASGVYSFDYRGQGTLVTVSSGTGGGGSGGGGSGGGGSEFDIVMTQSPDSLAVSLGERATINCKSSQSILYSSNQKNYLAWYQQKPGQSPKLLIYWASTRESGVPDRFSGSGSGTDFTLTISSLQAEDVAVYYCHQYISSYTFGQGTKLEIKLEIQNPDPAVYQLRDSKSSDKSVCLFTDFDSQTNVSQSKDSDVYITDKCVLDMRSMDFKSNSAVAWSNKSDFACANAFNNSIIPEDTFFPSPESSDSTDHVKPKETENTKQPSKSCHKPKAIVHTEKVNMMSLTVLGLRMLFAKTVAVNFLLTAKLFFLLTARAKRSGSGVKQTLNFDLLKLAGDVESNPGPTSMDWIWRILFLVGAATGAHSGPQLQLQESGPGLVKPSETLSLTCTVSGDSISSGDYYWGWIRQPPGKGLEWIGHIYYSGVTYYNPSLKSRVTISVDTSRNQFSLKLSSVTAADTAVYYCTREDSSNWRSRGQGTLVTVSSGSGGGGSGGGGSGGGGSFEQVQLVQSGAEVKKPGASVKVSCKASGYTFASQWMHWMRQAPGQGLEWIGWINPGNVNTKYNEKFKGRATLTVDTSTNTAYMELSSLRSEDTAVYYCARSTWYRPLDYWGQGTLVTVSSTREDLKNVFPPEVAVFEPSEAEISHTQKATLVCLATGFYPDHVELSWWVNGKEVHSGVCTDPQPLKEQPALNDSRYCLSSRLRVSATFWQNPRNHFRCQVQFYGLSENDEWTQDRAKPVTQIVSAEAWGRADDVIKIHWQEKKSNTILGSQEGNTMKTNDTYMKFSWLTVPEKSLDKEHRCIVRHENNKNGVDQEIIFPPIKTDVITMDPKDNCSKDANDTLLLQLTNTSAYYMYLLLLLKSVVYFAIITCCLLMAMVKRKDSRG

SEQ ID NO: 15220 - protein, 1003 aa, synthetic construct
MALPVTALLLPLALLLHAARPEVQLVESGGGLVQPGGSLRLSCAASGFSFSDFWMSWVRQAPGKGLEWVATISQAGSEKDYVDSVKGRFTISRDNAKKSLYLQMNSLRAEDTAVYYCASGVYSFDYRGQGTLVTVSSGTGGGGSGGGGSGGGGSEFDHIVLTQSPSSLSASLGDRVTISCRASQDISTYLNWYQQKPDGTVKLLIFYTSRLHAGVPSRFSGSGSGTHHSLTISNLEQEDIATYFCQQGNSLPFTFGSGTKLEIKRLEIQNPDPAVYQLRDSKSSDKSVCLFTDFDSQTNVSQSKDSDVYITDKCVLDMRSMDFKSNSAVAWSNKSDFACANAFNNSIIPEDTFFPSPESSDSTDHVKPKETENTKQPSKSCHKPKAIVHTEKVNMMSLTVLGLRMLFAKTVAVNFLLTAKLFFLLTARAKRSGSGVKQTLNFDLLKLAGDVESNPGPTSMDWIWRILFLVGAATGAHSGPQLQLQESGPGLVKPSETLSLTCTVSGDSISSGDYYWGWIRQPPGKGLEWIGHIYYSGVTYYNPSLKSRVTISVDTSRNQFSLKLSSVTAADTAVYYCTREDSSNWRSRGQGTLVTVSSGSGGGGSGGGGSGGGGSFEQVQLKESGPELEKPGASVKISCKASGYSFTAYSMNWVKQNNGMSLEWIGSIDPYYGDTKYAQKFKGKATLTVDKASSTAYLQLKSLTSEDSAVYYCARRMITTGDWYFDVWGAGTTVTVSSTREDLKNVFPPEVAVFEPSEAEISHTQKATLVCLATGFYPDHVELSWWVNGKEVHSGVCTDPQPLKEQPALNDSRYCLSSRLRVSATFWQNPRNHFRCQVQFYGLSENDEWTQDRAKPVTQIVSAEAWGRADDVIKIHWQEKKSNTILGSQEGNTMKTNDTYMKFSWLTVPEKSLDKEHRCIVRHENNKNGVDQEIIFPPIKTDVITMDPKDNCSKDANDTLLLQLTNTSAYYMYLLLLLKSVVYFAIITCCLLMAMVKRKDSRG

SEQ ID NO: 15221 - protein, 1003 aa, synthetic construct; identical to SEQ ID NO: 15220

SEQ ID NO: 15222 - protein, 1003 aa, synthetic construct
MALPVTALLLPLALLLHAARPEVQLVESGGGLVQPGGSLRLSCAASGFSFSDFWMSWVRQAPGKGLEWVATISQAGSEKDYVDSVKGRFTISRDNAKKSLYLQMNSLRAEDTAVYYCASGVYSFDYRGQGTLVTVSSGTGGGGSGGGGSGGGGSEFDEIVLTQSPATLSLSPGERATLSCRASQSVSSYLAWYQQKPGQAPRLLIYDASNRATGIPARFSGSGSGTDFTLTISSLEPEDFAVYYCQQRSNWPITFGQGTRLEIKLEIQNPDPAVYQLRDSKSSDKSVCLFTDFDSQTNVSQSKDSDVYITDKCVLDMRSMDFKSNSAVAWSNKSDFACANAFNNSIIPEDTFFPSPESSDSTDHVKPKETENTKQPSKSCHKPKAIVHTEKVNMMSLTVLGLRMLFAKTVAVNFLLTAKLFFLLTARAKRSGSGVKQTLNFDLLKLAGDVESNPGPTSMDWIWRILFLVGAATGAHSGPQLQLQESGPGLVKPSETLSLTCTVSGDSISSGDYYWGWIRQPPGKGLEWIGHIYYSGVTYYNPSLKSRVTISVDTSRNQFSLKLSSVTAADTAVYYCTREDSSNWRSRGQGTLVTVSSGSGGGGSGGGGSGGGGSFEEVQLVESGGGLVQPGRSLRLSCAASGFTFNDYAMHWVRQAPGKGLEWVSTISWNSGSIGYADSVKGRFTISRDNAKKSLYLQMNSLRAEDTALYYCAKDIQYGNYYYGMDVWGQGTTVTVSSTREDLKNVFPPEVAVFEPSEAEISHTQKATLVCLATGFYPDHVELSWWVNGKEVHSGVCTDPQPLKEQPALNDSRYCLSSRLRVSATFWQNPRNHFRCQVQFYGLSENDEWTQDRAKPVTQIVSAEAWGRADDVIKIHWQEKKSNTILGSQEGNTMKTNDTYMKFSWLTVPEKSLDKEHRCIVRHENNKNGVDQEIIFPPIKTDVITMDPKDNCSKDANDTLLLQLTNTSAYYMYLLLLLKSVVYFAIITCCLLMAMVKRKDSRG

SEQ ID NO: 15223 - protein, 1005 aa, synthetic construct
MALPVTALLLPLALLLHAARPEVQLVESGGGLVQPGGSLRLSCAASGFSFSDFWMSWVRQAPGKGLEWVATISQAGSEKDYVDSVKGRFTISRDNAKKSLYLQMNSLRAEDTAVYYCASGVYSFDYRGQGTLVTVSSGTGGGGSGGGGSGGGGSEFDIVMTQTPLSLPVTPGEPASISCRSSKSLLHSNGITYLYWYLQKPGQSPQLLIYQMSNLVSGVPDRFSGSGSGTDFTLKISRVEAEDVGVYYCAQNLELPYTFGGGTKVEIKRLEIQNPDPAVYQLRDSKSSDKSVCLFTDFDSQTNVSQSKDSDVYITDKCVLDMRSMDFKSNSAVAWSNKSDFACANAFNNSIIPEDTFFPSPESSDSTDHVKPKETENTKQPSKSCHKPKAIVHTEKVNMMSLTVLGLRMLFAKTVAVNFLLTAKLFFLLTARAKRSGSGVKQTLNFDLLKLAGDVESNPGPTSMDWIWRILFLVGAATGAHSGPQLQLQESGPGLVKPSETLSLTCTVSGDSISSGDYYWGWIRQPPGKGLEWIGHIYYSGVTYYNPSLKSRVTISVDTSRNQFSLKLSSVTAADTAVYYCTREDSSNWRSRGQGTLVTVSSGSGGGGSGGGGSGGGGSFEQVQLVQSGAEVKKPGSSVKVSCKASGYAFSYSWINWVRQAPGQGLEWMGRIFPGDGDTDYNGKFKGRVTITADKSTSTAYMELSSLRSEDTAVYYCARNVFDGYWLVYWGQGTLVTVSSTREDLKNVFPPEVAVFEPSEAEISHTQKATLVCLATGFYPDHVELSWWVNGKEVHSGVCTDPQPLKEQPALNDSRYCLSSRLRVSATFWQNPRNHFRCQVQFYGLSENDEWTQDRAKPVTQIVSAEAWGRADDVIKIHWQEKKSNTILGSQEGNTMKTNDTYMKFSWLTVPEKSLDKEHRCIVRHENNKNGVDQEIIFPPIKTDVITMDPKDNCSKDANDTLLLQLTNTSAYYMYLLLLLKSVVYFAIITCCLLMAMVKRKDSRG

SEQ ID NO: 15224 - protein, 1006 aa, synthetic construct
MALPVTALLLPLALLLHAARPEVQLVESGGGLVQPGGSLRLSCAASGFSFSDFWMSWVRQAPGKGLEWVATISQAGSEKDYVDSVKGRFTISRDNAKKSLYLQMNSLRAEDTAVYYCASGVYSFDYRGQGTLVTVSSGTGGGGSGGGGSGGGGSEFDIQMTQSPSSLSASVGDRVTITCRSSQSIVHSVGNTFLEWYQQKPGKAPKLLIYKVSNRFSGVPSRFSGSGSGTDFTLTISSLQPEDFATYYCFQGSQFPYTFGQGTKVEIKRLEIQNPDPAVYQLRDSKSSDKSVCLFTDFDSQTNVSQSKDSDVYITDKCVLDMRSMDFKSNSAVAWSNKSDFACANAFNNSIIPEDTFFPSPESSDSTDHVKPKETENTKQPSKSCHKPKAIVHTEKVNMMSLTVLGLRMLFAKTVAVNFLLTAKLFFLLTARAKRSGSGVKQTLNFDLLKLAGDVESNPGPTSMDWIWRILFLVGAATGAHSGPQLQLQESGPGLVKPSETLSLTCTVSGDSISSGDYYWGWIRQPPGKGLEWIGHIYYSGVTYYNPSLKSRVTISVDTSRNQFSLKLSSVTAADTAVYYCTREDSSNWRSRGQGTLVTVSSGSGGGGSGGGGSGGGGSFEEVQLVESGGGLVQPGGSLRLSCAASGYEFSRSWMNWVRQAPGKGLEWVGRIYPGDGDTNYSGKFKGRFTISADTSKNTAYLQMNSLRAEDTAVYYCARDGSSWDWYFDVWGQGTLVTVSSTREDLKNVFPPEVAVFEPSEAEISHTQKATLVCLATGFYPDHVELSWWVNGKEVHSGVCTDPQPLKEQPALNDSRYCLSSRLRVSATFWQNPRNHFRCQVQFYGLSENDEWTQDRAKPVTQIVSAEAWGRADDVIKIHWQEKKSNTILGSQEGNTMKTNDTYMKFSWLTVPEKSLDKEHRCIVRHENNKNGVDQEIIFPPIKTDVITMDPKDNCSKDANDTLLLQLTNTSAYYMYLLLLLKSVVYFAIITCCLLMAMVKRKDSRG

SEQ ID NO: 15225 - protein, 1004 aa, synthetic construct
MALPVTALLLPLALLLHAARPEVQLVESGGGLVQPGGSLRLSCAASGFSFSDFWMSWVRQAPGKGLEWVATISQAGSEKDYVDSVKGRFTISRDNAKKSLYLQMNSLRAEDTAVYYCASGVYSFDYRGQGTLVTVSSGTGGGGSGGGGSGGGGSEFDIQMTQSPSSLSASVGDRVTITCRASQTIWSYLNWYQQRPGKAPNLLIYAASSLQSGVPSRFSGRGSGTDFTLTISSLQAEDFATYYCQQSYSIPQIFGQGTKLEIKLEIQNPDPAVYQLRDSKSSDKSVCLFTDFDSQTNVSQSKDSDVYITDKCVLDMRSMDFKSNSAVAWSNKSDFACANAFNNSIIPEDTFFPSPESSDSTDHVKPKETENTKQPSKSCHKPKAIVHTEKVNMMSLTVLGLRMLFAKTVAVNFLLTAKLFFLLTARAKRSGSGVKQTLNFDLLKLAGDVESNPGPTSMDWIWRILFLVGAATGAHSGPQLQLQESGPGLVKPSETLSLTCTVSGDSISSGDYYWGWIRQPPGKGLEWIGHIYYSGVTYYNPSLKSRVTISVDTSRNQFSLKLSSVTAADTAVYYCTREDSSNWRSRGQGTLVTVSSGSGGGGSGGGGSGGGGSFEQVQLQQSGPGLVKPSQTLSLTCAISGDSVSSNSAAWNWIRQSPSRGLEWLGRTYYRSKWYNDYAVSVKSRITINPDTSKNQFSLQLNSVTPEDTAVYYCAREVTGDLEDAFDIWGQGTMVTVSSTREDLKNVFPPEVAVFEPSEAEISHTQKATLVCLATGFYPDHVELSWWVNGKEVHSGVCTDPQPLKEQPALNDSRYCLSSRLRVSATFWQNPRNHFRCQVQFYGLSENDEWTQDRAKPVTQIVSAEAWGRADDVIKIHWQEKKSNTILGSQEGNTMKTNDTYMKFSWLTVPEKSLDKEHRCIVRHENNKNGVDQEIIFPPIKTDVITMDPKDNCSKDANDTLLLQLTNTSAYYMYLLLLLKSVVYFAIITCCLLMAMVKRKDSRG

SEQ ID NO: 15226 - protein, 997 aa, synthetic construct
MALPVTALLLPLALLLHAARPEVQLVESGGGLVQPGGSLRLSCAASGFSFSDFWMSWVRQAPGKGLEWVATISQAGSEKDYVDSVKGRFTISRDNAKKSLYLQMNSLRAEDTAVYYCASGVYSFDYRGQGTLVTVSSGTGGGGSGGGGSGGGGSEFDIQMTQSPATIENTSLSASVGDRVTITCRASQGISSWLTWYQQKPEKAPKSLIYAASSLQSGVPSRFSGSGSGTDFTLTISSLQPEDFATYYCQQYDSYPITFGQGTRLEIKLEIQNPDPAVYQLRDSKSSDKSVCLFTDFDSQTNVSQSKDSDVYITDKCVLDMRSMDFKSNSAVAWSNKSDFACANAFNNSIIPEDTFFPSPESSDSTDHVKPKETENTKQPSKSCHKPKAIVHTEKVNMMSLTVLGLRMLFAKTVAVNFLLTAKLFFLLTARAKRSGSGVKQTLNFDLLKLAGDVESNPGPTSMDWIWRILFLVGAATGAHSGPQLQLQESGPGLVKPSETLSLTCTVSGDSISSGDYYWGWIRQPPGKGLEWIGHIYYSGVTYYNPSLKSRVTISVDTSRNQFSLKLSSVTAADTAVYYCTREDSSNWRSRGQGTLVTVSSGSGGGGSGGGGSGGGGSFEQVQLQQWGAGLLKPSETLSLTCAVYGGSFSAYYWSWIRQPPGKGLEWIGDINHGGGTNYNPSLKSRVTISVDTSKNQFSLKLNSVTAADTAVYYCASLTAYWGQGSLVTVSSTREDLKNVFPPEVAVFEPSEAEISHTQKATLVCLATGFYPDHVELSWWVNGKEVHSGVCTDPQPLKEQPALNDSRYCLSSRLRVSATFWQNPRNHFRCQVQFYGLSENDEWTQDRAKPVTQIVSAEAWGRADDVIKIHWQEKKSNTILGSQEGNTMKTNDTYMKFSWLTVPEKSLDKEHRCIVRHENNKNGVDQEIIFPPIKTDVITMDPKDNCSKDANDTLLLQLTNTSAYYMYLLLLLKSVVYFAIITCCLLMAMVKRKDSRG

SEQ ID NO: 15227 - protein, 1002 aa, synthetic construct
MALPVTALLLPLALLLHAARPEVQLVESGGGLVQPGGSLRLSCAASGFSFSDFWMSWVRQAPGKGLEWVATISQAGSEKDYVDSVKGRFTISRDNAKKSLYLQMNSLRAEDTAVYYCASGVYSFDYRGQGTLVTVSSGTGGGGSGGGGSGGGGSEFDEIVLTQSPDSLAVSLGERATINCKASQSVDFDGDSYLNWYQQKPGQPPKVLIYAASTLQSGVPSRFSGSGSGTDFTLTINSLEAEDAATYYCQQSNEDPWTFGGGTKVEIKLEIQNPDPAVYQLRDSKSSDKSVCLFTDFDSQTNVSQSKDSDVYITDKCVLDMRSMDFKSNSAVAWSNKSDFACANAFNNSIIPEDTFFPSPESSDSTDHVKPKETENTKQPSKSCHKPKAIVHTEKVNMMSLTVLGLRMLFAKTVAVNFLLTAKLFFLLTARAKRSGSGVKQTLNFDLLKLAGDVESNPGPTSMDWIWRILFLVGAATGAHSGPQLQLQESGPGLVKPSETLSLTCTVSGDSISSGDYYWGWIRQPPGKGLEWIGHIYYSGVTYYNPSLKSRVTISVDTSRNQFSLKLSSVTAADTAVYYCTREDSSNWRSRGQGTLVTVSSGSGGGGSGGGGSGGGGSFEQVQLVQSGAEVKKPGASVKVSCKVSGYTFTDYYITWVRQAPGQALEWMGWIYPGSGNTKYSQKFQGRFVFSVDTSASTAYLQLSSLKAEDTAVYYCANYGNYWFAYWGQGTLVTVSSTREDLKNVFPPEVAVFEPSEAEISHTQKATLVCLATGFYPDHVELSWWVNGKEVHSGVCTDPQPLKEQPALNDSRYCLSSRLRVSATFWQNPRNHFRCQVQFYGLSENDEWTQDRAKPVTQIVSAEAWGRADDVIKIHWQEKKSNTILGSQEGNTMKTNDTYMKFSWLTVPEKSLDKEHRCIVRHENNKNGVDQEIIFPPIKTDVITMDPKDNCSKDANDTLLLQLTNTSAYYMYLLLLLKSVVYFAIITCCLLMAMVKRKDSRG

SEQ ID NO: 15228 - protein, 999 aa, synthetic construct
MALPVTALLLPLALLLHAARPEVQLVESGGGLVQPGGSLRLSCAASGFSFSDFWMSWVRQAPGKGLEWVATISQAGSEKDYVDSVKGRFTISRDNAKKSLYLQMNSLRAEDTAVYYCASGVYSFDYRGQGTLVTVSSGTGGGGSGGGGSGGGGSEFDIQMTQSPSSLSASVGDRVTITCRASQGISSWLAWYQQKPEKAPKSLIYAASSLQSGVPSRFSGSGSGTDFTLTISSLQPEDFATYYCQQYNSYPPTFGGGTKVEIKLEIQNPDPAVYQLRDSKSSDKSVCLFTDFDSQTNVSQSKDSDVYITDKCVLDMRSMDFKSNSAVAWSNKSDFACANAFNNSIIPEDTFFPSPESSDSTDHVKPKETENTKQPSKSCHKPKAIVHTEKVNMMSLTVLGLRMLFAKTVAVNFLLTAKLFFLLTARAKRSGSGVKQTLNFDLLKLAGDVESNPGPTSMDWIWRILFLVGAATGAHSGPQLQLQESGPGLVKPSETLSLTCTVSGDSISSGDYYWGWIRQPPGKGLEWIGHIYYSGVTYYNPSLKSRVTISVDTSRNQFSLKLSSVTAADTAVYYCTREDSSNWRSRGQGTLVTVSSGSGGGGSGGGGSGGGGSFEEVQLVQSGGGLVHPGGSLRLSCAGSGFAFSSSTMHWIRQAPGKGLEWISLIGSGGGIYYGDSVKGRFTISRDNAKNSLYLQMNSLRAEDMAVYYCVRGYFDWVDYFDYWGQGTLVTVSSTREDLKNVFPPEVAVFEPSEAEISHTQKATLVCLATGFYPDHVELSWWVNGKEVHSGVCTDPQPLKEQPALNDSRYCLSSRLRVSATFWQNPRNHFRCQVQFYGLSENDEWTQDRAKPVTQIVSAEAWGRADDVIKIHWQEKKSNTILGSQEGNTMKTNDTYMKFSWLTVPEKSLDKEHRCIVRHENNKNGVDQEIIFPPIKTDVITMDPKDNCSKDANDTLLLQLTNTSAYYMYLLLLLKSVVYFAIITCCLLMAMVKRKDSRG

SEQ ID NO: 15229 - protein, 1009 aa, synthetic construct
MALPVTALLLPLALLLHAARPEVQLVESGGGLVQPGGSLRLSCAASGFSFSDFWMSWVRQAPGKGLEWVATISQAGSEKDYVDSVKGRFTISRDNAKKSLYLQMNSLRAEDTAVYYCASGVYSFDYRGQGTLVTVSSGTGGGGSGGGGSGGGGSEFDDIVMTQSPDSLTVSLGERTTINCKSSQSVLDSSKNKNSLAWYQQKPGQPPKLLLSWASTRESGIPDRFSGSGSGTDFTLTIDSLQPEDSATYYCQQSAHFPITFGQGTRLEIKLEIQNPDPAVYQLRDSKSSDKSVCLFTDFDSQTNVSQSKDSDVYITDKCVLDMRSMDFKSNSAVAWSNKSDFACANAFNNSIIPEDTFFPSPESSDSTDHVKPKETENTKQPSKSCHKPKAIVHTEKVNMMSLTVLGLRMLFAKTVAVNFLLTAKLFFLLTARAKRSGSGVKQTLNFDLLKLAGDVESNPGPTSMDWIWRILFLVGAATGAHSGPQLQLQESGPGLVKPSETLSLTCTVSGDSISSGDYYWGWIRQPPGKGLEWIGHIYYSGVTYYNPSLKSRVTISVDTSRNQFSLKLSSVTAADTAVYYCTREDSSNWRSRGQGTLVTVSSGSGGGGSGGGGSGGGGSFEQVQLVQSGAEVKKPGASVKVSCKASGYTFTNYGMNWVKQAPGQGLKWMGWINTYTGEPTYADDFKGRVTMTSDTSTSTAYLELHNLRSDDTAVYYCARWSWSDGYYVYFDYWGQGTTVTVSSTREDLKNVFPPEVAVFEPSEAEISHTQKATLVCLATGFYPDHVELSWWVNGKEVHSGVCTDPQPLKEQPALNDSRYCLSSRLRVSATFWQNPRNHFRCQVQFYGLSENDEWTQDRAKPVTQIVSAEAWGRADDVIKIHWQEKKSNTILGSQEGNTMKTNDTYMKFSWLTVPEKSLDKEHRCIVRHENNKNGVDQEIIFPPIKTDVITMDPKDNCSKDANDTLLLQLTNTSAYYMYLLLLLKSVVYFAIITCCLLMAMVKRKDSRG

SEQ ID NO: 15230 - protein, 1005 aa, synthetic construct
MALPVTALLLPLALLLHAARPEVQLVESGGGLVQPGGSLRLSCAASGFSFSDFWMSWVRQAPGKGLEWVATISQAGSEKDYVDSVKGRFTISRDNAKKSLYLQMNSLRAEDTAVYYCASGVYSFDYRGQGTLVTVSSGTGGGGSGGGGSGGGGSEFDEIVLTQSPGSLAVSPGERVTMSCKSSQSVFFSSSQKNYLAWYQQIPGQSPRLLIYWASTRESGVPDRFTGSGSGTDFTLTISSVQPEDLAIYYCHQYLSSRTFGQGTKLEIKRLEIQNPDPAVYQLRDSKSSDKSVCLFTDFDSQTNVSQSKDSDVYITDKCVLDMRSMDFKSNSAVAWSNKSDFACANAFNNSIIPEDTFFPSPESSDSTDHVKPKETENTKQPSKSCHKPKAIVHTEKVNMMSLTVLGLRMLFAKTVAVNFLLTAKLFFLLTARAKRSGSGVKQTLNFDLLKLAGDVESNPGPTSMDWIWRILFLVGAATGAHSGPQLQLQESGPGLVKPSETLSLTCTVSGDSISSGDYYWGWIRQPPGKGLEWIGHIYYSGVTYYNPSLKSRVTISVDTSRNQFSLKLSSVTAADTAVYYCTREDSSNWRSRGQGTLVTVSSGSGGGGSGGGGSGGGGSFEQVQLQQPGAEVVKPGASVKMSCKASGYTFTSYYIHWIKQTPGQGLEWVGVIYPGNDDISYNQKFQGKATLTADKSSTTAYMQLSSLTSEDSAVYYCAREVRLRYFDVWGQGTTVTVSSTREDLKNVFPPEVAVFEPSEAEISHTQKATLVCLATGFYPDHVELSWWVNGKEVHSGVCTDPQPLKEQPALNDSRYCLSSRLRVSATFWQNPRNHFRCQVQFYGLSENDEWTQDRAKPVTQIVSAEAWGRADDVIKIHWQEKKSNTILGSQEGNTMKTNDTYMKFSWLTVPEKSLDKEHRCIVRHENNKNGVDQEIIFPPIKTDVITMDPKDNCSKDANDTLLLQLTNTSAYYMYLLLLLKSVVYFAIITCCLLMAMVKRKDSRG

SEQ ID NO: 15231 - protein, 1009 aa, synthetic construct
MALPVTALLLPLALLLHAARPEVQLVESGGGLVQPGGSLRLSCAASGFSFSDFWMSWVRQAPGKGLEWVATISQAGSEKDYVDSVKGRFTISRDNAKKSLYLQMNSLRAEDTAVYYCASGVYSFDYRGQGTLVTVSSGTGGGGSGGGGSGGGGSEFDVLLTQSPLSLPVTLGQPASISCRSSQTIVHSNGNTYLEWFQQRPGQSPRLLIYQVSNRFSGVPDRFSGSGSGTDFTLKISRVEAEDVGVYYCFQGSHVPRTFGGGTKVEIKRALEIQNPDPAVYQLRDSKSSDKSVCLFTDFDSQTNVSQSKDSDVYITDKCVLDMRSMDFKSNSAVAWSNKSDFACANAFNNSIIPEDTFFPSPESSDSTDHVKPKETENTKQPSKSCHKPKAIVHTEKVNMMSLTVLGLRMLFAKTVAVNFLLTAKLFFLLTARAKRSGSGVKQTLNFDLLKLAGDVESNPGPTSMDWIWRILFLVGAATGAHSGPQLQLQESGPGLVKPSETLSLTCTVSGDSISSGDYYWGWIRQPPGKGLEWIGHIYYSGVTYYNPSLKSRVTISVDTSRNQFSLKLSSVTAADTAVYYCTREDSSNWRSRGQGTLVTVSSGSGGGGSGGGGSGGGGSFEQIQLVQSGSELKKPGASVKVSCKASGYTFTNYGMNWVRQAPGQGLKWMGWINTNTGEPKYAEEFKGRFALSLDTSVSTAYLQINSLKAEDTAVYFCARGYGNYARGAWLAYWGQGTLVTVSSTREDLKNVFPPEVAVFEPSEAEISHTQKATLVCLATGFYPDHVELSWWVNGKEVHSGVCTDPQPLKEQPALNDSRYCLSSRLRVSATFWQNPRNHFRCQVQFYGLSENDEWTQDRAKPVTQIVSAEAWGRADDVIKIHWQEKKSNTILGSQEGNTMKTNDTYMKFSWLTVPEKSLDKEHRCIVRHENNKNGVDQEIIFPPIKTDVITMDPKDNCSKDANDTLLLQLTNTSAYYMYLLLLLKSVVYFAIITCCLLMAMVKRKDSRG

SEQ ID NO: 15232 - protein, 994 aa, synthetic construct
MALPVTALLLPLALLLHAARPEVQLVESGGGLVQPGGSLRLSCAASGFSFSDFWMSWVRQAPGKGLEWVATISQAGSEKDYVDSVKGRFTISRDNAKKSLYLQMNSLRAEDTAVYYCASGVYSFDYRGQGTLVTVSSGTGGGGSGGGGSGGGGSEFDEIVLTQSPATLSLSPGERATLSCSASSSINYIYWLQQKPGQAPRILIYLTSNLASGVPARFSGSGSGTDFTLTISSLEPEDFAVYYCLQWSSNPLTFGGGTKVEIKLEIQNPDPAVYQLRDSKSSDKSVCLFTDFDSQTNVSQSKDSDVYITDKCVLDMRSMDFKSNSAVAWSNKSDFACANAFNNSIIPEDTFFPSPESSDSTDHVKPKETENTKQPSKSCHKPKAIVHTEKVNMMSLTVLGLRMLFAKTVAVNFLLTAKLFFLLTARAKRSGSGVKQTLNFDLLKLAGDVESNPGPTSMDWIWRILFLVGAATGAHSGPQLQLQESGPGLVKPSETLSLTCTVSGDSISSGDYYWGWIRQPPGKGLEWIGHIYYSGVTYYNPSLKSRVTISVDTSRNQFSLKLSSVTAADTAVYYCTREDSSNWRSRGQGTLVTVSSGSGGGGSGGGGSGGGGSFEEVQLVESGGGLVKPGGSLRLSCAASGFTFSSYDMSWVRQAPGKGLEWVSTISSGGSYTYYLDSIKGRFTISRDNAKNSLYLQMNSLRAEDTAVYYCARQGLDYWGRGTLVTVSSTREDLKNVFPPEVAVFEPSEAEISHTQKATLVCLATGFYPDHVELSWWVNGKEVHSGVCTDPQPLKEQPALNDSRYCLSSRLRVSATFWQNPRNHFRCQVQFYGLSENDEWTQDRAKPVTQIVSAEAWGRADDVIKIHWQEKKSNTILGSQEGNTMKTNDTYMKFSWLTVPEKSLDKEHRCIVRHENNKNGVDQEIIFPPIKTDVITMDPKDNCSKDANDTLLLQLTNTSAYYMYLLLLLKSVVYFAIITCCLLMAMVKRKDSRG

SEQ ID NO: 15233 - protein, 1003 aa, synthetic construct
MALPVTALLLPLALLLHAARPEVQLVESGGGLVQPGGSLRLSCAASGFSFSDFWMSWVRQAPGKGLEWVATISQAGSEKDYVDSVKGRFTISRDNAKKSLYLQMNSLRAEDTAVYYCASGVYSFDYRGQGTLVTVSSGTGGGGSGGGGSGGGGSEFDIVMTQSPDSLAVSLGERATINCRASKSVSTSGYSFMHWYQQKPGQPPKLLIYLASNLESGVPDRFSGSGSGTDFTLTISSLQAEDVAVYYCQHSREVPWTFGQGTKVEIKRLEIQNPDPAVYQLRDSKSSDKSVCLFTDFDSQTNVSQSKDSDVYITDKCVLDMRSMDFKSNSAVAWSNKSDFACANAFNNSIIPEDTFFPSPESSDSTDHVKPKETENTKQPSKSCHKPKAIVHTEKVNMMSLTVLGLRMLFAKTVAVNFLLTAKLFFLLTARAKRSGSGVKQTLNFDLLKLAGDVESNPGPTSMDWIWRILFLVGAATGAHSGPQLQLQESGPGLVKPSETLSLTCTVSGDSISSGDYYWGWIRQPPGKGLEWIGHIYYSGVTYYNPSLKSRVTISVDTSRNQFSLKLSSVTAADTAVYYCTREDSSNWRSRGQGTLVTVSSGSGGGGSGGGGSGGGGSFEQVQLVQSGAEVKKPGASVKVSCKASGYTFTNYGMNWVRQAPGQGLEWMGWINTYTGEPTYADAFKGRFAFSLDTSTSTAYLQINSLRSDDTAVYYCARDYGDYGMDYWGQGTTVTVSSTREDLKNVFPPEVAVFEPSEAEISHTQKATLVCLATGFYPDHVELSWWVNGKEVHSGVCTDPQPLKEQPALNDSRYCLSSRLRVSATFWQNPRNHFRCQVQFYGLSENDEWTQDRAKPVTQIVSAEAWGRADDVIKIHWQEKKSNTILGSQEGNTMKTNDTYMKFSWLTVPEKSLDKEHRCIVRHENNKNGVDQEIIFPPIKTDVITMDPKDNCSKDANDTLLLQLTNTSAYYMYLLLLLKSVVYFAIITCCLLMAMVKRKDSRG

SEQ ID NO: 15234 - protein, 999 aa, synthetic construct
MALPVTALLLPLALLLHAARPEVQLVESGGGLVQPGGSLRLSCAASGFSFSDFWMSWVRQAPGKGLEWVATISQAGSEKDYVDSVKGRFTISRDNAKKSLYLQMNSLRAEDTAVYYCASGVYSFDYRGQGTLVTVSSGTGGGGSGGGGSGGGGSEFDIVMTQTPLTLSVTIGQPASISCKSSQSLLDSDGKTYLNWLLQRPGQSPERLIYLVSKLDSGVPDRFTGSGSGTDFTLKISRVEAEDLGVYCCWQGTHFPYTFGGGTKVEIKGLEIQNPDPAVYQLRDSKSSDKSVCLFTDFDSQTNVSQSKDSDVYITDKCVLDMRSMDFKSNSAVAWSNKSDFACANAFNNSIIPEDTFFPSPESSDSTDHVKPKETENTKQPSKSCHKPKAIVHTEKVNMMSLTVLGLRMLFAKTVAVNFLLTAKLFFLLTARAKRSGSGVKQTLNFDLLKLAGDVESNPGPTSMDWIWRILFLVGAATGAHSGPQLQLQESGPGLVKPSETLSLTCTVSGDSISSGDYYWGWIRQPPGKGLEWIGHIYYSGVTYYNPSLKSRVTISVDTSRNQFSLKLSSVTAADTAVYYCTREDSSNWRSRGQGTLVTVSSGSGGGGSGGGGSGGGGSFEQVQLQQPGAELVRPGASVKLSCKASGYTFTSYWMNWVKQRPGQGLEWIGMIDPSDSETHYNHIFKDKATLTVDKSSSTAYLQLSSLTSEDSAVYYCARNLYLWGQGTSVTVSSTREDLKNVFPPEVAVFEPSEAEISHTQKATLVCLATGFYPDHVELSWWVNGKEVHSGVCTDPQPLKEQPALNDSRYCLSSRLRVSATFWQNPRNHFRCQVQFYGLSENDEWTQDRAKPVTQIVSAEAWGRADDVIKIHWQEKKSNTILGSQEGNTMKTNDTYMKFSWLTVPEKSLDKEHRCIVRHENNKNGVDQEIIFPPIKTDVITMDPKDNCSKDANDTLLLQLTNTSAYYMYLLLLLKSVVYFAIITCCLLMAMVKRKDSRG

SEQ ID NO: 15235 - protein, 1007 aa, synthetic construct
MALPVTALLLPLALLLHAARPEVQLVESGGGLVQPGGSLRLSCAASGFSFSDFWMSWVRQAPGKGLEWVATISQAGSEKDYVDSVKGRFTISRDNAKKSLYLQMNSLRAEDTAVYYCASGVYSFDYRGQGTLVTVSSGTGGGGSGGGGSGGGGSEFDIVMTQSPDSLAVSLGERATINCESSQSLLNSGNQKNYLTWYQQKPGQPPKPLIYWASTRESGVPDRFSGSGSGTDFTLTISSLQAEDVAVYYCQNDYSYPYTFGQGTKLEIKRLEIQNPDPAVYQLRDSKSSDKSVCLFTDFDSQTNVSQSKDSDVYITDKCVLDMRSMDFKSNSAVAWSNKSDFACANAFNNSIIPEDTFFPSPESSDSTDHVKPKETENTKQPSKSCHKPKAIVHTEKVNMMSLTVLGLRMLFAKTVAVNFLLTAKLFFLLTARAKRSGSGVKQTLNFDLLKLAGDVESNPGPTSMDWIWRILFLVGAATGAHSGPQLQLQESGPGLVKPSETLSLTCTVSGDSISSGDYYWGWIRQPPGKGLEWIGHIYYSGVTYYNPSLKSRVTISVDTSRNQFSLKLSSVTAADTAVYYCTREDSSNWRSRGQGTLVTVSSGSGGGGSGGGGSGGGGSFEEVQLVQSGAEVKKPGESLKISCKGSGYSFTDYYMKWARQMPGKGLEWMGDIIPSNGATFYNQKFKGQVTISADKSISTTYLQWSSLKASDTAMYYCARSHLLRASWFAYWGQGTMVTVSSTREDLKNVFPPEVAVFEPSEAEISHTQKATLVCLATGFYPDHVELSWWVNGKEVHSGVCTDPQPLKEQPALNDSRYCLSSRLRVSATFWQNPRNHFRCQVQFYGLSENDEWTQDRAKPVTQIVSAEAWGRADDVIKIHWQEKKSNTILGSQEGNTMKTNDTYMKFSWLTVPEKSLDKEHRCIVRHENNKNGVDQEIIFPPIKTDVITMDPKDNCSKDANDTLLLQLTNTSAYYMYLLLLLKSVVYFAIITCCLLMAMVKRKDSRG

SEQ ID NO: 15236 - protein, 1002 aa, synthetic construct
MALPVTALLLPLALLLHAARPEVQLVESGGGLVQPGGSLRLSCAASGFSFSDFWMSWVRQAPGKGLEWVATISQAGSEKDYVDSVKGRFTISRDNAKKSLYLQMNSLRAEDTAVYYCASGVYSFDYRGQGTLVTVSSGTGGGGSGGGGSGGGGSEFDIQMTQSTSSLSASLGDRVTISCSASQGINNYLNWYQQKPDGTVELLIYYTSTLQSGVPSRFSGSGSGTDYSLTISNLEPEDIGTYYCQQYSKLPRTFGGGTKLEIKLEIQNPDPAVYQLRDSKSSDKSVCLFTDFDSQTNVSQSKDSDVYITDKCVLDMRSMDFKSNSAVAWSNKSDFACANAFNNSIIPEDTFFPSPESSDSTDHVKPKETENTKQPSKSCHKPKAIVHTEKVNMMSLTVLGLRMLFAKTVAVNFLLTAKLFFLLTARAKRSGSGVKQTLNFDLLKLAGDVESNPGPTSMDWIWRILFLVGAATGAHSGPQLQLQESGPGLVKPSETLSLTCTVSGDSISSGDYYWGWIRQPPGKGLEWIGHIYYSGVTYYNPSLKSRVTISVDTSRNQFSLKLSSVTAADTAVYYCTREDSSNWRSRGQGTLVTVSSGSGGGGSGGGGSGGGGSFEQVQLQQSGSELMMPGASVKISCKATGYTFSNYWIEWVKQRPGHGLEWIGEILPGTGRTIYNEKFKGKATFTADISSNTVQMQLSSLTSEDSAVYYCARRDYYGNFYYAMDYWGQGTSVTVSSTREDLKNVFPPEVAVFEPSEAEISHTQKATLVCLATGFYPDHVELSWWVNGKEVHSGVCTDPQPLKEQPALNDSRYCLSSRLRVSATFWQNPRNHFRCQVQFYGLSENDEWTQDRAKPVTQIVSAEAWGRADDVIKIHWQEKKSNTILGSQEGNTMKTNDTYMKFSWLTVPEKSLDKEHRCIVRHENNKNGVDQEIIFPPIKTDVITMDPKDNCSKDANDTLLLQLTNTSAYYMYLLLLLKSVVYFAIITCCLLMAMVKRKDSRG

SEQ ID NO: 15237 - protein, 997 aa, synthetic construct
MALPVTALLLPLALLLHAARPEVQLVESGGGLVQPGGSLRLSCAASGFSFSDFWMSWVRQAPGKGLEWVATISQAGSEKDYVDSVKGRFTISRDNAKKSLYLQMNSLRAEDTAVYYCASGVYSFDYRGQGTLVTVSSGTGGGGSGGGGSGGGGSEFDIQMTQSPASLSVSVGETVTITCRASENIYSNLAWYQQKQGKSPQLLVYAATNLADGVPSRFSGSGSGTQYSLKINSLQSEDFGSYYCQHFWGTWTFGGGTTLEIKLEIQNPDPAVYQLRDSKSSDKSVCLFTDFDSQTNVSQSKDSDVYITDKCVLDMRSMDFKSNSAVAWSNKSDFACANAFNNSIIPEDTFFPSPESSDSTDHVKPKETENTKQPSKSCHKPKAIVHTEKVNMMSLTVLGLRMLFAKTVAVNFLLTAKLFFLLTARAKRSGSGVKQTLNFDLLKLAGDVESNPGPTSMDWIWRILFLVGAATGAHSGPQLQLQESGPGLVKPSETLSLTCTVSGDSISSGDYYWGWIRQPPGKGLEWIGHIYYSGVTYYNPSLKSRVTISVDTSRNQFSLKLSSVTAADTAVYYCTREDSSNWRSRGQGTLVTVSSGSGGGGSGGGGSGGGGSFEEVQLQQSGPELVKPGASVKMSCKASGYTFTDYYMKWMKQSHGKSLEWIGDINPNNGGTTYNQKFKGKATLTVDKSSSTAYMQLNSLTSEDSAVYYCARDYGYGYFDYWGQGTTLTVSSTREDLKNVFPPEVAVFEPSEAEISHTQKATLVCLATGFYPDHVELSWWVNGKEVHSGVCTDPQPLKEQPALNDSRYCLSSRLRVSATFWQNPRNHFRCQVQFYGLSENDEWTQDRAKPVTQIVSAEAWGRADDVIKIHWQEKKSNTILGSQEGNTMKTNDTYMKFSWLTVPEKSLDKEHRCIVRHENNKNGVDQEIIFPPIKTDVITMDPKDNCSKDANDTLLLQLTNTSAYYMYLLLLLKSVVYFAIITCCLLMAMVKRKDSRG

SEQ ID NO: 15238 - protein, 1000 aa, synthetic construct
MALPVTALLLPLALLLHAARPEVQLVESGGGLVQPGGSLRLSCAASGFSFSDFWMSWVRQAPGKGLEWVATISQAGSEKDYVDSVKGRFTISRDNAKKSLYLQMNSLRAEDTAVYYCASGVYSFDYRGQGTLVTVSSGTGGGGSGGGGSGGGGSEFEIVLTQSPGTLSLSPGERATLSCRASQSVGGYLAWYQQKPGQAPRLLIYDASNRATGIPARFSGSGSGTDFTLTISSLEPEDFAVYYCQQRNNWPPMYTFGQGTKLEIKRLEIQNPDPAVYQLRDSKSSDKSVCLFTDFDSQTNVSQSKDSDVYITDKCVLDMRSMDFKSNSAVAWSNKSDFACANAFNNSIIPEDTFFPSPESSDSTDHVKPKETENTKQPSKSCHKPKAIVHTEKVNMMSLTVLGLRMLFAKTVAVNFLLTAKLFFLLTARAKRSGSGVKQTLNFDLLKLAGDVESNPGPTSMDWIWRILFLVGAATGAHSGPQLQLQESGPGLVKPSETLSLTCTVSGDSISSGDYYWGWIRQPPGKGLEWIGHIYYSGVTYYNPSLKSRVTISVDTSRNQFSLKLSSVTAADTAVYYCTREDSSNWRSRGQGTLVTVSSGSGGGGSGGGGSGGGGSFEQVQLVQSGAEVKKPGSSVKVSCKASGGTFSSYAISWVRQAPGQGLEWMGGIIPILGTANYAQKFQGRVTITADESTSTAYMELSSLRSEDTAVYYCARWGGGAFDIWGQGTMVTVSSTREDLKNVFPPEVAVFEPSEAEISHTQKATLVCLATGFYPDHVELSWWVNGKEVHSGVCTDPQPLKEQPALNDSRYCLSSRLRVSATFWQNPRNHFRCQVQFYGLSENDEWTQDRAKPVTQIVSAEAWGRADDVIKIHWQEKKSNTILGSQEGNTMKTNDTYMKFSWLTVPEKSLDKEHRCIVRHENNKNGVDQEIIFPPIKTDVITMDPKDNCSKDANDTLLLQLTNTSAYYMYLLLLLKSVVYFAIITCCLLMAMVKRKDSRG

SEQ ID NO: 15239 - protein, 995 aa, synthetic construct
MALPVTALLLPLALLLHAARPEVQLVESGGGLVQPGGSLRLSCAASGFSFSDFWMSWVRQAPGKGLEWVATISQAGSEKDYVDSVKGRFTISRDNAKKSLYLQMNSLRAEDTAVYYCASGVYSFDYRGQGTLVTVSSGTGGGGSGGGGSGGGGSEFQIVLTQSPALMSASPGEKVTMTCSASSSVRYMYWYQQKPRSSPKPWIHLTSNLASGVPARFSGSGSGTSYSLTISSMEAEDAATYYCQQWSSHPFTFGSGTKLEIKLEIQNPDPAVYQLRDSKSSDKSVCLFTDFDSQTNVSQSKDSDVYITDKCVLDMRSMDFKSNSAVAWSNKSDFACANAFNNSIIPEDTFFPSPESSDSTDHVKPKETENTKQPSKSCHKPKAIVHTEKVNMMSLTVLGLRMLFAKTVAVNFLLTAKLFFLLTARAKRSGSGVKQTLNFDLLKLAGDVESNPGPTSMDWIWRILFLVGAATGAHSGPQLQLQESGPGLVKPSETLSLTCTVSGDSISSGDYYWGWIRQPPGKGLEWIGHIYYSGVTYYNPSLKSRVTISVDTSRNQFSLKLSSVTAADTAVYYCTREDSSNWRSRGQGTLVTVSSGSGGGGSGGGGSGGGGSFEDVQLQESGPGLVKPSQSLSLTCTVTGFSITSDYSWNWIRQFPGNKLEWMGYISYSGHTSYNPSLESRISITRDTSKNQFFLQLNSVTTEDTATYYCTRGNWDVVYWGQGTLVTVSATREDLKNVFPPEVAVFEPSEAEISHTQKATLVCLATGFYPDHVELSWWVNGKEVHSGVCTDPQPLKEQPALNDSRYCLSSRLRVSATFWQNPRNHFRCQVQFYGLSENDEWTQDRAKPVTQIVSAEAWGRADDVIKIHWQEKKSNTILGSQEGNTMKTNDTYMKFSWLTVPEKSLDKEHRCIVRHENNKNGVDQEIIFPPIKTDVITMDPKDNCSKDANDTLLLQLTNTSAYYMYLLLLLKSVVYFAIITCCLLMAMVKRKDSRG

SEQ ID NO: 15240 - protein, 1005 aa, synthetic construct
MALPVTALLLPLALLLHAARPEVQLVESGGGLVQPGGSLRLSCAASGFSFSDFWMSWVRQAPGKGLEWVATISQAGSEKDYVDSVKGRFTISRDNAKKSLYLQMNSLRAEDTAVYYCASGVYSFDYRGQGTLVTVSSGTGGGGSGGGGSGGGGSEFDVVMTQSPLSLPVTLGQPASISCRSSQSIVHSDGNTYLEWYQQRPGQSPRRLIYKVSNRFSGVPDRFSGSGSGTDFTLKISRVEAEDVGVYYCFQGSHAPWTFGGGTKVEIKLEIQNPDPAVYQLRDSKSSDKSVCLFTDFDSQTNVSQSKDSDVYITDKCVLDMRSMDFKSNSAVAWSNKSDFACANAFNNSIIPEDTFFPSPESSDSTDHVKPKETENTKQPSKSCHKPKAIVHTEKVNMMSLTVLGLRMLFAKTVAVNFLLTAKLFFLLTARAKRSGSGVKQTLNFDLLKLAGDVESNPGPTSMDWIWRILFLVGAATGAHSGPQLQLQESGPGLVKPSETLSLTCTVSGDSISSGDYYWGWIRQPPGKGLEWIGHIYYSGVTYYNPSLKSRVTISVDTSRNQFSLKLSSVTAADTAVYYCTREDSSNWRSRGQGTLVTVSSGSGGGGSGGGGSGGGGSFEEVQLVESGGGLVQPGGSLRLSCAASGFTFSSYGMHWVRQAPGKGLEWVAYITTRSSTIYYADSVKGRFTISRDNAKNSLYLQMNSLRAEDTAVYYCTREPLTGYYAMDYWGQGTSVTVSSTREDLKNVFPPEVAVFEPSEAEISHTQKATLVCLATGFYPDHVELSWWVNGKEVHSGVCTDPQPLKEQPALNDSRYCLSSRLRVSATFWQNPRNHFRCQVQFYGLSENDEWTQDRAKPVTQIVSAEAWGRADDVIKIHWQEKKSNTILGSQEGNTMKTNDTYMKFSWLTVPEKSLDKEHRCIVRHENNKNGVDQEIIFPPIKTDVITMDPKDNCSKDANDTLLLQLTNTSAYYMYLLLLLKSVVYFAIITCCLLMAMVKRKDSRG

SEQ ID NO: 15241 - protein, 997 aa, synthetic construct
MALPVTALLLPLALLLHAARPEVQLVESGGGLVQPGGSLRLSCAASGFSFSDFWMSWVRQAPGKGLEWVATISQAGSEKDYVDSVKGRFTISRDNAKKSLYLQMNSLRAEDTAVYYCASGVYSFDYRGQGTLVTVSSGTGGGGSGGGGSGGGGSEFDIQMTQSPSSLSASVGDRVTITCRASQSISLWLNWYQQKPGKAPKLLIYAASTLQSGVPSRFSGSGSGTDFTLTISSLQPEDFATYYCQQYYTSPYTFGQGTKVEIKRLEIQNPDPAVYQLRDSKSSDKSVCLFTDFDSQTNVSQSKDSDVYITDKCVLDMRSMDFKSNSAVAWSNKSDFACANAFNNSIIPEDTFFPSPESSDSTDHVKPKETENTKQPSKSCHKPKAIVHTEKVNMMSLTVLGLRMLFAKTVAVNFLLTAKLFFLLTARAKRSGSGVKQTLNFDLLKLAGDVESNPGPTSMDWIWRILFLVGAATGAHSGPQLQLQESGPGLVKPSETLSLTCTVSGDSISSGDYYWGWIRQPPGKGLEWIGHIYYSGVTYYNPSLKSRVTISVDTSRNQFSLKLSSVTAADTAVYYCTREDSSNWRSRGQGTLVTVSSGSGGGGSGGGGSGGGGSFEQVQLLESGGGLVQPGGSLRLSCAASGFTFSSYAMSWVRQAPGKGLEWVSVIRSSGSSTYYADSVKGRFTISRDNSKNTLYLQMNSLRAEDTAVYYCARGGGYFDYWGQGTLVTVSSTREDLKNVFPPEVAVFEPSEAEISHTQKATLVCLATGFYPDHVELSWWVNGKEVHSGVCTDPQPLKEQPALNDSRYCLSSRLRVSATFWQNPRNHFRCQVQFYGLSENDEWTQDRAKPVTQIVSAEAWGRADDVIKIHWQEKKSNTILGSQEGNTMKTNDTYMKFSWLTVPEKSLDKEHRCIVRHENNKNGVDQEIIFPPIKTDVITMDPKDNCSKDANDTLLLQLTNTSAYYMYLLLLLKSVVYFAIITCCLLMAMVKRKDSRG

SEQ ID NO: 15242 - protein, 1000 aa, synthetic construct
MALPVTALLLPLALLLHAARPEVQLVESGGGLVQPGGSLRLSCAASGFSFSDFWMSWVRQAPGKGLEWVATISQAGSEKDYVDSVKGRFTISRDNAKKSLYLQMNSLRAEDTAVYYCASGVYSFDYRGQGTLVTVSSGTGGGGSGGGGSGGGGSEFDIQMTQSPSSLSASVGDRVTITCRASQSISSYLNWYQQKPGKAPKLLIYAVSTLQSGVPSRFSGSGSGTDFTLTISSLQPEDFATYYCQQSGTFPPTTFGQGTKVEIKRLEIQNPDPAVYQLRDSKSSDKSVCLFTDFDSQTNVSQSKDSDVYITDKCVLDMRSMDFKSNSAVAWSNKSDFACANAFNNSIIPEDTFFPSPESSDSTDHVKPKETENTKQPSKSCHKPKAIVHTEKVNMMSLTVLGLRMLFAKTVAVNFLLTAKLFFLLTARAKRSGSGVKQTLNFDLLKLAGDVESNPGPTSMDWIWRILFLVGAATGAHSGPQLQLQESGPGLVKPSETLSLTCTVSGDSISSGDYYWGWIRQPPGKGLEWIGHIYYSGVTYYNPSLKSRVTISVDTSRNQFSLKLSSVTAADTAVYYCTREDSSNWRSRGQGTLVTVSSGSGGGGSGGGGSGGGGSFEQVQLLESGGGLVQPGGSLRLSCAASGFTFSSHGMHWVRQAPGKGLEWVSVISGSGSNTGYADSVKGRFTISRDNSKNTLYLQMNSLRAEDTAVYYCARQWGSYAFDSWGQGTLVTVSSTREDLKNVFPPEVAVFEPSEAEISHTQKATLVCLATGFYPDHVELSWWVNGKEVHSGVCTDPQPLKEQPALNDSRYCLSSRLRVSATFWQNPRNHFRCQVQFYGLSENDEWTQDRAKPVTQIVSAEAWGRADDVIKIHWQEKKSNTILGSQEGNTMKTNDTYMKFSWLTVPEKSLDKEHRCIVRHENNKNGVDQEIIFPPIKTDVITMDPKDNCSKDANDTLLLQLTNTSAYYMYLLLLLKSVVYFAIITCCLLMAMVKRKDSRG

SEQ ID NO: 15243 - protein, 1010 aa, synthetic construct
MALPVTALLLPLALLLHAARPEVQLVESGGGLVQPGGSLRLSCAASGFSFSDFWMSWVRQAPGKGLEWVATISQAGSEKDYVDSVKGRFTISRDNAKKSLYLQMNSLRAEDTAVYYCASGVYSFDYRGQGTLVTVSSGTGGGGSGGGGSGGGGSEFDIVMSQSPSSLAVSVGEKVTMSCKSSQSLLHSSNQKNYLAWYQQKPGQSPKVLIYWASTRESGVPDRFTGSGSGTDFTLTITSVKSEDLAVYYCQQYYSYPWTFGGGTRLEIKRLEIQNPDPAVYQLRDSKSSDKSVCLFTDFDSQTNVSQSKDSDVYITDKCVLDMRSMDFKSNSAVAWSNKSDFACANAFNNSIIPEDTFFPSPESSDSTDHVKPKETENTKQPSKSCHKPKAIVHTEKVNMMSLTVLGLRMLFAKTVAVNFLLTAKLFFLLTARAKRSGSGVKQTLNFDLLKLAGDVESNPGPTSMDWIWRILFLVGAATGAHSGPQLQLQESGPGLVKPSETLSLTCTVSGDSISSGDYYWGWIRQPPGKGLEWIGHIYYSGVTYYNPSLKSRVTISVDTSRNQFSLKLSSVTAADTAVYYCTREDSSNWRSRGQGTLVTVSSGSGGGGSGGGGSGGGGSFEEVQLQQSVAELVKPGASVKMSCKVSGYTLTDHTIHWMKQRPEQGLEWIGYIYPRDGITGYNEKFKGKATLTADTSSSTAYMQLNSLTSEDSAVYFCARWGYSYRNYAYYYDYWGQGTTLTVSSTREDLKNVFPPEVAVFEPSEAEISHTQKATLVCLATGFYPDHVELSWWVNGKEVHSGVCTDPQPLKEQPALNDSRYCLSSRLRVSATFWQNPRNHFRCQVQFYGLSENDEWTQDRAKPVTQIVSAEAWGRADDVIKIHWQEKKSNTILGSQEGNTMKTNDTYMKFSWLTVPEKSLDKEHRCIVRHENNKNGVDQEIIFPPIKTDVITMDPKDNCSKDANDTLLLQLTNTSAYYMYLLLLLKSVVYFAIITCCLLMAMVKRKDSRG

SEQ ID NO: 15244 - protein, 1007 aa, synthetic construct
MALPVTALLLPLALLLHAARPEVQLVESGGGLVQPGGSLRLSCAASGFSFSDFWMSWVRQAPGKGLEWVATISQAGSEKDYVDSVKGRFTISRDNAKKSLYLQMNSLRAEDTAVYYCASGVYSFDYRGQGTLVTVSSGTGGGGSGGGGSGGGGSEFEIVLTQSPGTLSLSPGERATLSCRASQSVSSSYLAWYQQKPGQAPRLLIYGTSSRATGIPDRFSGSGSGTDFTLTISRLEPEDFAVYYCQQYGSSPFTFGGGTKVEIKRLEIQNPDPAVYQLRDSKSSDKSVCLFTDFDSQTNVSQSKDSDVYITDKCVLDMRSMDFKSNSAVAWSNKSDFACANAFNNSIIPEDTFFPSPESSDSTDHVKPKETENTKQPSKSCHKPKAIVHTEKVNMMSLTVLGLRMLFAKTVAVNFLLTAKLFFLLTARAKRSGSGVKQTLNFDLLKLAGDVESNPGPTSMDWIWRILFLVGAATGAHSGPQLQLQESGPGLVKPSETLSLTCTVSGDSISSGDYYWGWIRQPPGKGLEWIGHIYYSGVTYYNPSLKSRVTISVDTSRNQFSLKLSSVTAADTAVYYCTREDSSNWRSRGQGTLVTVSSGSGGGGSGGGGSGGGGSFEQVQLQESGPGLAKPSETLSLTCTVSGDSITSYYWSWIRQPPGKGLEWIGYIYYSGSTNYNPSLKSRVTISVDTSKNQFSLKLSSVTAADTAVYYCARDQRRIAAAGTHFYGMDVWGQGTTVTVSSTREDLKNVFPPEVAVFEPSEAEISHTQKATLVCLATGFYPDHVELSWWVNGKEVHSGVCTDPQPLKEQPALNDSRYCLSSRLRVSATFWQNPRNHFRCQVQFYGLSENDEWTQDRAKPVTQIVSAEAWGRADDVIKIHWQEKKSNTILGSQEGNTMKTNDTYMKFSWLTVPEKSLDKEHRCIVRHENNKNGVDQEIIFPPIKTDVITMDPKDNCSKDANDTLLLQLTNTSAYYMYLLLLLKSVVYFAIITCCLLMAMVKRKDSRG

SEQ ID NO: 15245 - protein, 999 aa, synthetic construct
MALPVTALLLPLALLLHAARPEVQLVESGGGLVQPGGSLRLSCAASGFSFSDFWMSWVRQAPGKGLEWVATISQAGSEKDYVDSVKGRFTISRDNAKKSLYLQMNSLRAEDTAVYYCASGVYSFDYRGQGTLVTVSSGTGGGGSGGGGSGGGGSEFDILLTQSPVILSVSPGERVSFSCRASQSIGTNIHWYQQRTNGSPRLLIKYASESISGIPSRFSGSGSGTDFTLSINSVESEDIADYYCQQNNNWPTTFGAGTKLELKLEIQNPDPAVYQLRDSKSSDKSVCLFTDFDSQTNVSQSKDSDVYITDKCVLDMRSMDFKSNSAVAWSNKSDFACANAFNNSIIPEDTFFPSPESSDSTDHVKPKETENTKQPSKSCHKPKAIVHTEKVNMMSLTVLGLRMLFAKTVAVNFLLTAKLFFLLTARAKRSGSGVKQTLNFDLLKLAGDVESNPGPTSMDWIWRILFLVGAATGAHSGPQLQLQESGPGLVKPSETLSLTCTVSGDSISSGDYYWGWIRQPPGKGLEWIGHIYYSGVTYYNPSLKSRVTISVDTSRNQFSLKLSSVTAADTAVYYCTREDSSNWRSRGQGTLVTVSSGSGGGGSGGGGSGGGGSFEQVQLKQSGPGLVQPSQSLSITCTVSGFSLTNYGVHWVRQSPGKGLEWLGVIWSGGNTDYNTPFTSRLSINKDNSKSQVFFKMNSLQSNDTAIYYCARALTYYDYEFAYWGQGTLVTVSATREDLKNVFPPEVAVFEPSEAEISHTQKATLVCLATGFYPDHVELSWWVNGKEVHSGVCTDPQPLKEQPALNDSRYCLSSRLRVSATFWQNPRNHFRCQVQFYGLSENDEWTQDRAKPVTQIVSAEAWGRADDVIKIHWQEKKSNTILGSQEGNTMKTNDTYMKFSWLTVPEKSLDKEHRCIVRHENNKNGVDQEIIFPPIKTDVITMDPKDNCSKDANDTLLLQLTNTSAYYMYLLLLLKSVVYFAIITCCLLMAMVKRKDSRG

SEQ ID NO: 15246 - protein, 992 aa, synthetic construct
MALPVTALLLPLALLLHAARPEVQLVESGGGLVQPGGSLRLSCAASGFSFSDFWMSWVRQAPGKGLEWVATISQAGSEKDYVDSVKGRFTISRDNAKKSLYLQMNSLRAEDTAVYYCASGVYSFDYRGQGTLVTVSSGTGGGGSGGGGSGGGGSEFMTQSPKFLLVSAGDRVTLTCKASQSVNNDVYWYQQEPGQSPKLLIYWASTRESGVPDRFTGSGSGTDFTLTISSVQAEDLAVYYCKQSYNLYTFGGGTKLEIKRLEIQNPDPAVYQLRDSKSSDKSVCLFTDFDSQTNVSQSKDSDVYITDKCVLDMRSMDFKSNSAVAWSNKSDFACANAFNNSIIPEDTFFPSPESSDSTDHVKPKETENTKQPSKSCHKPKAIVHTEKVNMMSLTVLGLRMLFAKTVAVNFLLTAKLFFLLTARAKRSGSGVKQTLNFDLLKLAGDVESNPGPTSMDWIWRILFLVGAATGAHSGPQLQLQESGPGLVKPSETLSLTCTVSGDSISSGDYYWGWIRQPPGKGLEWIGHIYYSGVTYYNPSLKSRVTISVDTSRNQFSLKLSSVTAADTAVYYCTREDSSNWRSRGQGTLVTVSSGSGGGGSGGGGSGGGGSFEESGRGLVQPGGSRKLSCAASGFTFSTSGMHWVRQAPEKGLEWVAYISSGSTTIYHADTVKGRFTISRDNPKNTLFLQMTSLRSEDTAMYYCCARSGQFGNYFDYWGQGTTLTVSSTREDLKNVFPPEVAVFEPSEAEISHTQKATLVCLATGFYPDHVELSWWVNGKEVHSGVCTDPQPLKEQPALNDSRYCLSSRLRVSATFWQNPRNHFRCQVQFYGLSENDEWTQDRAKPVTQIVSAEAWGRADDVIKIHWQEKKSNTILGSQEGNTMKTNDTYMKFSWLTVPEKSLDKEHRCIVRHENNKNGVDQEIIFPPIKTDVITMDPKDNCSKDANDTLLLQLTNTSAYYMYLLLLLKSVVYFAIITCCLLMAMVKRKDSRG

SEQ ID NO: 15247 - protein, 997 aa, synthetic construct
MALPVTALLLPLALLLHAARPEVQLVESGGGLVQPGGSLRLSCAASGFSFSDFWMSWVRQAPGKGLEWVATISQAGSEKDYVDSVKGRFTISRDNAKKSLYLQMNSLRAEDTAVYYCASGVYSFDYRGQGTLVTVSSGTGGGGSGGGGSGGGGSEFQSPSSLAVSAGEKVTMSCKSSQSLLNSRTRKNYLAWYQQKPGQSPKLLIYWASTRESGVPDRFTGSGSGTDFTLTISSVQAEDLAVYYCKQSNLYTFGGGTKLEIKLEIQNPDPAVYQLRDSKSSDKSVCLFTDFDSQTNVSQSKDSDVYITDKCVLDMRSMDFKSNSAVAWSNKSDFACANAFNNSIIPEDTFFPSPESSDSTDHVKPKETENTKQPSKSCHKPKAIVHTEKVNMMSLTVLGLRMLFAKTVAVNFLLTAKLFFLLTARAKRSGSGVKQTLNFDLLKLAGDVESNPGPTSMDWIWRILFLVGAATGAHSGPQLQLQESGPGLVKPSETLSLTCTVSGDSISSGDYYWGWIRQPPGKGLEWIGHIYYSGVTYYNPSLKSRVTISVDTSRNQFSLKLSSVTAADTAVYYCTREDSSNWRSRGQGTLVTVSSGSGGGGSGGGGSGGGGSFEQVQLEESGPELVKPGASVKLSCKASGYTFTEYIIHWVKQRSGQGLEWIGWFYPGSGSIKYNEKFKDKATLTADKSSSTVYMELSGLTSEDSAVYFCARHDGYSYFDYWGQGTTLTVSSTREDLKNVFPPEVAVFEPSEAEISHTQKATLVCLATGFYPDHVELSWWVNGKEVHSGVCTDPQPLKEQPALNDSRYCLSSRLRVSATFWQNPRNHFRCQVQFYGLSENDEWTQDRAKPVTQIVSAEAWGRADDVIKIHWQEKKSNTILGSQEGNTMKTNDTYMKFSWLTVPEKSLDKEHRCIVRHENNKNGVDQEIIFPPIKTDVITMDPKDNCSKDANDTLLLQLTNTSAYYMYLLLLLKSVVYFAIITCCLLMAMVKRKDSRG

SEQ ID NO: 15248 - protein, 1000 aa, synthetic construct
MALPVTALLLPLALLLHAARPEVQLVESGGGLVQPGGSLRLSCAASGFSFSDFWMSWVRQAPGKGLEWVATISQAGSEKDYVDSVKGRFTISRDNAKKSLYLQMNSLRAEDTAVYYCASGVYSFDYRGQGTLVTVSSGTGGGGSGGGGSGGGGSEFDIQMTQSPSSLSASLGERVSLTCRATQELSGYLSWLQQKPDGTIKRLIYAASTLDSGVPKRFSGNRSGSDYSLTISSLESEDFADYYCLQYAIYPYTFGGGTKLEIKLEIQNPDPAVYQLRDSKSSDKSVCLFTDFDSQTNVSQSKDSDVYITDKCVLDMRSMDFKSNSAVAWSNKSDFACANAFNNSIIPEDTFFPSPESSDSTDHVKPKETENTKQPSKSCHKPKAIVHTEKVNMMSLTVLGLRMLFAKTVAVNFLLTAKLFFLLTARAKRSGSGVKQTLNFDLLKLAGDVESNPGPTSMDWIWRILFLVGAATGAHSGPQLQLQESGPGLVKPSETLSLTCTVSGDSISSGDYYWGWIRQPPGKGLEWIGHIYYSGVTYYNPSLKSRVTISVDTSRNQFSLKLSSVTAADTAVYYCTREDSSNWRSRGQGTLVTVSSGSGGGGSGGGGSGGGGSFEEVQLQQSGPELVKPGASVKMSCKASGYTFTSYFIHWVKQKPGQGLEWIGFINPYNDGSKYNEKFKGKATLTSDKSSSTAYMELSSLTSEDSAVYYCTRDDGYYGYAMDYWGQGTSVTVSSTREDLKNVFPPEVAVFEPSEAEISHTQKATLVCLATGFYPDHVELSWWVNGKEVHSGVCTDPQPLKEQPALNDSRYCLSSRLRVSATFWQNPRNHFRCQVQFYGLSENDEWTQDRAKPVTQIVSAEAWGRADDVIKIHWQEKKSNTILGSQEGNTMKTNDTYMKFSWLTVPEKSLDKEHRCIVRHENNKNGVDQEIIFPPIKTDVITMDPKDNCSKDANDTLLLQLTNTSAYYMYLLLLLKSVVYFAIITCCLLMAMVKRKDSRG

SEQ ID NO: 15249 - protein, 1005 aa, synthetic construct
MALPVTALLLPLALLLHAARPEVQLVESGGGLVQPGGSLRLSCAASGFSFSDFWMSWVRQAPGKGLEWVATISQAGSEKDYVDSVKGRFTISRDNAKKSLYLQMNSLRAEDTAVYYCASGVYSFDYRGQGTLVTVSSGTGGGGSGGGGSGGGGSEFDTIVLTQSPASLAVSLGQRATISCRASESVDSYGNSFMHWYQQKPGQPPKLLIYLASNLESGVPARFSGSGSRTDFTLTIDPVEADDAATYYCQQNNYDPWTFGGGTKLEIKLEIQNPDPAVYQLRDSKSSDKSVCLFTDFDSQTNVSQSKDSDVYITDKCVLDMRSMDFKSNSAVAWSNKSDFACANAFNNSIIPEDTFFPSPESSDSTDHVKPKETENTKQPSKSCHKPKAIVHTEKVNMMSLTVLGLRMLFAKTVAVNFLLTAKLFFLLTARAKRSGSGVKQTLNFDLLKLAGDVESNPGPTSMDWIWRILFLVGAATGAHSGPQLQLQESGPGLVKPSETLSLTCTVSGDSISSGDYYWGWIRQPPGKGLEWIGHIYYSGVTYYNPSLKSRVTISVDTSRNQFSLKLSSVTAADTAVYYCTREDSSNWRSRGQGTLVTVSSGSGGGGSGGGGSGGGGSFEEVQLQQSGPELVKPGASVKMSCKASGYTFTSYVMHWVKQKPGQGLEWIGYINPYNDGTKYNEKFKGKATLTSDTSSSTAYMELNSLTSEDSAVYFCARPIYFDNDYFDYWGQGTTLKVSSTREDLKNVFPPEVAVFEPSEAEISHTQKATLVCLATGFYPDHVELSWWVNGKEVHSGVCTDPQPLKEQPALNDSRYCLSSRLRVSATFWQNPRNHFRCQVQFYGLSENDEWTQDRAKPVTQIVSAEAWGRADDVIKIHWQEKKSNTILGSQEGNTMKTNDTYMKFSWLTVPEKSLDKEHRCIVRHENNKNGVDQEIIFPPIKTDVITMDPKDNCSKDANDTLLLQLTNTSAYYMYLLLLLKSVVYFAIITCCLLMAMVKRKDSRG

SEQ ID NO: 15250 - protein, 1000 aa, synthetic construct
MALPVTALLLPLALLLHAARPEVQLVESGGGLVQPGGSLRLSCAASGFSFSDFWMSWVRQAPGKGLEWVATISQAGSEKDYVDSVKGRFTISRDNAKKSLYLQMNSLRAEDTAVYYCASGVYSFDYRGQGTLVTVSSGTGGGGSGGGGSGGGGSEFDIQMTQSPSSLSASVGDRVTITCKASQDVGIAVAWYQQKPGKVPKLLIYWASTRHTGVPDRFSGSGSGTDFTLTISSLQPEDVATYYCQQYSSYPYTFGQGTKVEIKRLEIQNPDPAVYQLRDSKSSDKSVCLFTDFDSQTNVSQSKDSDVYITDKCVLDMRSMDFKSNSAVAWSNKSDFACANAFNNSIIPEDTFFPSPESSDSTDHVKPKETENTKQPSKSCHKPKAIVHTEKVNMMSLTVLGLRMLFAKTVAVNFLLTAKLFFLLTARAKRSGSGVKQTLNFDLLKLAGDVESNPGPTSMDWIWRILFLVGAATGAHSGPQLQLQESGPGLVKPSETLSLTCTVSGDSISSGDYYWGWIRQPPGKGLEWIGHIYYSGVTYYNPSLKSRVTISVDTSRNQFSLKLSSVTAADTAVYYCTREDSSNWRSRGQGTLVTVSSGSGGGGSGGGGSGGGGSFEEVQLVESGGGLVQPGGSLRLSCAASGFDFSRYWMSWVRQAPGKGLEWIGEINPDSSTINYAPSLKDKFIISRDNAKNSLYLQMNSLRAEDTAVYYCARPDGNYWYFDVWGQGTLVTVSSTREDLKNVFPPEVAVFEPSEAEISHTQKATLVCLATGFYPDHVELSWWVNGKEVHSGVCTDPQPLKEQPALNDSRYCLSSRLRVSATFWQNPRNHFRCQVQFYGLSENDEWTQDRAKPVTQIVSAEAWGRADDVIKIHWQEKKSNTILGSQEGNTMKTNDTYMKFSWLTVPEKSLDKEHRCIVRHENNKNGVDQEIIFPPIKTDVITMDPKDNCSKDANDTLLLQLTNTSAYYMYLLLLLKSVVYFAIITCCLLMAMVKRKDSRG

SEQ ID NO: 15251 - protein, 1000 aa, synthetic construct
MALPVTALLLPLALLLHAARPEVQLVESGGGLVQPGGSLRLSCAASGFSFSDFWMSWVRQAPGKGLEWVATISQAGSEKDYVDSVKGRFTISRDNAKKSLYLQMNSLRAEDTAVYYCASGVYSFDYRGQGTLVTVSSGTGGGGSGGGGSGGGGSEFDIVMTQSQKSMSTSVGDRVSITCKASQDVITGVAWYQQKPGQSPKLLIYSASYRYTGVPDRFTGSGSGTDFTFTISNVQAEDLAVYYCQQHYSTPLTFGAGTKLELKLEIQNPDPAVYQLRDSKSSDKSVCLFTDFDSQTNVSQSKDSDVYITDKCVLDMRSMDFKSNSAVAWSNKSDFACANAFNNSIIPEDTFFPSPESSDSTDHVKPKETENTKQPSKSCHKPKAIVHTEKVNMMSLTVLGLRMLFAKTVAVNFLLTAKLFFLLTARAKRSGSGVKQTLNFDLLKLAGDVESNPGPTSMDWIWRILFLVGAATGAHSGPQLQLQESGPGLVKPSETLSLTCTVSGDSISSGDYYWGWIRQPPGKGLEWIGHIYYSGVTYYNPSLKSRVTISVDTSRNQFSLKLSSVTAADTAVYYCTREDSSNWRSRGQGTLVTVSSGSGGGGSGGGGSGGGGSFEQVQLQQPGAELVRPGASVKLSCKASGYSFTTYWMNWVKQRPGQGLEWIGMIHPSDSETRLNQKFKDKATLTVDKSSSTAYMQLSSPTSEDSAVYYCARSTMIATRAMDYWGQGTSVTVSSTREDLKNVFPPEVAVFEPSEAEISHTQKATLVCLATGFYPDHVELSWWVNGKEVHSGVCTDPQPLKEQPALNDSRYCLSSRLRVSATFWQNPRNHFRCQVQFYGLSENDEWTQDRAKPVTQIVSAEAWGRADDVIKIHWQEKKSNTILGSQEGNTMKTNDTYMKFSWLTVPEKSLDKEHRCIVRHENNKNGVDQEIIFPPIKTDVITMDPKDNCSKDANDTLLLQLTNTSAYYMYLLLLLKSVVYFAIITCCLLMAMVKRKDSRG

SEQ ID NO: 15252 - protein, 1006 aa, synthetic construct
MALPVTALLLPLALLLHAARPEVQLVESGGGLVQPGGSLRLSCAASGFSFSDFWMSWVRQAPGKGLEWVATISQAGSEKDYVDSVKGRFTISRDNAKKSLYLQMNSLRAEDTAVYYCASGVYSFDYRGQGTLVTVSSGTGGGGSGGGGSGGGGSEFQSVLTQPPSVSGAPGQRVTISCTGSGSNIGAPYDVSWYQQLPGTAPKLLIYHNNKRPSGVPDRFSGSKSGTSASLAITGLQAEDEADYYCATVEAGLSGSVFGGGTKLTVLGALEIQNPDPAVYQLRDSKSSDKSVCLFTDFDSQTNVSQSKDSDVYITDKCVLDMRSMDFKSNSAVAWSNKSDFACANAFNNSIIPEDTFFPSPESSDSTDHVKPKETENTKQPSKSCHKPKAIVHTEKVNMMSLTVLGLRMLFAKTVAVNFLLTAKLFFLLTARAKRSGSGVKQTLNFDLLKLAGDVESNPGPTSMDWIWRILFLVGAATGAHSGPQLQLQESGPGLVKPSETLSLTCTVSGDSISSGDYYWGWIRQPPGKGLEWIGHIYYSGVTYYNPSLKSRVTISVDTSRNQFSLKLSSVTAADTAVYYCTREDSSNWRSRGQGTLVTVSSGSGGGGSGGGGSGGGGSFEQVQLVQSGAEVKKPGASVKVSCKVSGYTLTELSIHWVRQAPGKGLEWMGGFDPEENEIVYAQRFQGRVTMTEDTSTDTAYMELSSLRSEDTAVYYCAIVGSFSPLTLGLWGQGTMVTVSSTREDLKNVFPPEVAVFEPSEAEISHTQKATLVCLATGFYPDHVELSWWVNGKEVHSGVCTDPQPLKEQPALNDSRYCLSSRLRVSATFWQNPRNHFRCQVQFYGLSENDEWTQDRAKPVTQIVSAEAWGRADDVIKIHWQEKKSNTILGSQEGNTMKTNDTYMKFSWLTVPEKSLDKEHRCIVRHENNKNGVDQEIIFPPIKTDVITMDPKDNCSKDANDTLLLQLTNTSAYYMYLLLLLKSVVYFAIITCCLLMAMVKRKDSRG

SEQ ID NO: 15253 - protein, 1006 aa, synthetic construct
MALPVTALLLPLALLLHAARPEVQLVESGGGLVQPGGSLRLSCAASGFSFSDFWMSWVRQAPGKGLEWVATISQAGSEKDYVDSVKGRFTISRDNAKKSLYLQMNSLRAEDTAVYYCASGVYSFDYRGQGTLVTVSSGTGGGGSGGGGSGGGGSEFQSVLTQPPSVSGAPGQRVTISCTGSGSNIGAPYDVSWYQQLPGTAPKLLIYHNNKRPSGVPDRFSGSKSGTSASLAITGLQAEDEADYYCQSYDSSSISTIFGGGTKLTVLGALEIQNPDPAVYQLRDSKSSDKSVCLFTDFDSQTNVSQSKDSDVYITDKCVLDMRSMDFKSNSAVAWSNKSDFACANAFNNSIIPEDTFFPSPESSDSTDHVKPKETENTKQPSKSCHKPKAIVHTEKVNMMSLTVLGLRMLFAKTVAVNFLLTAKLFFLLTARAKRSGSGVKQTLNFDLLKLAGDVESNPGPTSMDWIWRILFLVGAATGAHSGPQLQLQESGPGLVKPSETLSLTCTVSGDSISSGDYYWGWIRQPPGKGLEWIGHIYYSGVTYYNPSLKSRVTISVDTSRNQFSLKLSSVTAADTAVYYCTREDSSNWRSRGQGTLVTVSSGSGGGGSGGGGSGGGGSFEQVQLVQSGAEVKKPGASVKVSCKVSGYTLTELSIHWVRQAPGKGLEWMGGFDPEENEIVYAQRFQGRVTMTEDTSTDTAYMELSSLRSEDTAVYYCAIVGSFSGIAYRPWGQGTMVTVSSTREDLKNVFPPEVAVFEPSEAEISHTQKATLVCLATGFYPDHVELSWWVNGKEVHSGVCTDPQPLKEQPALNDSRYCLSSRLRVSATFWQNPRNHFRCQVQFYGLSENDEWTQDRAKPVTQIVSAEAWGRADDVIKIHWQEKKSNTILGSQEGNTMKTNDTYMKFSWLTVPEKSLDKEHRCIVRHENNKNGVDQEIIFPPIKTDVITMDPKDNCSKDANDTLLLQLTNTSAYYMYLLLLLKSVVYFAIITCCLLMAMVKRKDSRG

SEQ ID NO: 15254 - protein, 994 aa, synthetic construct
MALPVTALLLPLALLLHAARPEVQLVESGGGLVQPGGSLRLSCAASGFSFSDFWMSWVRQAPGKGLEWVATISQAGSEKDYVDSVKGRFTISRDNAKKSLYLQMNSLRAEDTAVYYCASGVYSFDYRGQGTLVTVSSGTGGGGSGGGGSGGGGSEFDIQMTQSPSSLSASVGDRVTITCRASQGIRNNLAWYQQKPGKAPKRLIYAASNLQSGVPSRFTGSGSGTEFTLIVSSLQPEDFATYYCLQHHSYPLTSGGGTKVELEIQNPDPAVYQLRDSKSSDKSVCLFTDFDSQTNVSQSKDSDVYITDKCVLDMRSMDFKSNSAVAWSNKSDFACANAFNNSIIPEDTFFPSPESSDSTDHVKPKETENTKQPSKSCHKPKAIVHTEKVNMMSLTVLGLRMLFAKTVAVNFLLTAKLFFLLTARAKRSGSGVKQTLNFDLLKLAGDVESNPGPTSMDWIWRILFLVGAATGAHSGPQLQLQESGPGLVKPSETLSLTCTVSGDSISSGDYYWGWIRQPPGKGLEWIGHIYYSGVTYYNPSLKSRVTISVDTSRNQFSLKLSSVTAADTAVYYCTREDSSNWRSRGQGTLVTVSSGSGGGGSGGGGSGGGGSFEEVQVLESGGGLVQPGGSLRLSCAASGFTFSSYAMSWVRQAPGKGLEWVSAISGSGGSTNYADSVKGRFTISRDNSKNTLYLQMNSLRAEDTAVYYCAGSSGWSEYWGQGTLVTVSSTREDLKNVFPPEVAVFEPSEAEISHTQKATLVCLATGFYPDHVELSWWVNGKEVHSGVCTDPQPLKEQPALNDSRYCLSSRLRVSATFWQNPRNHFRCQVQFYGLSENDEWTQDRAKPVTQIVSAEAWGRADDVIKIHWQEKKSNTILGSQEGNTMKTNDTYMKFSWLTVPEKSLDKEHRCIVRHENNKNGVDQEIIFPPIKTDVITMDPKDNCSKDANDTLLLQLTNTSAYYMYLLLLLKSVVYFAIITCCLLMAMVKRKDSRG

SEQ ID NO: 15255 - protein, 1000 aa, synthetic construct
MALPVTALLLPLALLLHAARPEVQLVESGGGLVQPGGSLRLSCAASGFSFSDFWMSWVRQAPGKGLEWVATISQAGSEKDYVDSVKGRFTISRDNAKKSLYLQMNSLRAEDTAVYYCASGVYSFDYRGQGTLVTVSSGTGGGGSGGGGSGGGGSEFDEIQLVQSGAEVKKPGESLRISCKGSGFNIEDYYIHWVRQMPGKGLEWMGRIDPENDETKYGPIFQGHVTISADTSINTVYLQWSSLKASDTAMYYCAFRGGVYWGQGTTVTVSSLEIQNPDPAVYQLRDSKSSDKSVCLFTDFDSQTNVSQSKDSDVYITDKCVLDMRSMDFKSNSAVAWSNKSDFACANAFNNSIIPEDTFFPSPESSDSTDHVKPKETENTKQPSKSCHKPKAIVHTEKVNMMSLTVLGLRMLFAKTVAVNFLLTAKLFFLLTARAKRSGSGVKQTLNFDLLKLAGDVESNPGPTSMDWIWRILFLVGAATGAHSGPQLQLQESGPGLVKPSETLSLTCTVSGDSISSGDYYWGWIRQPPGKGLEWIGHIYYSGVTYYNPSLKSRVTISVDTSRNQFSLKLSSVTAADTAVYYCTREDSSNWRSRGQGTLVTVSSGSGGGGSGGGGSGGGGSFEDVVMTQSPDSLAVSLGERATINCKSSQSLLDSDGKTYLNWLQQKPGQPPKRLISLVSKLDSGVPDRFSGSGSGTDFTLTISSLQAEDVAVYYCWQGTHFPGTFGGGTKVEIKTREDLKNVFPPEVAVFEPSEAEISHTQKATLVCLATGFYPDHVELSWWVNGKEVHSGVCTDPQPLKEQPALNDSRYCLSSRLRVSATFWQNPRNHFRCQVQFYGLSENDEWTQDRAKPVTQIVSAEAWGRADDVIKIHWQEKKSNTILGSQEGNTMKTNDTYMKFSWLTVPEKSLDKEHRCIVRHENNKNGVDQEIIFPPIKTDVITMDPKDNCSKDANDTLLLQLTNTSAYYMYLLLLLKSVVYFAIITCCLLMAMVKRKDSRG

SEQ ID NO: 15256 - protein, 1007 aa, synthetic construct
MALPVTALLLPLALLLHAARPEVQLVESGGGLVQPGGSLRLSCAASGFSFSDFWMSWVRQAPGKGLEWVATISQAGSEKDYVDSVKGRFTISRDNAKKSLYLQMNSLRAEDTAVYYCASGVYSFDYRGQGTLVTVSSGTGGGGSGGGGSGGGGSEFDELVMTQSPSSLTVTAGEKVTMSCKSSQSLLNSGNQKNYLTWYQQKPGQPPKLLIYWASTRESGVPDRFTGSGSGTDFTLTISSVQAEDLAVYYCQNDYSYPLTFGAGTKLEIKLEIQNPDPAVYQLRDSKSSDKSVCLFTDFDSQTNVSQSKDSDVYITDKCVLDMRSMDFKSNSAVAWSNKSDFACANAFNNSIIPEDTFFPSPESSDSTDHVKPKETENTKQPSKSCHKPKAIVHTEKVNMMSLTVLGLRMLFAKTVAVNFLLTAKLFFLLTARAKRSGSGVKQTLNFDLLKLAGDVESNPGPTSMDWIWRILFLVGAATGAHSGPQLQLQESGPGLVKPSETLSLTCTVSGDSISSGDYYWGWIRQPPGKGLEWIGHIYYSGVTYYNPSLKSRVTISVDTSRNQFSLKLSSVTAADTAVYYCTREDSSNWRSRGQGTLVTVSSGSGGGGSGGGGSGGGGSFEEVQLLEQSGAELVRPGTSVKISCKASGYAFTNYWLGWVKQRPGHGLEWIGDIFPGSGNIHYNEKFKGKATLTADKSSSTAYMQLSSLTFEDSAVYFCARLRNWDEPMDYWGQGTTVTVSSTREDLKNVFPPEVAVFEPSEAEISHTQKATLVCLATGFYPDHVELSWWVNGKEVHSGVCTDPQPLKEQPALNDSRYCLSSRLRVSATFWQNPRNHFRCQVQFYGLSENDEWTQDRAKPVTQIVSAEAWGRADDVIKIHWQEKKSNTILGSQEGNTMKTNDTYMKFSWLTVPEKSLDKEHRCIVRHENNKNGVDQEIIFPPIKTDVITMDPKDNCSKDANDTLLLQLTNTSAYYMYLLLLLKSVVYFAIITCCLLMAMVKRKDSRG

SEQ ID NO: 15257 - protein, 1008 aa, synthetic construct
MALPVTALLLPLALLLHAARPEVQLVESGGGLVQPGGSLRLSCAASGFSFSDFWMSWVRQAPGKGLEWVATISQAGSEKDYVDSVKGRFTISRDNAKKSLYLQMNSLRAEDTAVYYCASGVYSFDYRGQGTLVTVSSGTGGGGSGGGGSGGGGSEFDELQMTQSPSSLSASVGDRVTITCRASQSISSYLNWYQQKPGQPPKLLIYWASTRESGVPDRFSGSESGTNYTLTISSLQPEDFATYFCQQSDSLPITFGQGTRLDIQLEIQNPDPAVYQLRDSKSSDKSVCLFTDFDSQTNVSQSKDSDVYITDKCVLDMRSMDFKSNSAVAWSNKSDFACANAFNNSIIPEDTFFPSPESSDSTDHVKPKETENTKQPSKSCHKPKAIVHTEKVNMMSLTVLGLRMLFAKTVAVNFLLTAKLFFLLTARAKRSGSGVKQTLNFDLLKLAGDVESNPGPTSMDWIWRILFLVGAATGAHSGPQLQLQESGPGLVKPSETLSLTCTVSGDSISSGDYYWGWIRQPPGKGLEWIGHIYYSGVTYYNPSLKSRVTISVDTSRNQFSLKLSSVTAADTAVYYCTREDSSNWRSRGQGTLVTVSSGSGGGGSGGGGSGGGGSFEEVQLLESGGGVVQPGRSLRLSCAASGFTFSSYGMHWVRQAPGKGLEWVAVISYDGSNKYYADSVKGRFTISRDNSKNTLYLQMNSLRAEDTAVYYCAKDMGWGSGWRPYYYYGMDVWGQGTTVTVSSTREDLKNVFPPEVAVFEPSEAEISHTQKATLVCLATGFYPDHVELSWWVNGKEVHSGVCTDPQPLKEQPALNDSRYCLSSRLRVSATFWQNPRNHFRCQVQFYGLSENDEWTQDRAKPVTQIVSAEAWGRADDVIKIHWQEKKSNTILGSQEGNTMKTNDTYMKFSWLTVPEKSLDKEHRCIVRHENNKNGVDQEIIFPPIKTDVITMDPKDNCSKDANDTLLLQLTNTSAYYMYLLLLLKSVVYFAIITCCLLMAMVKRKDSRG

SEQ ID NO: 15258 - protein, 1005 aa, synthetic construct
MALPVTALLLPLALLLHAARPEVQLVESGGGLVQPGGSLRLSCAASGFSFSDFWMSWVRQAPGKGLEWVATISQAGSEKDYVDSVKGRFTISRDNAKKSLYLQMNSLRAEDTAVYYCASGVYSFDYRGQGTLVTVSSGTGGGGSGGGGSGGGGSEFDDIQMTQSPSSLSASVGDRVTITCRASQSISSYLNWYQQKPGKAPKLLIYAASSLQSGVPSRFSGSGSGTDFTLTISSLQPEDLATYYCQQSYSTPFTFGPGTKVDIKLEIQNPDPAVYQLRDSKSSDKSVCLFTDFDSQTNVSQSKDSDVYITDKCVLDMRSMDFKSNSAVAWSNKSDFACANAFNNSIIPEDTFFPSPESSDSTDHVKPKETENTKQPSKSCHKPKAIVHTEKVNMMSLTVLGLRMLFAKTVAVNFLLTAKLFFLLTARAKRSGSGVKQTLNFDLLKLAGDVESNPGPTSMDWIWRILFLVGAATGAHSGPQLQLQESGPGLVKPSETLSLTCTVSGDSISSGDYYWGWIRQPPGKGLEWIGHIYYSGVTYYNPSLKSRVTISVDTSRNQFSLKLSSVTAADTAVYYCTREDSSNWRSRGQGTLVTVSSGSGGGGSGGGGSGGGGSFEVHEVQLVQSGAEVKKPGSSVKVSCKASGGTFSSYAISWVRQAPGQGLEWMGGIIPIFGTANYAQKFQGRVTITADKSTSTAYMELSSLRSEDTAVYYCATFALFGFREQAFDIWGQGTTVTVSSTREDLKNVFPPEVAVFEPSEAEISHTQKATLVCLATGFYPDHVELSWWVNGKEVHSGVCTDPQPLKEQPALNDSRYCLSSRLRVSATFWQNPRNHFRCQVQFYGLSENDEWTQDRAKPVTQIVSAEAWGRADDVIKIHWQEKKSNTILGSQEGNTMKTNDTYMKFSWLTVPEKSLDKEHRCIVRHENNKNGVDQEIIFPPIKTDVITMDPKDNCSKDANDTLLLQLTNTSAYYMYLLLLLKSVVYFAIITCCLLMAMVKRKDSRG

SEQ ID NO: 15259 - protein, 1003 aa, synthetic construct
MALPVTALLLPLALLLHAARPEVQLVESGGGLVQPGGSLRLSCAASGFSFSDFWMSWVRQAPGKGLEWVATISQAGSEKDYVDSVKGRFTISRDNAKKSLYLQMNSLRAEDTAVYYCASGVYSFDYRGQGTLVTVSSGTGGGGSGGGGSGGGGSEFDIVLTQSPLSLAVSLGQPAIISCKASQSVSFAGTSLMHWYHQKPGQQPRLLIYRASNLEAGVPDRFSGSGSKTDFTLTISPVEAEDAATYYCQQSREYPYTFGGGTKLEIKRLEIQNPDPAVYQLRDSKSSDKSVCLFTDFDSQTNVSQSKDSDVYITDKCVLDMRSMDFKSNSAVAWSNKSDFACANAFNNSIIPEDTFFPSPESSDSTDHVKPKETENTKQPSKSCHKPKAIVHTEKVNMMSLTVLGLRMLFAKTVAVNFLLTAKLFFLLTARAKRSGSGVKQTLNFDLLKLAGDVESNPGPTSMDWIWRILFLVGAATGAHSGPQLQLQESGPGLVKPSETLSLTCTVSGDSISSGDYYWGWIRQPPGKGLEWIGHIYYSGVTYYNPSLKSRVTISVDTSRNQFSLKLSSVTAADTAVYYCTREDSSNWRSRGQGTLVTVSSGSGGGGSGGGGSGGGGSFEQVQLVQSGAEVVKPGASVKISCKASGYTFTGYFMNWVKQSPGQSLEWIGRIHPYDGDTFYNQKFQGKATLTVDKSSNTAHMELLSLTSEDFAVYYCTRYDGSRAMDYWGQGTTVTVSSTREDLKNVFPPEVAVFEPSEAEISHTQKATLVCLATGFYPDHVELSWWVNGKEVHSGVCTDPQPLKEQPALNDSRYCLSSRLRVSATFWQNPRNHFRCQVQFYGLSENDEWTQDRAKPVTQIVSAEAWGRADDVIKIHWQEKKSNTILGSQEGNTMKTNDTYMKFSWLTVPEKSLDKEHRCIVRHENNKNGVDQEIIFPPIKTDVITMDPKDNCSKDANDTLLLQLTNTSAYYMYLLLLLKSVVYFAIITCCLLMAMVKRKDSRG

SEQ ID NO: 15260 - protein, 1000 aa, synthetic construct
MALPVTALLLPLALLLHAARPEVQLVESGGGLVQPGGSLRLSCAASGFSFSDFWMSWVRQAPGKGLEWVATISQAGSEKDYVDSVKGRFTISRDNAKKSLYLQMNSLRAEDTAVYYCASGVYSFDYRGQGTLVTVSSGTGGGGSGGGGSGGGGSEFDDVVMTQTPLSLPVTPGEPASISCRSSQSLVHRNGNTYLHWYLQKPGQSPKLLIHKVSNRFSGVPDRFSGSGSGTDFTLKISRVEAEDLGVYFCSQSTHVPPLTFGAGTKLELKLEIQNPDPAVYQLRDSKSSDKSVCLFTDFDSQTNVSQSKDSDVYITDKCVLDMRSMDFKSNSAVAWSNKSDFACANAFNNSIIPEDTFFPSPESSDSTDHVKPKETENTKQPSKSCHKPKAIVHTEKVNMMSLTVLGLRMLFAKTVAVNFLLTAKLFFLLTARAKRSGSGVKQTLNFDLLKLAGDVESNPGPTSMDWIWRILFLVGAATGAHSGPQLQLQESGPGLVKPSETLSLTCTVSGDSISSGDYYWGWIRQPPGKGLEWIGHIYYSGVTYYNPSLKSRVTISVDTSRNQFSLKLSSVTAADTAVYYCTREDSSNWRSRGQGTLVTVSSGSGGGGSGGGGSGGGGSFEEVQLVQSGAEVEKPGASVKISCKASGSSFTGYNMNWVRQNIGKSLEWIGAIDPYYGGTSYNQKFKGRATLTVDKSTSTAYMHLKSLRSEDTAVYYCVSGMEYWGQGTSVTVSSTREDLKNVFPPEVAVFEPSEAEISHTQKATLVCLATGFYPDHVELSWWVNGKEVHSGVCTDPQPLKEQPALNDSRYCLSSRLRVSATFWQNPRNHFRCQVQFYGLSENDEWTQDRAKPVTQIVSAEAWGRADDVIKIHWQEKKSNTILGSQEGNTMKTNDTYMKFSWLTVPEKSLDKEHRCIVRHENNKNGVDQEIIFPPIKTDVITMDPKDNCSKDANDTLLLQLTNTSAYYMYLLLLLKSVVYFAIITCCLLMAMVKRKDSRG

SEQ ID NO: 15261 - protein, 998 aa, synthetic construct
MALPVTALLLPLALLLHAARPEVQLVESGGGLVQPGGSLRLSCAASGFSFSDFWMSWVRQAPGKGLEWVATISQAGSEKDYVDSVKGRFTISRDNAKKSLYLQMNSLRAEDTAVYYCASGVYSFDYRGQGTLVTVSSGTGGGGSGGGGSGGGGSEFDEIVMTQTPATLSVSAGERVTITCKASQSVSNDVTWYQQKPGQAPRLLIYSASNRYSGVPARFSGSGYGTEFTFTISSVQSEDFAVYFCQQDYSSFGQGTKLEIKRLEIQNPDPAVYQLRDSKSSDKSVCLFTDFDSQTNVSQSKDSDVYITDKCVLDMRSMDFKSNSAVAWSNKSDFACANAFNNSIIPEDTFFPSPESSDSTDHVKPKETENTKQPSKSCHKPKAIVHTEKVNMMSLTVLGLRMLFAKTVAVNFLLTAKLFFLLTARAKRSGSGVKQTLNFDLLKLAGDVESNPGPTSMDWIWRILFLVGAATGAHSGPQLQLQESGPGLVKPSETLSLTCTVSGDSISSGDYYWGWIRQPPGKGLEWIGHIYYSGVTYYNPSLKSRVTISVDTSRNQFSLKLSSVTAADTAVYYCTREDSSNWRSRGQGTLVTVSSGSGGGGSGGGGSGGGGSFEQVQLVESGPGVVQPGRSLRISCAVSGFSVTNYGVHWVRQPPGKGLEWLGVIWAGGITNYNSAFMSRLTISKDNSKNTVYLQMNSLRAEDTAMYYCASRGGHYGYALDYWGQGTLVTVSSTREDLKNVFPPEVAVFEPSEAEISHTQKATLVCLATGFYPDHVELSWWVNGKEVHSGVCTDPQPLKEQPALNDSRYCLSSRLRVSATFWQNPRNHFRCQVQFYGLSENDEWTQDRAKPVTQIVSAEAWGRADDVIKIHWQEKKSNTILGSQEGNTMKTNDTYMKFSWLTVPEKSLDKEHRCIVRHENNKNGVDQEIIFPPIKTDVITMDPKDNCSKDANDTLLLQLTNTSAYYMYLLLLLKSVVYFAIITCCLLMAMVKRKDSRG

SEQ ID NO: 15262 - protein, 1000 aa, synthetic construct
MALPVTALLLPLALLLHAARPEVQLVESGGGLVQPGGSLRLSCAASGFSFSDFWMSWVRQAPGKGLEWVATISQAGSEKDYVDSVKGRFTISRDNAKKSLYLQMNSLRAEDTAVYYCASGVYSFDYRGQGTLVTVSSGTGGGGSGGGGSGGGGSEFDIQMTQTASSLPASLGDRVTISCSASQDISNYLNWYQQKPDGTVKLLIFYSSNLHSGVPSRFSGGGSGTDYSLTISNLEPEDIATYFCHQYSKLPWTFGGGTKLEIKRLEIQNPDPAVYQLRDSKSSDKSVCLFTDFDSQTNVSQSKDSDVYITDKCVLDMRSMDFKSNSAVAWSNKSDFACANAFNNSIIPEDTFFPSPESSDSTDHVKPKETENTKQPSKSCHKPKAIVHTEKVNMMSLTVLGLRMLFAKTVAVNFLLTAKLFFLLTARAKRSGSGVKQTLNFDLLKLAGDVESNPGPTSMDWIWRILFLVGAATGAHSGPQLQLQESGPGLVKPSETLSLTCTVSGDSISSGDYYWGWIRQPPGKGLEWIGHIYYSGVTYYNPSLKSRVTISVDTSRNQFSLKLSSVTAADTAVYYCTREDSSNWRSRGQGTLVTVSSGSGGGGSGGGGSGGGGSFEEVTLVESGGDFVKPGGSLKVSCAASGFAFSHYAMSWVRQTPAKRLEWVAYISSGGSGTYYSDSVKGRFTISRDNAKNTLYLQMRSLRSEDSAMYFCTRVKLGTYYFDSWGQGTTLTVSSTREDLKNVFPPEVAVFEPSEAEISHTQKATLVCLATGFYPDHVELSWWVNGKEVHSGVCTDPQPLKEQPALNDSRYCLSSRLRVSATFWQNPRNHFRCQVQFYGLSENDEWTQDRAKPVTQIVSAEAWGRADDVIKIHWQEKKSNTILGSQEGNTMKTNDTYMKFSWLTVPEKSLDKEHRCIVRHENNKNGVDQEIIFPPIKTDVITMDPKDNCSKDANDTLLLQLTNTSAYYMYLLLLLKSVVYFAIITCCLLMAMVKRKDSRG

SEQ ID NO: 15263 - protein, 1002 aa, synthetic construct
MALPVTALLLPLALLLHAARPEVQLVESGGGLVQPGGSLRLSCAASGFSFSDFWMSWVRQAPGKGLEWVATISQAGSEKDYVDSVKGRFTISRDNAKKSLYLQMNSLRAEDTAVYYCASGVYSFDYRGQGTLVTVSSGTGGGGSGGGGSGGGGSEFQFVLTQSPSASAALGASAKLTCTLSSAHKTYTIDWYQQQKGKAPRYLIQVKSDGTYTKATGVPDRFSGSSSGADRYLIIPSVQADDEADYYCGTDYTGGYVFGGGTQLTVTLEIQNPDPAVYQLRDSKSSDKSVCLFTDFDSQTNVSQSKDSDVYITDKCVLDMRSMDFKSNSAVAWSNKSDFACANAFNNSIIPEDTFFPSPESSDSTDHVKPKETENTKQPSKSCHKPKAIVHTEKVNMMSLTVLGLRMLFAKTVAVNFLLTAKLFFLLTARAKRSGSGVKQTLNFDLLKLAGDVESNPGPTSMDWIWRILFLVGAATGAHSGPQLQLQESGPGLVKPSETLSLTCTVSGDSISSGDYYWGWIRQPPGKGLEWIGHIYYSGVTYYNPSLKSRVTISVDTSRNQFSLKLSSVTAADTAVYYCTREDSSNWRSRGQGTLVTVSSGSGGGGSGGGGSGGGGSFEEQLKESGGGLFKPTDTLTLTCTVSGFSLSYYGVNWVRQAPGNGLEWIGTIGGSGDTYYASWAKSRSTIIRNTNENTVTLKMTSLTAADTATYFCVRYANIGYEYFNVWGPGTLVTVSSTREDLKNVFPPEVAVFEPSEAEISHTQKATLVCLATGFYPDHVELSWWVNGKEVHSGVCTDPQPLKEQPALNDSRYCLSSRLRVSATFWQNPRNHFRCQVQFYGLSENDEWTQDRAKPVTQIVSAEAWGRADDVIKIHWQEKKSNTILGSQEGNTMKTNDTYMKFSWLTVPEKSLDKEHRCIVRHENNKNGVDQEIIFPPIKTDVITMDPKDNCSKDANDTLLLQLTNTSAYYMYLLLLLKSVVYFAIITCCLLMAMVKRKDSRG

SEQ ID NO: 15264 - protein, 1007 aa, synthetic construct
MALPVTALLLPLALLLHAARPEVQLVESGGGLVQPGGSLRLSCAASGFSFSDFWMSWVRQAPGKGLEWVATISQAGSEKDYVDSVKGRFTISRDNAKKSLYLQMNSLRAEDTAVYYCASGVYSFDYRGQGTLVTVSSGTGGGGSGGGGSGGGGSEFQFVLTQSPSVSAALGASAKLTCTLSSAHKTYTIDWYQQQQGEAPRYLMQVKSDGSYTKGTGVPDRFSGSSSGADRYLIIPSVQADDEAGYVCGADDNGGYVFGGGTQLTVTLEIQNPDPAVYQLRDSKSSDKSVCLFTDFDSQTNVSQSKDSDVYITDKCVLDMRSMDFKSNSAVAWSNKSDFACANAFNNSIIPEDTFFPSPESSDSTDHVKPKETENTKQPSKSCHKPKAIVHTEKVNMMSLTVLGLRMLFAKTVAVNFLLTAKLFFLLTARAKRSGSGVKQTLNFDLLKLAGDVESNPGPTSMDWIWRILFLVGAATGAHSGPQLQLQESGPGLVKPSETLSLTCTVSGDSISSGDYYWGWIRQPPGKGLEWIGHIYYSGVTYYNPSLKSRVTISVDTSRNQFSLKLSSVTAADTAVYYCTREDSSNWRSRGQGTLVTVSSGSGGGGSGGGGSGGGGSFEQSVKESEGGLFKPTDTLTLTCTVSGFSLSRHALTWVRQAPGNGLEWIGAIDNAGTTYYASWAKSRSTITRNTDLHTVTLKMTSLTASDTATYFCARVFYDINSGYYLDGMDLWGPGTLVTVSSTREDLKNVFPPEVAVFEPSEAEISHTQKATLVCLATGFYPDHVELSWWVNGKEVHSGVCTDPQPLKEQPALNDSRYCLSSRLRVSATFWQNPRNHFRCQVQFYGLSENDEWTQDRAKPVTQIVSAEAWGRADDVIKIHWQEKKSNTILGSQEGNTMKTNDTYMKFSWLTVPEKSLDKEHRCIVRHENNKNGVDQEIIFPPIKTDVITMDPKDNCSKDANDTLLLQLTNTSAYYMYLLLLLKSVVYFAIITCCLLMAMVKRKDSRG

SEQ ID NO: 15265 - protein, 1001 aa, synthetic construct
MALPVTALLLPLALLLHAARPEVQLVESGGGLVQPGGSLRLSCAASGFSFSDFWMSWVRQAPGKGLEWVATISQAGSEKDYVDSVKGRFTISRDNAKKSLYLQMNSLRAEDTAVYYCASGVYSFDYRGQGTLVTVSSGTGGGGSGGGGSGGGGSEFDIQMTQSPSSLSASVGDRVTITCRASQGISSWLAWYQQKPEKAPKSLIYAASSLQSGVPSRFSGSGSGTDFTLTISSLQPEDFATYYCQQYNSYPPTFGGGTKVEIKLEIQNPDPAVYQLRDSKSSDKSVCLFTDFDSQTNVSQSKDSDVYITDKCVLDMRSMDFKSNSAVAWSNKSDFACANAFNNSIIPEDTFFPSPESSDSTDHVKPKETENTKQPSKSCHKPKAIVHTEKVNMMSLTVLGLRMLFAKTVAVNFLLTAKLFFLLTARAKRSGSGVKQTLNFDLLKLAGDVESNPGPTSMDWIWRILFLVGAATGAHSGPQLQLQESGPGLVKPSETLSLTCTVSGDSISSGDYYWGWIRQPPGKGLEWIGHIYYSGVTYYNPSLKSRVTISVDTSRNQFSLKLSSVTAADTAVYYCTREDSSNWRSRGQGTLVTVSSGSGGGGSGGGGSGGGGSFEEVQLVESGGGLVQPGESLRLSCVASGFTFSRYKMNWVRQAPGKGLEWVSYISRSGRDIYYADSVKGRFTISRDNAKNSLYLQMNSLRDEDTAVYYCAGTVTTYYYFGMDVWGHGTTVTVSSTREDLKNVFPPEVAVFEPSEAEISHTQKATLVCLATGFYPDHVELSWWVNGKEVHSGVCTDPQPLKEQPALNDSRYCLSSRLRVSATFWQNPRNHFRCQVQFYGLSENDEWTQDRAKPVTQIVSAEAWGRADDVIKIHWQEKKSNTILGSQEGNTMKTNDTYMKFSWLTVPEKSLDKEHRCIVRHENNKNGVDQEIIFPPIKTDVITMDPKDNCSKDANDTLLLQLTNTSAYYMYLLLLLKSVVYFAIITCCLLMAMVKRKDSRG

SEQ ID NO: 15266 - protein, 1002 aa, synthetic construct
MALPVTALLLPLALLLHAARPEVQLVESGGGLVQPGGSLRLSCAASGFSFSDFWMSWVRQAPGKGLEWVATISQAGSEKDYVDSVKGRFTISRDNAKKSLYLQMNSLRAEDTAVYYCASGVYSFDYRGQGTLVTVSSGTGGGGSGGGGSGGGGSEFDIQMTQSPSSLSASVGDRVTITCRASQGISSWLAWYQQKPEKAPKSLIYAASSLQSGVPSRFSGSGSGTDFTLTISSLQPEDFATYYCQQYNSYPPTFGGGTKVEIKLEIQNPDPAVYQLRDSKSSDKSVCLFTDFDSQTNVSQSKDSDVYITDKCVLDMRSMDFKSNSAVAWSNKSDFACANAFNNSIIPEDTFFPSPESSDSTDHVKPKETENTKQPSKSCHKPKAIVHTEKVNMMSLTVLGLRMLFAKTVAVNFLLTAKLFFLLTARAKRSGSGVKQTLNFDLLKLAGDVESNPGPTSMDWIWRILFLVGAATGAHSGPQLQLQESGPGLVKPSETLSLTCTVSGDSISSGDYYWGWIRQPPGKGLEWIGHIYYSGVTYYNPSLKSRVTISVDTSRNQFSLKLSSVTAADTAVYYCTREDSSNWRSRGQGTLVTVSSGSGGGGSGGGGSGGGGSFEEVQLVESGGGSVQPGESLRLSCVASGFTFSRYKMNWVRQAPGKGLEWVSYISRSGRDIYYADSVKGRFTISRDNAKNSLYLQMNSLRDEDTAVYYCAGTVTTYYYDFGMDVWGQGTTVTVSSTREDLKNVFPPEVAVFEPSEAEISHTQKATLVCLATGFYPDHVELSWWVNGKEVHSGVCTDPQPLKEQPALNDSRYCLSSRLRVSATFWQNPRNHFRCQVQFYGLSENDEWTQDRAKPVTQIVSAEAWGRADDVIKIHWQEKKSNTILGSQEGNTMKTNDTYMKFSWLTVPEKSLDKEHRCIVRHENNKNGVDQEIIFPPIKTDVITMDPKDNCSKDANDTLLLQLTNTSAYYMYLLLLLKSVVYFAIITCCLLMAMVKRKDSRG

SEQ ID NO: 15267 - protein, 1000 aa, synthetic construct
MALPVTALLLPLALLLHAARPEVQLVESGGGLVQPGGSLRLSCAASGFSFSDFWMSWVRQAPGKGLEWVATISQAGSEKDYVDSVKGRFTISRDNAKKSLYLQMNSLRAEDTAVYYCASGVYSFDYRGQGTLVTVSSGTGGGGSGGGGSGGGGSEFQSVLTQPPSASGTPGQRVTISCSGSRSNVGGNYVFWYQQVPGATPKLLIYRSNQRPSGVPDRFAGSKSGSSASLAISGLRSEDEADYYCATWDDSLSGFVFGTGTKVTVLGLEIQNPDPAVYQLRDSKSSDKSVCLFTDFDSQTNVSQSKDSDVYITDKCVLDMRSMDFKSNSAVAWSNKSDFACANAFNNSIIPEDTFFPSPESSDSTDHVKPKETENTKQPSKSCHKPKAIVHTEKVNMMSLTVLGLRMLFAKTVAVNFLLTAKLFFLLTARAKRSGSGVKQTLNFDLLKLAGDVESNPGPTSMDWIWRILFLVGAATGAHSGPQLQLQESGPGLVKPSETLSLTCTVSGDSISSGDYYWGWIRQPPGKGLEWIGHIYYSGVTYYNPSLKSRVTISVDTSRNQFSLKLSSVTAADTAVYYCTREDSSNWRSRGQGTLVTVSSGSGGGGSGGGGSGGGGSFEVQLVESGGGLVKPGGSLRLSCAASGFTFSDYYMSWIRQAPGKGLEWVSYISSSGSTIYYADSVKGRFTISRDNAKNSLYLQMNSLRAEDTAVYYCARGYGKAYDQWGQGTLVTVSSTREDLKNVFPPEVAVFEPSEAEISHTQKATLVCLATGFYPDHVELSWWVNGKEVHSGVCTDPQPLKEQPALNDSRYCLSSRLRVSATFWQNPRNHFRCQVQFYGLSENDEWTQDRAKPVTQIVSAEAWGRADDVIKIHWQEKKSNTILGSQEGNTMKTNDTYMKFSWLTVPEKSLDKEHRCIVRHENNKNGVDQEIIFPPIKTDVITMDPKDNCSKDANDTLLLQLTNTSAYYMYLLLLLKSVVYFAIITCCLLMAMVKRKDSRG

SEQ ID NO: 15268 - protein, 999 aa, synthetic construct
MALPVTALLLPLALLLHAARPEVQLVESGGGLVQPGGSLRLSCAASGFSFSDFWMSWVRQAPGKGLEWVATISQAGSEKDYVDSVKGRFTISRDNAKKSLYLQMNSLRAEDTAVYYCASGVYSFDYRGQGTLVTVSSGTGGGGSGGGGSGGGGSEFQSVVTQPPSMSAAPGQQVTISCSGGNSNIERNYVSWYLQLPGTAPKLVIFDNDRRPSGIPDRFSGSKSGTSATLGITGLQTGDEADYYCGTWDSSLRGWVFGGGTKLTVLGLEIQNPDPAVYQLRDSKSSDKSVCLFTDFDSQTNVSQSKDSDVYITDKCVLDMRSMDFKSNSAVAWSNKSDFACANAFNNSIIPEDTFFPSPESSDSTDHVKPKETENTKQPSKSCHKPKAIVHTEKVNMMSLTVLGLRMLFAKTVAVNFLLTAKLFFLLTARAKRSGSGVKQTLNFDLLKLAGDVESNPGPTSMDWIWRILFLVGAATGAHSGPQLQLQESGPGLVKPSETLSLTCTVSGDSISSGDYYWGWIRQPPGKGLEWIGHIYYSGVTYYNPSLKSRVTISVDTSRNQFSLKLSSVTAADTAVYYCTREDSSNWRSRGQGTLVTVSSGSGGGGSGGGGSGGGGSFEVQLVESGGGLIQPGGSLRLSCAASGFTFSNYAMNWVRQAPGKGLEWVSTINGRGSSTIYADSVKGRFTISRDNSKNTLYLQMNSLRAEDTATYYCARYISRGLGDSWGQGTLVTVTREDLKNVFPPEVAVFEPSEAEISHTQKATLVCLATGFYPDHVELSWWVNGKEVHSGVCTDPQPLKEQPALNDSRYCLSSRLRVSATFWQNPRNHFRCQVQFYGLSENDEWTQDRAKPVTQIVSAEAWGRADDVIKIHWQEKKSNTILGSQEGNTMKTNDTYMKFSWLTVPEKSLDKEHRCIVRHENNKNGVDQEIIFPPIKTDVITMDPKDNCSKDANDTLLLQLTNTSAYYMYLLLLLKSVVYFAIITCCLLMAMVKRKDSRG

SEQ ID NO: 15269 - protein, 1000 aa, synthetic construct
MALPVTALLLPLALLLHAARPEVQLVESGGGLVQPGGSLRLSCAASGFSFSDFWMSWVRQAPGKGLEWVATISQAGSEKDYVDSVKGRFTISRDNAKKSLYLQMNSLRAEDTAVYYCASGVYSFDYRGQGTLVTVSSGTGGGGSGGGGSGGGGSEFDVVMTQTPLSLPVSLGDQASISCRSSQSLVHSNGNTYLHWYLQKPGQSPKLLIYKVSNRFSGVPDRFSGSGSGTDFTLKISRVEAEDLGVYFCSQNTPVPPKFGSGTKLEIKLEIQNPDPAVYQLRDSKSSDKSVCLFTDFDSQTNVSQSKDSDVYITDKCVLDMRSMDFKSNSAVAWSNKSDFACANAFNNSIIPEDTFFPSPESSDSTDHVKPKETENTKQPSKSCHKPKAIVHTEKVNMMSLTVLGLRMLFAKTVAVNFLLTAKLFFLLTARAKRSGSGVKQTLNFDLLKLAGDVESNPGPTSMDWIWRILFLVGAATGAHSGPQLQLQESGPGLVKPSETLSLTCTVSGDSISSGDYYWGWIRQPPGKGLEWIGHIYYSGVTYYNPSLKSRVTISVDTSRNQFSLKLSSVTAADTAVYYCTREDSSNWRSRGQGTLVTVSSGSGGGGSGGGGSGGGGSFEQVQLQQSGAELVRPGASVKLSCKASGYTFNDYEMHWVKQTPVHGLKWIGALEPKTGDTAYSQKFKGKATLTADKSSSTAYMELRSLTSEDSAVYYCTSCYYYTYSGQGTLVTVSATREDLKNVFPPEVAVFEPSEAEISHTQKATLVCLATGFYPDHVELSWWVNGKEVHSGVCTDPQPLKEQPALNDSRYCLSSRLRVSATFWQNPRNHFRCQVQFYGLSENDEWTQDRAKPVTQIVSAEAWGRADDVIKIHWQEKKSNTILGSQEGNTMKTNDTYMKFSWLTVPEKSLDKEHRCIVRHENNKNGVDQEIIFPPIKTDVITMDPKDNCSKDANDTLLLQLTNTSAYYMYLLLLLKSVVYFAIITCCLLMAMVKRKDSRG

SEQ ID NO: 15270 - protein, 999 aa, synthetic construct
MALPVTALLLPLALLLHAARPEVQLVESGGGLVQPGGSLRLSCAASGFSFSDFWMSWVRQAPGKGLEWVATISQAGSEKDYVDSVKGRFTISRDNAKKSLYLQMNSLRAEDTAVYYCASGVYSFDYRGQGTLVTVSSGTGGGGSGGGGSGGGGSEFDIQLTQSPSSLSASVGDRVTITCRASQGIRNDLGWYQQKPGKAPKRLIYAASSLQNGVPSRFSGSGSGTEFTLTISSLQPEDFATYYCLQHNTYPAFGQGTKVEIKRLEIQNPDPAVYQLRDSKSSDKSVCLFTDFDSQTNVSQSKDSDVYITDKCVLDMRSMDFKSNSAVAWSNKSDFACANAFNNSIIPEDTFFPSPESSDSTDHVKPKETENTKQPSKSCHKPKAIVHTEKVNMMSLTVLGLRMLFAKTVAVNFLLTAKLFFLLTARAKRSGSGVKQTLNFDLLKLAGDVESNPGPTSMDWIWRILFLVGAATGAHSGPQLQLQESGPGLVKPSETLSLTCTVSGDSISSGDYYWGWIRQPPGKGLEWIGHIYYSGVTYYNPSLKSRVTISVDTSRNQFSLKLSSVTAADTAVYYCTREDSSNWRSRGQGTLVTVSSGSGGGGSGGGGSGGGGSFEQVQLQESGPGLVKPSQTLSLTCTVSGGSISSFNYYWSWIRHHPGKGLEWIGYIYYSGSTYSNPSLKSRVTISVDTSKNQFSLTLSSVTAADTAVYYCARGYNWNYFDYWGQGTLVTVSSTREDLKNVFPPEVAVFEPSEAEISHTQKATLVCLATGFYPDHVELSWWVNGKEVHSGVCTDPQPLKEQPALNDSRYCLSSRLRVSATFWQNPRNHFRCQVQFYGLSENDEWTQDRAKPVTQIVSAEAWGRADDVIKIHWQEKKSNTILGSQEGNTMKTNDTYMKFSWLTVPEKSLDKEHRCIVRHENNKNGVDQEIIFPPIKTDVITMDPKDNCSKDANDTLLLQLTNTSAYYMYLLLLLKSVVYFAIITCCLLMAMVKRKDSRG

SEQ ID NO: 15271 - protein, 1001 aa, synthetic construct
MALPVTALLLPLALLLHAARPEVQLVESGGGLVQPGGSLRLSCAASGFSFSDFWMSWVRQAPGKGLEWVATISQAGSEKDYVDSVKGRFTISRDNAKKSLYLQMNSLRAEDTAVYYCASGVYSFDYRGQGTLVTVSSGTGGGGSGGGGSGGGGSEFDDIVLTQSPASLAVSLGQSVTISCRASESVEYYGTSLMQWYQQKPGQPPKLLIYATSNVESGVPARFSGSGSGTDFSLNIHPVEEDDIAMYFCQQSRKLPSTFGGGTKLEIKLEIQNPDPAVYQLRDSKSSDKSVCLFTDFDSQTNVSQSKDSDVYITDKCVLDMRSMDFKSNSAVAWSNKSDFACANAFNNSIIPEDTFFPSPESSDSTDHVKPKETENTKQPSKSCHKPKAIVHTEKVNMMSLTVLGLRMLFAKTVAVNFLLTAKLFFLLTARAKRSGSGVKQTLNFDLLKLAGDVESNPGPTSMDWIWRILFLVGAATGAHSGPQLQLQESGPGLVKPSETLSLTCTVSGDSISSGDYYWGWIRQPPGKGLEWIGHIYYSGVTYYNPSLKSRVTISVDTSRNQFSLKLSSVTAADTAVYYCTREDSSNWRSRGQGTLVTVSSGSGGGGSGGGGSGGGGSFEDVRLQESGPGQVKPSQTVSLTCSVTGYSITNGNHWWNWIRQVSGSKLEWIGYISSSGSTDSNPSLKSRISITRDTSKNQLFLQLNSVTTEDIATYYCARGYYFDYWGQGTTLTVSSTREDLKNVFPPEVAVFEPSEAEISHTQKATLVCLATGFYPDHVELSWWVNGKEVHSGVCTDPQPLKEQPALNDSRYCLSSRLRVSATFWQNPRNHFRCQVQFYGLSENDEWTQDRAKPVTQIVSAEAWGRADDVIKIHWQEKKSNTILGSQEGNTMKTNDTYMKFSWLTVPEKSLDKEHRCIVRHENNKNGVDQEIIFPPIKTDVITMDPKDNCSKDANDTLLLQLTNTSAYYMYLLLLLKSVVYFAIITCCLLMAMVKRKDSRG

SEQ ID NO: 15272 - protein, 1000 aa, synthetic construct
MALPVTALLLPLALLLHAARPEVQLVESGGGLVQPGGSLRLSCAASGFSFSDFWMSWVRQAPGKGLEWVATISQAGSEKDYVDSVKGRFTISRDNAKKSLYLQMNSLRAEDTAVYYCASGVYSFDYRGQGTLVTVSSGTGGGGSGGGGSGGGGSEFDIQMTQSPSSLSASVGDRVTITCRASQDVNTAVAWYQQKPGKAPKLLIYSASFLESGVPSRFSGSRSGTDFTLTISSLQPEDFATYYCQQHYTTPPTFGQTKVEIKRLEIQNPDPAVYQLRDSKSSDKSVCLFTDFDSQTNVSQSKDSDVYITDKCVLDMRSMDFKSNSAVAWSNKSDFACANAFNNSIIPEDTFFPSPESSDSTDHVKPKETENTKQPSKSCHKPKAIVHTEKVNMMSLTVLGLRMLFAKTVAVNFLLTAKLFFLLTARAKRSGSGVKQTLNFDLLKLAGDVESNPGPTSMDWIWRILFLVGAATGAHSGPQLQLQESGPGLVKPSETLSLTCTVSGDSISSGDYYWGWIRQPPGKGLEWIGHIYYSGVTYYNPSLKSRVTISVDTSRNQFSLKLSSVTAADTAVYYCTREDSSNWRSRGQGTLVTVSSGSGGGGSGGGGSGGGGSFEEVQLVESGGGLVQPGGSLRLSCAASGFNIKDTYIHWVRQAPGKGLEWVARIYPTNGYTRYADSVKGRFTISADTSKNTAYLQMNSLRAEDTAVYYCSRWGGDGFYAMDVWGQGTLVTVSSTREDLKNVFPPEVAVFEPSEAEISHTQKATLVCLATGFYPDHVELSWWVNGKEVHSGVCTDPQPLKEQPALNDSRYCLSSRLRVSATFWQNPRNHFRCQVQFYGLSENDEWTQDRAKPVTQIVSAEAWGRADDVIKIHWQEKKSNTILGSQEGNTMKTNDTYMKFSWLTVPEKSLDKEHRCIVRHENNKNGVDQEIIFPPIKTDVITMDPKDNCSKDANDTLLLQLTNTSAYYMYLLLLLKSVVYFAIITCCLLMAMVKRKDSRG

SEQ ID NO: 15273 - protein, 999 aa, synthetic construct
MALPVTALLLPLALLLHAARPEVQLVESGGGLVQPGGSLRLSCAASGFSFSDFWMSWVRQAPGKGLEWVATISQAGSEKDYVDSVKGRFTISRDNAKKSLYLQMNSLRAEDTAVYYCASGVYSFDYRGQGTLVTVSSGTGGGGSGGGGSGGGGSEFDQSVLTQPPSVSVAPGKTARIPCEGNYIGSSNVHWYQQKPGQAPVLVIHFDSDRPSGIPDRFSGSNSGNMATLTISRVEAGDEADYYCQVWENHGWVFGGGTKLTVLSLEIQNPDPAVYQLRDSKSSDKSVCLFTDFDSQTNVSQSKDSDVYITDKCVLDMRSMDFKSNSAVAWSNKSDFACANAFNNSIIPEDTFFPSPESSDSTDHVKPKETENTKQPSKSCHKPKAIVHTEKVNMMSLTVLGLRMLFAKTVAVNFLLTAKLFFLLTARAKRSGSGVKQTLNFDLLKLAGDVESNPGPTSMDWIWRILFLVGAATGAHSGPQLQLQESGPGLVKPSETLSLTCTVSGDSISSGDYYWGWIRQPPGKGLEWIGHIYYSGVTYYNPSLKSRVTISVDTSRNQFSLKLSSVTAADTAVYYCTREDSSNWRSRGQGTLVTVSSGSGGGGSGGGGSGGGGSFEEVQLVETGGGLVQPGESLRLSCAASGFTFSDYEMNWVRQAPGKGLEWVSYISSSGSTIYYADSVKGRFTIYRDNAKNSLYLQMNSLRAEDTALYYCARAWGVGPPDYWGQGTLVTVSSTREDLKNVFPPEVAVFEPSEAEISHTQKATLVCLATGFYPDHVELSWWVNGKEVHSGVCTDPQPLKEQPALNDSRYCLSSRLRVSATFWQNPRNHFRCQVQFYGLSENDEWTQDRAKPVTQIVSAEAWGRADDVIKIHWQEKKSNTILGSQEGNTMKTNDTYMKFSWLTVPEKSLDKEHRCIVRHENNKNGVDQEIIFPPIKTDVITMDPKDNCSKDANDTLLLQLTNTSAYYMYLLLLLKSVVYFAIITCCLLMAMVKRKDSRG

SEQ ID NO: 15274 - protein, 1007 aa, synthetic construct
MALPVTALLLPLALLLHAARPEVQLVESGGGLVQPGGSLRLSCAASGFSFSDFWMSWVRQAPGKGLEWVATISQAGSEKDYVDSVKGRFTISRDNAKKSLYLQMNSLRAEDTAVYYCASGVYSFDYRGQGTLVTVSSGTGGGGSGGGGSGGGGSEFDIQMTQSPSSLSASVGDTVTITCQANGYLNWYQQRRGKAPKLLIYDGSKLERGVPSRFSGRRWGQEYNLTINNLQPEDIATYFCQVYEFVVPGTRLDLKRTVAAPLEIQNPDPAVYQLRDSKSSDKSVCLFTDFDSQTNVSQSKDSDVYITDKCVLDMRSMDFKSNSAVAWSNKSDFACANAFNNSIIPEDTFFPSPESSDSTDHVKPKETENTKQPSKSCHKPKAIVHTEKVNMMSLTVLGLRMLFAKTVAVNFLLTAKLFFLLTARAKRSGSGVKQTLNFDLLKLAGDVESNPGPTSMDWIWRILFLVGAATGAHSGPQLQLQESGPGLVKPSETLSLTCTVSGDSISSGDYYWGWIRQPPGKGLEWIGHIYYSGVTYYNPSLKSRVTISVDTSRNQFSLKLSSVTAADTAVYYCTREDSSNWRSRGQGTLVTVSSGSGGGGSGGGGSGGGGSFEQVQLLQSGAAVTKPGASVRVSCEASGYNIRDYFIHWWRQAPGQGLQWVGWINPKTGQPNNPRQFQGRVSLTRHASWDFDTFSFYMDLKALRSDDTAVYFCARQRSDYWDFDVWGSGTQVTVSSASTKGPTREDLKNVFPPEVAVFEPSEAEISHTQKATLVCLATGFYPDHVELSWWVNGKEVHSGVCTDPQPLKEQPALNDSRYCLSSRLRVSATFWQNPRNHFRCQVQFYGLSENDEWTQDRAKPVTQIVSAEAWGRADDVIKIHWQEKKSNTILGSQEGNTMKTNDTYMKFSWLTVPEKSLDKEHRCIVRHENNKNGVDQEIIFPPIKTDVITMDPKDNCSKDANDTLLLQLTNTSAYYMYLLLLLKSVVYFAIITCCLLMAMVKRKDSRG

SEQ ID NO: 15275 - protein, 1013 aa, synthetic construct
MALPVTALLLPLALLLHAARPEVQLVESGGGLVQPGGSLRLSCAASGFSFSDFWMSWVRQAPGKGLEWVATISQAGSEKDYVDSVKGRFTISRDNAKKSLYLQMNSLRAEDTAVYYCASGVYSFDYRGQGTLVTVSSGTGGGGSGGGGSGGGGSEFQSALTQPPSASGSPGQSITISCTGTSNNFVSWYQQHAGKAPKLVIYDVNKRPSGVPDRFSGSKSGNTASLTVSGLQTDDEAVYYCGSLVGNWDVIFGGGTKLTVLLEIQNPDPAVYQLRDSKSSDKSVCLFTDFDSQTNVSQSKDSDVYITDKCVLDMRSMDFKSNSAVAWSNKSDFACANAFNNSIIPEDTFFPSPESSDSTDHVKPKETENTKQPSKSCHKPKAIVHTEKVNMMSLTVLGLRMLFAKTVAVNFLLTAKLFFLLTARAKRSGSGVKQTLNFDLLKLAGDVESNPGPTSMDWIWRILFLVGAATGAHSGPQLQLQESGPGLVKPSETLSLTCTVSGDSISSGDYYWGWIRQPPGKGLEWIGHIYYSGVTYYNPSLKSRVTISVDTSRNQFSLKLSSVTAADTAVYYCTREDSSNWRSRGQGTLVTVSSGSGGGGSGGGGSGGGGSFEQPQLQESGPTLVEASETLSLTCAVSGDSTAACNSFWGWVRQPPGKGLEWVGSLSHCASYWNRGWTYHNPSLKSRLTLALDTPKNLVFLKLNSVTAADTATYYCARFGGEVLRYTDWPKPAWVDLWGRGTLVTVSSTREDLKNVFPPEVAVFEPSEAEISHTQKATLVCLATGFYPDHVELSWWVNGKEVHSGVCTDPQPLKEQPALNDSRYCLSSRLRVSATFWQNPRNHFRCQVQFYGLSENDEWTQDRAKPVTQIVSAEAWGRADDVIKIHWQEKKSNTILGSQEGNTMKTNDTYMKFSWLTVPEKSLDKEHRCIVRHENNKNGVDQEIIFPPIKTDVITMDPKDNCSKDANDTLLLQLTNTSAYYMYLLLLLKSVVYFAIITCCLLMAMVKRKDSRG

SEQ ID NO: 15276 - protein, 998 aa, synthetic construct
MALPVTALLLPLALLLHAARPEVQLVESGGGLVQPGGSLRLSCAASGFSFSDFWMSWVRQAPGKGLEWVATISQAGSEKDYVDSVKGRFTISRDNAKKSLYLQMNSLRAEDTAVYYCASGVYSFDYRGQGTLVTVSSGTGGGGSGGGGSGGGGSEFEIVLTQSPGTLSLSPGETAIISCRTSQYGSLAWYQQRPGQAPRLVIYSGSTRAAGIPDRFSGSRWGPDYNLTISNLESGDFGVYYCQQYEFFGQGTKVQVDIKRLEIQNPDPAVYQLRDSKSSDKSVCLFTDFDSQTNVSQSKDSDVYITDKCVLDMRSMDFKSNSAVAWSNKSDFACANAFNNSIIPEDTFFPSPESSDSTDHVKPKETENTKQPSKSCHKPKAIVHTEKVNMMSLTVLGLRMLFAKTVAVNFLLTAKLFFLLTARAKRSGSGVKQTLNFDLLKLAGDVESNPGPTSMDWIWRILFLVGAATGAHSGPQLQLQESGPGLVKPSETLSLTCTVSGDSISSGDYYWGWIRQPPGKGLEWIGHIYYSGVTYYNPSLKSRVTISVDTSRNQFSLKLSSVTAADTAVYYCTREDSSNWRSRGQGTLVTVSSGSGGGGSGGGGSGGGGSFEQVQLVQSGGQMKKPGESMRISCRASGYEFIDCTLNWIRLAPGKRPEWMGWLKPRGGAVNYARPLQGRVTMTRDVYSDTAFLELRSLTVDDTAVYFCTRGKNCDYNWDFEHWGRGTPVIVSSTREDLKNVFPPEVAVFEPSEAEISHTQKATLVCLATGFYPDHVELSWWVNGKEVHSGVCTDPQPLKEQPALNDSRYCLSSRLRVSATFWQNPRNHFRCQVQFYGLSENDEWTQDRAKPVTQIVSAEAWGRADDVIKIHWQEKKSNTILGSQEGNTMKTNDTYMKFSWLTVPEKSLDKEHRCIVRHENNKNGVDQEIIFPPIKTDVITMDPKDNCSKDANDTLLLQLTNTSAYYMYLLLLLKSVVYFAIITCCLLMAMVKRKDSRG

SEQ ID NO: 15277 - protein, 1008 aa, synthetic construct
MALPVTALLLPLALLLHAARPEVQLVESGGGLVQPGGSLRLSCAASGFSFSDFWMSWVRQAPGKGLEWVATISQAGSEKDYVDSVKGRFTISRDNAKKSLYLQMNSLRAEDTAVYYCASGVYSFDYRGQGTLVTVSSGTGGGGSGGGGSGGGGSEFELVLTQSPGTLSLSAGERATLSCRASQSVSSGSLAWYQQKPGQAPRLLIYGASTRATGIPDRFSGSGSGTDFTLTIGRLEPEDLAVYYCQQYGTSPYTFGQGTKLEILEIQNPDPAVYQLRDSKSSDKSVCLFTDFDSQTNVSQSKDSDVYITDKCVLDMRSMDFKSNSAVAWSNKSDFACANAFNNSIIPEDTFFPSPESSDSTDHVKPKETENTKQPSKSCHKPKAIVHTEKVNMMSLTVLGLRMLFAKTVAVNFLLTAKLFFLLTARAKRSGSGVKQTLNFDLLKLAGDVESNPGPTSMDWIWRILFLVGAATGAHSGPQLQLQESGPGLVKPSETLSLTCTVSGDSISSGDYYWGWIRQPPGKGLEWIGHIYYSGVTYYNPSLKSRVTISVDTSRNQFSLKLSSVTAADTAVYYCTREDSSNWRSRGQGTLVTVSSGSGGGGSGGGGSGGGGSFELEQSGAEVKKPGSSVQVSCKASGGTFSMYGFNWVRQAPGHGLEWMGGIIPIFGTSNYAQKFRGRVTFTADQATSTAYMELTNLRSDDTAVYYCARDFGPDWEDGDSYDGSGRGFFDFWGQGTLVTVSSTREDLKNVFPPEVAVFEPSEAEISHTQKATLVCLATGFYPDHVELSWWVNGKEVHSGVCTDPQPLKEQPALNDSRYCLSSRLRVSATFWQNPRNHFRCQVQFYGLSENDEWTQDRAKPVTQIVSAEAWGRADDVIKIHWQEKKSNTILGSQEGNTMKTNDTYMKFSWLTVPEKSLDKEHRCIVRHENNKNGVDQEIIFPPIKTDVITMDPKDNCSKDANDTLLLQLTNTSAYYMYLLLLLKSVVYFAIITCCLLMAMVKRKDSRG

SEQ ID NO: 15278 - protein, 988 aa, synthetic construct
MALPVTALLLPLALLLHAARPEVQLVESGGGLVQPGGSLRLSCAASGFSFSDFWMSWVRQAPGKGLEWVATISQAGSEKDYVDSVKGRFTISRDNAKKSLYLQMNSLRAEDTAVYYCASGVYSFDYRGQGTLVTVSSGTGGGGSGGGGSGGGGSEFDIQMTQSPSSLSASVGDRVTITCQASQDINNYLNWYQQKPGKAPKLLIYDASNLQTGVPSRFSGSGSGTDFTFTIEDIATYYCQQYTFGPGTKVDIKLEIQNPDPAVYQLRDSKSSDKSVCLFTDFDSQTNVSQSKDSDVYITDKCVLDMRSMDFKSNSAVAWSNKSDFACANAFNNSIIPEDTFFPSPESSDSTDHVKPKETENTKQPSKSCHKPKAIVHTEKVNMMSLTVLGLRMLFAKTVAVNFLLTAKLFFLLTARAKRSGSGVKQTLNFDLLKLAGDVESNPGPTSMDWIWRILFLVGAATGAHSGPQLQLQESGPGLVKPSETLSLTCTVSGDSISSGDYYWGWIRQPPGKGLEWIGHIYYSGVTYYNPSLKSRVTISVDTSRNQFSLKLSSVTAADTAVYYCTREDSSNWRSRGQGTLVTVSSGSGGGGSGGGGSGGGGSFEEVQLLESGGGLVQPGGSLRLSCAASGFTFSWYSMTWVRQAPGKGLEWVSSIVPWGDFTQYADSVKGRFTISRDNSKNTLYLQMNSLRAEDTAVYYCAKGPGWGSFDLWGRGTLVTVSSTREDLKNVFPPEVAVFEPSEAEISHTQKATLVCLATGFYPDHVELSWWVNGKEVHSGVCTDPQPLKEQPALNDSRYCLSSRLRVSATFWQNPRNHFRCQVQFYGLSENDEWTQDRAKPVTQIVSAEAWGRADDVIKIHWQEKKSNTILGSQEGNTMKTNDTYMKFSWLTVPEKSLDKEHRCIVRHENNKNGVDQEIIFPPIKTDVITMDPKDNCSKDANDTLLLQLTNTSAYYMYLLLLLKSVVYFAIITCCLLMAMVKRKDSRG

SEQ ID NO: 15279 - protein, 998 aa, synthetic construct
MALPVTALLLPLALLLHAARPEVQLVESGGGLVQPGGSLRLSCAASGFSFSDFWMSWVRQAPGKGLEWVATISQAGSEKDYVDSVKGRFTISRDNAKKSLYLQMNSLRAEDTAVYYCASGVYSFDYRGQGTLVTVSSGTGGGGSGGGGSGGGGSEFDIQMTQSPSSLSASVGDRVTITCTASLSVSSTYLHWYQQKPGSSPKLWIYSTSNLASGVPSRFSGSGSGTSYTLTISSLQPEDFATYYCHQYHRSPLTFGGGTKVEIKRLEIQNPDPAVYQLRDSKSSDKSVCLFTDFDSQTNVSQSKDSDVYITDKCVLDMRSMDFKSNSAVAWSNKSDFACANAFNNSIIPEDTFFPSPESSDSTDHVKPKETENTKQPSKSCHKPKAIVHTEKVNMMSLTVLGLRMLFAKTVAVNFLLTAKLFFLLTARAKRSGSGVKQTLNFDLLKLAGDVESNPGPTSMDWIWRILFLVGAATGAHSGPQLQLQESGPGLVKPSETLSLTCTVSGDSISSGDYYWGWIRQPPGKGLEWIGHIYYSGVTYYNPSLKSRVTISVDTSRNQFSLKLSSVTAADTAVYYCTREDSSNWRSRGQGTLVTVSSGSGGGGSGGGGSGGGGSFEEVQLVESGGGLVQPGGSLRLSCAASGFSLTKYGVHWVRQAPGKGLEWVGVKWAGGSTDYNSALMSRFTISKDNAKNSLYLQMNSLRAEDTAVYYCARDHRDAMDYWGQGTLVTVSSTREDLKNVFPPEVAVFEPSEAEISHTQKATLVCLATGFYPDHVELSWWVNGKEVHSGVCTDPQPLKEQPALNDSRYCLSSRLRVSATFWQNPRNHFRCQVQFYGLSENDEWTQDRAKPVTQIVSAEAWGRADDVIKIHWQEKKSNTILGSQEGNTMKTNDTYMKFSWLTVPEKSLDKEHRCIVRHENNKNGVDQEIIFPPIKTDVITMDPKDNCSKDANDTLLLQLTNTSAYYMYLLLLLKSVVYFAIITCCLLMAMVKRKDSRG

SEQ ID NO: 15280 - protein, 1002 aa, synthetic construct
MALPVTALLLPLALLLHAARPEVQLVESGGGLVQPGGSLRLSCAASGFSFSDFWMSWVRQAPGKGLEWVATISQAGSEKDYVDSVKGRFTISRDNAKKSLYLQMNSLRAEDTAVYYCASGVYSFDYRGQGTLVTVSSGTGGGGSGGGGSGGGGSEFDIQMTQSPSSLSASVGDRVTITCKASQDVGTAVAWYQQKPGKAPKLLIYSASYRSTGVPSRFSGSGSGTDFTLTISSLQPEDFATYYCQHHYSAPWTFGGGTKVEIKLEIQNPDPAVYQLRDSKSSDKSVCLFTDFDSQTNVSQSKDSDVYITDKCVLDMRSMDFKSNSAVAWSNKSDFACANAFNNSIIPEDTFFPSPESSDSTDHVKPKETENTKQPSKSCHKPKAIVHTEKVNMMSLTVLGLRMLFAKTVAVNFLLTAKLFFLLTARAKRSGSGVKQTLNFDLLKLAGDVESNPGPTSMDWIWRILFLVGAATGAHSGPQLQLQESGPGLVKPSETLSLTCTVSGDSISSGDYYWGWIRQPPGKGLEWIGHIYYSGVTYYNPSLKSRVTISVDTSRNQFSLKLSSVTAADTAVYYCTREDSSNWRSRGQGTLVTVSSGSGGGGSGGGGSGGGGSFEEVQLVESGGGLVQPGGSLRLSCAASGFTFSRNGMSWVRQAPGKGLEWVATVSSGGSYIYYADSVKGRFTISRDNAKNSLYLQMNSLRAEDTAVYYCARQGTTALATRFFDVWGQGTLVTVSSTREDLKNVFPPEVAVFEPSEAEISHTQKATLVCLATGFYPDHVELSWWVNGKEVHSGVCTDPQPLKEQPALNDSRYCLSSRLRVSATFWQNPRNHFRCQVQFYGLSENDEWTQDRAKPVTQIVSAEAWGRADDVIKIHWQEKKSNTILGSQEGNTMKTNDTYMKFSWLTVPEKSLDKEHRCIVRHENNKNGVDQEIIFPPIKTDVITMDPKDNCSKDANDTLLLQLTNTSAYYMYLLLLLKSVVYFAIITCCLLMAMVKRKDSRG

SEQ ID NO: 15281 - protein, 1002 aa, synthetic construct; identical to SEQ ID NO: 15280

SEQ ID NO: 15282 - protein, 998 aa, synthetic construct
MALPVTALLLPLALLLHAARPEVQLVESGGGLVQPGGSLRLSCAASGFSFSDFWMSWVRQAPGKGLEWVATISQAGSEKDYVDSVKGRFTISRDNAKKSLYLQMNSLRAEDTAVYYCASGVYSFDYRGQGTLVTVSSGTGGGGSGGGGSGGGGSEFDIQMTQSPPSLSASVGGKVTITCKASQDIDRYMAWYQDKPGKGPKLLIHDTSTLQPGIPSRFSGSGSGRDYSFSISNLEPEDIATYYCLQYDNLWTFGGGTKLEIKRLEIQNPDPAVYQLRDSKSSDKSVCLFTDFDSQTNVSQSKDSDVYITDKCVLDMRSMDFKSNSAVAWSNKSDFACANAFNNSIIPEDTFFPSPESSDSTDHVKPKETENTKQPSKSCHKPKAIVHTEKVNMMSLTVLGLRMLFAKTVAVNFLLTAKLFFLLTARAKRSGSGVKQTLNFDLLKLAGDVESNPGPTSMDWIWRILFLVGAATGAHSGPQLQLQESGPGLVKPSETLSLTCTVSGDSISSGDYYWGWIRQPPGKGLEWIGHIYYSGVTYYNPSLKSRVTISVDTSRNQFSLKLSSVTAADTAVYYCTREDSSNWRSRGQGTLVTVSSGSGGGGSGGGGSGGGGSFEQVQLVQSGAELVKPGASVKMSCKASGYIFTNYNIHWVKKSPGQGLEWIGAIYPGNGDAPYSQKFQDRATLTADTSSSTTYMELSSLTSEDSAVYYCVRANWDVAFAYWGQGTLVSVSSTREDLKNVFPPEVAVFEPSEAEISHTQKATLVCLATGFYPDHVELSWWVNGKEVHSGVCTDPQPLKEQPALNDSRYCLSSRLRVSATFWQNPRNHFRCQVQFYGLSENDEWTQDRAKPVTQIVSAEAWGRADDVIKIHWQEKKSNTILGSQEGNTMKTNDTYMKFSWLTVPEKSLDKEHRCIVRHENNKNGVDQEIIFPPIKTDVITMDPKDNCSKDANDTLLLQLTNTSAYYMYLLLLLKSVVYFAIITCCLLMAMVKRKDSRG

SEQ ID NO: 15283 - protein, 999 aa, synthetic construct
MALPVTALLLPLALLLHAARPEVQLVESGGGLVQPGGSLRLSCAASGFSFSDFWMSWVRQAPGKGLEWVATISQAGSEKDYVDSVKGRFTISRDNAKKSLYLQMNSLRAEDTAVYYCASGVYSFDYRGQGTLVTVSSGTGGGGSGGGGSGGGGSEFDIQMTQSPASLSASVGETVTITCRVSGNIHNYLAWYQQKQGKSPQLLVYNAKTLADGVPSRFSGSGSGTQYSLKINSLQPEDFGSYYCQHFWSNPYTFGGGTKLEIKLEIQNPDPAVYQLRDSKSSDKSVCLFTDFDSQTNVSQSKDSDVYITDKCVLDMRSMDFKSNSAVAWSNKSDFACANAFNNSIIPEDTFFPSPESSDSTDHVKPKETENTKQPSKSCHKPKAIVHTEKVNMMSLTVLGLRMLFAKTVAVNFLLTAKLFFLLTARAKRSGSGVKQTLNFDLLKLAGDVESNPGPTSMDWIWRILFLVGAATGAHSGPQLQLQESGPGLVKPSETLSLTCTVSGDSISSGDYYWGWIRQPPGKGLEWIGHIYYSGVTYYNPSLKSRVTISVDTSRNQFSLKLSSVTAADTAVYYCTREDSSNWRSRGQGTLVTVSSGSGGGGSGGGGSGGGGSFEQVQLQQSGASVKVSCKASELVRPGTGYAFTNYLIEWVKQRPGQGLEWIGVINPGSGGTNYNEKFKGKATLTADKSSSTAYMQLSSLTSDDSAVYFCARYRSYDWYFDVWGAGTTVTVSSTREDLKNVFPPEVAVFEPSEAEISHTQKATLVCLATGFYPDHVELSWWVNGKEVHSGVCTDPQPLKEQPALNDSRYCLSSRLRVSATFWQNPRNHFRCQVQFYGLSENDEWTQDRAKPVTQIVSAEAWGRADDVIKIHWQEKKSNTILGSQEGNTMKTNDTYMKFSWLTVPEKSLDKEHRCIVRHENNKNGVDQEIIFPPIKTDVITMDPKDNCSKDANDTLLLQLTNTSAYYMYLLLLLKSVVYFAIITCCLLMAMVKRKDSRG

SEQ ID NO: 15284 - protein, 998 aa, synthetic construct
MALPVTALLLPLALLLHAARPEVQLVESGGGLVQPGGSLRLSCAASGFSFSDFWMSWVRQAPGKGLEWVATISQAGSEKDYVDSVKGRFTISRDNAKKSLYLQMNSLRAEDTAVYYCASGVYSFDYRGQGTLVTVSSGTGGGGSGGGGSGGGGSEFDIQMTQSFSSLSASVGDRVTITCRASQDISNYLNWYQQKPGKAPKLLIYYTSRLHSGVPSRFSGSGSGTDYTLTISSLQPEDFATYFCQQGNTLPWTFGGGTKLEIKRLEIQNPDPAVYQLRDSKSSDKSVCLFTDFDSQTNVSQSKDSDVYITDKCVLDMRSMDFKSNSAVAWSNKSDFACANAFNNSIIPEDTFFPSPESSDSTDHVKPKETENTKQPSKSCHKPKAIVHTEKVNMMSLTVLGLRMLFAKTVAVNFLLTAKLFFLLTARAKRSGSGVKQTLNFDLLKLAGDVESNPGPTSMDWIWRILFLVGAATGAHSGPQLQLQESGPGLVKPSETLSLTCTVSGDSISSGDYYWGWIRQPPGKGLEWIGHIYYSGVTYYNPSLKSRVTISVDTSRNQFSLKLSSVTAADTAVYYCTREDSSNWRSRGQGTLVTVSSGSGGGGSGGGGSGGGGSFEEVQLVQSGGGLVQSGGSLRLSCRASGYTFTRYWMLWVRQRPGKGLEWVAEINPRNDRTNYNEKFKTRFTISVDRSKNTLYLQMDSLRAEDTAVYFCALGGGYAMDYWGQGTLVTVSSTREDLKNVFPPEVAVFEPSEAEISHTQKATLVCLATGFYPDHVELSWWVNGKEVHSGVCTDPQPLKEQPALNDSRYCLSSRLRVSATFWQNPRNHFRCQVQFYGLSENDEWTQDRAKPVTQIVSAEAWGRADDVIKIHWQEKKSNTILGSQEGNTMKTNDTYMKFSWLTVPEKSLDKEHRCIVRHENNKNGVDQEIIFPPIKTDVITMDPKDNCSKDANDTLLLQLTNTSAYYMYLLLLLKSVVYFAIITCCLLMAMVKRKDSRG

SEQ ID NO: 15285 - protein, 999 aa, synthetic construct
MALPVTALLLPLALLLHAARPEVQLVESGGGLVQPGGSLRLSCAASGFSFSDFWMSWVRQAPGKGLEWVATISQAGSEKDYVDSVKGRFTISRDNAKKSLYLQMNSLRAEDTAVYYCASGVYSFDYRGQGTLVTVSSGTGGGGSGGGGSGGGGSEFDIQMTQSPASLSASVGETVTIICRASVNIYSYLAWYQQKQGKSPQLLVYNAKILAEGVPSRFSGSGSGTQFSLKINSLQPEDFGSYYCQHHYGTFTFGSGTKLEIKRLEIQNPDPAVYQLRDSKSSDKSVCLFTDFDSQTNVSQSKDSDVYITDKCVLDMRSMDFKSNSAVAWSNKSDFACANAFNNSIIPEDTFFPSPESSDSTDHVKPKETENTKQPSKSCHKPKAIVHTEKVNMMSLTVLGLRMLFAKTVAVNFLLTAKLFFLLTARAKRSGSGVKQTLNFDLLKLAGDVESNPGPTSMDWIWRILFLVGAATGAHSGPQLQLQESGPGLVKPSETLSLTCTVSGDSISSGDYYWGWIRQPPGKGLEWIGHIYYSGVTYYNPSLKSRVTISVDTSRNQFSLKLSSVTAADTAVYYCTREDSSNWRSRGQGTLVTVSSGSGGGGSGGGGSGGGGSFEQVQLKESGPGLVAPSQSLSITCTISGFSLTSYGVHWVRQPPGKGLEWLVVIWSDGSTTYNSALKSRLSISKDNSKSQVFLKMNSLQTDDTAIYYCASHYGSTLAFASWGHGTLVTVSAATREDLKNVFPPEVAVFEPSEAEISHTQKATLVCLATGFYPDHVELSWWVNGKEVHSGVCTDPQPLKEQPALNDSRYCLSSRLRVSATFWQNPRNHFRCQVQFYGLSENDEWTQDRAKPVTQIVSAEAWGRADDVIKIHWQEKKSNTILGSQEGNTMKTNDTYMKFSWLTVPEKSLDKEHRCIVRHENNKNGVDQEIIFPPIKTDVITMDPKDNCSKDANDTLLLQLTNTSAYYMYLLLLLKSVVYFAIITCCLLMAMVKRKDSRG

SEQ ID NO: 15286 - protein, 1007 aa, synthetic construct
MALPVTALLLPLALLLHAARPEVQLVESGGGLVQPGGSLRLSCAASGFSFSDFWMSWVRQAPGKGLEWVATISQAGSEKDYVDSVKGRFTISRDNAKKSLYLQMNSLRAEDTAVYYCASGVYSFDYRGQGTLVTVSSGTGGGGSGGGGSGGGGSEFDIVMTQSHKFMSTSVGDRVSVTCKASQNVGNNVAWYQQKPGQSPKVLIYSASYRYSGVPDRFTGSGSGTDFTLTISNVQSEDLAEYFCQQYNTYPFTFGSGTKLEIKLEIQNPDPAVYQLRDSKSSDKSVCLFTDFDSQTNVSQSKDSDVYITDKCVLDMRSMDFKSNSAVAWSNKSDFACANAFNNSIIPEDTFFPSPESSDSTDHVKPKETENTKQPSKSCHKPKAIVHTEKVNMMSLTVLGLRMLFAKTVAVNFLLTAKLFFLLTARAKRSGSGVKQTLNFDLLKLAGDVESNPGPTSMDWIWRILFLVGAATGAHSGPQLQLQESGPGLVKPSETLSLTCTVSGDSISSGDYYWGWIRQPPGKGLEWIGHIYYSGVTYYNPSLKSRVTISVDTSRNQFSLKLSSVTAADTAVYYCTREDSSNWRSRGQGTLVTVSSGSGGGGSGGGGSGGGGSFEEVQLEESGGGLVQPGGSMKLSCVASGFTFSNYWMNWVRQSPEKGLEWVAEIRFKSHNYATHFAESVKGRFTISRDDSKSSVYLQMNNLRAEDTGIYYCTRRIGNSDYDWWYFDVWGAGTSVTVSSASTREDLKNVFPPEVAVFEPSEAEISHTQKATLVCLATGFYPDHVELSWWVNGKEVHSGVCTDPQPLKEQPALNDSRYCLSSRLRVSATFWQNPRNHFRCQVQFYGLSENDEWTQDRAKPVTQIVSAEAWGRADDVIKIHWQEKKSNTILGSQEGNTMKTNDTYMKFSWLTVPEKSLDKEHRCIVRHENNKNGVDQEIIFPPIKTDVITMDPKDNCSKDANDTLLLQLTNTSAYYMYLLLLLKSVVYFAIITCCLLMAMVKRKDSRG

SEQ ID NO: 15287 - protein, 1000 aa, synthetic construct
MALPVTALLLPLALLLHAARPEVQLVESGGGLVQPGGSLRLSCAASGFSFSDFWMSWVRQAPGKGLEWVATISQAGSEKDYVDSVKGRFTISRDNAKKSLYLQMNSLRAEDTAVYYCASGVYSFDYRGQGTLVTVSSGTGGGGSGGGGSGGGGSEFDQIVLTQSPAIMSASPGEKVTISCSASSSVSYMYWYQQKPGSSPKPWIYRTSNLASGVPARFSGSGSGTSYSLTISNMEAEDAAAYYCQQYHSYPTTFGGGTKLEVKLEIQNPDPAVYQLRDSKSSDKSVCLFTDFDSQTNVSQSKDSDVYITDKCVLDMRSMDFKSNSAVAWSNKSDFACANAFNNSIIPEDTFFPSPESSDSTDHVKPKETENTKQPSKSCHKPKAIVHTEKVNMMSLTVLGLRMLFAKTVAVNFLLTAKLFFLLTARAKRSGSGVKQTLNFDLLKLAGDVESNPGPTSMDWIWRILFLVGAATGAHSGPQLQLQESGPGLVKPSETLSLTCTVSGDSISSGDYYWGWIRQPPGKGLEWIGHIYYSGVTYYNPSLKSRVTISVDTSRNQFSLKLSSVTAADTAVYYCTREDSSNWRSRGQGTLVTVSSGSGGGGSGGGGSGGGGSFEEVQLVESGGGLVQPKGSLKLSCAASGFSFNTYAMNWVRQAPGKGLEWIAHIRSKSNNFATYYADSVKDRFSISRDASENILFLQMNNLKTEDTAMYYCVRQGGDFPMDYWGQGTSVTVSSTREDLKNVFPPEVAVFEPSEAEISHTQKATLVCLATGFYPDHVELSWWVNGKEVHSGVCTDPQPLKEQPALNDSRYCLSSRLRVSATFWQNPRNHFRCQVQFYGLSENDEWTQDRAKPVTQIVSAEAWGRADDVIKIHWQEKKSNTILGSQEGNTMKTNDTYMKFSWLTVPEKSLDKEHRCIVRHENNKNGVDQEIIFPPIKTDVITMDPKDNCSKDANDTLLLQLTNTSAYYMYLLLLLKSVVYFAIITCCLLMAMVKRKDSRG

SEQ ID NO: 15288 - protein, 999 aa, synthetic construct
MALPVTALLLPLALLLHAARPEVQLVESGGGLVQPGGSLRLSCAASGFSFSDFWMSWVRQAPGKGLEWVATISQAGSEKDYVDSVKGRFTISRDNAKKSLYLQMNSLRAEDTAVYYCASGVYSFDYRGQGTLVTVSSGTGGGGSGGGGSGGGGSEFDDIQMTQSSSSFSVSLGDRVTITCMASEDIYIRLAWYQQKPGNAPRLLISAATSLETGVPSRFSGSGSGKDYTLSITSLQTEDVGTYYCQQYWSSPWTFGGGTKLEINLEIQNPDPAVYQLRDSKSSDKSVCLFTDFDSQTNVSQSKDSDVYITDKCVLDMRSMDFKSNSAVAWSNKSDFACANAFNNSIIPEDTFFPSPESSDSTDHVKPKETENTKQPSKSCHKPKAIVHTEKVNMMSLTVLGLRMLFAKTVAVNFLLTAKLFFLLTARAKRSGSGVKQTLNFDLLKLAGDVESNPGPTSMDWIWRILFLVGAATGAHSGPQLQLQESGPGLVKPSETLSLTCTVSGDSISSGDYYWGWIRQPPGKGLEWIGHIYYSGVTYYNPSLKSRVTISVDTSRNQFSLKLSSVTAADTAVYYCTREDSSNWRSRGQGTLVTVSSGSGGGGSGGGGSGGGGSFEDVQLQESGPGLVKPSQSLSLTCTVTGYSITSDYTWNWIRQFPGNKLEWMGYITYSGSTSYNPSLKSRNSITRDTSKNQFFLQLNSVTTEDTATYYCARLGRRYTMDYWGQGTSVTVSSTREDLKNVFPPEVAVFEPSEAEISHTQKATLVCLATGFYPDHVELSWWVNGKEVHSGVCTDPQPLKEQPALNDSRYCLSSRLRVSATFWQNPRNHFRCQVQFYGLSENDEWTQDRAKPVTQIVSAEAWGRADDVIKIHWQEKKSNTILGSQEGNTMKTNDTYMKFSWLTVPEKSLDKEHRCIVRHENNKNGVDQEIIFPPIKTDVITMDPKDNCSKDANDTLLLQLTNTSAYYMYLLLLLKSVVYFAIITCCLLMAMVKRKDSRG

SEQ ID NO: 15289 - protein, 1002 aa, synthetic construct
MALPVTALLLPLALLLHAARPEVQLVESGGGLVQPGGSLRLSCAASGFSFSDFWMSWVRQAPGKGLEWVATISQAGSEKDYVDSVKGRFTISRDNAKKSLYLQMNSLRAEDTAVYYCASGVYSFDYRGQGTLVTVSSGTGGGGSGGGGSGGGGSEFDDIQMTQSPSSLSASVGDRVTITCRASQSISSYLNWYQQKPGKAPKLLIYDASNLETGVPSRFSGSGSGTDFTFTISSLQPEDIATYYCQQYDNLPLTFGGGTKVDIKRLEIQNPDPAVYQLRDSKSSDKSVCLFTDFDSQTNVSQSKDSDVYITDKCVLDMRSMDFKSNSAVAWSNKSDFACANAFNNSIIPEDTFFPSPESSDSTDHVKPKETENTKQPSKSCHKPKAIVHTEKVNMMSLTVLGLRMLFAKTVAVNFLLTAKLFFLLTARAKRSGSGVKQTLNFDLLKLAGDVESNPGPTSMDWIWRILFLVGAATGAHSGPQLQLQESGPGLVKPSETLSLTCTVSGDSISSGDYYWGWIRQPPGKGLEWIGHIYYSGVTYYNPSLKSRVTISVDTSRNQFSLKLSSVTAADTAVYYCTREDSSNWRSRGQGTLVTVSSGSGGGGSGGGGSGGGGSFEQVQLVESGGGVVQPGRSLRLSCAASGFTFSSYAMHWVRQAPGKGLEWVAVISYDGSNKYYADSVKGRFTISRDNSKNTLYLQMNSLRAEDTAVYYCARAHNSSSWSFDYWGQGTLVTVSSTREDLKNVFPPEVAVFEPSEAEISHTQKATLVCLATGFYPDHVELSWWVNGKEVHSGVCTDPQPLKEQPALNDSRYCLSSRLRVSATFWQNPRNHFRCQVQFYGLSENDEWTQDRAKPVTQIVSAEAWGRADDVIKIHWQEKKSNTILGSQEGNTMKTNDTYMKFSWLTVPEKSLDKEHRCIVRHENNKNGVDQEIIFPPIKTDVITMDPKDNCSKDANDTLLLQLTNTSAYYMYLLLLLKSVVYFAIITCCLLMAMVKRKDSRG

SEQ ID NO: 15290 - protein, 1011 aa, synthetic construct
MALPVTALLLPLALLLHAARPEVQLVESGGGLVQPGGSLRLSCAASGFSFSDFWMSWVRQAPGKGLEWVATISQAGSEKDYVDSVKGRFTISRDNAKKSLYLQMNSLRAEDTAVYYCASGVYSFDYRGQGTLVTVSSGTGGGGSGGGGSGGGGSEFDDVVMTQSPLSLPVSLGDQASISCRSSQRLVHSNGNTYLHWYLQKPGQSPKLLIYRVSNRFPGVPDRFSGSGSGTDFTLKISRVEAEDLGIYFCSQSTHVPYTFGGGTKLEIKRLEIQNPDPAVYQLRDSKSSDKSVCLFTDFDSQTNVSQSKDSDVYITDKCVLDMRSMDFKSNSAVAWSNKSDFACANAFNNSIIPEDTFFPSPESSDSTDHVKPKETENTKQPSKSCHKPKAIVHTEKVNMMSLTVLGLRMLFAKTVAVNFLLTAKLFFLLTARAKRSGSGVKQTLNFDLLKLAGDVESNPGPTSMDWIWRILFLVGAATGAHSGPQLQLQESGPGLVKPSETLSLTCTVSGDSISSGDYYWGWIRQPPGKGLEWIGHIYYSGVTYYNPSLKSRVTISVDTSRNQFSLKLSSVTAADTAVYYCTREDSSNWRSRGQGTLVTVSSGSGGGGSGGGGSGGGGSFEEVRLQQSGPDLIKPGASVKMSCKASGYTFTGYVMHWVKQRPGQGLEWIGFINPYNDDIQSNERFRGKATLTSDKSSTTAYMELSSLTSEDSAVYYCARGAGYNFDGAYRFFDFWGQGTTLTVSSTREDLKNVFPPEVAVFEPSEAEISHTQKATLVCLATGFYPDHVELSWWVNGKEVHSGVCTDPQPLKEQPALNDSRYCLSSRLRVSATFWQNPRNHFRCQVQFYGLSENDEWTQDRAKPVTQIVSAEAWGRADDVIKIHWQEKKSNTILGSQEGNTMKTNDTYMKFSWLTVPEKSLDKEHRCIVRHENNKNGVDQEIIFPPIKTDVITMDPKDNCSKDANDTLLLQLTNTSAYYMYLLLLLKSVVYFAIITCCLLMAMVKRKDSRG

SEQ ID NO: 15291 - protein, 1002 aa, synthetic construct
MALPVTALLLPLALLLHAARPEVQLVESGGGLVQPGGSLRLSCAASGFSFSDFWMSWVRQAPGKGLEWVATISQAGSEKDYVDSVKGRFTISRDNAKKSLYLQMNSLRAEDTAVYYCASGVYSFDYRGQGTLVTVSSGTGGGGSGGGGSGGGGSEFDSYELTQPPSVSVSPGQTATISCSGDQLGGKYGHWYQKKPGQSPVLVLYQDRKRPAGIPERFSGSSSGNTITLTISGTQAVDEADYYCQAWDTNLGGVFGGGTKVTVLGQLEIQNPDPAVYQLRDSKSSDKSVCLFTDFDSQTNVSQSKDSDVYITDKCVLDMRSMDFKSNSAVAWSNKSDFACANAFNNSIIPEDTFFPSPESSDSTDHVKPKETENTKQPSKSCHKPKAIVHTEKVNMMSLTVLGLRMLFAKTVAVNFLLTAKLFFLLTARAKRSGSGVKQTLNFDLLKLAGDVESNPGPTSMDWIWRILFLVGAATGAHSGPQLQLQESGPGLVKPSETLSLTCTVSGDSISSGDYYWGWIRQPPGKGLEWIGHIYYSGVTYYNPSLKSRVTISVDTSRNQFSLKLSSVTAADTAVYYCTREDSSNWRSRGQGTLVTVSSGSGGGGSGGGGSGGGGSFEQVQLVESGAEVKKPGASVKVSCKASGYTFTGYYMHWVRQAPGQGLEWMGRINPNSGGTNYAQKFQGRVTMTRDTSISTAYMELSRLRSDDTAVYYCASPRGRGSAFDIWGQGTLVTVSSTREDLKNVFPPEVAVFEPSEAEISHTQKATLVCLATGFYPDHVELSWWVNGKEVHSGVCTDPQPLKEQPALNDSRYCLSSRLRVSATFWQNPRNHFRCQVQFYGLSENDEWTQDRAKPVTQIVSAEAWGRADDVIKIHWQEKKSNTILGSQEGNTMKTNDTYMKFSWLTVPEKSLDKEHRCIVRHENNKNGVDQEIIFPPIKTDVITMDPKDNCSKDANDTLLLQLTNTSAYYMYLLLLLKSVVYFAIITCCLLMAMVKRKDSRG

SEQ ID NO: 15292 - protein, 1005 aa, synthetic construct
MALPVTALLLPLALLLHAARPEVQLVESGGGLVQPGGSLRLSCAASGFSFSDFWMSWVRQAPGKGLEWVATISQAGSEKDYVDSVKGRFTISRDNAKKSLYLQMNSLRAEDTAVYYCASGVYSFDYRGQGTLVTVSSGTGGGGSGGGGSGGGGSEFDNFMLTQPHSVSESPGKTVTISCTRSSGSIASKYVQWYQQRPGSSPTTVIYEDNQRPSGVPDRFSGSIDTSSNSASLTISGLRTEDEADYYCHSYDSNNHSVFGGGTKVTVLGQLEIQNPDPAVYQLRDSKSSDKSVCLFTDFDSQTNVSQSKDSDVYITDKCVLDMRSMDFKSNSAVAWSNKSDFACANAFNNSIIPEDTFFPSPESSDSTDHVKPKETENTKQPSKSCHKPKAIVHTEKVNMMSLTVLGLRMLFAKTVAVNFLLTAKLFFLLTARAKRSGSGVKQTLNFDLLKLAGDVESNPGPTSMDWIWRILFLVGAATGAHSGPQLQLQESGPGLVKPSETLSLTCTVSGDSISSGDYYWGWIRQPPGKGLEWIGHIYYSGVTYYNPSLKSRVTISVDTSRNQFSLKLSSVTAADTAVYYCTREDSSNWRSRGQGTLVTVSSGSGGGGSGGGGSGGGGSFEEVQLVESGGGVVQPGGSLRLSCAASGFTFSSYAMSWVRQAPGKGLEWVSAISGSGGSTYYADSVKGRFSISRDNSKNTLYLQMNSLRAEDTAVYYCARTRSSGAFDIWGQGTLVTVSSTREDLKNVFPPEVAVFEPSEAEISHTQKATLVCLATGFYPDHVELSWWVNGKEVHSGVCTDPQPLKEQPALNDSRYCLSSRLRVSATFWQNPRNHFRCQVQFYGLSENDEWTQDRAKPVTQIVSAEAWGRADDVIKIHWQEKKSNTILGSQEGNTMKTNDTYMKFSWLTVPEKSLDKEHRCIVRHENNKNGVDQEIIFPPIKTDVITMDPKDNCSKDANDTLLLQLTNTSAYYMYLLLLLKSVVYFAIITCCLLMAMVKRKDSRG

SEQ ID NO: 15293 - protein, 1000 aa, synthetic construct
MALPVTALLLPLALLLHAARPEVQLVESGGGLVQPGGSLRLSCAASGFSFSDFWMSWVRQAPGKGLEWVATISQAGSEKDYVDSVKGRFTISRDNAKKSLYLQMNSLRAEDTAVYYCASGVYSFDYRGQGTLVTVSSGTGGGGSGGGGSGGGGSEFDIQMNQSPSSLSASLGDTITITCHASQNINVWLSWYQQKPGNIPKLLIYKASNLHTGVPSRFSGSGSGTGFTITISSLQPEDIATYYCQQGQSYPWTFGGGTKLEIKRLEIQNPDPAVYQLRDSKSSDKSVCLFTDFDSQTNVSQSKDSDVYITDKCVLDMRSMDFKSNSAVAWSNKSDFACANAFNNSIIPEDTFFPSPESSDSTDHVKPKETENTKQPSKSCHKPKAIVHTEKVNMMSLTVLGLRMLFAKTVAVNFLLTAKLFFLLTARAKRSGSGVKQTLNFDLLKLAGDVESNPGPTSMDWIWRILFLVGAATGAHSGPQLQLQESGPGLVKPSETLSLTCTVSGDSISSGDYYWGWIRQPPGKGLEWIGHIYYSGVTYYNPSLKSRVTISVDTSRNQFSLKLSSVTAADTAVYYCTREDSSNWRSRGQGTLVTVSSGSGGGGSGGGGSGGGGSFEEVQLQQSGPELVKPGASVKISCKASGYSFTGYFMNWVKQSHGKSLEYIGRFNPYNGETLYNQKFKGKATLTVDKSSSTVHMELLSVTSEDSAVYYCGRSGNDDAMDYWGQGTSVTVSSATREDLKNVFPPEVAVFEPSEAEISHTQKATLVCLATGFYPDHVELSWWVNGKEVHSGVCTDPQPLKEQPALNDSRYCLSSRLRVSATFWQNPRNHFRCQVQFYGLSENDEWTQDRAKPVTQIVSAEAWGRADDVIKIHWQEKKSNTILGSQEGNTMKTNDTYMKFSWLTVPEKSLDKEHRCIVRHENNKNGVDQEIIFPPIKTDVITMDPKDNCSKDANDTLLLQLTNTSAYYMYLLLLLKSVVYFAIITCCLLMAMVKRKDSRG

SEQ ID NO: 15294 - protein, 1001 aa, synthetic construct
MALPVTALLLPLALLLHAARPEVQLVESGGGLVQPGGSLRLSCAASGFSFSDFWMSWVRQAPGKGLEWVATISQAGSEKDYVDSVKGRFTISRDNAKKSLYLQMNSLRAEDTAVYYCASGVYSFDYRGQGTLVTVSSGTGGGGSGGGGSGGGGSEFEIVLTQSPATLSLSPGERATLSCRASQSVRSYLAWYQQKPGQAPRLLIYDASNRATGIPARFSGSGSGTDFTLTISSLEPEDFAVYYCQQRSNWPPTFGQGTKVEIKLEIQNPDPAVYQLRDSKSSDKSVCLFTDFDSQTNVSQSKDSDVYITDKCVLDMRSMDFKSNSAVAWSNKSDFACANAFNNSIIPEDTFFPSPESSDSTDHVKPKETENTKQPSKSCHKPKAIVHTEKVNMMSLTVLGLRMLFAKTVAVNFLLTAKLFFLLTARAKRSGSGVKQTLNFDLLKLAGDVESNPGPTSMDWIWRILFLVGAATGAHSGPQLQLQESGPGLVKPSETLSLTCTVSGDSISSGDYYWGWIRQPPGKGLEWIGHIYYSGVTYYNPSLKSRVTISVDTSRNQFSLKLSSVTAADTAVYYCTREDSSNWRSRGQGTLVTVSSGSGGGGSGGGGSGGGGSFEQLQVQESGPGLVKPSETLSLTCTVSGGSISNSYFSWGWIRQPPGKGLEWIGSFYYGEKTYYNPSLKSRATISIDTSKSQFSLKLSSVTAADTAVYYCPRGPTMIRGVIDSWGQGTLVTVSSTREDLKNVFPPEVAVFEPSEAEISHTQKATLVCLATGFYPDHVELSWWVNGKEVHSGVCTDPQPLKEQPALNDSRYCLSSRLRVSATFWQNPRNHFRCQVQFYGLSENDEWTQDRAKPVTQIVSAEAWGRADDVIKIHWQEKKSNTILGSQEGNTMKTNDTYMKFSWLTVPEKSLDKEHRCIVRHENNKNGVDQEIIFPPIKTDVITMDPKDNCSKDANDTLLLQLTNTSAYYMYLLLLLKSVVYFAIITCCLLMAMVKRKDSRG

SEQ ID NO: 15295 - protein, 1010 aa, synthetic construct
MALPVTALLLPLALLLHAARPEVQLVESGGGLVQPGGSLRLSCAASGFSFSDFWMSWVRQAPGKGLEWVATISQAGSEKDYVDSVKGRFTISRDNAKKSLYLQMNSLRAEDTAVYYCASGVYSFDYRGQGTLVTVSSGTGGGGSGGGGSGGGGSEFDIVMTQTPLSLPVTPGEPASISCRSSRSLLDSDDGNTYLDWYLQKPGQSPQLLIYTLSYRASGVPDRFSGSGSGTDFTLKISRVEAEDVGVYYCMQRVEFPITFGQGTRLEIKRLEIQNPDPAVYQLRDSKSSDKSVCLFTDFDSQTNVSQSKDSDVYITDKCVLDMRSMDFKSNSAVAWSNKSDFACANAFNNSIIPEDTFFPSPESSDSTDHVKPKETENTKQPSKSCHKPKAIVHTEKVNMMSLTVLGLRMLFAKTVAVNFLLTAKLFFLLTARAKRSGSGVKQTLNFDLLKLAGDVESNPGPTSMDWIWRILFLVGAATGAHSGPQLQLQESGPGLVKPSETLSLTCTVSGDSISSGDYYWGWIRQPPGKGLEWIGHIYYSGVTYYNPSLKSRVTISVDTSRNQFSLKLSSVTAADTAVYYCTREDSSNWRSRGQGTLVTVSSGSGGGGSGGGGSGGGGSFEQVQLVESGGGVVQPGRSLRLSCAASGFIFSRYGMHWVRQAPGKGLKWVAVIWYDGSNKLYADSVKGRFTISRDNSKNTLYLQMNSLRAEDTAVYYCARDYYDNSRHHWGFDYWGQGTLVTVSSTREDLKNVFPPEVAVFEPSEAEISHTQKATLVCLATGFYPDHVELSWWVNGKEVHSGVCTDPQPLKEQPALNDSRYCLSSRLRVSATFWQNPRNHFRCQVQFYGLSENDEWTQDRAKPVTQIVSAEAWGRADDVIKIHWQEKKSNTILGSQEGNTMKTNDTYMKFSWLTVPEKSLDKEHRCIVRHENNKNGVDQEIIFPPIKTDVITMDPKDNCSKDANDTLLLQLTNTSAYYMYLLLLLKSVVYFAIITCCLLMAMVKRKDSRG

SEQ ID NO: 15296 - protein, 1000 aa, synthetic construct
MALPVTALLLPLALLLHAARPEVQLVESGGGLVQPGGSLRLSCAASGFSFSDFWMSWVRQAPGKGLEWVATISQAGSEKDYVDSVKGRFTISRDNAKKSLYLQMNSLRAEDTAVYYCASGVYSFDYRGQGTLVTVSSGTGGGGSGGGGSGGGGSEFEIQMTQSPSSMSASLGDTITITCQATQDIFKNLNWYQQKPGKPPSLLIYYATELAEGVPSRFSGSGSGSDYSLTISNLESEDFAAYYCLQFFEFPFTFGSGTKLEMKLEIQNPDPAVYQLRDSKSSDKSVCLFTDFDSQTNVSQSKDSDVYITDKCVLDMRSMDFKSNSAVAWSNKSDFACANAFNNSIIPEDTFFPSPESSDSTDHVKPKETENTKQPSKSCHKPKAIVHTEKVNMMSLTVLGLRMLFAKTVAVNFLLTAKLFFLLTARAKRSGSGVKQTLNFDLLKLAGDVESNPGPTSMDWIWRILFLVGAATGAHSGPQLQLQESGPGLVKPSETLSLTCTVSGDSISSGDYYWGWIRQPPGKGLEWIGHIYYSGVTYYNPSLKSRVTISVDTSRNQFSLKLSSVTAADTAVYYCTREDSSNWRSRGQGTLVTVSSGSGGGGSGGGGSGGGGSFEQVQLQQSGAELVRPGTSVKVSCKASGYVFTNYWIEWIKQRPGQGLEWIGVMNPGSGETTYNEKFKGKATLTADKSSSTAYMQLSSLTSVDSAVYFCARDHDRDYYAMDYWGQGTSVTVSSTREDLKNVFPPEVAVFEPSEAEISHTQKATLVCLATGFYPDHVELSWWVNGKEVHSGVCTDPQPLKEQPALNDSRYCLSSRLRVSATFWQNPRNHFRCQVQFYGLSENDEWTQDRAKPVTQIVSAEAWGRADDVIKIHWQEKKSNTILGSQEGNTMKTNDTYMKFSWLTVPEKSLDKEHRCIVRHENNKNGVDQEIIFPPIKTDVITMDPKDNCSKDANDTLLLQLTNTSAYYMYLLLLLKSVVYFAIITCCLLMAMVKRKDSRG

SEQ ID NO: 15297 - protein, 997 aa, synthetic construct
MALPVTALLLPLALLLHAARPEVQLVESGGGLVQPGGSLRLSCAASGFSFSDFWMSWVRQAPGKGLEWVATISQAGSEKDYVDSVKGRFTISRDNAKKSLYLQMNSLRAEDTAVYYCASGVYSFDYRGQGTLVTVSSGTGGGGSGGGGSGGGGSEFDILLTQSPAILSVSPGERVSFSCRASQNIGTSIHWYQQRTNGSPRLLIKYASESVSGIPSRFSGSGSGTDFTLSINSVESEDIADYYCQHTNSWPTTFGGGTKLEIKRLEIQNPDPAVYQLRDSKSSDKSVCLFTDFDSQTNVSQSKDSDVYITDKCVLDMRSMDFKSNSAVAWSNKSDFACANAFNNSIIPEDTFFPSPESSDSTDHVKPKETENTKQPSKSCHKPKAIVHTEKVNMMSLTVLGLRMLFAKTVAVNFLLTAKLFFLLTARAKRSGSGVKQTLNFDLLKLAGDVESNPGPTSMDWIWRILFLVGAATGAHSGPQLQLQESGPGLVKPSETLSLTCTVSGDSISSGDYYWGWIRQPPGKGLEWIGHIYYSGVTYYNPSLKSRVTISVDTSRNQFSLKLSSVTAADTAVYYCTREDSSNWRSRGQGTLVTVSSGSGGGGSGGGGSGGGGSFEQVQLQQSDAELVKPGASVKISCKASGYTFTDHAIHWVKQKPEQGLEWIGYFSPGNGDIKYNEKFKGKATLTADKSSSTAYMQLNSLTSEDSAVYFCKRSYGNYDYWGQGTTLTVSSTREDLKNVFPPEVAVFEPSEAEISHTQKATLVCLATGFYPDHVELSWWVNGKEVHSGVCTDPQPLKEQPALNDSRYCLSSRLRVSATFWQNPRNHFRCQVQFYGLSENDEWTQDRAKPVTQIVSAEAWGRADDVIKIHWQEKKSNTILGSQEGNTMKTNDTYMKFSWLTVPEKSLDKEHRCIVRHENNKNGVDQEIIFPPIKTDVITMDPKDNCSKDANDTLLLQLTNTSAYYMYLLLLLKSVVYFAIITCCLLMAMVKRKDSRG

SEQ ID NO: 15298 - protein, 1002 aa, synthetic construct
MALPVTALLLPLALLLHAARPEVQLVESGGGLVQPGGSLRLSCAASGFSFSDFWMSWVRQAPGKGLEWVATISQAGSEKDYVDSVKGRFTISRDNAKKSLYLQMNSLRAEDTAVYYCASGVYSFDYRGQGTLVTVSSGTGGGGSGGGGSGGGGSEFDIVMTQSPDSLAVSLGERATINCKSSQSLLNSGDQKNYLTWYQQKPGQPPKLLIYWASTRESGVPDRFSGSGSGTDFTLTISSLQAEDVAVYYCQNDYSYPLTFGQGTKVEIKLEIQNPDPAVYQLRDSKSSDKSVCLFTDFDSQTNVSQSKDSDVYITDKCVLDMRSMDFKSNSAVAWSNKSDFACANAFNNSIIPEDTFFPSPESSDSTDHVKPKETENTKQPSKSCHKPKAIVHTEKVNMMSLTVLGLRMLFAKTVAVNFLLTAKLFFLLTARAKRSGSGVKQTLNFDLLKLAGDVESNPGPTSMDWIWRILFLVGAATGAHSGPQLQLQESGPGLVKPSETLSLTCTVSGDSISSGDYYWGWIRQPPGKGLEWIGHIYYSGVTYYNPSLKSRVTISVDTSRNQFSLKLSSVTAADTAVYYCTREDSSNWRSRGQGTLVTVSSGSGGGGSGGGGSGGGGSFEQVQLVQSGAEVKKTGSSVKVSCKASGYTFTDHAIHVWRQAPGQALEWMGHFSPGNTDIKYNDKFKGRVTLTVDRSMSTAYMELSSLRSEDTAMYYCKTSTFFFDYWGQGTMVTVSSTREDLKNVFPPEVAVFEPSEAEISHTQKATLVCLATGFYPDHVELSWWVNGKEVHSGVCTDPQPLKEQPALNDSRYCLSSRLRVSATFWQNPRNHFRCQVQFYGLSENDEWTQDRAKPVTQIVSAEAWGRADDVIKIHWQEKKSNTILGSQEGNTMKTNDTYMKFSWLTVPEKSLDKEHRCIVRHENNKNGVDQEIIFPPIKTDVITMDPKDNCSKDANDTLLLQLTNTSAYYMYLLLLLKSVVYFAIITCCLLMAMVKRKDSRG

SEQ ID NO: 15299 - protein, 1001 aa, synthetic construct
MALPVTALLLPLALLLHAARPEVQLVESGGGLVQPGGSLRLSCAASGFSFSDFWMSWVRQAPGKGLEWVATISQAGSEKDYVDSVKGRFTISRDNAKKSLYLQMNSLRAEDTAVYYCASGVYSFDYRGQGTLVTVSSGTGGGGSGGGGSGGGGSEFDIQMTQSPSSLSASVGDRVTITCKASQDVSIAVAWYQQKPGKAPKVLIYSASYRYTGVPDRFSGSGSGTDFTFTISSLQPEDIAVYYCQQHYITPLTFGGGTKVEIKLEIQNPDPAVYQLRDSKSSDKSVCLFTDFDSQTNVSQSKDSDVYITDKCVLDMRSMDFKSNSAVAWSNKSDFACANAFNNSIIPEDTFFPSPESSDSTDHVKPKETENTKQPSKSCHKPKAIVHTEKVNMMSLTVLGLRMLFAKTVAVNFLLTAKLFFLLTARAKRSGSGVKQTLNFDLLKLAGDVESNPGPTSMDWIWRILFLVGAATGAHSGPQLQLQESGPGLVKPSETLSLTCTVSGDSISSGDYYWGWIRQPPGKGLEWIGHIYYSGVTYYNPSLKSRVTISVDTSRNQFSLKLSSVTAADTAVYYCTREDSSNWRSRGQGTLVTVSSGSGGGGSGGGGSGGGGSFEQIQLVQSGHEVKKPGASVKVSCKASGYTFTNYGMNWVRQAPGQGLEWMGWINTKTGEPTYAEEFKGRFVFSLETSASTAYLQISSLKAEDTAMYFCGRGGYGSSYWYFDVWGQGTTVTVSSTREDLKNVFPPEVAVFEPSEAEISHTQKATLVCLATGFYPDHVELSWWVNGKEVHSGVCTDPQPLKEQPALNDSRYCLSSRLRVSATFWQNPRNHFRCQVQFYGLSENDEWTQDRAKPVTQIVSAEAWGRADDVIKIHWQEKKSNTILGSQEGNTMKTNDTYMKFSWLTVPEKSLDKEHRCIVRHENNKNGVDQEIIFPPIKTDVITMDPKDNCSKDANDTLLLQLTNTSAYYMYLLLLLKSVVYFAIITCCLLMAMVKRKDSRG

SEQ ID NO: 15300 - protein, 1003 aa, synthetic construct
MALPVTALLLPLALLLHAARPEVQLVESGGGLVQPGGSLRLSCAASGFSFSDFWMSWVRQAPGKGLEWVATISQAGSEKDYVDSVKGRFTISRDNAKKSLYLQMNSLRAEDTAVYYCASGVYSFDYRGQGTLVTVSSGTGGGGSGGGGSGGGGSEFDIVMTQSPDSLAVSLGERATINCRASKSVSTSGYSYMHWYQQKPGQPPKLLIYLASNLESGVPDRFSGSGSGTDFTLTISSLQAEDVAVYYCQHSRELPYTFGQGTKLEIKLEIQNPDPAVYQLRDSKSSDKSVCLFTDFDSQTNVSQSKDSDVYITDKCVLDMRSMDFKSNSAVAWSNKSDFACANAFNNSIIPEDTFFPSPESSDSTDHVKPKETENTKQPSKSCHKPKAIVHTEKVNMMSLTVLGLRMLFAKTVAVNFLLTAKLFFLLTARAKRSGSGVKQTLNFDLLKLAGDVESNPGPTSMDWIWRILFLVGAATGAHSGPQLQLQESGPGLVKPSETLSLTCTVSGDSISSGDYYWGWIRQPPGKGLEWIGHIYYSGVTYYNPSLKSRVTISVDTSRNQFSLKLSSVTAADTAVYYCTREDSSNWRSRGQGTLVTVSSGSGGGGSGGGGSGGGGSFEQVQLQESGPGLVKPSETLSLTCTVSGGSISSYGVHWIRQPPGKGLEWIGVIWTSGVTDYNSALMGRVTISVDTSKNQFSLKLSSVTAADTAVYYCARDGDYDRYTMDYWGQGTLVTVSSTREDLKNVFPPEVAVFEPSEAEISHTQKATLVCLATGFYPDHVELSWWVNGKEVHSGVCTDPQPLKEQPALNDSRYCLSSRLRVSATFWQNPRNHFRCQVQFYGLSENDEWTQDRAKPVTQIVSAEAWGRADDVIKIHWQEKKSNTILGSQEGNTMKTNDTYMKFSWLTVPEKSLDKEHRCIVRHENNKNGVDQEIIFPPIKTDVITMDPKDNCSKDANDTLLLQLTNTSAYYMYLLLLLKSVVYFAIITCCLLMAMVKRKDSRG

SEQ ID NO: 15301 - protein, 1003 aa, synthetic construct
MALPVTALLLPLALLLHAARPEVQLVESGGGLVQPGGSLRLSCAASGFSFSDFWMSWVRQAPGKGLEWVATISQAGSEKDYVDSVKGRFTISRDNAKKSLYLQMNSLRAEDTAVYYCASGVYSFDYRGQGTLVTVSSGTGGGGSGGGGSGGGGSEFDIQMTQSPSSLSASVGDRVTITCRASQSIGTSLHWYQQKPGKAPKLLIKFASRLQSGVPSRFSGSGSGTDFTLTISSLQPEDFATYYCQQSPGFPPTFGQGTKLEIKRLEIQNPDPAVYQLRDSKSSDKSVCLFTDFDSQTNVSQSKDSDVYITDKCVLDMRSMDFKSNSAVAWSNKSDFACANAFNNSIIPEDTFFPSPESSDSTDHVKPKETENTKQPSKSCHKPKAIVHTEKVNMMSLTVLGLRMLFAKTVAVNFLLTAKLFFLLTARAKRSGSGVKQTLNFDLLKLAGDVESNPGPTSMDWIWRILFLVGAATGAHSGPQLQLQESGPGLVKPSETLSLTCTVSGDSISSGDYYWGWIRQPPGKGLEWIGHIYYSGVTYYNPSLKSRVTISVDTSRNQFSLKLSSVTAADTAVYYCTREDSSNWRSRGQGTLVTVSSGSGGGGSGGGGSGGGGSFEQVQLVESGGGLVKPGGSLRLSCAASGFSITTSGYYWTWIRQFPGKGLEWMGYIGYNSKTYYNPALKSRITISRDNAKNSLYLQMNSLRAEDTAVYYCARSLYGGYKDAFDSWGQGTLVTVSSTREDLKNVFPPEVAVFEPSEAEISHTQKATLVCLATGFYPDHVELSWWVNGKEVHSGVCTDPQPLKEQPALNDSRYCLSSRLRVSATFWQNPRNHFRCQVQFYGLSENDEWTQDRAKPVTQIVSAEAWGRADDVIKIHWQEKKSNTILGSQEGNTMKTNDTYMKFSWLTVPEKSLDKEHRCIVRHENNKNGVDQEIIFPPIKTDVITMDPKDNCSKDANDTLLLQLTNTSAYYMYLLLLLKSVVYFAIITCCLLMAMVKRKDSRG

SEQ ID NO: 15302 - protein, 1008 aa, synthetic construct
MALPVTALLLPLALLLHAARPEVQLVESGGGLVQPGGSLRLSCAASGFSFSDFWMSWVRQAPGKGLEWVATISQAGSEKDYVDSVKGRFTISRDNAKKSLYLQMNSLRAEDTAVYYCASGVYSFDYRGQGTLVTVSSGTGGGGSGGGGSGGGGSEFDEIVLTQSPLSLPVTPGEPASISCRSSQSLLHSIGYNYLDWYLQKPGQSPQLLIYLGSNRASGVPDRFSGSGSGTDFTLKISRVEAEDVGVYYCMQALQTPLTFGGGTKVEIKRLEIQNPDPAVYQLRDSKSSDKSVCLFTDFDSQTNVSQSKDSDVYITDKCVLDMRSMDFKSNSAVAWSNKSDFACANAFNNSIIPEDTFFPSPESSDSTDHVKPKETENTKQPSKSCHKPKAIVHTEKVNMMSLTVLGLRMLFAKTVAVNFLLTAKLFFLLTARAKRSGSGVKQTLNFDLLKLAGDVESNPGPTSMDWIWRILFLVGAATGAHSGPQLQLQESGPGLVKPSETLSLTCTVSGDSISSGDYYWGWIRQPPGKGLEWIGHIYYSGVTYYNPSLKSRVTISVDTSRNQFSLKLSSVTAADTAVYYCTREDSSNWRSRGQGTLVTVSSGSGGGGSGGGGSGGGGSFEEVQLVESGGGVVQPGRSLRLSCAASGFTFRSYGMHWVRQAPGKGLEWVAVISYDGSNKYYTDSVNGRFTISRDNSKNTLYLQMNSLRAEDTAVYYCARGGGYYETSGPDYWGQGTLVTVSSTREDLKNVFPPEVAVFEPSEAEISHTQKATLVCLATGFYPDHVELSWWVNGKEVHSGVCTDPQPLKEQPALNDSRYCLSSRLRVSATFWQNPRNHFRCQVQFYGLSENDEWTQDRAKPVTQIVSAEAWGRADDVIKIHWQEKKSNTILGSQEGNTMKTNDTYMKFSWLTVPEKSLDKEHRCIVRHENNKNGVDQEIIFPPIKTDVITMDPKDNCSKDANDTLLLQLTNTSAYYMYLLLLLKSVVYFAIITCCLLMAMVKRKDSRG

SEQ ID NO: 15303 - protein, 1006 aa, synthetic construct
MALPVTALLLPLALLLHAARPEVQLVESGGGLVQPGGSLRLSCAASGFSFSDFWMSWVRQAPGKGLEWVATISQAGSEKDYVDSVKGRFTISRDNAKKSLYLQMNSLRAEDTAVYYCASGVYSFDYRGQGTLVTVSSGTGGGGSGGGGSGGGGSEFDDVVMTQSPLSLPVTPGEPASISCRSSQSLLHSIGYNYLHWFLQKPGQSPQLLIYLGSNRASGVPDRFSGSGSGTDFTLKISRVEAEDVGVYYCMQALQTPPTFGQGTRLEIKRLEIQNPDPAVYQLRDSKSSDKSVCLFTDFDSQTNVSQSKDSDVYITDKCVLDMRSMDFKSNSAVAWSNKSDFACANAFNNSIIPEDTFFPSPESSDSTDHVKPKETENTKQPSKSCHKPKAIVHTEKVNMMSLTVLGLRMLFAKTVAVNFLLTAKLFFLLTARAKRSGSGVKQTLNFDLLKLAGDVESNPGPTSMDWIWRILFLVGAATGAHSGPQLQLQESGPGLVKPSETLSLTCTVSGDSISSGDYYWGWIRQPPGKGLEWIGHIYYSGVTYYNPSLKSRVTISVDTSRNQFSLKLSSVTAADTAVYYCTREDSSNWRSRGQGTLVTVSSGSGGGGSGGGGSGGGGSFEQLQLQESGPGLVKPSGTLSLTCAVSGGSISSSNWWSWVRQPPGKGLEWIGEIYHSGSTNYNPSLKSRVTISVDKSKNQFSLKLSSVTAADTAVYYCVGSPYGDYVLDYWGQGTLVTVSSTREDLKNVFPPEVAVFEPSEAEISHTQKATLVCLATGFYPDHVELSWWVNGKEVHSGVCTDPQPLKEQPALNDSRYCLSSRLRVSATFWQNPRNHFRCQVQFYGLSENDEWTQDRAKPVTQIVSAEAWGRADDVIKIHWQEKKSNTILGSQEGNTMKTNDTYMKFSWLTVPEKSLDKEHRCIVRHENNKNGVDQEIIFPPIKTDVITMDPKDNCSKDANDTLLLQLTNTSAYYMYLLLLLKSVVYFAIITCCLLMAMVKRKDSRG

SEQ ID NO: 15304 - protein, 1004 aa, synthetic construct
MALPVTALLLPLALLLHAARPEVQLVESGGGLVQPGGSLRLSCAASGFSFSDFWMSWVRQAPGKGLEWVATISQAGSEKDYVDSVKGRFTISRDNAKKSLYLQMNSLRAEDTAVYYCASGVYSFDYRGQGTLVTVSSGTGGGGSGGGGSGGGGSEFDEIVLTQSPGTLSLSLGERATLSCRASQSISSSFLAWYQQKPGQAPKLLIYAASTRATGIPDRFSGSGSGTDFTLTISRLEPEDFAVYYCQQYGRSLSFGGGTKVEVKLEIQNPDPAVYQLRDSKSSDKSVCLFTDFDSQTNVSQSKDSDVYITDKCVLDMRSMDFKSNSAVAWSNKSDFACANAFNNSIIPEDTFFPSPESSDSTDHVKPKETENTKQPSKSCHKPKAIVHTEKVNMMSLTVLGLRMLFAKTVAVNFLLTAKLFFLLTARAKRSGSGVKQTLNFDLLKLAGDVESNPGPTSMDWIWRILFLVGAATGAHSGPQLQLQESGPGLVKPSETLSLTCTVSGDSISSGDYYWGWIRQPPGKGLEWIGHIYYSGVTYYNPSLKSRVTISVDTSRNQFSLKLSSVTAADTAVYYCTREDSSNWRSRGQGTLVTVSSGSGGGGSGGGGSGGGGSFEQVQLQQSGPGLVKPSQTLSLTCAISGDSVSGNSATWNWIRQSPSRGLEWLGRTYYRSKWNHDYAESVKSRITINPDTSKNQFSLQLNSVTPEDTAVYYCARGDSSSWYAFDYWGQGTLVTVSSTREDLKNVFPPEVAVFEPSEAEISHTQKATLVCLATGFYPDHVELSWWVNGKEVHSGVCTDPQPLKEQPALNDSRYCLSSRLRVSATFWQNPRNHFRCQVQFYGLSENDEWTQDRAKPVTQIVSAEAWGRADDVIKIHWQEKKSNTILGSQEGNTMKTNDTYMKFSWLTVPEKSLDKEHRCIVRHENNKNGVDQEIIFPPIKTDVITMDPKDNCSKDANDTLLLQLTNTSAYYMYLLLLLKSVVYFAIITCCLLMAMVKRKDSRG

SEQ ID NO: 15305 - protein, 1003 aa, synthetic construct
MALPVTALLLPLALLLHAARPEVQLVESGGGLVQPGGSLRLSCAASGFSFSDFWMSWVRQAPGKGLEWVATISQAGSEKDYVDSVKGRFTISRDNAKKSLYLQMNSLRAEDTAVYYCASGVYSFDYRGQGTLVTVSSGTGGGGSGGGGSGGGGSEFDQSVVTQPPSVSVAPGKTARITCGRNNIGSKSVHWYQQKPGQAPVLVVYDDSDRPSGIPERFSGSNSGNTATLTISRVEAGDEADYYCQVWDSSSDHVVFGGGTKLTVLGLEIQNPDPAVYQLRDSKSSDKSVCLFTDFDSQTNVSQSKDSDVYITDKCVLDMRSMDFKSNSAVAWSNKSDFACANAFNNSIIPEDTFFPSPESSDSTDHVKPKETENTKQPSKSCHKPKAIVHTEKVNMMSLTVLGLRMLFAKTVAVNFLLTAKLFFLLTARAKRSGSGVKQTLNFDLLKLAGDVESNPGPTSMDWIWRILFLVGAATGAHSGPQLQLQESGPGLVKPSETLSLTCTVSGDSISSGDYYWGWIRQPPGKGLEWIGHIYYSGVTYYNPSLKSRVTISVDTSRNQFSLKLSSVTAADTAVYYCTREDSSNWRSRGQGTLVTVSSGSGGGGSGGGGSGGGGSFEVQLVQSGGGVMRPGGSLRLSCAASGFTFDDYGMSWVRQAPGKGLEWVSGINWNGGSTGYADSVRGRFTISRDNAKNSLYLQMNSLRAEDTALYYCARERGYGYHDPHDYWGQGTLVTVSSTREDLKNVFPPEVAVFEPSEAEISHTQKATLVCLATGFYPDHVELSWWVNGKEVHSGVCTDPQPLKEQPALNDSRYCLSSRLRVSATFWQNPRNHFRCQVQFYGLSENDEWTQDRAKPVTQIVSAEAWGRADDVIKIHWQEKKSNTILGSQEGNTMKTNDTYMKFSWLTVPEKSLDKEHRCIVRHENNKNGVDQEIIFPPIKTDVITMDPKDNCSKDANDTLLLQLTNTSAYYMYLLLLLKSVVYFAIITCCLLMAMVKRKDSRG

SEQ ID NO: 15306 - protein, 1016 aa, synthetic construct
MALPVTALLLPLALLLHAARPEVQLVESGGGLVQPGGSLRLSCAASGFSFSDFWMSWVRQAPGKGLEWVATISQAGSEKDYVDSVKGRFTISRDNAKKSLYLQMNSLRAEDTAVYYCASGVYSFDYRGQGTLVTVSSGTGGGGSGGGGSGGGGSEFEQKLISEEDLEFQAVVTQPPSASGTPGQRVTISCSGSSSNIGSNTVNWYQQVPGTAPKLLIYSNNQRPSGVPDRFSGSKSGTSASLAISGLQSEDEADYYCAAWDDSLNGWVFGGGTKLTVLLEIQNPDPAVYQLRDSKSSDKSVCLFTDFDSQTNVSQSKDSDVYITDKCVLDMRSMDFKSNSAVAWSNKSDFACANAFNNSIIPEDTFFPSPESSDSTDHVKPKETENTKQPSKSCHKPKAIVHTEKVNMMSLTVLGLRMLFAKTVAVNFLLTAKLFFLLTARAKRSGSGVKQTLNFDLLKLAGDVESNPGPTSMDWIWRILFLVGAATGAHSGPQLQLQESGPGLVKPSETLSLTCTVSGDSISSGDYYWGWIRQPPGKGLEWIGHIYYSGVTYYNPSLKSRVTISVDTSRNQFSLKLSSVTAADTAVYYCTREDSSNWRSRGQGTLVTVSSGSGGGGSGGGGSGGGGSFEQMQLVQSGAEVKEPGESLRISCKGSGYSFTNFWISWVRQMPGKGLEWMGRVDPGYSYSTYSPSFQGHVTISADKSTSTAYLQWNSLKASDTAMYYCARVQYSGYYDWFDPWGQGTLVTVSSTREDLKNVFPPEVAVFEPSEAEISHTQKATLVCLATGFYPDHVELSWWVNGKEVHSGVCTDPQPLKEQPALNDSRYCLSSRLRVSATFWQNPRNHFRCQVQFYGLSENDEWTQDRAKPVTQIVSAEAWGRADDVIKIHWQEKKSNTILGSQEGNTMKTNDTYMKFSWLTVPEKSLDKEHRCIVRHENNKNGVDQEIIFPPIKTDVITMDPKDNCSKDANDTLLLQLTNTSAYYMYLLLLLKSVVYFAIITCCLLMAMVKRKDSRG

SEQ ID NO: 15307 - protein, 1010 aa, synthetic construct
MALPVTALLLPLALLLHAARPEVQLVESGGGLVQPGGSLRLSCAASGFSFSDFWMSWVRQAPGKGLEWVATISQAGSEKDYVDSVKGRFTISRDNAKKSLYLQMNSLRAEDTAVYYCASGVYSFDYRGQGTLVTVSSGTGGGGSGGGGSGGGGSEFEQKLISEEDLEFDIQMTQSPSTLSASVGDRVTITCRASQNINKWLAWYQQRPGKAPQLLIYKASSLESGVPSRFSGSGSGTEYTLTISSLQPDDFATYYCQQYNSYATFGQGTKVEIKRLEIQNPDPAVYQLRDSKSSDKSVCLFTDFDSQTNVSQSKDSDVYITDKCVLDMRSMDFKSNSAVAWSNKSDFACANAFNNSIIPEDTFFPSPESSDSTDHVKPKETENTKQPSKSCHKPKAIVHTEKVNMMSLTVLGLRMLFAKTVAVNFLLTAKLFFLLTARAKRSGSGVKQTLNFDLLKLAGDVESNPGPTSMDWIWRILFLVGAATGAHSGPQLQLQESGPGLVKPSETLSLTCTVSGDSISSGDYYWGWIRQPPGKGLEWIGHIYYSGVTYYNPSLKSRVTISVDTSRNQFSLKLSSVTAADTAVYYCTREDSSNWRSRGQGTLVTVSSGSGGGGSGGGGSGGGGSFEQVQLVQSGAEVKKPGESLKISCKGSGYNFSNKWIGWVRQLPGRGLEWIAIIYPGYSDITYSPSFQGRVTISADTSINTAYLHWHSLKASDTAMYYCVRHTALAGFDYWGLGTLVTVSSTREDLKNVFPPEVAVFEPSEAEISHTQKATLVCLATGFYPDHVELSWWVNGKEVHSGVCTDPQPLKEQPALNDSRYCLSSRLRVSATFWQNPRNHFRCQVQFYGLSENDEWTQDRAKPVTQIVSAEAWGRADDVIKIHWQEKKSNTILGSQEGNTMKTNDTYMKFSWLTVPEKSLDKEHRCIVRHENNKNGVDQEIIFPPIKTDVITMDPKDNCSKDANDTLLLQLTNTSAYYMYLLLLLKSVVYFAIITCCLLMAMVKRKDSRG

SEQ ID NO: 15308 - protein, 1002 aa, synthetic construct
MALPVTALLLPLALLLHAARPEVQLVESGGGLVQPGGSLRLSCAASGFSFSDFWMSWVRQAPGKGLEWVATISQAGSEKDYVDSVKGRFTISRDNAKKSLYLQMNSLRAEDTAVYYCASGVYSFDYRGQGTLVTVSSGTGGGGSGGGGSGGGGSEFDIVLTQSPASLAVSLGQRATISCRASESVDNYGNTFMHWYQQKPGQPPKLLIYRASNLESGIPARFSGSGSRTDFTLTINPVEADDVATYYCQQSNEDPPTFGAGTKLELKLEIQNPDPAVYQLRDSKSSDKSVCLFTDFDSQTNVSQSKDSDVYITDKCVLDMRSMDFKSNSAVAWSNKSDFACANAFNNSIIPEDTFFPSPESSDSTDHVKPKETENTKQPSKSCHKPKAIVHTEKVNMMSLTVLGLRMLFAKTVAVNFLLTAKLFFLLTARAKRSGSGVKQTLNFDLLKLAGDVESNPGPTSMDWIWRILFLVGAATGAHSGPQLQLQESGPGLVKPSETLSLTCTVSGDSISSGDYYWGWIRQPPGKGLEWIGHIYYSGVTYYNPSLKSRVTISVDTSRNQFSLKLSSVTAADTAVYYCTREDSSNWRSRGQGTLVTVSSGSGGGGSGGGGSGGGGSFEQIQLVQSGPELKKPGETVKISCKASGYIFTNYGMNWVKQAPGKSFKWMGWINTYTGESTYSADFKGRFAFSLETSASTAYLHINDLKNEDTATYFCARSGGYDPMDYWGQGTSVTVSSTREDLKNVFPPEVAVFEPSEAEISHTQKATLVCLATGFYPDHVELSWWVNGKEVHSGVCTDPQPLKEQPALNDSRYCLSSRLRVSATFWQNPRNHFRCQVQFYGLSENDEWTQDRAKPVTQIVSAEAWGRADDVIKIHWQEKKSNTILGSQEGNTMKTNDTYMKFSWLTVPEKSLDKEHRCIVRHENNKNGVDQEIIFPPIKTDVITMDPKDNCSKDANDTLLLQLTNTSAYYMYLLLLLKSVVYFAIITCCLLMAMVKRKDSRG

SEQ ID NO: 15309 - protein, 1001 aa, synthetic construct
MALPVTALLLPLALLLHAARPEVQLVESGGGLVQPGGSLRLSCAASGFSFSDFWMSWVRQAPGKGLEWVATISQAGSEKDYVDSVKGRFTISRDNAKKSLYLQMNSLRAEDTAVYYCASGVYSFDYRGQGTLVTVSSGTGGGGSGGGGSGGGGSEFDEIVLTQSPGTLSLSPGERATLSCRASQSVSNTYLAWYHQRPGQAPRLLIYGASSRATGIPDRFSGSGSGTDFALTISSLEPEDFAVYYCQQYSNSWTFGQGTKVEIKRLEIQNPDPAVYQLRDSKSSDKSVCLFTDFDSQTNVSQSKDSDVYITDKCVLDMRSMDFKSNSAVAWSNKSDFACANAFNNSIIPEDTFFPSPESSDSTDHVKPKETENTKQPSKSCHKPKAIVHTEKVNMMSLTVLGLRMLFAKTVAVNFLLTAKLFFLLTARAKRSGSGVKQTLNFDLLKLAGDVESNPGPTSMDWIWRILFLVGAATGAHSGPQLQLQESGPGLVKPSETLSLTCTVSGDSISSGDYYWGWIRQPPGKGLEWIGHIYYSGVTYYNPSLKSRVTISVDTSRNQFSLKLSSVTAADTAVYYCTREDSSNWRSRGQGTLVTVSSGSGGGGSGGGGSGGGGSFEQVQLVESGGGVVQPGRSLRLSCAASGFTFSSYDMHWVRQAPGKGLEWVAVISYDGTNEYYADSVKGRFTISRDTSKNTLYLQMNSLRAEDTAVYYCARERYFDWSFDYWGQGTLVSVSSTREDLKNVFPPEVAVFEPSEAEISHTQKATLVCLATGFYPDHVELSWWVNGKEVHSGVCTDPQPLKEQPALNDSRYCLSSRLRVSATFWQNPRNHFRCQVQFYGLSENDEWTQDRAKPVTQIVSAEAWGRADDVIKIHWQEKKSNTILGSQEGNTMKTNDTYMKFSWLTVPEKSLDKEHRCIVRHENNKNGVDQEIIFPPIKTDVITMDPKDNCSKDANDTLLLQLTNTSAYYMYLLLLLKSVVYFAIITCCLLMAMVKRKDSRG

SEQ ID NO: 15310 - protein, 1000 aa, synthetic construct
MALPVTALLLPLALLLHAARPEVQLVESGGGLVQPGGSLRLSCAASGFSFSDFWMSWVRQAPGKGLEWVATISQAGSEKDYVDSVKGRFTISRDNAKKSLYLQMNSLRAEDTAVYYCASGVYSFDYRGQGTLVTVSSGTGGGGSGGGGSGGGGSEFDELTQDPAVSVALGQTVRITCQGDSLRSNYANWYQQKPGQAPVLVIYGQNNRPSGIPDRFSGSSSGNTASLTITGAQAADEADYYCDSRVSTGNHVVFGGGTKLTVLGQLEIQNPDPAVYQLRDSKSSDKSVCLFTDFDSQTNVSQSKDSDVYITDKCVLDMRSMDFKSNSAVAWSNKSDFACANAFNNSIIPEDTFFPSPESSDSTDHVKPKETENTKQPSKSCHKPKAIVHTEKVNMMSLTVLGLRMLFAKTVAVNFLLTAKLFFLLTARAKRSGSGVKQTLNFDLLKLAGDVESNPGPTSMDWIWRILFLVGAATGAHSGPQLQLQESGPGLVKPSETLSLTCTVSGDSISSGDYYWGWIRQPPGKGLEWIGHIYYSGVTYYNPSLKSRVTISVDTSRNQFSLKLSSVTAADTAVYYCTREDSSNWRSRGQGTLVTVSSGSGGGGSGGGGSGGGGSFEEVQLVQSGAEVKKPGASVKVSCKASGYTFTSYAMHWVRQAPGQRLEWMGWINAGNGNTKYSQKFQGRVTITRDTSASTAYMELSSLRSEDTAVYYCARDISYGSFDYWGQGTLVTVSSTREDLKNVFPPEVAVFEPSEAEISHTQKATLVCLATGFYPDHVELSWWVNGKEVHSGVCTDPQPLKEQPALNDSRYCLSSRLRVSATFWQNPRNHFRCQVQFYGLSENDEWTQDRAKPVTQIVSAEAWGRADDVIKIHWQEKKSNTILGSQEGNTMKTNDTYMKFSWLTVPEKSLDKEHRCIVRHENNKNGVDQEIIFPPIKTDVITMDPKDNCSKDANDTLLLQLTNTSAYYMYLLLLLKSVVYFAIITCCLLMAMVKRKDSRG

SEQ ID NO: 15311 - protein, 1002 aa, synthetic construct
MALPVTALLLPLALLLHAARPEVQLVESGGGLVQPGGSLRLSCAASGFSFSDFWMSWVRQAPGKGLEWVATISQAGSEKDYVDSVKGRFTISRDNAKKSLYLQMNSLRAEDTAVYYCASGVYSFDYRGQGTLVTVSSGTGGGGSGGGGSGGGGSEFDDIVLTQTPATLSVTPGDSVSLSCRASQSISNNLHWYQQKSHESPRLLIKNASQSISGIPSKFSGSGSGTDFTLRINSVETEDFGMYFCQQSNSWPYTFGSGTKLEIKLEIQNPDPAVYQLRDSKSSDKSVCLFTDFDSQTNVSQSKDSDVYITDKCVLDMRSMDFKSNSAVAWSNKSDFACANAFNNSIIPEDTFFPSPESSDSTDHVKPKETENTKQPSKSCHKPKAIVHTEKVNMMSLTVLGLRMLFAKTVAVNFLLTAKLFFLLTARAKRSGSGVKQTLNFDLLKLAGDVESNPGPTSMDWIWRILFLVGAATGAHSGPQLQLQESGPGLVKPSETLSLTCTVSGDSISSGDYYWGWIRQPPGKGLEWIGHIYYSGVTYYNPSLKSRVTISVDTSRNQFSLKLSSVTAADTAVYYCTREDSSNWRSRGQGTLVTVSSGSGGGGSGGGGSGGGGSFEQVKLQQSGPELVKPGASVKISCKASGYSFTGYYMHWVKQSHGNILDWIGYIYPYNGVSSYNQKFKGKATLTVDKSSSTAYMELRSLTSEDSAVYYCARERGLYQLRAMDYWGQGTSVTVSSTREDLKNVFPPEVAVFEPSEAEISHTQKATLVCLATGFYPDHVELSWWVNGKEVHSGVCTDPQPLKEQPALNDSRYCLSSRLRVSATFWQNPRNHFRCQVQFYGLSENDEWTQDRAKPVTQIVSAEAWGRADDVIKIHWQEKKSNTILGSQEGNTMKTNDTYMKFSWLTVPEKSLDKEHRCIVRHENNKNGVDQEIIFPPIKTDVITMDPKDNCSKDANDTLLLQLTNTSAYYMYLLLLLKSVVYFAIITCCLLMAMVKRKDSRG

SEQ ID NO: 15312 - protein, 993 aa, synthetic construct
MALPVTALLLPLALLLHAARPEVQLVESGGGLVQPGGSLRLSCAASGFSFSDFWMSWVRQAPGKGLEWVATISQAGSEKDYVDSVKGRFTISRDNAKKSLYLQMNSLRAEDTAVYYCASGVYSFDYRGQGTLVTVSSGTGGGGSGGGGSGGGGSEFDDIVMTQTPAIMSASPGQKVTITCSASSSVNYMHWYQQKLGSSPKLWIYDTSKLAPGVPARFSGSGSGTSYSLTISSMEAEDAASYFCHQWSSYPYTFGSGTKLEIKLEIQNPDPAVYQLRDSKSSDKSVCLFTDFDSQTNVSQSKDSDVYITDKCVLDMRSMDFKSNSAVAWSNKSDFACANAFNNSIIPEDTFFPSPESSDSTDHVKPKETENTKQPSKSCHKPKAIVHTEKVNMMSLTVLGLRMLFAKTVAVNFLLTAKLFFLLTARAKRSGSGVKQTLNFDLLKLAGDVESNPGPTSMDWIWRILFLVGAATGAHSGPQLQLQESGPGLVKPSETLSLTCTVSGDSISSGDYYWGWIRQPPGKGLEWIGHIYYSGVTYYNPSLKSRVTISVDTSRNQFSLKLSSVTAADTAVYYCTREDSSNWRSRGQGTLVTVSSGSGGGGSGGGGSGGGGSFEEVQLQESGPDLVKPSQSLSLTCTVTGYSITSGYGWHWIRQFPGNKLEWMGYIHYSGSTTYNPSLKSRISISRDTSKNQFFLQLNSVTTEDTATYYCARSLRYWGQGTTLTVSSTREDLKNVFPPEVAVFEPSEAEISHTQKATLVCLATGFYPDHVELSWWVNGKEVHSGVCTDPQPLKEQPALNDSRYCLSSRLRVSATFWQNPRNHFRCQVQFYGLSENDEWTQDRAKPVTQIVSAEAWGRADDVIKIHWQEKKSNTILGSQEGNTMKTNDTYMKFSWLTVPEKSLDKEHRCIVRHENNKNGVDQEIIFPPIKTDVITMDPKDNCSKDANDTLLLQLTNTSAYYMYLLLLLKSVVYFAIITCCLLMAMVKRKDSRG

SEQ ID NO: 15313 - protein, 996 aa, synthetic construct
MALPVTALLLPLALLLHAARPEVQLVESGGGLVQPGGSLRLSCAASGFSFSDFWMSWVRQAPGKGLEWVATISQAGSEKDYVDSVKGRFTISRDNAKKSLYLQMNSLRAEDTAVYYCASGVYSFDYRGQGTLVTVSSGTGGGGSGGGGSGGGGSEFDDIQMTQSPSSLSASVGDRVTITCSATSSISYMHWYQQKPGKAPKGWIYDTSKLAHGVPSRFSGSGSGTDFTLTISSLQPEDFATYYCHQRRSYPFTFGQGTKVEIKLEIQNPDPAVYQLRDSKSSDKSVCLFTDFDSQTNVSQSKDSDVYITDKCVLDMRSMDFKSNSAVAWSNKSDFACANAFNNSIIPEDTFFPSPESSDSTDHVKPKETENTKQPSKSCHKPKAIVHTEKVNMMSLTVLGLRMLFAKTVAVNFLLTAKLFFLLTARAKRSGSGVKQTLNFDLLKLAGDVESNPGPTSMDWIWRILFLVGAATGAHSGPQLQLQESGPGLVKPSETLSLTCTVSGDSISSGDYYWGWIRQPPGKGLEWIGHIYYSGVTYYNPSLKSRVTISVDTSRNQFSLKLSSVTAADTAVYYCTREDSSNWRSRGQGTLVTVSSGSGGGGSGGGGSGGGGSFEEVQLVQSGAEVKKPGASVKVSCKASGYTFTNFWIHWVRQAPGQGLEWIGEIDPSDSYTNYNQKFKGRVTITRDTSTSTAYLELSSLRSEDTAVYYCAREITTVDYWGQGTLVTVSSTREDLKNVFPPEVAVFEPSEAEISHTQKATLVCLATGFYPDHVELSWWVNGKEVHSGVCTDPQPLKEQPALNDSRYCLSSRLRVSATFWQNPRNHFRCQVQFYGLSENDEWTQDRAKPVTQIVSAEAWGRADDVIKIHWQEKKSNTILGSQEGNTMKTNDTYMKFSWLTVPEKSLDKEHRCIVRHENNKNGVDQEIIFPPIKTDVITMDPKDNCSKDANDTLLLQLTNTSAYYMYLLLLLKSVVYFAIITCCLLMAMVKRKDSRG

SEQ ID NO: 15314 - protein, 1003 aa, synthetic construct
MALPVTALLLPLALLLHAARPEVQLVESGGGLVQPGGSLRLSCAASGFSFSDFWMSWVRQAPGKGLEWVATISQAGSEKDYVDSVKGRFTISRDNAKKSLYLQMNSLRAEDTAVYYCASGVYSFDYRGQGTLVTVSSGTGGGGSGGGGSGGGGSEFDDIQMTQSPSSLSASVGDRVTITCKASQGFNKYVAWYQQKPGKAPKLLIYYTSTLQPGVPSRFSGSGSGRDYTLTISSLQPEDFATYYCLQYGNLLYAFGQGTKVEIKRLEIQNPDPAVYQLRDSKSSDKSVCLFTDFDSQTNVSQSKDSDVYITDKCVLDMRSMDFKSNSAVAWSNKSDFACANAFNNSIIPEDTFFPSPESSDSTDHVKPKETENTKQPSKSCHKPKAIVHTEKVNMMSLTVLGLRMLFAKTVAVNFLLTAKLFFLLTARAKRSGSGVKQTLNFDLLKLAGDVESNPGPTSMDWIWRILFLVGAATGAHSGPQLQLQESGPGLVKPSETLSLTCTVSGDSISSGDYYWGWIRQPPGKGLEWIGHIYYSGVTYYNPSLKSRVTISVDTSRNQFSLKLSSVTAADTAVYYCTREDSSNWRSRGQGTLVTVSSGSGGGGSGGGGSGGGGSFEEVQLVQSGAEVKKPGASVKVSCKASGYTFTSYWIGWVRQAPGQGLEWIGDIYPGGGYTNYNEKFKGRVTITRDTSTSTAYLELSSLRSEDTAVYYCARLDGSSYRGAMDSWGQGTLVTVSSTREDLKNVFPPEVAVFEPSEAEISHTQKATLVCLATGFYPDHVELSWWVNGKEVHSGVCTDPQPLKEQPALNDSRYCLSSRLRVSATFWQNPRNHFRCQVQFYGLSENDEWTQDRAKPVTQIVSAEAWGRADDVIKIHWQEKKSNTILGSQEGNTMKTNDTYMKFSWLTVPEKSLDKEHRCIVRHENNKNGVDQEIIFPPIKTDVITMDPKDNCSKDANDTLLLQLTNTSAYYMYLLLLLKSVVYFAIITCCLLMAMVKRKDSRG

SEQ ID NO: 15315 - protein, 999 aa, synthetic construct
MALPVTALLLPLALLLHAARPEVQLVESGGGLVQPGGSLRLSCAASGFSFSDFWMSWVRQAPGKGLEWVATISQAGSEKDYVDSVKGRFTISRDNAKKSLYLQMNSLRAEDTAVYYCASGVYSFDYRGQGTLVTVSSGTGGGGSGGGGSGGGGSEFDDIQMTQSPSSLSASVGDRVTITCRASQDIRYYLNWYQQKPGKAPKLLIYVASSLQSGVPSRFSGSGSGTEFTLTVSSLQPEDFATYYCLQVYSTPRTFGQGTKVEIKLEIQNPDPAVYQLRDSKSSDKSVCLFTDFDSQTNVSQSKDSDVYITDKCVLDMRSMDFKSNSAVAWSNKSDFACANAFNNSIIPEDTFFPSPESSDSTDHVKPKETENTKQPSKSCHKPKAIVHTEKVNMMSLTVLGLRMLFAKTVAVNFLLTAKLFFLLTARAKRSGSGVKQTLNFDLLKLAGDVESNPGPTSMDWIWRILFLVGAATGAHSGPQLQLQESGPGLVKPSETLSLTCTVSGDSISSGDYYWGWIRQPPGKGLEWIGHIYYSGVTYYNPSLKSRVTISVDTSRNQFSLKLSSVTAADTAVYYCTREDSSNWRSRGQGTLVTVSSGSGGGGSGGGGSGGGGSFEEVQLVESGGGLAKPGGSLRLSCAASGFRFTFNNYYMDWVRQAPGQGLEWVSRISSSGDPTWYADSVKGRFTISRENAKNTLFLQMNSLRAEDTAVYYCASLTTGSDSWGQGVLVTVSSTREDLKNVFPPEVAVFEPSEAEISHTQKATLVCLATGFYPDHVELSWWVNGKEVHSGVCTDPQPLKEQPALNDSRYCLSSRLRVSATFWQNPRNHFRCQVQFYGLSENDEWTQDRAKPVTQIVSAEAWGRADDVIKIHWQEKKSNTILGSQEGNTMKTNDTYMKFSWLTVPEKSLDKEHRCIVRHENNKNGVDQEIIFPPIKTDVITMDPKDNCSKDANDTLLLQLTNTSAYYMYLLLLLKSVVYFAIITCCLLMAMVKRKDSRG

SEQ ID NO: 15316 - protein, 999 aa, synthetic construct
MALPVTALLLPLALLLHAARPEVQLVESGGGLVQPGGSLRLSCAASGFSFSDFWMSWVRQAPGKGLEWVATISQAGSEKDYVDSVKGRFTISRDNAKKSLYLQMNSLRAEDTAVYYCASGVYSFDYRGQGTLVTVSSGTGGGGSGGGGSGGGGSEFEIVMTQSPATLSVSPGERATLSCRASQSVSRNLAWYQQKPGQAPRLLIYGASTRATGIPARFSGSGSGTEFTLTIGSLQSEDFAVYYCQQYKTWPRTFGQGTNVEIKLEIQNPDPAVYQLRDSKSSDKSVCLFTDFDSQTNVSQSKDSDVYITDKCVLDMRSMDFKSNSAVAWSNKSDFACANAFNNSIIPEDTFFPSPESSDSTDHVKPKETENTKQPSKSCHKPKAIVHTEKVNMMSLTVLGLRMLFAKTVAVNFLLTAKLFFLLTARAKRSGSGVKQTLNFDLLKLAGDVESNPGPTSMDWIWRILFLVGAATGAHSGPQLQLQESGPGLVKPSETLSLTCTVSGDSISSGDYYWGWIRQPPGKGLEWIGHIYYSGVTYYNPSLKSRVTISVDTSRNQFSLKLSSVTAADTAVYYCTREDSSNWRSRGQGTLVTVSSGSGGGGSGGGGSGGGGSFEQVQLQQWGAGLLKPSETLSLTCAVFGGSFSGYYWSWIRQPPGKGLEWIGEINHRGNTNDNPSLKSRVTISVDTSKNQFALKLSSVTAADTAVYYCARERGYTYGNFDHWGQGTLVTVSSTREDLKNVFPPEVAVFEPSEAEISHTQKATLVCLATGFYPDHVELSWWVNGKEVHSGVCTDPQPLKEQPALNDSRYCLSSRLRVSATFWQNPRNHFRCQVQFYGLSENDEWTQDRAKPVTQIVSAEAWGRADDVIKIHWQEKKSNTILGSQEGNTMKTNDTYMKFSWLTVPEKSLDKEHRCIVRHENNKNGVDQEIIFPPIKTDVITMDPKDNCSKDANDTLLLQLTNTSAYYMYLLLLLKSVVYFAIITCCLLMAMVKRKDSRG

SEQ ID NO: 15317 - protein, 1000 aa, synthetic construct
MALPVTALLLPLALLLHAARPEVQLVESGGGLVQPGGSLRLSCAASGFSFSDFWMSWVRQAPGKGLEWVATISQAGSEKDYVDSVKGRFTISRDNAKKSLYLQMNSLRAEDTAVYYCASGVYSFDYRGQGTLVTVSSGTGGGGSGGGGSGGGGSEFEIVMTPSSATLSVSPGERATLSCRASQSVSRNLAWYQQKPGQAPRLLIYGASTRATGIPARFSGSGSGTEFTLTISSLQSEDFAVYYCHQYSNWMCSFGQGTKLEIKLEIQNPDPAVYQLRDSKSSDKSVCLFTDFDSQTNVSQSKDSDVYITDKCVLDMRSMDFKSNSAVAWSNKSDFACANAFNNSIIPEDTFFPSPESSDSTDHVKPKETENTKQPSKSCHKPKAIVHTEKVNMMSLTVLGLRMLFAKTVAVNFLLTAKLFFLLTARAKRSGSGVKQTLNFDLLKLAGDVESNPGPTSMDWIWRILFLVGAATGAHSGPQLQLQESGPGLVKPSETLSLTCTVSGDSISSGDYYWGWIRQPPGKGLEWIGHIYYSGVTYYNPSLKSRVTISVDTSRNQFSLKLSSVTAADTAVYYCTREDSSNWRSRGQGTLVTVSSGSGGGGSGGGGSGGGGSFEEVQLLESGGGLVQPGGSLRLSCAASGFTFSRYAMNWVRQAPGKGLEWVSGISGSGGRTYYADSVKGRFTISRDNSKNTLYLQMNSLRAEDTAVYYCAKDRDFWSGPFDYWGQGTLVTVSSTREDLKNVFPPEVAVFEPSEAEISHTQKATLVCLATGFYPDHVELSWWVNGKEVHSGVCTDPQPLKEQPALNDSRYCLSSRLRVSATFWQNPRNHFRCQVQFYGLSENDEWTQDRAKPVTQIVSAEAWGRADDVIKIHWQEKKSNTILGSQEGNTMKTNDTYMKFSWLTVPEKSLDKEHRCIVRHENNKNGVDQEIIFPPIKTDVITMDPKDNCSKDANDTLLLQLTNTSAYYMYLLLLLKSVVYFAIITCCLLMAMVKRKDSRG

SEQ ID NO: 15318 - protein, 1005 aa, synthetic construct
MALPVTALLLPLALLLHAARPEVQLVESGGGLVQPGGSLRLSCAASGFSFSDFWMSWVRQAPGKGLEWVATISQAGSEKDYVDSVKGRFTISRDNAKKSLYLQMNSLRAEDTAVYYCASGVYSFDYRGQGTLVTVSSGTGGGGSGGGGSGGGGSEFDIQMTQSPSSLSASVGDRVTITCKASKNIRSYLAWYQQKPGKAPKLLIYSGSTLHSGVPSRFSGSGSGTDFTLTISSLQPEDFATYYCQQHHEYPLTFGQGTKVEIKRLEIQNPDPAVYQLRDSKSSDKSVCLFTDFDSQTNVSQSKDSDVYITDKCVLDMRSMDFKSNSAVAWSNKSDFACANAFNNSIIPEDTFFPSPESSDSTDHVKPKETENTKQPSKSCHKPKAIVHTEKVNMMSLTVLGLRMLFAKTVAVNFLLTAKLFFLLTARAKRSGSGVKQTLNFDLLKLAGDVESNPGPTSMDWIWRILFLVGAATGAHSGPQLQLQESGPGLVKPSETLSLTCTVSGDSISSGDYYWGWIRQPPGKGLEWIGHIYYSGVTYYNPSLKSRVTISVDTSRNQFSLKLSSVTAADTAVYYCTREDSSNWRSRGQGTLVTVSSGSGGGGSGGGGSGGGGSFEQVQLQESGPGLVKPSETLSLTCTVSGYTITSGYDWSWIRQPPGKGLEWIGYINYGGSTNYKPSLGSRVTISVDTSKNQFSLKLSSVTAADTAVYYCARYNEYKSYIYDWYFDFWGQGTLVTVSSTREDLKNVFPPEVAVFEPSEAEISHTQKATLVCLATGFYPDHVELSWWVNGKEVHSGVCTDPQPLKEQPALNDSRYCLSSRLRVSATFWQNPRNHFRCQVQFYGLSENDEWTQDRAKPVTQIVSAEAWGRADDVIKIHWQEKKSNTILGSQEGNTMKTNDTYMKFSWLTVPEKSLDKEHRCIVRHENNKNGVDQEIIFPPIKTDVITMDPKDNCSKDANDTLLLQLTNTSAYYMYLLLLLKSVVYFAIITCCLLMAMVKRKDSRG

SEQ ID NO: 15319 - protein, 1007 aa, synthetic construct
MALPVTALLLPLALLLHAARPEVQLVESGGGLVQPGGSLRLSCAASGFSFSDFWMSWVRQAPGKGLEWVATISQAGSEKDYVDSVKGRFTISRDNAKKSLYLQMNSLRAEDTAVYYCASGVYSFDYRGQGTLVTVSSGTGGGGSGGGGSGGGGSEFQSVVTQPPSVSAAPGQKVTISCSGSSSNIGNNYVSWYQQLPGTAPKLLIYDNNKRPSGIPDRFSGSKSGTSATLGITGLQTGDEADYYCGTWDGSLYTMLFGGGTKLTVLLEIQNPDPAVYQLRDSKSSDKSVCLFTDFDSQTNVSQSKDSDVYITDKCVLDMRSMDFKSNSAVAWSNKSDFACANAFNNSIIPEDTFFPSPESSDSTDHVKPKETENTKQPSKSCHKPKAIVHTEKVNMMSLTVLGLRMLFAKTVAVNFLLTAKLFFLLTARAKRSGSGVKQTLNFDLLKLAGDVESNPGPTSMDWIWRILFLVGAATGAHSGPQLQLQESGPGLVKPSETLSLTCTVSGDSISSGDYYWGWIRQPPGKGLEWIGHIYYSGVTYYNPSLKSRVTISVDTSRNQFSLKLSSVTAADTAVYYCTREDSSNWRSRGQGTLVTVSSGSGGGGSGGGGSGGGGSFEEVQLVESGGGLVKPGGSLRLSCAASGFTFSNAWMSWVRQAPGKGLEWVGFIRSKAYGGTTEYAASVKGRFTISRDDSKSIAYLQMNNLKTEDTAVYYCARDGLYSSSWYDSDYWGQGTLVTVSSTREDLKNVFPPEVAVFEPSEAEISHTQKATLVCLATGFYPDHVELSWWVNGKEVHSGVCTDPQPLKEQPALNDSRYCLSSRLRVSATFWQNPRNHFRCQVQFYGLSENDEWTQDRAKPVTQIVSAEAWGRADDVIKIHWQEKKSNTILGSQEGNTMKTNDTYMKFSWLTVPEKSLDKEHRCIVRHENNKNGVDQEIIFPPIKTDVITMDPKDNCSKDANDTLLLQLTNTSAYYMYLLLLLKSVVYFAIITCCLLMAMVKRKDSRG

SEQ ID NO: 15320 - protein, 1012 aa, synthetic construct
MALPVTALLLPLALLLHAARPEVQLVESGGGLVQPGGSLRLSCAASGFSFSDFWMSWVRQAPGKGLEWVATISQAGSEKDYVDSVKGRFTISRDNAKKSLYLQMNSLRAEDTAVYYCASGVYSFDYRGQGTLVTVSSGTGGGGSGGGGSGGGGSEFQSVLTQPPSVSGAPGQRVTISCTGSSSNIGAGYDVHWYQQLPGTAPKLLIFGNSNRPSGVPDRFSGFKSGTSASLAITGLQAEDEADYFCQSYDSSLSGSGVFGTGTKVTVLGLEIQNPDPAVYQLRDSKSSDKSVCLFTDFDSQTNVSQSKDSDVYITDKCVLDMRSMDFKSNSAVAWSNKSDFACANAFNNSIIPEDTFFPSPESSDSTDHVKPKETENTKQPSKSCHKPKAIVHTEKVNMMSLTVLGLRMLFAKTVAVNFLLTAKLFFLLTARAKRSGSGVKQTLNFDLLKLAGDVESNPGPTSMDWIWRILFLVGAATGAHSGPQLQLQESGPGLVKPSETLSLTCTVSGDSISSGDYYWGWIRQPPGKGLEWIGHIYYSGVTYYNPSLKSRVTISVDTSRNQFSLKLSSVTAADTAVYYCTREDSSNWRSRGQGTLVTVSSGSGGGGSGGGGSGGGGSFEQMQLVQSGGGLVQPGRSLRLSCAASGFTFDDYAMHWVRQAPGKGLEWVSGISWNSGSIGYADSVKGRFTISRDNAKNSLYLQMNSLRAEDTALYYCAKDIHSGSYYGLLYYAMDVWGQGTTVTVSSTREDLKNVFPPEVAVFEPSEAEISHTQKATLVCLATGFYPDHVELSWWVNGKEVHSGVCTDPQPLKEQPALNDSRYCLSSRLRVSATFWQNPRNHFRCQVQFYGLSENDEWTQDRAKPVTQIVSAEAWGRADDVIKIHWQEKKSNTILGSQEGNTMKTNDTYMKFSWLTVPEKSLDKEHRCIVRHENNKNGVDQEIIFPPIKTDVITMDPKDNCSKDANDTLLLQLTNTSAYYMYLLLLLKSVVYFAIITCCLLMAMVKRKDSRG

SEQ ID NO: 15321 - protein, 1012 aa, synthetic construct
MALPVTALLLPLALLLHAARPEVQLVESGGGLVQPGGSLRLSCAASGFSFSDFWMSWVRQAPGKGLEWVATISQAGSEKDYVDSVKGRFTISRDNAKKSLYLQMNSLRAEDTAVYYCASGVYSFDYRGQGTLVTVSSGTGGGGSGGGGSGGGGSEFLPVLTQPPSASGTPGQRVTISCSGRSSNIGSNSVNWYRQLPGAAPKLLIYSNNQRPPGVPVRFSGSKSGTSASLAISGLQSEDEATYYCATWDDNLNVHYVFGTGTKVTVLGSRLEIQNPDPAVYQLRDSKSSDKSVCLFTDFDSQTNVSQSKDSDVYITDKCVLDMRSMDFKSNSAVAWSNKSDFACANAFNNSIIPEDTFFPSPESSDSTDHVKPKETENTKQPSKSCHKPKAIVHTEKVNMMSLTVLGLRMLFAKTVAVNFLLTAKLFFLLTARAKRSGSGVKQTLNFDLLKLAGDVESNPGPTSMDWIWRILFLVGAATGAHSGPQLQLQESGPGLVKPSETLSLTCTVSGDSISSGDYYWGWIRQPPGKGLEWIGHIYYSGVTYYNPSLKSRVTISVDTSRNQFSLKLSSVTAADTAVYYCTREDSSNWRSRGQGTLVTVSSGSGGGGSGGGGSGGGGSFELEMAQVQLVQSGAEVKKPGSSVKVSCKASGGTFSSYAISWVRQAPGQGLEWMGRIIPILGIANYAQKFQGRVTITADKSTSTAYMELSSLRSEDTAVYYCARGGYYSHDMWSEDWGQGTLVTVSSTREDLKNVFPPEVAVFEPSEAEISHTQKATLVCLATGFYPDHVELSWWVNGKEVHSGVCTDPQPLKEQPALNDSRYCLSSRLRVSATFWQNPRNHFRCQVQFYGLSENDEWTQDRAKPVTQIVSAEAWGRADDVIKIHWQEKKSNTILGSQEGNTMKTNDTYMKFSWLTVPEKSLDKEHRCIVRHENNKNGVDQEIIFPPIKTDVITMDPKDNCSKDANDTLLLQLTNTSAYYMYLLLLLKSVVYFAIITCCLLMAMVKRKDSRG

SEQ ID NO: 15322 - protein, 1006 aa, synthetic construct
MALPVTALLLPLALLLHAARPEVQLVESGGGLVQPGGSLRLSCAASGFSFSDFWMSWVRQAPGKGLEWVATISQAGSEKDYVDSVKGRFTISRDNAKKSLYLQMNSLRAEDTAVYYCASGVYSFDYRGQGTLVTVSSGTGGGGSGGGGSGGGGSEFDFVMTQSPDSLAVSLGERVTMSCKSSQSLLNSGNQKNYLTWYQQKPGQPPKLLIYWASTRESGVPDRFSGSGSGTDFTLTISSLQAEDVAVYYCQNDYSYPYTFGQGTKLEIKLEIQNPDPAVYQLRDSKSSDKSVCLFTDFDSQTNVSQSKDSDVYITDKCVLDMRSMDFKSNSAVAWSNKSDFACANAFNNSIIPEDTFFPSPESSDSTDHVKPKETENTKQPSKSCHKPKAIVHTEKVNMMSLTVLGLRMLFAKTVAVNFLLTAKLFFLLTARAKRSGSGVKQTLNFDLLKLAGDVESNPGPTSMDWIWRILFLVGAATGAHSGPQLQLQESGPGLVKPSETLSLTCTVSGDSISSGDYYWGWIRQPPGKGLEWIGHIYYSGVTYYNPSLKSRVTISVDTSRNQFSLKLSSVTAADTAVYYCTREDSSNWRSRGQGTLVTVSSGSGGGGSGGGGSGGGGSFEEVQLVQSGAELKKPGASVKVSCKASGYTFTDYYMKWVRQAPGQGLEWIGDIIPSNGATFYNQKFKGRVTITVDKSTSTAYMELSSLRSEDTAVYYCARSHLLRASWFAYWGQGTLVTVSSTREDLKNVFPPEVAVFEPSEAEISHTQKATLVCLATGFYPDHVELSWWVNGKEVHSGVCTDPQPLKEQPALNDSRYCLSSRLRVSATFWQNPRNHFRCQVQFYGLSENDEWTQDRAKPVTQIVSAEAWGRADDVIKIHWQEKKSNTILGSQEGNTMKTNDTYMKFSWLTVPEKSLDKEHRCIVRHENNKNGVDQEIIFPPIKTDVITMDPKDNCSKDANDTLLLQLTNTSAYYMYLLLLLKSVVYFAIITCCLLMAMVKRKDSRG

SEQ ID NO: 15323 - protein, 1006 aa, synthetic construct
MALPVTALLLPLALLLHAARPEVQLVESGGGLVQPGGSLRLSCAASGFSFSDFWMSWVRQAPGKGLEWVATISQAGSEKDYVDSVKGRFTISRDNAKKSLYLQMNSLRAEDTAVYYCASGVYSFDYRGQGTLVTVSSGTGGGGSGGGGSGGGGSEFDFVMTQSPDSLAVSLGERVTMSCKSSQSLLNSGNQKNYLTWYQQKPGQPPKLLIYWASTRESGVPDRFSGSGSGTDFTLTISSLQAEDVAVYYCQNDYSYPYTFGQGTKLEIKLEIQNPDPAVYQLRDSKSSDKSVCLFTDFDSQTNVSQSKDSDVYITDKCVLDMRSMDFKSNSAVAWSNKSDFACANAFNNSIIPEDTFFPSPESSDSTDHVKPKETENTKQPSKSCHKPKAIVHTEKVNMMSLTVLGLRMLFAKTVAVNFLLTAKLFFLLTARAKRSGSGVKQTLNFDLLKLAGDVESNPGPTSMDWIWRILFLVGAATGAHSGPQLQLQESGPGLVKPSETLSLTCTVSGDSISSGDYYWGWIRQPPGKGLEWIGHIYYSGVTYYNPSLKSRVTISVDTSRNQFSLKLSSVTAADTAVYYCTREDSSNWRSRGQGTLVTVSSGSGGGGSGGGGSGGGGSFEQVQLVQSGAELKKPGASVKVSCKASGYTFTDYYMKWVRQAPGQGLEWIGDIIPSNGATFYNQKFKGRVTITVDKSTSTAYMELSSLRSEDTAVYYCARSHLLRASWFAYWGQGTLVTVSSTREDLKNVFPPEVAVFEPSEAEISHTQKATLVCLATGFYPDHVELSWWVNGKEVHSGVCTDPQPLKEQPALNDSRYCLSSRLRVSATFWQNPRNHFRCQVQFYGLSENDEWTQDRAKPVTQIVSAEAWGRADDVIKIHWQEKKSNTILGSQEGNTMKTNDTYMKFSWLTVPEKSLDKEHRCIVRHENNKNGVDQEIIFPPIKTDVITMDPKDNCSKDANDTLLLQLTNTSAYYMYLLLLLKSVVYFAIITCCLLMAMVKRKDSRG

SEQ ID NO: 15324 - protein, 996 aa, synthetic construct
MALPVTALLLPLALLLHAARPEVQLVESGGGLVQPGGSLRLSCAASGFSFSDFWMSWVRQAPGKGLEWVATISQAGSEKDYVDSVKGRFTISRDNAKKSLYLQMNSLRAEDTAVYYCASGVYSFDYRGQGTLVTVSSGTGGGGSGGGGSGGGGSEFDVQITQSPSYLAASPGETITINCRASKSISKDLAWYQEKPGKTNKLLIYSGSTLQSGIPSRFSGSGSGTDFTLTISSLEPEDFAMYYCQQHNKYPYTFGGGTKLEIKRLEIQNPDPAVYQLRDSKSSDKSVCLFTDFDSQTNVSQSKDSDVYITDKCVLDMRSMDFKSNSAVAWSNKSDFACANAFNNSIIPEDTFFPSPESSDSTDHVKPKETENTKQPSKSCHKPKAIVHTEKVNMMSLTVLGLRMLFAKTVAVNFLLTAKLFFLLTARAKRSGSGVKQTLNFDLLKLAGDVESNPGPTSMDWIWRILFLVGAATGAHSGPQLQLQESGPGLVKPSETLSLTCTVSGDSISSGDYYWGWIRQPPGKGLEWIGHIYYSGVTYYNPSLKSRVTISVDTSRNQFSLKLSSVTAADTAVYYCTREDSSNWRSRGQGTLVTVSSGSGGGGSGGGGSGGGGSFEQVQLQQPGAELVRPGASVKLSCKASGYTFTSYWMNWVKQRPDQGLEWIGRIDPYDSETHYNQKFKDKAILTVDKSSSTAYMQLSSLTSEDSAVYYCARGNWDDYWGQGTTLTVSSTREDLKNVFPPEVAVFEPSEAEISHTQKATLVCLATGFYPDHVELSWWVNGKEVHSGVCTDPQPLKEQPALNDSRYCLSSRLRVSATFWQNPRNHFRCQVQFYGLSENDEWTQDRAKPVTQIVSAEAWGRADDVIKIHWQEKKSNTILGSQEGNTMKTNDTYMKFSWLTVPEKSLDKEHRCIVRHENNKNGVDQEIIFPPIKTDVITMDPKDNCSKDANDTLLLQLTNTSAYYMYLLLLLKSVVYFAIITCCLLMAMVKRKDSRG

SEQ ID NO: 15325 - protein, 998 aa, synthetic construct
MALPVTALLLPLALLLHAARPEVQLVESGGGLVQPGGSLRLSCAASGFSFSDFWMSWVRQAPGKGLEWVATISQAGSEKDYVDSVKGRFTISRDNAKKSLYLQMNSLRAEDTAVYYCASGVYSFDYRGQGTLVTVSSGTGGGGSGGGGSGGGGSEFEIVLTQSPTSMTASPGEQVTITCRASSSINYMHWYQQKPGASPRPWIYETSKLASGVPDRFSGSASGTSYSLTINNMEAEDAATYYCQQWNYPSWTFGGGTKLELKLEIQNPDPAVYQLRDSKSSDKSVCLFTDFDSQTNVSQSKDSDVYITDKCVLDMRSMDFKSNSAVAWSNKSDFACANAFNNSIIPEDTFFPSPESSDSTDHVKPKETENTKQPSKSCHKPKAIVHTEKVNMMSLTVLGLRMLFAKTVAVNFLLTAKLFFLLTARAKRSGSGVKQTLNFDLLKLAGDVESNPGPTSMDWIWRILFLVGAATGAHSGPQLQLQESGPGLVKPSETLSLTCTVSGDSISSGDYYWGWIRQPPGKGLEWIGHIYYSGVTYYNPSLKSRVTISVDTSRNQFSLKLSSVTAADTAVYYCTREDSSNWRSRGQGTLVTVSSGSGGGGSGGGGSGGGGSFEEVQLVESGGGLVQPGRSLKLSCAASGFTFSDYNMAWVRQAPKKGLEWVATILYDGGRTYYRGSVKGRFTISRDNAKSTLYLRMDSLRSEDTATYYCATHSRGTDYFDYWGQGVMVTVSSTREDLKNVFPPEVAVFEPSEAEISHTQKATLVCLATGFYPDHVELSWWVNGKEVHSGVCTDPQPLKEQPALNDSRYCLSSRLRVSATFWQNPRNHFRCQVQFYGLSENDEWTQDRAKPVTQIVSAEAWGRADDVIKIHWQEKKSNTILGSQEGNTMKTNDTYMKFSWLTVPEKSLDKEHRCIVRHENNKNGVDQEIIFPPIKTDVITMDPKDNCSKDANDTLLLQLTNTSAYYMYLLLLLKSVVYFAIITCCLLMAMVKRKDSRG

SEQ ID NO: 15326 - protein, 1007 aa, synthetic construct
MALPVTALLLPLALLLHAARPEVQLVESGGGLVQPGGSLRLSCAASGFSFSDFWMSWVRQAPGKGLEWVATISQAGSEKDYVDSVKGRFTISRDNAKKSLYLQMNSLRAEDTAVYYCASGVYSFDYRGQGTLVTVSSGTGGGGSGGGGSGGGGSEFDIVMTQSPSSLAVSEGETVTINCKSSQSFLSSGDGKNYVAWYQYKPGQSPKLLIYWASTRQSGVPDRFIGSGSGTDFTLTISTVQAEDLAIYYCQQYYDTPLTFGSGTKLEIKLEIQNPDPAVYQLRDSKSSDKSVCLFTDFDSQTNVSQSKDSDVYITDKCVLDMRSMDFKSNSAVAWSNKSDFACANAFNNSIIPEDTFFPSPESSDSTDHVKPKETENTKQPSKSCHKPKAIVHTEKVNMMSLTVLGLRMLFAKTVAVNFLLTAKLFFLLTARAKRSGSGVKQTLNFDLLKLAGDVESNPGPTSMDWIWRILFLVGAATGAHSGPQLQLQESGPGLVKPSETLSLTCTVSGDSISSGDYYWGWIRQPPGKGLEWIGHIYYSGVTYYNPSLKSRVTISVDTSRNQFSLKLSSVTAADTAVYYCTREDSSNWRSRGQGTLVTVSSGSGGGGSGGGGSGGGGSFEEVKLQESGPSLVQSSQTLSLTCTVSGFSLTSYHIHWVRQTPGKGLEWMGVMWSDGDTSYNSALKSRLSISRDTSQSQVFLKMNSLQTEDTATYYCARGYYSSYLYLWFAYWGQGTLVTVSSTREDLKNVFPPEVAVFEPSEAEISHTQKATLVCLATGFYPDHVELSWWVNGKEVHSGVCTDPQPLKEQPALNDSRYCLSSRLRVSATFWQNPRNHFRCQVQFYGLSENDEWTQDRAKPVTQIVSAEAWGRADDVIKIHWQEKKSNTILGSQEGNTMKTNDTYMKFSWLTVPEKSLDKEHRCIVRHENNKNGVDQEIIFPPIKTDVITMDPKDNCSKDANDTLLLQLTNTSAYYMYLLLLLKSVVYFAIITCCLLMAMVKRKDSRG

SEQ ID NO: 15327 - protein, 1011 aa, synthetic construct
MALPVTALLLPLALLLHAARPEVQLVESGGGLVQPGGSLRLSCAASGFSFSDFWMSWVRQAPGKGLEWVATISQAGSEKDYVDSVKGRFTISRDNAKKSLYLQMNSLRAEDTAVYYCASGVYSFDYRGQGTLVTVSSGTGGGGSGGGGSGGGGSEFDVLMTQTPVSLPVSLGGQVSISCRSSQSLVHSDGDTYLHWYLQKPGQSPQLLIYRVSNRFSGVPDRFSGSGSGTDFTLKISRVEPEDLGLYYCLQTTHFPPWTFGGGTKLEMKLEIQNPDPAVYQLRDSKSSDKSVCLFTDFDSQTNVSQSKDSDVYITDKCVLDMRSMDFKSNSAVAWSNKSDFACANAFNNSIIPEDTFFPSPESSDSTDHVKPKETENTKQPSKSCHKPKAIVHTEKVNMMSLTVLGLRMLFAKTVAVNFLLTAKLFFLLTARAKRSGSGVKQTLNFDLLKLAGDVESNPGPTSMDWIWRILFLVGAATGAHSGPQLQLQESGPGLVKPSETLSLTCTVSGDSISSGDYYWGWIRQPPGKGLEWIGHIYYSGVTYYNPSLKSRVTISVDTSRNQFSLKLSSVTAADTAVYYCTREDSSNWRSRGQGTLVTVSSGSGGGGSGGGGSGGGGSFEQVQLQQSGPELRRPGSSVRLSCKASGYRIKDFLIHWIKNRPEHGLEWIGWIDPEDGETKYAQKFQTKATLTADTSSNTAYMQLSSLTSEDTATYFCARWGDVYYGLMRGHVMDAWGQGTSVTVSSTREDLKNVFPPEVAVFEPSEAEISHTQKATLVCLATGFYPDHVELSWWVNGKEVHSGVCTDPQPLKEQPALNDSRYCLSSRLRVSATFWQNPRNHFRCQVQFYGLSENDEWTQDRAKPVTQIVSAEAWGRADDVIKIHWQEKKSNTILGSQEGNTMKTNDTYMKFSWLTVPEKSLDKEHRCIVRHENNKNGVDQEIIFPPIKTDVITMDPKDNCSKDANDTLLLQLTNTSAYYMYLLLLLKSVVYFAIITCCLLMAMVKRKDSRG

SEQ ID NO: 15328 - protein, 1006 aa, synthetic construct
MALPVTALLLPLALLLHAARPEVQLVESGGGLVQPGGSLRLSCAASGFSFSDFWMSWVRQAPGKGLEWVATISQAGSEKDYVDSVKGRFTISRDNAKKSLYLQMNSLRAEDTAVYYCASGVYSFDYRGQGTLVTVSSGTGGGGSGGGGSGGGGSEFDIVMTQSPATLSLSPGERATLSCRSSKSLQNVNGNTYLYWFQQKPGQSPQLLIYRMSNLNSGVPDRFSGSGSGTEFTLTISSLEPEDFAVYYCMQHLEYPITFGAGTKLEIKLEIQNPDPAVYQLRDSKSSDKSVCLFTDFDSQTNVSQSKDSDVYITDKCVLDMRSMDFKSNSAVAWSNKSDFACANAFNNSIIPEDTFFPSPESSDSTDHVKPKETENTKQPSKSCHKPKAIVHTEKVNMMSLTVLGLRMLFAKTVAVNFLLTAKLFFLLTARAKRSGSGVKQTLNFDLLKLAGDVESNPGPTSMDWIWRILFLVGAATGAHSGPQLQLQESGPGLVKPSETLSLTCTVSGDSISSGDYYWGWIRQPPGKGLEWIGHIYYSGVTYYNPSLKSRVTISVDTSRNQFSLKLSSVTAADTAVYYCTREDSSNWRSRGQGTLVTVSSGSGGGGSGGGGSGGGGSFEEVQLVESGGGLVKPGGSLKLSCAASGYTFTSYVMHWVRQAPGKGLEWIGYINPYNDGTKYNEKFQGRVTISSDKSISTAYMELSSLRSEDTAMYYCARGTYYYGTRVFDYWGQGTLVTVSSTREDLKNVFPPEVAVFEPSEAEISHTQKATLVCLATGFYPDHVELSWWVNGKEVHSGVCTDPQPLKEQPALNDSRYCLSSRLRVSATFWQNPRNHFRCQVQFYGLSENDEWTQDRAKPVTQIVSAEAWGRADDVIKIHWQEKKSNTILGSQEGNTMKTNDTYMKFSWLTVPEKSLDKEHRCIVRHENNKNGVDQEIIFPPIKTDVITMDPKDNCSKDANDTLLLQLTNTSAYYMYLLLLLKSVVYFAIITCCLLMAMVKRKDSRG

SEQ ID NO: 15329 - protein, 1002 aa, synthetic construct
MALPVTALLLPLALLLHAARPEVQLVESGGGLVQPGGSLRLSCAASGFSFSDFWMSWVRQAPGKGLEWVATISQAGSEKDYVDSVKGRFTISRDNAKKSLYLQMNSLRAEDTAVYYCASGVYSFDYRGQGTLVTVSSGTGGGGSGGGGSGGGGSEFDIQMTQSPSSLSASVGDRVTITCKASDHINNWLAWYQQKPGQAPKLLIYGATTLETGVPSRFSGSGSGTDYTLTISSLQPEDFATYYCQQSWNTPWTFGQGTKLEIKRLEIQNPDPAVYQLRDSKSSDKSVCLFTDFDSQTNVSQSKDSDVYITDKCVLDMRSMDFKSNSAVAWSNKSDFACANAFNNSIIPEDTFFPSPESSDSTDHVKPKETENTKQPSKSCHKPKAIVHTEKVNMMSLTVLGLRMLFAKTVAVNFLLTAKLFFLLTARAKRSGSGVKQTLNFDLLKLAGDVESNPGPTSMDWIWRILFLVGAATGAHSGPQLQLQESGPGLVKPSETLSLTCTVSGDSISSGDYYWGWIRQPPGKGLEWIGHIYYSGVTYYNPSLKSRVTISVDTSRNQFSLKLSSVTAADTAVYYCTREDSSNWRSRGQGTLVTVSSGSGGGGSGGGGSGGGGSFEQVQLQQPGAELVKPGASVKMSCKASGYAFSSYWINWMKQKPGQGLEWIGQIYPGDGDTNYNGKFKGRATLTADTSSSTAYMQLSSLTSEDSAVYFCARSITTVVGCAMDYWGQGTSVTVSSTREDLKNVFPPEVAVFEPSEAEISHTQKATLVCLATGFYPDHVELSWWVNGKEVHSGVCTDPQPLKEQPALNDSRYCLSSRLRVSATFWQNPRNHFRCQVQFYGLSENDEWTQDRAKPVTQIVSAEAWGRADDVIKIHWQEKKSNTILGSQEGNTMKTNDTYMKFSWLTVPEKSLDKEHRCIVRHENNKNGVDQEIIFPPIKTDVITMDPKDNCSKDANDTLLLQLTNTSAYYMYLLLLLKSVVYFAIITCCLLMAMVKRKDSRG

SEQ ID NO: 15330 - protein, 1004 aa, synthetic construct
MALPVTALLLPLALLLHAARPEVQLVESGGGLVQPGGSLRLSCAASGFSFSDFWMSWVRQAPGKGLEWVATISQAGSEKDYVDSVKGRFTISRDNAKKSLYLQMNSLRAEDTAVYYCASGVYSFDYRGQGTLVTVSSGTGGGGSGGGGSGGGGSEFQIVLSQSPAILSASPGEKVTMTCRASSSVSYMHWYQQKPGSSPKPWIYATSNLASGVPARFSGSGSGTSYSFTISRVEAEDAATYYCQQWTFNPPTFGGGTRLEIKRTVAALEIQNPDPAVYQLRDSKSSDKSVCLFTDFDSQTNVSQSKDSDVYITDKCVLDMRSMDFKSNSAVAWSNKSDFACANAFNNSIIPEDTFFPSPESSDSTDHVKPKETENTKQPSKSCHKPKAIVHTEKVNMMSLTVLGLRMLFAKTVAVNFLLTAKLFFLLTARAKRSGSGVKQTLNFDLLKLAGDVESNPGPTSMDWIWRILFLVGAATGAHSGPQLQLQESGPGLVKPSETLSLTCTVSGDSISSGDYYWGWIRQPPGKGLEWIGHIYYSGVTYYNPSLKSRVTISVDTSRNQFSLKLSSVTAADTAVYYCTREDSSNWRSRGQGTLVTVSSGSGGGGSGGGGSGGGGSFEQAYLQQSGAELVRPGASVKMSCKASGYTFTSYNMHWVKQTPRQGLEWIGGIYPGNGDTSYNQKFKGKATLTVGKSSSTAYMQLSSLTSEDSAVYFCARYDYNYAMDYWGQGTSVTVSSASTREDLKNVFPPEVAVFEPSEAEISHTQKATLVCLATGFYPDHVELSWWVNGKEVHSGVCTDPQPLKEQPALNDSRYCLSSRLRVSATFWQNPRNHFRCQVQFYGLSENDEWTQDRAKPVTQIVSAEAWGRADDVIKIHWQEKKSNTILGSQEGNTMKTNDTYMKFSWLTVPEKSLDKEHRCIVRHENNKNGVDQEIIFPPIKTDVITMDPKDNCSKDANDTLLLQLTNTSAYYMYLLLLLKSVVYFAIITCCLLMAMVKRKDSRG

SEQ ID NO: 15331 - protein, 1002 aa, synthetic construct
MALPVTALLLPLALLLHAARPEVQLVESGGGLVQPGGSLRLSCAASGFSFSDFWMSWVRQAPGKGLEWVATISQAGSEKDYVDSVKGRFTISRDNAKKSLYLQMNSLRAEDTAVYYCASGVYSFDYRGQGTLVTVSSGTGGGGSGGGGSGGGGSEFEIVLTQSPATLSLSPGERATLSCRASQSVSSYLAWYQQKPGQAPRLLIYDASNRATGIPARFSGSGSGTDFTLTISSLEPEDFAVYYCQQRSNWPITFGQGTRLEIKLEIQNPDPAVYQLRDSKSSDKSVCLFTDFDSQTNVSQSKDSDVYITDKCVLDMRSMDFKSNSAVAWSNKSDFACANAFNNSIIPEDTFFPSPESSDSTDHVKPKETENTKQPSKSCHKPKAIVHTEKVNMMSLTVLGLRMLFAKTVAVNFLLTAKLFFLLTARAKRSGSGVKQTLNFDLLKLAGDVESNPGPTSMDWIWRILFLVGAATGAHSGPQLQLQESGPGLVKPSETLSLTCTVSGDSISSGDYYWGWIRQPPGKGLEWIGHIYYSGVTYYNPSLKSRVTISVDTSRNQFSLKLSSVTAADTAVYYCTREDSSNWRSRGQGTLVTVSSGSGGGGSGGGGSGGGGSFEEVQLVESGGGLVQPDRSLRLSCAASGFTFHDYAMHWVRQAPGKGLEWVSTISWNSGTIGYADSVKGRFTISRDNAKNSLYLQMNSLRAEDTALYYCAKDIQYGNYYYGMDVWGQGTTVTVSSTREDLKNVFPPEVAVFEPSEAEISHTQKATLVCLATGFYPDHVELSWWVNGKEVHSGVCTDPQPLKEQPALNDSRYCLSSRLRVSATFWQNPRNHFRCQVQFYGLSENDEWTQDRAKPVTQIVSAEAWGRADDVIKIHWQEKKSNTILGSQEGNTMKTNDTYMKFSWLTVPEKSLDKEHRCIVRHENNKNGVDQEIIFPPIKTDVITMDPKDNCSKDANDTLLLQLTNTSAYYMYLLLLLKSVVYFAIITCCLLMAMVKRKDSRG

SEQ ID NO: 15332 - protein, 997 aa, synthetic construct
MALPVTALLLPLALLLHAARPEVQLVESGGGLVQPGGSLRLSCAASGFSFSDFWMSWVRQAPGKGLEWVATISQAGSEKDYVDSVKGRFTISRDNAKKSLYLQMNSLRAEDTAVYYCASGVYSFDYRGQGTLVTVSSGTGGGGSGGGGSGGGGSEFDIQMTQSPSSLSASVGDRVTINCKASQDINSYLSWFQQKPGKAPKTLIYRANRLVDGVPSRFSGSGSGQDYTLTISSLQPEDFATYYCLQYDEFPLTFGGGTKVEIKLEIQNPDPAVYQLRDSKSSDKSVCLFTDFDSQTNVSQSKDSDVYITDKCVLDMRSMDFKSNSAVAWSNKSDFACANAFNNSIIPEDTFFPSPESSDSTDHVKPKETENTKQPSKSCHKPKAIVHTEKVNMMSLTVLGLRMLFAKTVAVNFLLTAKLFFLLTARAKRSGSGVKQTLNFDLLKLAGDVESNPGPTSMDWIWRILFLVGAATGAHSGPQLQLQESGPGLVKPSETLSLTCTVSGDSISSGDYYWGWIRQPPGKGLEWIGHIYYSGVTYYNPSLKSRVTISVDTSRNQFSLKLSSVTAADTAVYYCTREDSSNWRSRGQGTLVTVSSGSGGGGSGGGGSGGGGSFEQVQLVQSGAEVKKPGASVKVSCKASGYTFTNYDINWVRQAPGQGLEWIGWIYPGDGSTKYNEKFKAKATLTADTSTSTAYMELRSLRSDDTAVYYCASGYEDAMDYWGQGTTVTVSSTREDLKNVFPPEVAVFEPSEAEISHTQKATLVCLATGFYPDHVELSWWVNGKEVHSGVCTDPQPLKEQPALNDSRYCLSSRLRVSATFWQNPRNHFRCQVQFYGLSENDEWTQDRAKPVTQIVSAEAWGRADDVIKIHWQEKKSNTILGSQEGNTMKTNDTYMKFSWLTVPEKSLDKEHRCIVRHENNKNGVDQEIIFPPIKTDVITMDPKDNCSKDANDTLLLQLTNTSAYYMYLLLLLKSVVYFAIITCCLLMAMVKRKDSRG

SEQ ID NO: 15333 - protein, 999 aa, synthetic construct
MALPVTALLLPLALLLHAARPEVQLVESGGGLVQPGGSLRLSCAASGFSFSDFWMSWVRQAPGKGLEWVATISQAGSEKDYVDSVKGRFTISRDNAKKSLYLQMNSLRAEDTAVYYCASGVYSFDYRGQGTLVTVSSGTGGGGSGGGGSGGGGSEFDIVMTQTPLSLSVTPGQPASISCKSSQSLLDGDGKTYLNWLLQKPGQSPQRLIYLVSKLDSGVPDRFSGSGSGTDFTLKISRVEAEDVGVYYCWQGTHFPRTFGQGTKLEIKLEIQNPDPAVYQLRDSKSSDKSVCLFTDFDSQTNVSQSKDSDVYITDKCVLDMRSMDFKSNSAVAWSNKSDFACANAFNNSIIPEDTFFPSPESSDSTDHVKPKETENTKQPSKSCHKPKAIVHTEKVNMMSLTVLGLRMLFAKTVAVNFLLTAKLFFLLTARAKRSGSGVKQTLNFDLLKLAGDVESNPGPTSMDWIWRILFLVGAATGAHSGPQLQLQESGPGLVKPSETLSLTCTVSGDSISSGDYYWGWIRQPPGKGLEWIGHIYYSGVTYYNPSLKSRVTISVDTSRNQFSLKLSSVTAADTAVYYCTREDSSNWRSRGQGTLVTVSSGSGGGGSGGGGSGGGGSFEQVQLVQSGAEVKKPGASVKVSCKASGYTFKDTYIHWVRQAPGQGLEWMGRIDPANGNTKYDPKFQGRVTMTRDTSISTAYMELSRLRSDDTAVYYCARRGGVDWGQGTLVTVSSTREDLKNVFPPEVAVFEPSEAEISHTQKATLVCLATGFYPDHVELSWWVNGKEVHSGVCTDPQPLKEQPALNDSRYCLSSRLRVSATFWQNPRNHFRCQVQFYGLSENDEWTQDRAKPVTQIVSAEAWGRADDVIKIHWQEKKSNTILGSQEGNTMKTNDTYMKFSWLTVPEKSLDKEHRCIVRHENNKNGVDQEIIFPPIKTDVITMDPKDNCSKDANDTLLLQLTNTSAYYMYLLLLLKSVVYFAIITCCLLMAMVKRKDSRG

SEQ ID NO: 15334 - protein, 1000 aa, synthetic construct
MALPVTALLLPLALLLHAARPEVQLVESGGGLVQPGGSLRLSCAASGFSFSDFWMSWVRQAPGKGLEWVATISQAGSEKDYVDSVKGRFTISRDNAKKSLYLQMNSLRAEDTAVYYCASGVYSFDYRGQGTLVTVSSGTGGGGSGGGGSGGGGSEFDIQMTQSPSSLSASVGDRVTITCKASQDVSTAVAWFQQKPGKAPKLLIYSPSYRYTGVPSRFSGSGSGTDFTLTISSLQPEDFTYYCQQLYSTPYTFGQGTKVEIKLEIQNPDPAVYQLRDSKSSDKSVCLFTDFDSQTNVSQSKDSDVYITDKCVLDMRSMDFKSNSAVAWSNKSDFACANAFNNSIIPEDTFFPSPESSDSTDHVKPKETENTKQPSKSCHKPKAIVHTEKVNMMSLTVLGLRMLFAKTVAVNFLLTAKLFFLLTARAKRSGSGVKQTLNFDLLKLAGDVESNPGPTSMDWIWRILFLVGAATGAHSGPQLQLQESGPGLVKPSETLSLTCTVSGDSISSGDYYWGWIRQPPGKGLEWIGHIYYSGVTYYNPSLKSRVTISVDTSRNQFSLKLSSVTAADTAVYYCTREDSSNWRSRGQGTLVTVSSGSGGGGSGGGGSGGGGSFEEVQLVQSGAEVKKPGASVKVSCKASGYTFTDYYLDVVVRQAPGQGLEWIGRVNPYNGGTIYNQKFKGRVTLTRDTSTSTAYLELSSLRSEDTAVYYCARDHYRYDPLLDYWGQGTLVTVSSTREDLKNVFPPEVAVFEPSEAEISHTQKATLVCLATGFYPDHVELSWWVNGKEVHSGVCTDPQPLKEQPALNDSRYCLSSRLRVSATFWQNPRNHFRCQVQFYGLSENDEWTQDRAKPVTQIVSAEAWGRADDVIKIHWQEKKSNTILGSQEGNTMKTNDTYMKFSWLTVPEKSLDKEHRCIVRHENNKNGVDQEIIFPPIKTDVITMDPKDNCSKDANDTLLLQLTNTSAYYMYLLLLLKSVVYFAIITCCLLMAMVKRKDSRG

SEQ ID NO: 15335 - protein, 1006 aa, synthetic construct
MALPVTALLLPLALLLHAARPEVQLVESGGGLVQPGGSLRLSCAASGFSFSDFWMSWVRQAPGKGLEWVATISQAGSEKDYVDSVKGRFTISRDNAKKSLYLQMNSLRAEDTAVYYCASGVYSFDYRGQGTLVTVSSGTGGGGSGGGGSGGGGSEFDIQMTQSPSSLSASVGDRVTITCRASQSVSTSSYNYMHWYQQKPGKPPKLLIKYASNLESGVPSRFSGSGSGTDFTLTISSLQPEDFATYYCQHSWEIPLTFGQGTKVEIKLEIQNPDPAVYQLRDSKSSDKSVCLFTDFDSQTNVSQSKDSDVYITDKCVLDMRSMDFKSNSAVAWSNKSDFACANAFNNSIIPEDTFFPSPESSDSTDHVKPKETENTKQPSKSCHKPKAIVHTEKVNMMSLTVLGLRMLFAKTVAVNFLLTAKLFFLLTARAKRSGSGVKQTLNFDLLKLAGDVESNPGPTSMDWIWRILFLVGAATGAHSGPQLQLQESGPGLVKPSETLSLTCTVSGDSISSGDYYWGWIRQPPGKGLEWIGHIYYSGVTYYNPSLKSRVTISVDTSRNQFSLKLSSVTAADTAVYYCTREDSSNWRSRGQGTLVTVSSGSGGGGSGGGGSGGGGSFEEVQLVQSGAEVKKPGASVKVSCKASGYSFTDYYMHWVRQAPGQGLEWIGRINPYNGAAFYSQNFKDRVTLTVDTSTSTAYLELSSLRSEDTAVYYCAIERGADLEGYAMDYWGQGTLVTVSSTREDLKNVFPPEVAVFEPSEAEISHTQKATLVCLATGFYPDHVELSWWVNGKEVHSGVCTDPQPLKEQPALNDSRYCLSSRLRVSATFWQNPRNHFRCQVQFYGLSENDEWTQDRAKPVTQIVSAEAWGRADDVIKIHWQEKKSNTILGSQEGNTMKTNDTYMKFSWLTVPEKSLDKEHRCIVRHENNKNGVDQEIIFPPIKTDVITMDPKDNCSKDANDTLLLQLTNTSAYYMYLLLLLKSVVYFAIITCCLLMAMVKRKDSRG

SEQ ID NO: 15336 - protein, 1004 aa, synthetic construct
MALPVTALLLPLALLLHAARPEVQLVESGGGLVQPGGSLRLSCAASGFSFSDFWMSWVRQAPGKGLEWVATISQAGSEKDYVDSVKGRFTISRDNAKKSLYLQMNSLRAEDTAVYYCASGVYSFDYRGQGTLVTVSSGTGGGGSGGGGSGGGGSEFEIVLTQSPATLSASPGERVTLTCRASSNVISSYVHWYQQKPGSSPRLFLYSTSNLASGVPSRFSGSGSGTDFTFTISSLEAEDAATYYCQQYSGYPLTFGQGTRLEIKLEIQNPDPAVYQLRDSKSSDKSVCLFTDFDSQTNVSQSKDSDVYITDKCVLDMRSMDFKSNSAVAWSNKSDFACANAFNNSIIPEDTFFPSPESSDSTDHVKPKETENTKQPSKSCHKPKAIVHTEKVNMMSLTVLGLRMLFAKTVAVNFLLTAKLFFLLTARAKRSGSGVKQTLNFDLLKLAGDVESNPGPTSMDWIWRILFLVGAATGAHSGPQLQLQESGPGLVKPSETLSLTCTVSGDSISSGDYYWGWIRQPPGKGLEWIGHIYYSGVTYYNPSLKSRVTISVDTSRNQFSLKLSSVTAADTAVYYCTREDSSNWRSRGQGTLVTVSSGSGGGGSGGGGSGGGGSFEQVQLQESGPGLVKPSETLSLTCAVSGYSITSAYYWNWIRQPPGKGLEWIGYISYDGRNNYNPSLKNRITINPDTSKNQFSLQLNSVTPEDTAVYYCAREGDYDVGNYYAMDYWGQGTLVTVSSTREDLKNVFPPEVAVFEPSEAEISHTQKATLVCLATGFYPDHVELSWWVNGKEVHSGVCTDPQPLKEQPALNDSRYCLSSRLRVSATFWQNPRNHFRCQVQFYGLSENDEWTQDRAKPVTQIVSAEAWGRADDVIKIHWQEKKSNTILGSQEGNTMKTNDTYMKFSWLTVPEKSLDKEHRCIVRHENNKNGVDQEIIFPPIKTDVITMDPKDNCSKDANDTLLLQLTNTSAYYMYLLLLLKSVVYFAIITCCLLMAMVKRKDSRG

SEQ ID NO: 15337 - protein, 1004 aa, synthetic construct
MALPVTALLLPLALLLHAARPEVQLVESGGGLVQPGGSLRLSCAASGFSFSDFWMSWVRQAPGKGLEWVATISQAGSEKDYVDSVKGRFTISRDNAKKSLYLQMNSLRAEDTAVYYCASGVYSFDYRGQGTLVTVSSGTGGGGSGGGGSGGGGSEFEIVLTQSPATLSLSPGERATLSCRASSNVISSYVHWYQQKPGQAPRLLIYSTSNLASGIPARFSGSGSGTDFTLTISSLEPEDFAVYYCQQYSGYPLTFGQGTRLEIKLEIQNPDPAVYQLRDSKSSDKSVCLFTDFDSQTNVSQSKDSDVYITDKCVLDMRSMDFKSNSAVAWSNKSDFACANAFNNSIIPEDTFFPSPESSDSTDHVKPKETENTKQPSKSCHKPKAIVHTEKVNMMSLTVLGLRMLFAKTVAVNFLLTAKLFFLLTARAKRSGSGVKQTLNFDLLKLAGDVESNPGPTSMDWIWRILFLVGAATGAHSGPQLQLQESGPGLVKPSETLSLTCTVSGDSISSGDYYWGWIRQPPGKGLEWIGHIYYSGVTYYNPSLKSRVTISVDTSRNQFSLKLSSVTAADTAVYYCTREDSSNWRSRGQGTLVTVSSGSGGGGSGGGGSGGGGSFEEVQLVESGGGLVQPGRSLRLSCAASGYSITSAYYWNWVRQAPGKGLEWVSYISYDGRNNYNPSLKNRFTISRDNAKKSLYLQMNSLRAEDTALYYCAKEGDYDVGNYYAMDYWGQGTTVTVSSTREDLKNVFPPEVAVFEPSEAEISHTQKATLVCLATGFYPDHVELSWWVNGKEVHSGVCTDPQPLKEQPALNDSRYCLSSRLRVSATFWQNPRNHFRCQVQFYGLSENDEWTQDRAKPVTQIVSAEAWGRADDVIKIHWQEKKSNTILGSQEGNTMKTNDTYMKFSWLTVPEKSLDKEHRCIVRHENNKNGVDQEIIFPPIKTDVITMDPKDNCSKDANDTLLLQLTNTSAYYMYLLLLLKSVVYFAIITCCLLMAMVKRKDSRG

SEQ ID NO: 15338 - protein, 1003 aa, synthetic construct
MALPVTALLLPLALLLHAARPEVQLVESGGGLVQPGGSLRLSCAASGFSFSDFWMSWVRQAPGKGLEWVATISQAGSEKDYVDSVKGRFTISRDNAKKSLYLQMNSLRAEDTAVYYCASGVYSFDYRGQGTLVTVSSGTGGGGSGGGGSGGGGSEFDVVMTQTPLSLPVSLGDQASISCRSSQSLVHSNGNTYLRWYLQKPGQSPKVLIYKVSNRVSGVPDRFSGSGSGTDFTLKINRVEAEDLGVYFCSQSTHVPWTFGGGTKLEIKLEIQNPDPAVYQLRDSKSSDKSVCLFTDFDSQTNVSQSKDSDVYITDKCVLDMRSMDFKSNSAVAWSNKSDFACANAFNNSIIPEDTFFPSPESSDSTDHVKPKETENTKQPSKSCHKPKAIVHTEKVNMMSLTVLGLRMLFAKTVAVNFLLTAKLFFLLTARAKRSGSGVKQTLNFDLLKLAGDVESNPGPTSMDWIWRILFLVGAATGAHSGPQLQLQESGPGLVKPSETLSLTCTVSGDSISSGDYYWGWIRQPPGKGLEWIGHIYYSGVTYYNPSLKSRVTISVDTSRNQFSLKLSSVTAADTAVYYCTREDSSNWRSRGQGTLVTVSSGSGGGGSGGGGSGGGGSFEGVKLDETGGGLVQPGGAMKLSCVTSGFTFGHYWMNWVRQSPEKGLEWVAQFRNKPYNYETYYSDSVKGRFTISRDDSKSSVYLQMNNLRVEDTGIYYCTGASYGMEYLGQGTSVTVSTTREDLKNVFPPEVAVFEPSEAEISHTQKATLVCLATGFYPDHVELSWWVNGKEVHSGVCTDPQPLKEQPALNDSRYCLSSRLRVSATFWQNPRNHFRCQVQFYGLSENDEWTQDRAKPVTQIVSAEAWGRADDVIKIHWQEKKSNTILGSQEGNTMKTNDTYMKFSWLTVPEKSLDKEHRCIVRHENNKNGVDQEIIFPPIKTDVITMDPKDNCSKDANDTLLLQLTNTSAYYMYLLLLLKSVVYFAIITCCLLMAMVKRKDSRG

SEQ ID NO: 15339 - protein, 1009 aa, synthetic construct
MALPVTALLLPLALLLHAARPEVQLVESGGGLVQPGGSLRLSCAASGFSFSDFWMSWVRQAPGKGLEWVATISQAGSEKDYVDSVKGRFTISRDNAKKSLYLQMNSLRAEDTAVYYCASGVYSFDYRGQGTLVTVSSGTGGGGSGGGGSGGGGSEFQVQLVESGGNLVQPGGSLRLSCAASGFTFGSFSMSWVRQAPGGGLEWVAGLSARSSLTHYADSVKGRFTISRDNAKNSVYLQMNSLRVEDTAVYYCARRSYDSSGYWGHFYSYMDVWGQGTLVTVSLEIQNPDPAVYQLRDSKSSDKSVCLFTDFDSQTNVSQSKDSDVYITDKCVLDMRSMDFKSNSAVAWSNKSDFACANAFNNSIIPEDTFFPSPESSDSTDHVKPKETENTKQPSKSCHKPKAIVHTEKVNMMSLTVLGLRMLFAKTVAVNFLLTAKLFFLLTARAKRSGSGVKQTLNFDLLKLAGDVESNPGPTSMDWIWRILFLVGAATGAHSGPQLQLQESGPGLVKPSETLSLTCTVSGDSISSGDYYWGWIRQPPGKGLEWIGHIYYSGVTYYNPSLKSRVTISVDTSRNQFSLKLSSVTAADTAVYYCTREDSSNWRSRGQGTLVTVSSGSGGGGSGGGGSGGGGSFESVLTQPSSVSAAPGQKVTISCSGSTSNIGNNYVSWYQQHPGKAPKLMIYDVSKRPSGVPDRFSGSKSGNSASLDISGLQSEDEADYYCAAWDDSLSEFLFGTGTKLTVLGTREDLKNVFPPEVAVFEPSEAEISHTQKATLVCLATGFYPDHVELSWWVNGKEVHSGVCTDPQPLKEQPALNDSRYCLSSRLRVSATFWQNPRNHFRCQVQFYGLSENDEWTQDRAKPVTQIVSAEAWGRADDVIKIHWQEKKSNTILGSQEGNTMKTNDTYMKFSWLTVPEKSLDKEHRCIVRHENNKNGVDQEIIFPPIKTDVITMDPKDNCSKDANDTLLLQLTNTSAYYMYLLLLLKSVVYFAIITCCLLMAMVKRKDSRG

SEQ ID NO: 15340 - protein, 1004 aa, synthetic construct
MALPVTALLLPLALLLHAARPEVQLVESGGGLVQPGGSLRLSCAASGFSFSDFWMSWVRQAPGKGLEWVATISQAGSEKDYVDSVKGRFTISRDNAKKSLYLQMNSLRAEDTAVYYCASGVYSFDYRGQGTLVTVSSGTGGGGSGGGGSGGGGSEFDVVMTQSPSSLSASVGDRVTITCQSSLDISHYLNWYQQKPGKAPKLLIYDASNLETGVPSRFSGSGSGTHFTFTISSLQPEDFATYYCQQYDNLPLTFGGGTKLEIKRLEIQNPDPAVYQLRDSKSSDKSVCLFTDFDSQTNVSQSKDSDVYITDKCVLDMRSMDFKSNSAVAWSNKSDFACANAFNNSIIPEDTFFPSPESSDSTDHVKPKETENTKQPSKSCHKPKAIVHTEKVNMMSLTVLGLRMLFAKTVAVNFLLTAKLFFLLTARAKRSGSGVKQTLNFDLLKLAGDVESNPGPTSMDWIWRILFLVGAATGAHSGPQLQLQESGPGLVKPSETLSLTCTVSGDSISSGDYYWGWIRQPPGKGLEWIGHIYYSGVTYYNPSLKSRVTISVDTSRNQFSLKLSSVTAADTAVYYCTREDSSNWRSRGQGTLVTVSSGSGGGGSGGGGSGGGGSFEQVQLVQSGGGVVQPGGSLRVSCAASGVTLSDYGMHWVRQAPGKGLEWVAFIRNDGSDKYYADSVKGRFTISRDNSEKTVSLQMSSLRAEDTAVYYCAKNGESGPLDYWYLDLWGRGTLVTVSSTREDLKNVFPPEVAVFEPSEAEISHTQKATLVCLATGFYPDHVELSWWVNGKEVHSGVCTDPQPLKEQPALNDSRYCLSSRLRVSATFWQNPRNHFRCQVQFYGLSENDEWTQDRAKPVTQIVSAEAWGRADDVIKIHWQEKKSNTILGSQEGNTMKTNDTYMKFSWLTVPEKSLDKEHRCIVRHENNKNGVDQEIIFPPIKTDVITMDPKDNCSKDANDTLLLQLTNTSAYYMYLLLLLKSVVYFAIITCCLLMAMVKRKDSRG

SEQ ID NO: 15341 - protein, 1008 aa, synthetic construct
MALPVTALLLPLALLLHAARPEVQLVESGGGLVQPGGSLRLSCAASGFSFSDFWMSWVRQAPGKGLEWVATISQAGSEKDYVDSVKGRFTISRDNAKKSLYLQMNSLRAEDTAVYYCASGVYSFDYRGQGTLVTVSSGTGGGGSGGGGSGGGGSEFSYELTQPPSVSGTPGQRVAISCSGSSSNIGTRMVTWYQHVPGTAPKLLIFNNNQRPSGVPDRFSASKSGTSASLAIIGLQSDDEADYYCATWDDNVKSYVFGTGTKVTVLGSRLEIQNPDPAVYQLRDSKSSDKSVCLFTDFDSQTNVSQSKDSDVYITDKCVLDMRSMDFKSNSAVAWSNKSDFACANAFNNSIIPEDTFFPSPESSDSTDHVKPKETENTKQPSKSCHKPKAIVHTEKVNMMSLTVLGLRMLFAKTVAVNFLLTAKLFFLLTARAKRSGSGVKQTLNFDLLKLAGDVESNPGPTSMDWIWRILFLVGAATGAHSGPQLQLQESGPGLVKPSETLSLTCTVSGDSISSGDYYWGWIRQPPGKGLEWIGHIYYSGVTYYNPSLKSRVTISVDTSRNQFSLKLSSVTAADTAVYYCTREDSSNWRSRGQGTLVTVSSGSGGGGSGGGGSGGGGSFELEMAQVQLQQWGAGLLKPSETLSLTCAVYGGSFSGYYWSWIRQPPGKGLEWIGEINHSGSTNYNPSLKSRVTISVDTSKNQFSLKLSSVTAADTAVYYCARAPQSWYVGDVWGQGTLVTVSSTREDLKNVFPPEVAVFEPSEAEISHTQKATLVCLATGFYPDHVELSWWVNGKEVHSGVCTDPQPLKEQPALNDSRYCLSSRLRVSATFWQNPRNHFRCQVQFYGLSENDEWTQDRAKPVTQIVSAEAWGRADDVIKIHWQEKKSNTILGSQEGNTMKTNDTYMKFSWLTVPEKSLDKEHRCIVRHENNKNGVDQEIIFPPIKTDVITMDPKDNCSKDANDTLLLQLTNTSAYYMYLLLLLKSVVYFAIITCCLLMAMVKRKDSRG

SEQ ID NO: 15342 - protein, 1005 aa, synthetic construct
MALPVTALLLPLALLLHAARPEVQLVESGGGLVQPGGSLRLSCAASGFSFSDFWMSWVRQAPGKGLEWVATISQAGSEKDYVDSVKGRFTISRDNAKKSLYLQMNSLRAEDTAVYYCASGVYSFDYRGQGTLVTVSSGTGGGGSGGGGSGGGGSEFQSVLTQPPSLSVAPGKTASITCGGNNIGMKSVHWYQQRPGQAPVLVIYYDSDRPSGIPGRFSGSNSGNTATLTISRVEAGDEADYYCQVWDTTGDHPGYVFGTGTKVTVLLEIQNPDPAVYQLRDSKSSDKSVCLFTDFDSQTNVSQSKDSDVYITDKCVLDMRSMDFKSNSAVAWSNKSDFACANAFNNSIIPEDTFFPSPESSDSTDHVKPKETENTKQPSKSCHKPKAIVHTEKVNMMSLTVLGLRMLFAKTVAVNFLLTAKLFFLLTARAKRSGSGVKQTLNFDLLKLAGDVESNPGPTSMDWIWRILFLVGAATGAHSGPQLQLQESGPGLVKPSETLSLTCTVSGDSISSGDYYWGWIRQPPGKGLEWIGHIYYSGVTYYNPSLKSRVTISVDTSRNQFSLKLSSVTAADTAVYYCTREDSSNWRSRGQGTLVTVSSGSGGGGSGGGGSGGGGSFEQVQLVQSGAEVKKPGSSVKVSCKASGGTFSSYAISWVRQAPGQGLEWMGGIIPIFGTANYAQKFQGRVTITADESTSTAYMELSSLRSEDTAVYYCARGVYGYSGSAPYDEWGQGTLVTVSSTREDLKNVFPPEVAVFEPSEAEISHTQKATLVCLATGFYPDHVELSWWVNGKEVHSGVCTDPQPLKEQPALNDSRYCLSSRLRVSATFWQNPRNHFRCQVQFYGLSENDEWTQDRAKPVTQIVSAEAWGRADDVIKIHWQEKKSNTILGSQEGNTMKTNDTYMKFSWLTVPEKSLDKEHRCIVRHENNKNGVDQEIIFPPIKTDVITMDPKDNCSKDANDTLLLQLTNTSAYYMYLLLLLKSVVYFAIITCCLLMAMVKRKDSRG

SEQ ID NO: 15343 - protein, 1003 aa, synthetic construct
MALPVTALLLPLALLLHAARPEVQLVESGGGLVQPGGSLRLSCAASGFSFSDFWMSWVRQAPGKGLEWVATISQAGSEKDYVDSVKGRFTISRDNAKKSLYLQMNSLRAEDTAVYYCASGVYSFDYRGQGTLVTVSSGTGGGGSGGGGSGGGGSEFEVQLVESGGGLVQPGRSLRLSCAASGFTFDDYAMHWVRQAPGKGLEWVSGISWNSGSIGYADSVKGRFTISRDNAKNSLYLQMNSLRAEDTALYYCAKDKGGGYYDFWSGSDYWGQGTLVTVSSLEIQNPDPAVYQLRDSKSSDKSVCLFTDFDSQTNVSQSKDSDVYITDKCVLDMRSMDFKSNSAVAWSNKSDFACANAFNNSIIPEDTFFPSPESSDSTDHVKPKETENTKQPSKSCHKPKAIVHTEKVNMMSLTVLGLRMLFAKTVAVNFLLTAKLFFLLTARAKRSGSGVKQTLNFDLLKLAGDVESNPGPTSMDWIWRILFLVGAATGAHSGPQLQLQESGPGLVKPSETLSLTCTVSGDSISSGDYYWGWIRQPPGKGLEWIGHIYYSGVTYYNPSLKSRVTISVDTSRNQFSLKLSSVTAADTAVYYCTREDSSNWRSRGQGTLVTVSSGSGGGGSGGGGSGGGGSFESSELTQDPAVSVALGQTVRITCQGDSLRSYYASWYQQKPGQAPVLVIYGKNNRPSGIPDRFSGSSSGNTASLTITGAQAEDEADYYCNSRDSSGWVFGGGTKLTVLTREDLKNVFPPEVAVFEPSEAEISHTQKATLVCLATGFYPDHVELSWWVNGKEVHSGVCTDPQPLKEQPALNDSRYCLSSRLRVSATFWQNPRNHFRCQVQFYGLSENDEWTQDRAKPVTQIVSAEAWGRADDVIKIHWQEKKSNTILGSQEGNTMKTNDTYMKFSWLTVPEKSLDKEHRCIVRHENNKNGVDQEIIFPPIKTDVITMDPKDNCSKDANDTLLLQLTNTSAYYMYLLLLLKSVVYFAIITCCLLMAMVKRKDSRG

SEQ ID NO: 15344 - protein, 1012 aa, synthetic construct
MALPVTALLLPLALLLHAARPEVQLVESGGGLVQPGGSLRLSCAASGFSFSDFWMSWVRQAPGKGLEWVATISQAGSEKDYVDSVKGRFTISRDNAKKSLYLQMNSLRAEDTAVYYCASGVYSFDYRGQGTLVTVSSGTGGGGSGGGGSGGGGSEFEVQLQQSGPGLVKPSQTLSLTCAISGDSVLSNSDTWNWIRQSPSRGLEWLGRTYHRSTWYDDYASSVRGRVSINVDTSKNQYSLQLNAVTPEDTGVYYCARDRLQDGNSWSDAFDVWGQGTMVTVSSLEIQNPDPAVYQLRDSKSSDKSVCLFTDFDSQTNVSQSKDSDVYITDKCVLDMRSMDFKSNSAVAWSNKSDFACANAFNNSIIPEDTFFPSPESSDSTDHVKPKETENTKQPSKSCHKPKAIVHTEKVNMMSLTVLGLRMLFAKTVAVNFLLTAKLFFLLTARAKRSGSGVKQTLNFDLLKLAGDVESNPGPTSMDWIWRILFLVGAATGAHSGPQLQLQESGPGLVKPSETLSLTCTVSGDSISSGDYYWGWIRQPPGKGLEWIGHIYYSGVTYYNPSLKSRVTISVDTSRNQFSLKLSSVTAADTAVYYCTREDSSNWRSRGQGTLVTVSSGSGGGGSGGGGSGGGGSFEQSALTQPASVSGSPGQSITISCTGTSSDVGGYNYVSWYQQHPGKAPKLMIYDVSNRPSGVSNRFSGSKSGNTASLTISGLQAEDEADYYCSSYTSSSTLVYVFGTGTKVTVLTREDLKNVFPPEVAVFEPSEAEISHTQKATLVCLATGFYPDHVELSWWVNGKEVHSGVCTDPQPLKEQPALNDSRYCLSSRLRVSATFWQNPRNHFRCQVQFYGLSENDEWTQDRAKPVTQIVSAEAWGRADDVIKIHWQEKKSNTILGSQEGNTMKTNDTYMKFSWLTVPEKSLDKEHRCIVRHENNKNGVDQEIIFPPIKTDVITMDPKDNCSKDANDTLLLQLTNTSAYYMYLLLLLKSVVYFAIITCCLLMAMVKRKDSRG

SEQ ID NO: 15345 - protein, 990 aa, synthetic construct
MALPVTALLLPLALLLHAARPEVQLVESGGGLVQPGGSLRLSCAASGFSFSDFWMSWVRQAPGKGLEWVATISQAGSEKDYVDSVKGRFTISRDNAKKSLYLQMNSLRAEDTAVYYCASGVYSFDYRGQGTLVTVSSGTGGGGSGGGGSGGGGSEFQVQLVQSGAEVKKPGASVKVSCKASGYTFTSYDINWVRQATGQGLEWMGWMNPNSGNTGYAQKFQGRVTMTRNTSISTAYMELSSLRSEDTAVYYCARGDSTKVEIKLEIQNPDPAVYQLRDSKSSDKSVCLFTDFDSQTNVSQSKDSDVYITDKCVLDMRSMDFKSNSAVAWSNKSDFACANAFNNSIIPEDTFFPSPESSDSTDHVKPKETENTKQPSKSCHKPKAIVHTEKVNMMSLTVLGLRMLFAKTVAVNFLLTAKLFFLLTARAKRSGSGVKQTLNFDLLKLAGDVESNPGPTSMDWIWRILFLVGAATGAHSGPQLQLQESGPGLVKPSETLSLTCTVSGDSISSGDYYWGWIRQPPGKGLEWIGHIYYSGVTYYNPSLKSRVTISVDTSRNQFSLKLSSVTAADTAVYYCTREDSSNWRSRGQGTLVTVSSGSGGGGSGGGGSGGGGSFEQSVLTQPRSVSGSPGQSVTISCTGTSSDVGGYNYVSWYQQHPGEAPKLIIYDADKRPSGISNRFSSGKSGNTASLTISGLQVEDEADYYCCSYAGGSTWVFGGGTKVTVLTREDLKNVFPPEVAVFEPSEAEISHTQKATLVCLATGFYPDHVELSWWVNGKEVHSGVCTDPQPLKEQPALNDSRYCLSSRLRVSATFWQNPRNHFRCQVQFYGLSENDEWTQDRAKPVTQIVSAEAWGRADDVIKIHWQEKKSNTILGSQEGNTMKTNDTYMKFSWLTVPEKSLDKEHRCIVRHENNKNGVDQEIIFPPIKTDVITMDPKDNCSKDANDTLLLQLTNTSAYYMYLLLLLKSVVYFAIITCCLLMAMVKRKDSRG

SEQ ID NO: 15346 - protein, 1012 aa, synthetic construct
MALPVTALLLPLALLLHAARPEVQLVESGGGLVQPGGSLRLSCAASGFSFSDFWMSWVRQAPGKGLEWVATISQAGSEKDYVDSVKGRFTISRDNAKKSLYLQMNSLRAEDTAVYYCASGVYSFDYRGQGTLVTVSSGTGGGGSGGGGSGGGGSEFEVQLQQSGPGLVKPSQTLSLTCAISGDSVSSNSAAWNWIRQSPSRGLEWLGRTYYRSKWYSDYAVSVKSRITINPDTSKNQFSLQLNSVTPEDTAVYYCARDPYDFWSGYPDAFDIWGQGTMVTVSSLEIQNPDPAVYQLRDSKSSDKSVCLFTDFDSQTNVSQSKDSDVYITDKCVLDMRSMDFKSNSAVAWSNKSDFACANAFNNSIIPEDTFFPSPESSDSTDHVKPKETENTKQPSKSCHKPKAIVHTEKVNMMSLTVLGLRMLFAKTVAVNFLLTAKLFFLLTARAKRSGSGVKQTLNFDLLKLAGDVESNPGPTSMDWIWRILFLVGAATGAHSGPQLQLQESGPGLVKPSETLSLTCTVSGDSISSGDYYWGWIRQPPGKGLEWIGHIYYSGVTYYNPSLKSRVTISVDTSRNQFSLKLSSVTAADTAVYYCTREDSSNWRSRGQGTLVTVSSGSGGGGSGGGGSGGGGSFEQSALTQPASVSGSPGQSITISCTGTSSDVGGYNYVSWYQQHPGKAPKVIISEVNNRPSGVSHRFSGSKSGNTASLTISGLQAEDEADYFCSSYTSGRTLYVFGTGSKVTVLGTREDLKNVFPPEVAVFEPSEAEISHTQKATLVCLATGFYPDHVELSWWVNGKEVHSGVCTDPQPLKEQPALNDSRYCLSSRLRVSATFWQNPRNHFRCQVQFYGLSENDEWTQDRAKPVTQIVSAEAWGRADDVIKIHWQEKKSNTILGSQEGNTMKTNDTYMKFSWLTVPEKSLDKEHRCIVRHENNKNGVDQEIIFPPIKTDVITMDPKDNCSKDANDTLLLQLTNTSAYYMYLLLLLKSVVYFAIITCCLLMAMVKRKDSRG

SEQ ID NO: 15347 - protein, 1011 aa, synthetic construct
MALPVTALLLPLALLLHAARPEVQLVESGGGLVQPGGSLRLSCAASGFSFSDFWMSWVRQAPGKGLEWVATISQAGSEKDYVDSVKGRFTISRDNAKKSLYLQMNSLRAEDTAVYYCASGVYSFDYRGQGTLVTVSSGTGGGGSGGGGSGGGGSEFQSALTQPASASGSPGQSVTISCTGTSSDVGGYNYVSWYQQHPGKAPKLMIYDVSNRPSGVSNRFSGSKSGNTASLTISGLQAEDEADYYCSSYTSSSTLYVFGTGTQLTVLLEIQNPDPAVYQLRDSKSSDKSVCLFTDFDSQTNVSQSKDSDVYITDKCVLDMRSMDFKSNSAVAWSNKSDFACANAFNNSIIPEDTFFPSPESSDSTDHVKPKETENTKQPSKSCHKPKAIVHTEKVNMMSLTVLGLRMLFAKTVAVNFLLTAKLFFLLTARAKRSGSGVKQTLNFDLLKLAGDVESNPGPTSMDWIWRILFLVGAATGAHSGPQLQLQESGPGLVKPSETLSLTCTVSGDSISSGDYYWGWIRQPPGKGLEWIGHIYYSGVTYYNPSLKSRVTISVDTSRNQFSLKLSSVTAADTAVYYCTREDSSNWRSRGQGTLVTVSSGSGGGGSGGGGSGGGGSFEEVQLQQSGPGLVKPSQTLSLTCAISGDSMLSNSDTWNWIRQSPSRGLEWLGRTYHRSTWYDDYASSVRGRVSINVDTSKNQYSLQLNAVTPEDTGVYYCARVRLQDGNSWSDAFDVWGQGTMVTVSSTREDLKNVFPPEVAVFEPSEAEISHTQKATLVCLATGFYPDHVELSWWVNGKEVHSGVCTDPQPLKEQPALNDSRYCLSSRLRVSATFWQNPRNHFRCQVQFYGLSENDEWTQDRAKPVTQIVSAEAWGRADDVIKIHWQEKKSNTILGSQEGNTMKTNDTYMKFSWLTVPEKSLDKEHRCIVRHENNKNGVDQEIIFPPIKTDVITMDPKDNCSKDANDTLLLQLTNTSAYYMYLLLLLKSVVYFAIITCCLLMAMVKRKDSRG

SEQ ID NO: 15348 - protein, 1011 aa, synthetic construct
MALPVTALLLPLALLLHAARPEVQLVESGGGLVQPGGSLRLSCAASGFSFSDFWMSWVRQAPGKGLEWVATISQAGSEKDYVDSVKGRFTISRDNAKKSLYLQMNSLRAEDTAVYYCASGVYSFDYRGQGTLVTVSSGTGGGGSGGGGSGGGGSEFDVMLTQTPLSLPVSLGDQASISCRSSQSILHSTGDTYLEWYLQKPGQSPKLLINKVSNRLSGVPDRFSGSGSGTDFTLKISRVEAEDLGVYYCFQGSHVPWTFGGGTKLEIKRADAAPTVSIFPLEIQNPDPAVYQLRDSKSSDKSVCLFTDFDSQTNVSQSKDSDVYITDKCVLDMRSMDFKSNSAVAWSNKSDFACANAFNNSIIPEDTFFPSPESSDSTDHVKPKETENTKQPSKSCHKPKAIVHTEKVNMMSLTVLGLRMLFAKTVAVNFLLTAKLFFLLTARAKRSGSGVKQTLNFDLLKLAGDVESNPGPTSMDWIWRILFLVGAATGAHSGPQLQLQESGPGLVKPSETLSLTCTVSGDSISSGDYYWGWIRQPPGKGLEWIGHIYYSGVTYYNPSLKSRVTISVDTSRNQFSLKLSSVTAADTAVYYCTREDSSNWRSRGQGTLVTVSSGSGGGGSGGGGSGGGGSFEQVKLQQSGPSLVKPGASVKMSCKASGYTFTDFYMKWVKQSHGKSLEWIGDINPNIGDTFYNQKFKGKATLTVDKSSSTAYMQLNSLTSEDSAVYFCSVGYFDVWGAGTTVTVSSTREDLKNVFPPEVAVFEPSEAEISHTQKATLVCLATGFYPDHVELSWWVNGKEVHSGVCTDPQPLKEQPALNDSRYCLSSRLRVSATFWQNPRNHFRCQVQFYGLSENDEWTQDRAKPVTQIVSAEAWGRADDVIKIHWQEKKSNTILGSQEGNTMKTNDTYMKFSWLTVPEKSLDKEHRCIVRHENNKNGVDQEIIFPPIKTDVITMDPKDNCSKDANDTLLLQLTNTSAYYMYLLLLLKSVVYFAIITCCLLMAMVKRKDSRG

SEQ ID NO: 15349 - protein, 1007 aa, synthetic construct
MALPVTALLLPLALLLHAARPEVQLVESGGGLVQPGGSLRLSCAASGFSFSDFWMSWVRQAPGKGLEWVATISQAGSEKDYVDSVKGRFTISRDNAKKSLYLQMNSLRAEDTAVYYCASGVYSFDYRGQGTLVTVSSGTGGGGSGGGGSGGGGSEFEIVLTQSPATLSLSPGERATLSCRASQSVSIYLAWYQQKPGQAPRLLIYDASNRATGIPARFSGSGSGTDFTLTISSLEPEDFAVYYCQQRSNWPPFTFGPGTKVDIKLEIQNPDPAVYQLRDSKSSDKSVCLFTDFDSQTNVSQSKDSDVYITDKCVLDMRSMDFKSNSAVAWSNKSDFACANAFNNSIIPEDTFFPSPESSDSTDHVKPKETENTKQPSKSCHKPKAIVHTEKVNMMSLTVLGLRMLFAKTVAVNFLLTAKLFFLLTARAKRSGSGVKQTLNFDLLKLAGDVESNPGPTSMDWIWRILFLVGAATGAHSGPQLQLQESGPGLVKPSETLSLTCTVSGDSISSGDYYWGWIRQPPGKGLEWIGHIYYSGVTYYNPSLKSRVTISVDTSRNQFSLKLSSVTAADTAVYYCTREDSSNWRSRGQGTLVTVSSGSGGGGSGGGGSGGGGSFEQVQLVESGGGVVQPGRSLRLSCAASGFTFSSYGMHWVRQAPGKGLEWVAVIWDDGSNKYYVDSVKGRFTISRDNSKNTLYLQMNSLRAEDTAVYYCARDDYYGSGSFNSYYGTDVWGQGTTVTVSSTREDLKNVFPPEVAVFEPSEAEISHTQKATLVCLATGFYPDHVELSWWVNGKEVHSGVCTDPQPLKEQPALNDSRYCLSSRLRVSATFWQNPRNHFRCQVQFYGLSENDEWTQDRAKPVTQIVSAEAWGRADDVIKIHWQEKKSNTILGSQEGNTMKTNDTYMKFSWLTVPEKSLDKEHRCIVRHENNKNGVDQEIIFPPIKTDVITMDPKDNCSKDANDTLLLQLTNTSAYYMYLLLLLKSVVYFAIITCCLLMAMVKRKDSRG

SEQ ID NO: 15350 - protein, 992 aa, synthetic construct
MALPVTALLLPLALLLHAARPEVQLVESGGGLVQPGGSLRLSCAASGFSFSDFWMSWVRQAPGKGLEWVATISQAGSEKDYVDSVKGRFTISRDNAKKSLYLQMNSLRAEDTAVYYCASGVYSFDYRGQGTLVTVSSGTGGGGSGGGGSGGGGSEFDIQMTQSPSSLSASVGDRVTITCRASQGISSWLAWYQQKPEKAPKSLIYAASSLQSGVPSRFSGSGSGTDFTLTISSLQPEDFATYYCQQYNSYPYTFGQGTKLEIKLEIQNPDPAVYQLRDSKSSDKSVCLFTDFDSQTNVSQSKDSDVYITDKCVLDMRSMDFKSNSAVAWSNKSDFACANAFNNSIIPEDTFFPSPESSDSTDHVKPKETENTKQPSKSCHKPKAIVHTEKVNMMSLTVLGLRMLFAKTVAVNFLLTAKLFFLLTARAKRSGSGVKQTLNFDLLKLAGDVESNPGPTSMDWIWRILFLVGAATGAHSGPQLQLQESGPGLVKPSETLSLTCTVSGDSISSGDYYWGWIRQPPGKGLEWIGHIYYSGVTYYNPSLKSRVTISVDTSRNQFSLKLSSVTAADTAVYYCTREDSSNWRSRGQGTLVTVSSGSGGGGSGGGGSGGGGSFEEVQLVQSGGGLVHPGGSLRLSCAGSGFTFSTYLMYWVRQAPGKTLEWVSAIGSGGDTYYADSVKGRFTISRDNAKNSLYLQMNSLRAEDMAVYYCARGLGYWGQGTLVTVSSTREDLKNVFPPEVAVFEPSEAEISHTQKATLVCLATGFYPDHVELSWWVNGKEVHSGVCTDPQPLKEQPALNDSRYCLSSRLRVSATFWQNPRNHFRCQVQFYGLSENDEWTQDRAKPVTQIVSAEAWGRADDVIKIHWQEKKSNTILGSQEGNTMKTNDTYMKFSWLTVPEKSLDKEHRCIVRHENNKNGVDQEIIFPPIKTDVITMDPKDNCSKDANDTLLLQLTNTSAYYMYLLLLLKSVVYFAIITCCLLMAMVKRKDSRG

SEQ ID NO: 15351 - protein, 1011 aa, synthetic construct
MALPVTALLLPLALLLHAARPEVQLVESGGGLVQPGGSLRLSCAASGFSFSDFWMSWVRQAPGKGLEWVATISQAGSEKDYVDSVKGRFTISRDNAKKSLYLQMNSLRAEDTAVYYCASGVYSFDYRGQGTLVTVSSGTGGGGSGGGGSGGGGSEFLPVLTQPPSVSVAPGKTARITCGGNNIGSKSVHWYQQKPGQAPVLVVYDDSDRPSGIPERFSGSNSGNTATLTISRVEAGDEADYYCQVWDSSSDYVVFGGGTKLTVLLEIQNPDPAVYQLRDSKSSDKSVCLFTDFDSQTNVSQSKDSDVYITDKCVLDMRSMDFKSNSAVAWSNKSDFACANAFNNSIIPEDTFFPSPESSDSTDHVKPKETENTKQPSKSCHKPKAIVHTEKVNMMSLTVLGLRMLFAKTVAVNFLLTAKLFFLLTARAKRSGSGVKQTLNFDLLKLAGDVESNPGPTSMDWIWRILFLVGAATGAHSGPQLQLQESGPGLVKPSETLSLTCTVSGDSISSGDYYWGWIRQPPGKGLEWIGHIYYSGVTYYNPSLKSRVTISVDTSRNQFSLKLSSVTAADTAVYYCTREDSSNWRSRGQGTLVTVSSGSGGGGSGGGGSGGGGSFEEVQLVQSGAEVKKPGESLKISCKGSGYSFTSYWIGWVRQMPGKGLEWMGIIYPGDSDTRYSPSFQGQVTISADKSISTAYLQWSSLKASDTAMYYCARQVWGWQGGMYPRSNWWYNLDSWGQGTLVTVSSTREDLKNVFPPEVAVFEPSEAEISHTQKATLVCLATGFYPDHVELSWWVNGKEVHSGVCTDPQPLKEQPALNDSRYCLSSRLRVSATFWQNPRNHFRCQVQFYGLSENDEWTQDRAKPVTQIVSAEAWGRADDVIKIHWQEKKSNTILGSQEGNTMKTNDTYMKFSWLTVPEKSLDKEHRCIVRHENNKNGVDQEIIFPPIKTDVITMDPKDNCSKDANDTLLLQLTNTSAYYMYLLLLLKSVVYFAIITCCLLMAMVKRKDSRG

SEQ ID NO: 15352 - protein, 1004 aa, synthetic construct
MALPVTALLLPLALLLHAARPEVQLVESGGGLVQPGGSLRLSCAASGFSFSDFWMSWVRQAPGKGLEWVATISQAGSEKDYVDSVKGRFTISRDNAKKSLYLQMNSLRAEDTAVYYCASGVYSFDYRGQGTLVTVSSGTGGGGSGGGGSGGGGSEFELVMTQSPASLAVSLGQRATISCRASESVDSYGKSFMHWYQLKPGQPPKLLIYRASNLESGVPARFSGSGSRTDFTLTIDPVEADDAATYYCQQNNEDPWTFGGGTKLEIKLEIQNPDPAVYQLRDSKSSDKSVCLFTDFDSQTNVSQSKDSDVYITDKCVLDMRSMDFKSNSAVAWSNKSDFACANAFNNSIIPEDTFFPSPESSDSTDHVKPKETENTKQPSKSCHKPKAIVHTEKVNMMSLTVLGLRMLFAKTVAVNFLLTAKLFFLLTARAKRSGSGVKQTLNFDLLKLAGDVESNPGPTSMDWIWRILFLVGAATGAHSGPQLQLQESGPGLVKPSETLSLTCTVSGDSISSGDYYWGWIRQPPGKGLEWIGHIYYSGVTYYNPSLKSRVTISVDTSRNQFSLKLSSVTAADTAVYYCTREDSSNWRSRGQGTLVTVSSGSGGGGSGGGGSGGGGSFEEVQLEQSGPELVKPGASVKMSCKASGYTFTNYYMKWVKQSHGKSLEWIGDLNPNNGDTFYNQKFKGKATLTVDKSSNTAYMQLNSLTSEDSAVYYCARTGRYEENAMDYWGQGTSVTVSSTREDLKNVFPPEVAVFEPSEAEISHTQKATLVCLATGFYPDHVELSWWVNGKEVHSGVCTDPQPLKEQPALNDSRYCLSSRLRVSATFWQNPRNHFRCQVQFYGLSENDEWTQDRAKPVTQIVSAEAWGRADDVIKIHWQEKKSNTILGSQEGNTMKTNDTYMKFSWLTVPEKSLDKEHRCIVRHENNKNGVDQEIIFPPIKTDVITMDPKDNCSKDANDTLLLQLTNTSAYYMYLLLLLKSVVYFAIITCCLLMAMVKRKDSRG

SEQ ID NO: 15353 - protein, 998 aa, synthetic construct
MALPVTALLLPLALLLHAARPEVQLVESGGGLVQPGGSLRLSCAASGFSFSDFWMSWVRQAPGKGLEWVATISQAGSEKDYVDSVKGRFTISRDNAKKSLYLQMNSLRAEDTAVYYCASGVYSFDYRGQGTLVTVSSGTGGGGSGGGGSGGGGSEFDVVMTQSPSSLSASVGDRVTITCMASEDIYIRLAWYQQKPGNAPKLLIYAATSLETGVPSRFSGSGSGTDFTLTISSLQPEDFATYYCQQYWSSPWTFGGGTKVEIKLEIQNPDPAVYQLRDSKSSDKSVCLFTDFDSQTNVSQSKDSDVYITDKCVLDMRSMDFKSNSAVAWSNKSDFACANAFNNSIIPEDTFFPSPESSDSTDHVKPKETENTKQPSKSCHKPKAIVHTEKVNMMSLTVLGLRMLFAKTVAVNFLLTAKLFFLLTARAKRSGSGVKQTLNFDLLKLAGDVESNPGPTSMDWIWRILFLVGAATGAHSGPQLQLQESGPGLVKPSETLSLTCTVSGDSISSGDYYWGWIRQPPGKGLEWIGHIYYSGVTYYNPSLKSRVTISVDTSRNQFSLKLSSVTAADTAVYYCTREDSSNWRSRGQGTLVTVSSGSGGGGSGGGGSGGGGSFEQVQLQESGPGLVKPSQTLSLTCTVSGYSITSDYTWNWIRQPPGNGLEWIGYITYSGSTSYNPSLKSRVLISVDTSKNQVSLKLSSVTAADTAVYYCARLGRRYTMDYWGQGTTVTVSSTREDLKNVFPPEVAVFEPSEAEISHTQKATLVCLATGFYPDHVELSWWVNGKEVHSGVCTDPQPLKEQPALNDSRYCLSSRLRVSATFWQNPRNHFRCQVQFYGLSENDEWTQDRAKPVTQIVSAEAWGRADDVIKIHWQEKKSNTILGSQEGNTMKTNDTYMKFSWLTVPEKSLDKEHRCIVRHENNKNGVDQEIIFPPIKTDVITMDPKDNCSKDANDTLLLQLTNTSAYYMYLLLLLKSVVYFAIITCCLLMAMVKRKDSRG

SEQ ID NO: 15354 - protein, 1002 aa, synthetic construct; identical to SEQ ID NO: 15216

SEQ ID NO: 15355 - protein, 1002 aa, synthetic construct
MALPVTALLLPLALLLHAARPEVQLVESGGGLVQPGGSLRLSCAASGFSFSDFWMSWVRQAPGKGLEWVATISQAGSEKDYVDSVKGRFTISRDNAKKSLYLQMNSLRAEDTAVYYCASGVYSFDYRGQGTLVTVSSGTGGGGSGGGGSGGGGSEFDIVLTQSPATLSLSPGDRATLSCRASESVTILGSHLIYWYQQKPGQAPRLLIQLASNVQTGIPARFSGSGSRTDFTLTISSLEPEDFAVYYCLQSRTIPRTFGQGTKLEIKRLEIQNPDPAVYQLRDSKSSDKSVCLFTDFDSQTNVSQSKDSDVYITDKCVLDMRSMDFKSNSAVAWSNKSDFACANAFNNSIIPEDTFFPSPESSDSTDHVKPKETENTKQPSKSCHKPKAIVHTEKVNMMSLTVLGLRMLFAKTVAVNFLLTAKLFFLLTARAKRSGSGVKQTLNFDLLKLAGDVESNPGPTSMDWIWRILFLVGAATGAHSGPQLQLQESGPGLVKPSETLSLTCTVSGDSISSGDYYWGWIRQPPGKGLEWIGHIYYSGVTYYNPSLKSRVTISVDTSRNQFSLKLSSVTAADTAVYYCTREDSSNWRSRGQGTLVTVSSGSGGGGSGGGGSGGGGSFEQVQLVQSGSELKKPGESVKISCKASGYTFTHYSMNWVRQAPGQGLEWMGRINTETGEPLYADDFKGRFVFSLDTSASTAYLQISSLKAEDTAVYYCSNDYLYSLDYWGQGTLVTVSSTREDLKNVFPPEVAVFEPSEAEISHTQKATLVCLATGFYPDHVELSWWVNGKEVHSGVCTDPQPLKEQPALNDSRYCLSSRLRVSATFWQNPRNHFRCQVQFYGLSENDEWTQDRAKPVTQIVSAEAWGRADDVIKIHWQEKKSNTILGSQEGNTMKTNDTYMKFSWLTVPEKSLDKEHRCIVRHENNKNGVDQEIIFPPIKTDVITMDPKDNCSKDANDTLLLQLTNTSAYYMYLLLLLKSVVYFAIITCCLLMAMVKRKDSRG

SEQ ID NO: 15356 - protein, 1003 aa, synthetic construct
MALPVTALLLPLALLLHAARPEVQLVESGGGLVQPGGSLRLSCAASGFSFSDFWMSWVRQAPGKGLEWVATISQAGSEKDYVDSVKGRFTISRDNAKKSLYLQMNSLRAEDTAVYYCASGVYSFDYRGQGTLVTVSSGTGGGGSGGGGSGGGGSEFDIQLTQSPSFLSASVGDRVTITCRASQGISTDLNWYQQKPGKAPKLLIYAASNLESGVPSRFSGSGSGTEFTLTISSLQPEDFATYYCQQSYNWPYTFGGGTKVEIKRLEIQNPDPAVYQLRDSKSSDKSVCLFTDFDSQTNVSQSKDSDVYITDKCVLDMRSMDFKSNSAVAWSNKSDFACANAFNNSIIPEDTFFPSPESSDSTDHVKPKETENTKQPSKSCHKPKAIVHTEKVNMMSLTVLGLRMLFAKTVAVNFLLTAKLFFLLTARAKRSGSGVKQTLNFDLLKLAGDVESNPGPTSMDWIWRILFLVGAATGAHSGPQLQLQESGPGLVKPSETLSLTCTVSGDSISSGDYYWGWIRQPPGKGLEWIGHIYYSGVTYYNPSLKSRVTISVDTSRNQFSLKLSSVTAADTAVYYCTREDSSNWRSRGQGTLVTVSSGSGGGGSGGGGSGGGGSFEEVQLVESGGGLVKPGGSLRLSCAASGFTFSNFEMNWVRQAPGKGLEWVSGISSNGRYINYADSVKGRFTISRDNAKNSLYLQMNSLRAEDTAVYYCARVVDFDQDYNGFDYWGQGTLVTVSSTREDLKNVFPPEVAVFEPSEAEISHTQKATLVCLATGFYPDHVELSWWVNGKEVHSGVCTDPQPLKEQPALNDSRYCLSSRLRVSATFWQNPRNHFRCQVQFYGLSENDEWTQDRAKPVTQIVSAEAWGRADDVIKIHWQEKKSNTILGSQEGNTMKTNDTYMKFSWLTVPEKSLDKEHRCIVRHENNKNGVDQEIIFPPIKTDVITMDPKDNCSKDANDTLLLQLTNTSAYYMYLLLLLKSVVYFAIITCCLLMAMVKRKDSRG

SEQ ID NO: 15357 - protein, 1001 aa, synthetic construct
MALPVTALLLPLALLLHAARPEVQLVESGGGLVQPGGSLRLSCAASGFSFSDFWMSWVRQAPGKGLEWVATISQAGSEKDYVDSVKGRFTISRDNAKKSLYLQMNSLRAEDTAVYYCASGVYSFDYRGQGTLVTVSSGTGGGGSGGGGSGGGGSEFDIQLTQSPSFLSASVGDRVTITCSLSLGISTWRDWFPPRLGRGLEPLTYAASTLQSGVPSRFSGSGSGTEFTLTISSLQPEDFATYYCQQLNSYPLTFGGGTKVEIKRLEIQNPDPAVYQLRDSKSSDKSVCLFTDFDSQTNVSQSKDSDVYITDKCVLDMRSMDFKSNSAVAWSNKSDFACANAFNNSIIPEDTFFPSPESSDSTDHVKPKETENTKQPSKSCHKPKAIVHTEKVNMMSLTVLGLRMLFAKTVAVNFLLTAKLFFLLTARAKRSGSGVKQTLNFDLLKLAGDVESNPGPTSMDWIWRILFLVGAATGAHSGPQLQLQESGPGLVKPSETLSLTCTVSGDSISSGDYYWGWIRQPPGKGLEWIGHIYYSGVTYYNPSLKSRVTISVDTSRNQFSLKLSSVTAADTAVYYCTREDSSNWRSRGQGTLVTVSSGSGGGGSGGGGSGGGGSFEEVQLVESGGGLVKPGGSLRLSCAASGFTFSTYGMSWVRQAPGKGLEWVAYINNGSGYIYYADSVKGRFTISRDNAKNSLYLQMNSLRAEDTAVYYCARGQWWSGGDFDYWGQGTLVTVSSTREDLKNVFPPEVAVFEPSEAEISHTQKATLVCLATGFYPDHVELSWWVNGKEVHSGVCTDPQPLKEQPALNDSRYCLSSRLRVSATFWQNPRNHFRCQVQFYGLSENDEWTQDRAKPVTQIVSAEAWGRADDVIKIHWQEKKSNTILGSQEGNTMKTNDTYMKFSWLTVPEKSLDKEHRCIVRHENNKNGVDQEIIFPPIKTDVITMDPKDNCSKDANDTLLLQLTNTSAYYMYLLLLLKSVVYFAIITCCLLMAMVKRKDSRG

SEQ ID NO: 15358 - protein, 1002 aa, synthetic construct
MALPVTALLLPLALLLHAARPEVQLVESGGGLVQPGGSLRLSCAASGFSFSDFWMSWVRQAPGKGLEWVATISQAGSEKDYVDSVKGRFTISRDNAKKSLYLQMNSLRAEDTAVYYCASGVYSFDYRGQGTLVTVSSGTGGGGSGGGGSGGGGSEFEIVLTQSPATLSLSPGERATLSCSASSSVSYMYWYQQKPGQAPRLLIYRTSNLASGIPARFSGSGSGTDFTLTISSLEPEDFAVYYCQQYHSYPTTFGQGTKVEIKRTVLEIQNPDPAVYQLRDSKSSDKSVCLFTDFDSQTNVSQSKDSDVYITDKCVLDMRSMDFKSNSAVAWSNKSDFACANAFNNSIIPEDTFFPSPESSDSTDHVKPKETENTKQPSKSCHKPKAIVHTEKVNMMSLTVLGLRMLFAKTVAVNFLLTAKLFFLLTARAKRSGSGVKQTLNFDLLKLAGDVESNPGPTSMDWIWRILFLVGAATGAHSGPQLQLQESGPGLVKPSETLSLTCTVSGDSISSGDYYWGWIRQPPGKGLEWIGHIYYSGVTYYNPSLKSRVTISVDTSRNQFSLKLSSVTAADTAVYYCTREDSSNWRSRGQGTLVTVSSGSGGGGSGGGGSGGGGSFEEVQLVESGGGLVQPGGSLRLSCAASGFSFNTYAMNWVRQAPGKGLEWVSHIRSKSNNFATYYADSVKDRFTISRDNAKNSLYLQMNSLRAEDTAVYYCARQGGDFPMDYWGQGTLVTVSSTREDLKNVFPPEVAVFEPSEAEISHTQKATLVCLATGFYPDHVELSWWVNGKEVHSGVCTDPQPLKEQPALNDSRYCLSSRLRVSATFWQNPRNHFRCQVQFYGLSENDEWTQDRAKPVTQIVSAEAWGRADDVIKIHWQEKKSNTILGSQEGNTMKTNDTYMKFSWLTVPEKSLDKEHRCIVRHENNKNGVDQEIIFPPIKTDVITMDPKDNCSKDANDTLLLQLTNTSAYYMYLLLLLKSVVYFAIITCCLLMAMVKRKDSRG

SEQ ID NO: 15359 - protein, 998 aa, synthetic construct
MALPVTALLLPLALLLHAARPEVQLVESGGGLVQPGGSLRLSCAASGFSFSDFWMSWVRQAPGKGLEWVATISQAGSEKDYVDSVKGRFTISRDNAKKSLYLQMNSLRAEDTAVYYCASGVYSFDYRGQGTLVTVSSGTGGGGSGGGGSGGGGSEFDVVMTQSPSSLSASVGDRVTITCKASEDIYIRLAWYQQKPGKAPKLLIYAATSLETGVPSRFSGSGSGTDFTLTISSLQPEDFATYYCQQYWTTPWTFGGGTKVEIKLEIQNPDPAVYQLRDSKSSDKSVCLFTDFDSQTNVSQSKDSDVYITDKCVLDMRSMDFKSNSAVAWSNKSDFACANAFNNSIIPEDTFFPSPESSDSTDHVKPKETENTKQPSKSCHKPKAIVHTEKVNMMSLTVLGLRMLFAKTVAVNFLLTAKLFFLLTARAKRSGSGVKQTLNFDLLKLAGDVESNPGPTSMDWIWRILFLVGAATGAHSGPQLQLQESGPGLVKPSETLSLTCTVSGDSISSGDYYWGWIRQPPGKGLEWIGHIYYSGVTYYNPSLKSRVTISVDTSRNQFSLKLSSVTAADTAVYYCTREDSSNWRSRGQGTLVTVSSGSGGGGSGGGGSGGGGSFEQVQLQESGPGLVKPSQTLSLTCTVSGYSITIDYTWNWIRQPPGKGLEWIGYITYSGSTDYNPSLKSRVLISVDTSKNQVSLKLSSVTAADTAVYYCARLGRRYALDYWGQGTTVTVSSTREDLKNVFPPEVAVFEPSEAEISHTQKATLVCLATGFYPDHVELSWWVNGKEVHSGVCTDPQPLKEQPALNDSRYCLSSRLRVSATFWQNPRNHFRCQVQFYGLSENDEWTQDRAKPVTQIVSAEAWGRADDVIKIHWQEKKSNTILGSQEGNTMKTNDTYMKFSWLTVPEKSLDKEHRCIVRHENNKNGVDQEIIFPPIKTDVITMDPKDNCSKDANDTLLLQLTNTSAYYMYLLLLLKSVVYFAIITCCLLMAMVKRKDSRG

SEQ ID NO: 15360 - protein, 1002 aa, synthetic construct
MALPVTALLLPLALLLHAARPEVQLVESGGGLVQPGGSLRLSCAASGFSFSDFWMSWVRQAPGKGLEWVATISQAGSEKDYVDSVKGRFTISRDNAKKSLYLQMNSLRAEDTAVYYCASGVYSFDYRGQGTLVTVSSGTGGGGSGGGGSGGGGSEFDIQMTQTTSSLSASLGDRVTISCRASQDISNYLNWYQQKPDGTVKLLIYYTSILHSGVPSRFSGSGSGTDYSLTISNLEQEDFATYFCQQGNTLPWTFGGGTKLEIKALEIQNPDPAVYQLRDSKSSDKSVCLFTDFDSQTNVSQSKDSDVYITDKCVLDMRSMDFKSNSAVAWSNKSDFACANAFNNSIIPEDTFFPSPESSDSTDHVKPKETENTKQPSKSCHKPKAIVHTEKVNMMSLTVLGLRMLFAKTVAVNFLLTAKLFFLLTARAKRSGSGVKQTLNFDLLKLAGDVESNPGPTSMDWIWRILFLVGAATGAHSGPQLQLQESGPGLVKPSETLSLTCTVSGDSISSGDYYWGWIRQPPGKGLEWIGHIYYSGVTYYNPSLKSRVTISVDTSRNQFSLKLSSVTAADTAVYYCTREDSSNWRSRGQGTLVTVSSGSGGGGSGGGGSGGGGSFEVQLVESGGGLVKPGGSLKLSCAASGFAFSIYDMSWVRQTPEKRLEWVAYISSGGGTYYPDTVKGRFTISRDNAKNTLYLQMSSLKSEDTAMYYCARHSGYGTHWGVLFAYWGQGTLVTVSATREDLKNVFPPEVAVFEPSEAEISHTQKATLVCLATGFYPDHVELSWWVNGKEVHSGVCTDPQPLKEQPALNDSRYCLSSRLRVSATFWQNPRNHFRCQVQFYGLSENDEWTQDRAKPVTQIVSAEAWGRADDVIKIHWQEKKSNTILGSQEGNTMKTNDTYMKFSWLTVPEKSLDKEHRCIVRHENNKNGVDQEIIFPPIKTDVITMDPKDNCSKDANDTLLLQLTNTSAYYMYLLLLLKSVVYFAIITCCLLMAMVKRKDSRG

SEQ ID NO: 15361 - protein, 1013 aa, synthetic construct
MALPVTALLLPLALLLHAARPEVQLVESGGGLVQPGGSLRLSCAASGFSFSDFWMSWVRQAPGKGLEWVATISQAGSEKDYVDSVKGRFTISRDNAKKSLYLQMNSLRAEDTAVYYCASGVYSFDYRGQGTLVTVSSGTGGGGSGGGGSGGGGSEFDIVMTQSPDSLAVSLGERATINCKSSQSLLYRSNQKNYLAWYQQKPGQPPKLLIYWASTRESGVPDRFSGSGSGTDFTLTISSLQAEDVAVYYCQQYYNYPRTFGQGTKVEIKRTVLEIQNPDPAVYQLRDSKSSDKSVCLFTDFDSQTNVSQSKDSDVYITDKCVLDMRSMDFKSNSAVAWSNKSDFACANAFNNSIIPEDTFFPSPESSDSTDHVKPKETENTKQPSKSCHKPKAIVHTEKVNMMSLTVLGLRMLFAKTVAVNFLLTAKLFFLLTARAKRSGSGVKQTLNFDLLKLAGDVESNPGPTSMDWIWRILFLVGAATGAHSGPQLQLQESGPGLVKPSETLSLTCTVSGDSISSGDYYWGWIRQPPGKGLEWIGHIYYSGVTYYNPSLKSRVTISVDTSRNQFSLKLSSVTAADTAVYYCTREDSSNWRSRGQGTLVTVSSGSGGGGSGGGGSGGGGSFEEVQLLESGGGLVQPGGSLRLSCAASGYSITSDYAWNWVRQAPGKGLEWVSYISNSGSTSYNPSLKSRFTISRDNSKNTLYLQMNSLRAEDTAVYYCAKERNYDYDDYYYAMDYWGQGTLVTVSSTREDLKNVFPPEVAVFEPSEAEISHTQKATLVCLATGFYPDHVELSWWVNGKEVHSGVCTDPQPLKEQPALNDSRYCLSSRLRVSATFWQNPRNHFRCQVQFYGLSENDEWTQDRAKPVTQIVSAEAWGRADDVIKIHWQEKKSNTILGSQEGNTMKTNDTYMKFSWLTVPEKSLDKEHRCIVRHENNKNGVDQEIIFPPIKTDVITMDPKDNCSKDANDTLLLQLTNTSAYYMYLLLLLKSVVYFAIITCCLLMAMVKRKDSRG

SEQ ID NO: 15362 - protein, 1006 aa, synthetic construct
MALPVTALLLPLALLLHAARPEVQLVESGGGLVQPGGSLRLSCAASGFSFSDFWMSWVRQAPGKGLEWVATISQAGSEKDYVDSVKGRFTISRDNAKKSLYLQMNSLRAEDTAVYYCASGVYSFDYRGQGTLVTVSSGTGGGGSGGGGSGGGGSEFDVVMTQSPLSLPVTLGQPASISCRSSQSLLHSSGNTYLEWYQQRPGQSPRPLIYKISTRFSGVPDRFSGSGSGTDFTLKISRVEAEDVGVYYCFQGSHVPYTFGGGTKVEIKRLEIQNPDPAVYQLRDSKSSDKSVCLFTDFDSQTNVSQSKDSDVYITDKCVLDMRSMDFKSNSAVAWSNKSDFACANAFNNSIIPEDTFFPSPESSDSTDHVKPKETENTKQPSKSCHKPKAIVHTEKVNMMSLTVLGLRMLFAKTVAVNFLLTAKLFFLLTARAKRSGSGVKQTLNFDLLKLAGDVESNPGPTSMDWIWRILFLVGAATGAHSGPQLQLQESGPGLVKPSETLSLTCTVSGDSISSGDYYWGWIRQPPGKGLEWIGHIYYSGVTYYNPSLKSRVTISVDTSRNQFSLKLSSVTAADTAVYYCTREDSSNWRSRGQGTLVTVSSGSGGGGSGGGGSGGGGSFEQVQLVQSGAEVKKPGASVKVSCKASGLTIEDYYMHWVRQAPGQGLEWMGWIDPENGDTEYGPKFQGRVTMTRDTSINTAYMELSRLRSDDTAVYYCAVHNAHYGTWFAYWGQGTLVTVSSTREDLKNVFPPEVAVFEPSEAEISHTQKATLVCLATGFYPDHVELSWWVNGKEVHSGVCTDPQPLKEQPALNDSRYCLSSRLRVSATFWQNPRNHFRCQVQFYGLSENDEWTQDRAKPVTQIVSAEAWGRADDVIKIHWQEKKSNTILGSQEGNTMKTNDTYMKFSWLTVPEKSLDKEHRCIVRHENNKNGVDQEIIFPPIKTDVITMDPKDNCSKDANDTLLLQLTNTSAYYMYLLLLLKSVVYFAIITCCLLMAMVKRKDSRG

SEQ ID NO: 15363 - protein, 998 aa, synthetic construct
MALPVTALLLPLALLLHAARPEVQLVESGGGLVQPGGSLRLSCAASGFSFSDFWMSWVRQAPGKGLEWVATISQAGSEKDYVDSVKGRFTISRDNAKKSLYLQMNSLRAEDTAVYYCASGVYSFDYRGQGTLVTVSSGTGGGGSGGGGSGGGGSEFDIQMTQSPSSLSASVGDRVTITCRASENIYSNLAWYQQKPGKAPKLLIYAATNLADGVPSRFSGSGSGTDFTLTISSLQPEDFATYYCQHFWGTPTFGQGTKVEIKRTVLEIQNPDPAVYQLRDSKSSDKSVCLFTDFDSQTNVSQSKDSDVYITDKCVLDMRSMDFKSNSAVAWSNKSDFACANAFNNSIIPEDTFFPSPESSDSTDHVKPKETENTKQPSKSCHKPKAIVHTEKVNMMSLTVLGLRMLFAKTVAVNFLLTAKLFFLLTARAKRSGSGVKQTLNFDLLKLAGDVESNPGPTSMDWIWRILFLVGAATGAHSGPQLQLQESGPGLVKPSETLSLTCTVSGDSISSGDYYWGWIRQPPGKGLEWIGHIYYSGVTYYNPSLKSRVTISVDTSRNQFSLKLSSVTAADTAVYYCTREDSSNWRSRGQGTLVTVSSGSGGGGSGGGGSGGGGSFEEVQLVESGGGLVQPGGSLRLSCAASGFSLTNYGVHWVRQAPGKGLEWVSVIWSGGSTDYNAAFISRFTISADTSKNTAYLQMNSLRAEDTAVYYCARELIHAMDNWGQGTLVTVSSTREDLKNVFPPEVAVFEPSEAEISHTQKATLVCLATGFYPDHVELSWWVNGKEVHSGVCTDPQPLKEQPALNDSRYCLSSRLRVSATFWQNPRNHFRCQVQFYGLSENDEWTQDRAKPVTQIVSAEAWGRADDVIKIHWQEKKSNTILGSQEGNTMKTNDTYMKFSWLTVPEKSLDKEHRCIVRHENNKNGVDQEIIFPPIKTDVITMDPKDNCSKDANDTLLLQLTNTSAYYMYLLLLLKSVVYFAIITCCLLMAMVKRKDSRG

SEQ ID NO: 15364 - protein, 1005 aa, synthetic construct
MALPVTALLLPLALLLHAARPEVQLVESGGGLVQPGGSLRLSCAASGFSFSDFWMSWVRQAPGKGLEWVATISQAGSEKDYVDSVKGRFTISRDNAKKSLYLQMNSLRAEDTAVYYCASGVYSFDYRGQGTLVTVSSGTGGGGSGGGGSGGGGSEFDFVMTQSPLSLPVTPGEPASISCRSSQSIVHSNGNTYLEWYLQKPGQSPQLLIYKVSNRFSGVPDRFSGSGSGTDFTLKISRVEAEDVGVYYCFQGSHVPLTFGQGTKLEIKRLEIQNPDPAVYQLRDSKSSDKSVCLFTDFDSQTNVSQSKDSDVYITDKCVLDMRSMDFKSNSAVAWSNKSDFACANAFNNSIIPEDTFFPSPESSDSTDHVKPKETENTKQPSKSCHKPKAIVHTEKVNMMSLTVLGLRMLFAKTVAVNFLLTAKLFFLLTARAKRSGSGVKQTLNFDLLKLAGDVESNPGPTSMDWIWRILFLVGAATGAHSGPQLQLQESGPGLVKPSETLSLTCTVSGDSISSGDYYWGWIRQPPGKGLEWIGHIYYSGVTYYNPSLKSRVTISVDTSRNQFSLKLSSVTAADTAVYYCTREDSSNWRSRGQGTLVTVSSGSGGGGSGGGGSGGGGSFEEVQLVESGAEVKKPGASVKVSCKASGYTFTSYWIHWVRQAPGQGLEWMGENDPSNGRTNYNEKFKNRVTLTVDTSISTAYMELSRLRSDDTAVYYCARGPNYFYSMDYWGQGTMVTVSSTREDLKNVFPPEVAVFEPSEAEISHTQKATLVCLATGFYPDHVELSWWVNGKEVHSGVCTDPQPLKEQPALNDSRYCLSSRLRVSATFWQNPRNHFRCQVQFYGLSENDEWTQDRAKPVTQIVSAEAWGRADDVIKIHWQEKKSNTILGSQEGNTMKTNDTYMKFSWLTVPEKSLDKEHRCIVRHENNKNGVDQEIIFPPIKTDVITMDPKDNCSKDANDTLLLQLTNTSAYYMYLLLLLKSVVYFAIITCCLLMAMVKRKDSRG

SEQ ID NO: 15365 - protein, 998 aa, synthetic construct
MALPVTALLLPLALLLHAARPEVQLVESGGGLVQPGGSLRLSCAASGFSFSDFWMSWVRQAPGKGLEWVATISQAGSEKDYVDSVKGRFTISRDNAKKSLYLQMNSLRAEDTAVYYCASGVYSFDYRGQGTLVTVSSGTGGGGSGGGGSGGGGSEFDIQLTQSPSFLSASVGDRVTITCSARSSISFMYWYQQKPGKAPKLLIYDTSNLASGVPSRFSGSGSGTEFTLTISSLEAEDAATYYCQQWSSYPLTFGQGTKLEIKLEIQNPDPAVYQLRDSKSSDKSVCLFTDFDSQTNVSQSKDSDVYITDKCVLDMRSMDFKSNSAVAWSNKSDFACANAFNNSIIPEDTFFPSPESSDSTDHVKPKETENTKQPSKSCHKPKAIVHTEKVNMMSLTVLGLRMLFAKTVAVNFLLTAKLFFLLTARAKRSGSGVKQTLNFDLLKLAGDVESNPGPTSMDWIWRILFLVGAATGAHSGPQLQLQESGPGLVKPSETLSLTCTVSGDSISSGDYYWGWIRQPPGKGLEWIGHIYYSGVTYYNPSLKSRVTISVDTSRNQFSLKLSSVTAADTAVYYCTREDSSNWRSRGQGTLVTVSSGSGGGGSGGGGSGGGGSFEQVQLVQSGAEVKKPGASVKVSCKASGYTFTGSWMNWVRQAPGQGLEWIGRIYPGDGETNYNGKFKDRVTITADKSTSTAYMELSSLRSEDTAVYYCARIYGNNVYFDVWGQGTTVTVSSTREDLKNVFPPEVAVFEPSEAEISHTQKATLVCLATGFYPDHVELSWWVNGKEVHSGVCTDPQPLKEQPALNDSRYCLSSRLRVSATFWQNPRNHFRCQVQFYGLSENDEWTQDRAKPVTQIVSAEAWGRADDVIKIHWQEKKSNTILGSQEGNTMKTNDTYMKFSWLTVPEKSLDKEHRCIVRHENNKNGVDQEIIFPPIKTDVITMDPKDNCSKDANDTLLLQLTNTSAYYMYLLLLLKSVVYFAIITCCLLMAMVKRKDSRG

SEQ ID NO: 15366 - protein, 1006 aa, synthetic construct
MALPVTALLLPLALLLHAARPEVQLVESGGGLVQPGGSLRLSCAASGFSFSDFWMSWVRQAPGKGLEWVATISQAGSEKDYVDSVKGRFTISRDNAKKSLYLQMNSLRAEDTAVYYCASGVYSFDYRGQGTLVTVSSGTGGGGSGGGGSGGGGSEFQLVLTQSPSASASLGSSVKLTCTLSSGHKTDTIDWYQQQPGKAPRYLMKLEGSGSYNKGSGVPDRFSGSSSGADWYLTISSLQSEDEADYYCGTDYPGNYLFGGGTQLTVLGLEIQNPDPAVYQLRDSKSSDKSVCLFTDFDSQTNVSQSKDSDVYITDKCVLDMRSMDFKSNSAVAWSNKSDFACANAFNNSIIPEDTFFPSPESSDSTDHVKPKETENTKQPSKSCHKPKAIVHTEKVNMMSLTVLGLRMLFAKTVAVNFLLTAKLFFLLTARAKRSGSGVKQTLNFDLLKLAGDVESNPGPTSMDWIWRILFLVGAATGAHSGPQLQLQESGPGLVKPSETLSLTCTVSGDSISSGDYYWGWIRQPPGKGLEWIGHIYYSGVTYYNPSLKSRVTISVDTSRNQFSLKLSSVTAADTAVYYCTREDSSNWRSRGQGTLVTVSSGSGGGGSGGGGSGGGGSFEQEQLVESGGGLVQPGGSLRLSCAASGFTFSDYYMSWIRQAPGKGLEWVATIYPSSGKTYYADSAKGRLTISSDNAKDSLYLQMNSLRAEDTAVYYCTRDSYADDAALFDIWGQGTTVTVSSTREDLKNVFPPEVAVFEPSEAEISHTQKATLVCLATGFYPDHVELSWWVNGKEVHSGVCTDPQPLKEQPALNDSRYCLSSRLRVSATFWQNPRNHFRCQVQFYGLSENDEWTQDRAKPVTQIVSAEAWGRADDVIKIHWQEKKSNTILGSQEGNTMKTNDTYMKFSWLTVPEKSLDKEHRCIVRHENNKNGVDQEIIFPPIKTDVITMDPKDNCSKDANDTLLLQLTNTSAYYMYLLLLLKSVVYFAIITCCLLMAMVKRKDSRG

SEQ ID NO: 15367 - protein, 998 aa, synthetic construct; identical to SEQ ID NO: 15363

SEQ ID NO: 15368 - protein, 1005 aa, synthetic construct; identical to SEQ ID NO: 15364

SEQ ID NO: 15369 - protein, 998 aa, synthetic construct; identical to SEQ ID NO: 15365

SEQ ID NO: 15370 - protein, 1006 aa, synthetic construct; identical to SEQ ID NO: 15366

SEQ ID NO: 15371 - protein, 1005 aa, synthetic construct
MALPVTALLLPLALLLHAARPEVQLVESGGGLVQPGGSLRLSCAASGFSFSDFWMSWVRQAPGKGLEWVATISQAGSEKDYVDSVKGRFTISRDNAKKSLYLQMNSLRAEDTAVYYCASGVYSFDYRGQGTLVTVSSGTGGGGSGGGGSGGGGSEFDIQLTQSPSSLSASVGDRVSFTCQASQDINNFLNWYQQKPGKAPKLLIYDASNLETGVPSRFSGSGSGTDFTFTISSLQPEDIATYYCQQYGNLPFTFGGGTKVEIKRLEIQNPDPAVYQLRDSKSSDKSVCLFTDFDSQTNVSQSKDSDVYITDKCVLDMRSMDFKSNSAVAWSNKSDFACANAFNNSIIPEDTFFPSPESSDSTDHVKPKETENTKQPSKSCHKPKAIVHTEKVNMMSLTVLGLRMLFAKTVAVNFLLTAKLFFLLTARAKRSGSGVKQTLNFDLLKLAGDVESNPGPTSMDWIWRILFLVGAATGAHSGPQLQLQESGPGLVKPSETLSLTCTVSGDSISSGDYYWGWIRQPPGKGLEWIGHIYYSGVTYYNPSLKSRVTISVDTSRNQFSLKLSSVTAADTAVYYCTREDSSNWRSRGQGTLVTVSSGSGGGGSGGGGSGGGGSFEQVQLQESGPGLVKPSQTLSLTCTVSGGSISSGGFYWSWIRQHPGKGLEWIGYIHHSGSTHYNPSLKSRVTISIDTSKNLFSLRLSSVTAADTAVYYCASLVYCGGDCYSGFDYWGQGTLVTVSSTREDLKNVFPPEVAVFEPSEAEISHTQKATLVCLATGFYPDHVELSWWVNGKEVHSGVCTDPQPLKEQPALNDSRYCLSSRLRVSATFWQNPRNHFRCQVQFYGLSENDEWTQDRAKPVTQIVSAEAWGRADDVIKIHWQEKKSNTILGSQEGNTMKTNDTYMKFSWLTVPEKSLDKEHRCIVRHENNKNGVDQEIIFPPIKTDVITMDPKDNCSKDANDTLLLQLTNTSAYYMYLLLLLKSVVYFAIITCCLLMAMVKRKDSRG

SEQ ID NO: 15372 - protein, 1001 aa, synthetic construct
MALPVTALLLPLALLLHAARPEVQLVESGGGLVQPGGSLRLSCAASGFSFSDFWMSWVRQAPGKGLEWVATISQAGSEKDYVDSVKGRFTISRDNAKKSLYLQMNSLRAEDTAVYYCASGVYSFDYRGQGTLVTVSSGTGGGGSGGGGSGGGGSEFDIQMTQSPSSLSASVGDRVTITCKSSQSVLYSSNQKNYLAWFQQKPGKAPKLLIYWASTRESGVPSRFSGSGSGTDFTLTISSLQPEDFATYFCHQYLSSYTFGQGTKVEIKRLEIQNPDPAVYQLRDSKSSDKSVCLFTDFDSQTNVSQSKDSDVYITDKCVLDMRSMDFKSNSAVAWSNKSDFACANAFNNSIIPEDTFFPSPESSDSTDHVKPKETENTKQPSKSCHKPKAIVHTEKVNMMSLTVLGLRMLFAKTVAVNFLLTAKLFFLLTARAKRSGSGVKQTLNFDLLKLAGDVESNPGPTSMDWIWRILFLVGAATGAHSGPQLQLQESGPGLVKPSETLSLTCTVSGDSISSGDYYWGWIRQPPGKGLEWIGHIYYSGVTYYNPSLKSRVTISVDTSRNQFSLKLSSVTAADTAVYYCTREDSSNWRSRGQGTLVTVSSGSGGGGSGGGGSGGGGSFEEVQLVESGGGLVQPGGSLRLSCAASGYTFTTYWMHWVRQAPGKGLEWVGYIRPSTGYTEYNQKFKDRFTISADTSKNTAYLQMNSLRAEDTAVYYCARSRWLLDYWGQGTLVTVSTREDLKNVFPPEVAVFEPSEAEISHTQKATLVCLATGFYPDHVELSWWVNGKEVHSGVCTDPQPLKEQPALNDSRYCLSSRLRVSATFWQNPRNHFRCQVQFYGLSENDEWTQDRAKPVTQIVSAEAWGRADDVIKIHWQEKKSNTILGSQEGNTMKTNDTYMKFSWLTVPEKSLDKEHRCIVRHENNKNGVDQEIIFPPIKTDVITMDPKDNCSKDANDTLLLQLTNTSAYYMYLLLLLKSVVYFAIITCCLLMAMVKRKDSRG

SEQ ID NO: 15373 - protein, 998 aa, synthetic construct
MALPVTALLLPLALLLHAARPEVQLVESGGGLVQPGGSLRLSCAASGFSFSDFWMSWVRQAPGKGLEWVATISQAGSEKDYVDSVKGRFTISRDNAKKSLYLQMNSLRAEDTAVYYCASGVYSFDYRGQGTLVTVSSGTGGGGSGGGGSGGGGSEFDIQMTQSPSSLSASVGDRVTITCRASQDISNYLNWYQQKPGKAPKLLIYYTSRLHSGVPSRFSGSGSGTDFTLTISSLQPEDFATYYCQQGNTLPYTFGQGTKVEIKRLEIQNPDPAVYQLRDSKSSDKSVCLFTDFDSQTNVSQSKDSDVYITDKCVLDMRSMDFKSNSAVAWSNKSDFACANAFNNSIIPEDTFFPSPESSDSTDHVKPKETENTKQPSKSCHKPKAIVHTEKVNMMSLTVLGLRMLFAKTVAVNFLLTAKLFFLLTARAKRSGSGVKQTLNFDLLKLAGDVESNPGPTSMDWIWRILFLVGAATGAHSGPQLQLQESGPGLVKPSETLSLTCTVSGDSISSGDYYWGWIRQPPGKGLEWIGHIYYSGVTYYNPSLKSRVTISVDTSRNQFSLKLSSVTAADTAVYYCTREDSSNWRSRGQGTLVTVSSGSGGGGSGGGGSGGGGSFEEVQLVESGGGLVQPGGSLRLSCAASGFTFSDYFMSWVRQAPGKGLEWVATISNGGTYTYYPDSVKGRFTISRDNSKNTLYLQMNSLRAEDTAVYYCARFDGYIFDYWGQGTLVTVSSTREDLKNVFPPEVAVFEPSEAEISHTQKATLVCLATGFYPDHVELSWWVNGKEVHSGVCTDPQPLKEQPALNDSRYCLSSRLRVSATFWQNPRNHFRCQVQFYGLSENDEWTQDRAKPVTQIVSAEAWGRADDVIKIHWQEKKSNTILGSQEGNTMKTNDTYMKFSWLTVPEKSLDKEHRCIVRHENNKNGVDQEIIFPPIKTDVITMDPKDNCSKDANDTLLLQLTNTSAYYMYLLLLLKSVVYFAIITCCLLMAMVKRKDSRG

SEQ ID NO: 15374 - protein, 796 aa, synthetic construct
MALPVTALLLPLALLLHAARPDIQMTQSPSSLSASVGDRVTITCKASDHINNWLAWYQQKPGQAPKLLIYGATTLETGVPSRFSGSGSGTDYTLTISSLQPEDFATYYCQQSWNTPWTFGQGTKLEIKRLEDLKNVFPPEVAVFEPSEAEISHTQKATLVCLATGFYPDHVELSWWVNGKEVHSGVCTDPQPLKEQPALNDSRYCLSSRLRVSATFWQNPRNHFRCQVQFYGLSENDEWTQDRAKPVTQIVSAEAWGRADDVIKIHWQEKKSNTILGSQEGNTMKTNDTYMKFSWLTVPEKSLDKEHRCIVRHENNKNGVDQEIIFPPIKTDVITMDPKDNCSKDANDTLLLQLTNTSAYYMYLLLLLKSVVYFAIITCCLLMAMVKRKDSRGRAKRSGSGATNFSLLKQAGDVEENPGPTSMDWIWRILFLVGAATGAHSGPMDPDLEIRAAFLRQRNTALRTEVAELEQEVQRLENEVSQYETRYGPLGGGKGSGGGGSGGGGSGGGGSFEQVQLQQPGAELVKPGASVKMSCKASGYAFSSYWINWMKQKPGQGLEWIGQIYPGDGDTNYNGKFKGRATLTADTSSSTAYMQLSSLTSEDSAVYFCARSITTVVGCAMDYWGQGTSVTVSSTRIQNPDPAVYQLRDSKSSDKSVCLFTDFDSQTNVSQSKDSDVYITDKCVLDMRSMDFKSNSAVAWSNKSDFACANAFNNSIIPEDTFFPSPESSDSTDHVKPKETENTKQPSKSCHKPKAIVHTEKVNMMSLTVLGLRMLFAKTVAVNFLLTAKLFFLLTA

SEQ ID NO: 15375 - protein, 800 aa, synthetic construct
MALPVTALLLPLALLLHAARPDIQMTQSPSSLSASVGDRVTITCKASDHINNWLAWYQQKPGQAPKLLIYGATTLETGVPSRFSGSGSGTDYTLTISSLQPEDFATYYCQQSWNTPWTFGQGTKLEIKRLEIQNPDPAVYQLRDSKSSDKSVCLFTDFDSQTNVSQSKDSDVYITDKCVLDMRSMDFKSNSAVAWSNKSDFACANAFNNSIIPEDTFFPSPESSDSTDHVKPKETENTKQPSKSCHKPKAIVHTEKVNMMSLTVLGLRMLFAKTVAVNFLLTAKLFFLLTARAKRSGSGVKQTLNFDLLKLAGDVESNPGPTSMDWIWRILFLVGAATGAHSGPMDPDLEIRAAFLRQRNTALRTEVAELEQEVQRLENEVSQYETRYGPLGGGKGSGGGGSGGGGSGGGGSFEQVQLQQPGAELVKPGASVKMSCKASGYAFSSYWINWMKQKPGQGLEWIGQIYPGDGDTNYNGKFKGRATLTADTSSSTAYMQLSSLTSEDSAVYFCARSITTVVGCAMDYWGQGTSVTVSSTREDLKNVFPPEVAVFEPSEAEISHTQKATLVCLATGFYPDHVELSWWVNGKEVHSGVCTDPQPLKEQPALNDSRYCLSSRLRVSATFWQNPRNHFRCQVQFYGLSENDEWTQDRAKPVTQIVSAEAWGRADDVIKIHWQEKKSNTILGSQEGNTMKTNDTYMKFSWLTVPEKSLDKEHRCIVRHENNKNGVDQEIIFPPIKTDVITMDPKDNCSKDANDTLLLQLTNTSAYYMYLLLLLKSVVYFAIITCCLLMAMVKRKDSRG

SEQ ID NO: 15376 - protein, 773 aa, synthetic construct
MALPVTALLLPLALLLHAARPDIQMTQSPSSLSASVGDRVTITCKASDHINNWLAWYQQKPGQAPKLLIYGATTLETGVPSRFSGSGSGTDYTLTISSLQPEDFATYYCQQSWNTPWTFGQGTKLEIKRLEDLKNVFPPEVAVFEPSEAEISHTQKATLVCLATGFYPDHVELSWWVNGKEVHSGVCTDPQPLKEQPALNDSRYCLSSRLRVSATFWQNPRNHFRCQVQFYGLSENDEWTQDRAKPVTQIVSAEAWGRADDVIKIHWQEKKSNTILGSQEGNTMKTNDTYMKFSWLTVPEKSLDKEHRCIVRHENNKNGVDQEIIFPPIKTDVITMDPKDNCSKDANDTLLLQLTNTSAYYMYLLLLLKSVVYFAIITCCLLMAMVKRKDSRGRAKRSGSGATNFSLLKQAGDVEENPGPTSMDWIWRILFLVGAATGAHSGPEVAALEKEVAALEKEVAALEKEVAALEKGSGGGGSGGGGSGGGGSFEQVQLQQPGAELVKPGASVKMSCKASGYAFSSYWINWMKQKPGQGLEWIGQIYPGDGDTNYNGKFKGRATLTADTSSSTAYMQLSSLTSEDSAVYFCARSITTVVGCAMDYWGQGTSVTVSSTRIQNPDPAVYQLRDSKSSDKSVCLFTDFDSQTNVSQSKDSDVYITDKCVLDMRSMDFKSNSAVAWSNKSDFACANAFNNSIIPEDTFFPSPESSDSTDHVKPKETENTKQPSKSCHKPKAIVHTEKVNMMSLTVLGLRMLFAKTVAVNFLLTAKLFFLLTA

SEQ ID NO: 15377 - protein, 777 aa, synthetic construct
MALPVTALLLPLALLLHAARPDIQMTQSPSSLSASVGDRVTITCKASDHINNWLAWYQQKPGQAPKLLIYGATTLETGVPSRFSGSGSGTDYTLTISSLQPEDFATYYCQQSWNTPWTFGQGTKLEIKRLEIQNPDPAVYQLRDSKSSDKSVCLFTDFDSQTNVSQSKDSDVYITDKCVLDMRSMDFKSNSAVAWSNKSDFACANAFNNSIIPEDTFFPSPESSDSTDHVKPKETENTKQPSKSCHKPKAIVHTEKVNMMSLTVLGLRMLFAKTVAVNFLLTAKLFFLLTARAKRSGSGVKQTLNFDLLKLAGDVESNPGPTSMDWIWRILFLVGAATGAHSGPEVAALEKEVAALEKEVAALEKEVAALEKGSGGGGSGGGGSGGGGSFEQVQLQQPGAELVKPGASVKMSCKASGYAFSSYWINWMKQKPGQGLEWIGQIYPGDGDTNYNGKFKGRATLTADTSSSTAYMQLSSLTSEDSAVYFCARSITTVVGCAMDYWGQGTSVTVSSTREDLKNVFPPEVAVFEPSEAEISHTQKATLVCLATGFYPDHVELSWWVNGKEVHSGVCTDPQPLKEQPALNDSRYCLSSRLRVSATFWQNPRNHFRCQVQFYGLSENDEWTQDRAKPVTQIVSAEAWGRADDVIKIHWQEKKSNTILGSQEGNTMKTNDTYMKFSWLTVPEKSLDKEHRCIVRHENNKNGVDQEIIFPPIKTDVITMDPKDNCSKDANDTLLLQLTNTSAYYMYLLLLLKSVVYFAIITCCLLMAMVKRKDSRG

SEQ ID NO: 15378 - protein, 773 aa, synthetic construct; identical to SEQ ID NO: 15376

SEQ ID NO: 15379 - protein, 777 aa, synthetic construct; identical to SEQ ID NO: 15377

SEQ ID NO: 15380 - protein, 863 aa, synthetic construct
MALPVTALLLPLALLLHAARPDIQMTQSPSSLSASVGDRVTITCKASDHINNWLAWYQQKPGQAPKLLIYGATTLETGVPSRFSGSGSGTDYTLTISSLQPEDFATYYCQQSWNTPWTFGQGTKLEIKRLEDLKNVFPPEVAVFEPSEAEISHTQKATLVCLATGFYPDHVELSWWVNGKEVHSGVCTDPQPLKEQPALNDSRYCLSSRLRVSATFWQNPRNHFRCQVQFYGLSENDEWTQDRAKPVTQIVSAEAWGRADDVIKIHWQEKKSNTILGSQEGNTMKTNDTYMKFSWLTVPEKSLDKEHRCIVRHENNKNGVDQEIIFPPIKTDVITMDPKDNCSKDANDTLLLQLTNTSAYYMYLLLLLKSVVYFAIITCCLLMAMVKRKDSRGRAKRSGSGATNFSLLKQAGDVEENPGPTSMDWIWRILFLVGAATGAHSGPQVQLQESGGGLAQAGGSLRLSCAASGRTFSMGWFRQAPGKEREFVAAITYSGGSPYYASSVRGRFTISRDNAKNTVYLQMNSLKPEDTAVYYCAANPTYGSDWNAENWGQGTQVTVSSGSGGGGSGGGGSGGGGSFEQVQLQQPGAELVKPGASVKMSCKASGYAFSSYWINWMKQKPGQGLEWIGQIYPGDGDTNYNGKFKGRATLTADTSSSTAYMQLSSLTSEDSAVYFCARSITTVVGCAMDYWGQGTSVTVSSTRIQNPDPAVYQLRDSKSSDKSVCLFTDFDSQTNVSQSKDSDVYITDKCVLDMRSMDFKSNSAVAWSNKSDFACANAFNNSIIPEDTFFPSPESSDSTDHVKPKETENTKQPSKSCHKPKAIVHTEKVNMMSLTVLGLRMLFAKTVAVNFLLTAKLFFLLTA

SEQ ID NO: 15381 - protein, 867 aa, synthetic construct
MALPVTALLLPLALLLHAARPDIQMTQSPSSLSASVGDRVTITCKASDHINNWLAWYQQKPGQAPKLLIYGATTLETGVPSRFSGSGSGTDYTLTISSLQPEDFATYYCQQSWNTPWTFGQGTKLEIKRLEIQNPDPAVYQLRDSKSSDKSVCLFTDFDSQTNVSQSKDSDVYITDKCVLDMRSMDFKSNSAVAWSNKSDFACANAFNNSIIPEDTFFPSPESSDSTDHVKPKETENTKQPSKSCHKPKAIVHTEKVNMMSLTVLGLRMLFAKTVAVNFLLTAKLFFLLTARAKRSGSGVKQTLNFDLLKLAGDVESNPGPTSMDWIWRILFLVGAATGAHSGPQVQLQESGGGLAQAGGSLRLSCAASGRTFSMGWFRQAPGKEREFVAAITYSGGSPYYASSVRGRFTISRDNAKNTVYLQMNSLKPEDTAVYYCAANPTYGSDWNAENWGQGTQVTVSSGSGGGGSGGGGSGGGGSFEQVQLQQPGAELVKPGASVKMSCKASGYAFSSYWINWMKQKPGQGLEWIGQIYPGDGDTNYNGKFKGRATLTADTSSSTAYMQLSSLTSEDSAVYFCARSITTVVGCAMDYWGQGTSVTVSSTREDLKNVFPPEVAVFEPSEAEISHTQKATLVCLATGFYPDHVELSWWVNGKEVHSGVCTDPQPLKEQPALNDSRYCLSSRLRVSATFWQNPRNHFRCQVQFYGLSENDEWTQDRAKPVTQIVSAEAWGRADDVIKIHWQEKKSNTILGSQEGNTMKTNDTYMKFSWLTVPEKSLDKEHRCIVRHENNKNGVDQEIIFPPIKTDVITMDPKDNCSKDANDTLLLQLTNTSAYYMYLLLLLKSVVYFAIITCCLLMAMVKRKDSRG

SEQ ID NO: 15382 - protein, 869 aa, synthetic construct
MALPVTALLLPLALLLHAARPEVQLVESGGSLVQPGGSLRLSCAASGFTFDDYAMSWVRQVPGKGLEWVSSINWSGTHTDYADSVKGRFTISRNNANNTLYLQMNSLKSEDTAVYYCAKNWRDAGTTWFEKSGSAGQGTQVTVSSGTGGGGSGGGGSGGGGSEFDIQMTQSPSSLSASVGDRVTITCKASDHINNWLAWYQQKPGQAPKLLIYGATTLETGVPSRFSGSGSGTDYTLTISSLQPEDFATYYCQQSWNTPWTFGQGTKLEIKRLEDLKNVFPPEVAVFEPSEAEISHTQKATLVCLATGFYPDHVELSWWVNGKEVHSGVCTDPQPLKEQPALNDSRYCLSSRLRVSATFWQNPRNHFRCQVQFYGLSENDEWTQDRAKPVTQIVSAEAWGRADDVIKIHWQEKKSNTILGSQEGNTMKTNDTYMKFSWLTVPEKSLDKEHRCIVRHENNKNGVDQEIIFPPIKTDVITMDPKDNCSKDANDTLLLQLTNTSAYYMYLLLLLKSVVYFAIITCCLLMAMVKRKDSRGRAKRSGSGATNFSLLKQAGDVEENPGPTSMDWIWRILFLVGAATGAHSFEQVQLQQPGAELVKPGASVKMSCKASGYAFSSYWINWMKQKPGQGLEWIGQIYPGDGDTNYNGKFKGRATLTADTSSSTAYMQLSSLTSEDSAVYFCARSITTVVGCAMDYWGQGTSVTVSSTRIQNPDPAVYQLRDSKSSDKSVCLFTDFDSQTNVSQSKDSDVYITDKCVLDMRSMDFKSNSAVAWSNKSDFACANAFNNSIIPEDTFFPSPESSDSTDHVKPKETENTKQPSKSCHKPKAIVHTEKVNMMSLTVLGLRMLFAKTVAVNFLLTAKLFFLLTA

SEQ ID NO: 15383 - protein, 873 aa, synthetic construct
MALPVTALLLPLALLLHAARPEVQLVESGGSLVQPGGSLRLSCAASGFTFDDYAMSWVRQVPGKGLEWVSSINWSGTHTDYADSVKGRFTISRNNANNTLYLQMNSLKSEDTAVYYCAKNWRDAGTTWFEKSGSAGQGTQVTVSSGTGGGGSGGGGSGGGGSEFDIQMTQSPSSLSASVGDRVTITCKASDHINNWLAWYQQKPGQAPKLLIYGATTLETGVPSRFSGSGSGTDYTLTISSLQPEDFATYYCQQSWNTPWTFGQGTKLEIKRLEIQNPDPAVYQLRDSKSSDKSVCLFTDFDSQTNVSQSKDSDVYITDKCVLDMRSMDFKSNSAVAWSNKSDFACANAFNNSIIPEDTFFPSPESSDSTDHVKPKETENTKQPSKSCHKPKAIVHTEKVNMMSLTVLGLRMLFAKTVAVNFLLTAKLFFLLTARAKRSGSGVKQTLNFDLLKLAGDVESNPGPTSMDWIWRILFLVGAATGAHSFEQVQLQQPGAELVKPGASVKMSCKASGYAFSSYWINWMKQKPGQGLEWIGQIYPGDGDTNYNGKFKGRATLTADTSSSTAYMQLSSLTSEDSAVYFCARSITTVVGCAMDYWGQGTSVTVSSTREDLKNVFPPEVAVFEPSEAEISHTQKATLVCLATGFYPDHVELSWWVNGKEVHSGVCTDPQPLKEQPALNDSRYCLSSRLRVSATFWQNPRNHFRCQVQFYGLSENDEWTQDRAKPVTQIVSAEAWGRADDVIKIHWQEKKSNTILGSQEGNTMKTNDTYMKFSWLTVPEKSLDKEHRCIVRHENNKNGVDQEIIFPPIKTDVITMDPKDNCSKDANDTLLLQLTNTSAYYMYLLLLLKSVVYFAIITCCLLMAMVKRKDSRG

SEQ ID NO: 15384 - protein, 867 aa, synthetic construct
MALPVTALLLPLALLLHAARPEVQLLESGGGLVQPGGSLRLSCAASGFIFSSYAMSWVRQAPGKGQEWVSGVSGTGVNTYYADSVKGRFTISRDNSKNTLYLQMNSLRAEDTAVYYCASGKGWDSGSWYEDYRGQGTLVTVSSGTGGGGSGGGGSGGGGSEFDIQMTQSPSSLSASVGDRVTITCKASDHINNWLAWYQQKPGQAPKLLIYGATTLETGVPSRFSGSGSGTDYTLTISSLQPEDFATYYCQQSWNTPWTFGQGTKLEIKRLEDLKNVFPPEVAVFEPSEAEISHTQKATLVCLATGFYPDHVELSWWVNGKEVHSGVCTDPQPLKEQPALNDSRYCLSSRLRVSATFWQNPRNHFRCQVQFYGLSENDEWTQDRAKPVTQIVSAEAWGRADDVIKIHWQEKKSNTILGSQEGNTMKTNDTYMKFSWLTVPEKSLDKEHRCIVRHENNKNGVDQEIIFPPIKTDVITMDPKDNCSKDANDTLLLQLTNTSAYYMYLLLLLKSVVYFAIITCCLLMAMVKRKDSRGRAKRSGSGATNFSLLKQAGDVEENPGPTSMDWIWRILFLVGAATGAHSFEQVQLQQPGAELVKPGASVKMSCKASGYAFSSYWINWMKQKPGQGLEWIGQIYPGDGDTNYNGKFKGRATLTADTSSSTAYMQLSSLTSEDSAVYFCARSITTVVGCAMDYWGQGTSVTVSSTRIQNPDPAVYQLRDSKSSDKSVCLFTDFDSQTNVSQSKDSDVYITDKCVLDMRSMDFKSNSAVAWSNKSDFACANAFNNSIIPEDTFFPSPESSDSTDHVKPKETENTKQPSKSCHKPKAIVHTEKVNMMSLTVLGLRMLFAKTVAVNFLLTAKLFFLLTA

SEQ ID NO: 15385 - protein, 871 aa, synthetic construct
MALPVTALLLPLALLLHAARPEVQLLESGGGLVQPGGSLRLSCAASGFIFSSYAMSWVRQAPGKGQEWVSGVSGTGVNTYYADSVKGRFTISRDNSKNTLYLQMNSLRAEDTAVYYCASGKGWDSGSWYEDYRGQGTLVTVSSGTGGGGSGGGGSGGGGSEFDIQMTQSPSSLSASVGDRVTITCKASDHINNWLAWYQQKPGQAPKLLIYGATTLETGVPSRFSGSGSGTDYTLTISSLQPEDFATYYCQQSWNTPWTFGQGTKLEIKRLEIQNPDPAVYQLRDSKSSDKSVCLFTDFDSQTNVSQSKDSDVYITDKCVLDMRSMDFKSNSAVAWSNKSDFACANAFNNSIIPEDTFFPSPESSDSTDHVKPKETENTKQPSKSCHKPKAIVHTEKVNMMSLTVLGLRMLFAKTVAVNFLLTAKLFFLLTARAKRSGSGVKQTLNFDLLKLAGDVESNPGPTSMDWIWRILFLVGAATGAHSFEQVQLQQPGAELVKPGASVKMSCKASGYAFSSYWINWMKQKPGQGLEWIGQIYPGDGDTNYNGKFKGRATLTADTSSSTAYMQLSSLTSEDSAVYFCARSITTVVGCAMDYWGQGTSVTVSSTREDLKNVFPPEVAVFEPSEAEISHTQKATLVCLATGFYPDHVELSWWVNGKEVHSGVCTDPQPLKEQPALNDSRYCLSSRLRVSATFWQNPRNHFRCQVQFYGLSENDEWTQDRAKPVTQIVSAEAWGRADDVIKIHWQEKKSNTILGSQEGNTMKTNDTYMKFSWLTVPEKSLDKEHRCIVRHENNKNGVDQEIIFPPIKTDVITMDPKDNCSKDANDTLLLQLTNTSAYYMYLLLLLKSVVYFAIITCCLLMAMVKRKDSRG

SEQ ID NO: 15386 - protein, 835 aa, synthetic construct
MALPVTALLLPLALLLHAARPMLPAPKNLVVSRITEDSARLSWTAPDAAFDSFPIRYIETLIWGEAIWLDVPGSERSYDLTGLKPGTEYAVVITGVKGGRFSSPLVASFTTGTGGGGSGGGGSGGGGSEFDIQMTQSPSSLSASVGDRVTITCKASDHINNWLAWYQQKPGQAPKLLIYGATTLETGVPSRFSGSGSGTDYTLTISSLQPEDFATYYCQQSWNTPWTFGQGTKLEIKRLEDLKNVFPPEVAVFEPSEAEISHTQKATLVCLATGFYPDHVELSWWVNGKEVHSGVCTDPQPLKEQPALNDSRYCLSSRLRVSATFWQNPRNHFRCQVQFYGLSENDEWTQDRAKPVTQIVSAEAWGRADDVIKIHWQEKKSNTILGSQEGNTMKTNDTYMKFSWLTVPEKSLDKEHRCIVRHENNKNGVDQEIIFPPIKTDVITMDPKDNCSKDANDTLLLQLTNTSAYYMYLLLLLKSVVYFAIITCCLLMAMVKRKDSRGRAKRSGSGATNFSLLKQAGDVEENPGPTSMDWIWRILFLVGAATGAHSFEQVQLQQPGAELVKPGASVKMSCKASGYAFSSYWINWMKQKPGQGLEWIGQIYPGDGDTNYNGKFKGRATLTADTSSSTAYMQLSSLTSEDSAVYFCARSITTVVGCAMDYWGQGTSVTVSSTRIQNPDPAVYQLRDSKSSDKSVCLFTDFDSQTNVSQSKDSDVYITDKCVLDMRSMDFKSNSAVAWSNKSDFACANAFNNSIIPEDTFFPSPESSDSTDHVKPKETENTKQPSKSCHKPKAIVHTEKVNMMSLTVLGLRMLFAKTVAVNFLLTAKLFFLLTA

SEQ ID NO: 15387 - protein, 839 aa, synthetic construct
MALPVTALLLPLALLLHAARPMLPAPKNLVVSRITEDSARLSWTAPDAAFDSFPIRYIETLIWGEAIWLDVPGSERSYDLTGLKPGTEYAVVITGVKGGRFSSPLVASFTTGTGGGGSGGGGSGGGGSEFDIQMTQSPSSLSASVGDRVTITCKASDHINNWLAWYQQKPGQAPKLLIYGATTLETGVPSRFSGSGSGTDYTLTISSLQPEDFATYYCQQSWNTPWTFGQGTKLEIKRLEIQNPDPAVYQLRDSKSSDKSVCLFTDFDSQTNVSQSKDSDVYITDKCVLDMRSMDFKSNSAVAWSNKSDFACANAFNNSIIPEDTFFPSPESSDSTDHVKPKETENTKQPSKSCHKPKAIVHTEKVNMMSLTVLGLRMLFAKTVAVNFLLTAKLFFLLTARAKRSGSGVKQTLNFDLLKLAGDVESNPGPTSMDWIWRILFLVGAATGAHSFEQVQLQQPGAELVKPGASVKMSCKASGYAFSSYWINWMKQKPGQGLEWIGQIYPGDGDTNYNGKFKGRATLTADTSSSTAYMQLSSLTSEDSAVYFCARSITTVVGCAMDYWGQGTSVTVSSTREDLKNVFPPEVAVFEPSEAEISHTQKATLVCLATGFYPDHVELSWWVNGKEVHSGVCTDPQPLKEQPALNDSRYCLSSRLRVSATFWQNPRNHFRCQVQFYGLSENDEWTQDRAKPVTQIVSAEAWGRADDVIKIHWQEKKSNTILGSQEGNTMKTNDTYMKFSWLTVPEKSLDKEHRCIVRHENNKNGVDQEIIFPPIKTDVITMDPKDNCSKDANDTLLLQLTNTSAYYMYLLLLLKSVVYFAIITCCLLMAMVKRKDSRG

SEQ ID NO: 15388 - protein, 864 aa, synthetic construct
MALPVTALLLPLALLLHAARPEVQLVESGGGLVQPGGSLRLSCAASGFNIKDTCIGWVRRAPGKEEELVAKICKYSGHTRYADSVKGRFTISADTSKNTAYLQMNSLRAEDTAVYYCAAVSVRDGHYNYWGQGTTVTVSSGTGGGGSGGGGSGGGGSEFDIQMTQSPSSLSASVGDRVTITCKASDHINNWLAWYQQKPGQAPKLLIYGATTLETGVPSRFSGSGSGTDYTLTISSLQPEDFATYYCQQSWNTPWTFGQGTKLEIKRLEDLKNVFPPEVAVFEPSEAEISHTQKATLVCLATGFYPDHVELSWWVNGKEVHSGVCTDPQPLKEQPALNDSRYCLSSRLRVSATFWQNPRNHFRCQVQFYGLSENDEWTQDRAKPVTQIVSAEAWGRADDVIKIHWQEKKSNTILGSQEGNTMKTNDTYMKFSWLTVPEKSLDKEHRCIVRHENNKNGVDQEIIFPPIKTDVITMDPKDNCSKDANDTLLLQLTNTSAYYMYLLLLLKSVVYFAIITCCLLMAMVKRKDSRGRAKRSGSGATNFSLLKQAGDVEENPGPTSMDWIWRILFLVGAATGAHSFEQVQLQQPGAELVKPGASVKMSCKASGYAFSSYWINWMKQKPGQGLEWIGQIYPGDGDTNYNGKFKGRATLTADTSSSTAYMQLSSLTSEDSAVYFCARSITTVVGCAMDYWGQGTSVTVSSTRIQNPDPAVYQLRDSKSSDKSVCLFTDFDSQTNVSQSKDSDVYITDKCVLDMRSMDFKSNSAVAWSNKSDFACANAFNNSIIPEDTFFPSPESSDSTDHVKPKETENTKQPSKSCHKPKAIVHTEKVNMMSLTVLGLRMLFAKTVAVNFLLTAKLFFLLTA

SEQ ID NO: 15389 - protein, 868 aa, synthetic construct
MALPVTALLLPLALLLHAARPEVQLVESGGGLVQPGGSLRLSCAASGFNIKDTCIGWVRRAPGKEEELVAKICKYSGHTRYADSVKGRFTISADTSKNTAYLQMNSLRAEDTAVYYCAAVSVRDGHYNYWGQGTTVTVSSGTGGGGSGGGGSGGGGSEFDIQMTQSPSSLSASVGDRVTITCKASDHINNWLAWYQQKPGQAPKLLIYGATTLETGVPSRFSGSGSGTDYTLTISSLQPEDFATYYCQQSWNTPWTFGQGTKLEIKRLEIQNPDPAVYQLRDSKSSDKSVCLFTDFDSQTNVSQSKDSDVYITDKCVLDMRSMDFKSNSAVAWSNKSDFACANAFNNSIIPEDTFFPSPESSDSTDHVKPKETENTKQPSKSCHKPKAIVHTEKVNMMSLTVLGLRMLFAKTVAVNFLLTAKLFFLLTARAKRSGSGVKQTLNFDLLKLAGDVESNPGPTSMDWIWRILFLVGAATGAHSFEQVQLQQPGAELVKPGASVKMSCKASGYAFSSYWINWMKQKPGQGLEWIGQIYPGDGDTNYNGKFKGRATLTADTSSSTAYMQLSSLTSEDSAVYFCARSITTVVGCAMDYWGQGTSVTVSSTREDLKNVFPPEVAVFEPSEAEISHTQKATLVCLATGFYPDHVELSWWVNGKEVHSGVCTDPQPLKEQPALNDSRYCLSSRLRVSATFWQNPRNHFRCQVQFYGLSENDEWTQDRAKPVTQIVSAEAWGRADDVIKIHWQEKKSNTILGSQEGNTMKTNDTYMKFSWLTVPEKSLDKEHRCIVRHENNKNGVDQEIIFPPIKTDVITMDPKDNCSKDANDTLLLQLTNTSAYYMYLLLLLKSVVYFAIITCCLLMAMVKRKDSRG

SEQ ID NO: 15390 - protein, 741 aa, synthetic construct
MALPVTALLLPLALLLHAARPQLQLQESGPGLVKPSETLSLTCTVSGDSISSGDYYWGWIRQPPGKGLEWIGHIYYSGVTYYNPSLKSRVTISVDTSRNQFSLKLSSVTAADTAVYYCTREDSSNWRSRGQGTLVTVSSLEDLKNVFPPEVAVFEPSEAEISHTQKATLVCLATGFYPDHVELSWWVNGKEVHSGVCTDPQPLKEQPALNDSRYCLSSRLRVSATFWQNPRNHFRCQVQFYGLSENDEWTQDRAKPVTQIVSAEAWGRADDVIKIHWQEKKSNTILGSQEGNTMKTNDTYMKFSWLTVPEKSLDKEHRCIVRHENNKNGVDQEIIFPPIKTDVITMDPKDNCSKDANDTLLLQLTNTSAYYMYLLLLLKSVVYFAIITCCLLMAMVKRKDSRGRAKRSGSGATNFSLLKQAGDVEENPGPTSMDWIWRILFLVGAATGAHSFEVQLVESGGGVVQPGRSLRLSCAASGFSFSGYGMHWVRQAPGKGLEWVAYISYDGSNKYYADSVKGRFTISRDNSKNTLYLQMNSLRAEDTAVYYCAKDPAWGLRLGESSSYDFDIWGQGTMVTVSSTRIQNPDPAVYQLRDSKSSDKSVCLFTDFDSQTNVSQSKDSDVYITDKCVLDMRSMDFKSNSAVAWSNKSDFACANAFNNSIIPEDTFFPSPESSDSTDHVKPKETENTKQPSKSCHKPKAIVHTEKVNMMSLTVLGLRMLFAKTVAVNFLLTAKLFFLLTA

SEQ ID NO: 15391 - protein, 745 aa, synthetic construct
MALPVTALLLPLALLLHAARPQLQLQESGPGLVKPSETLSLTCTVSGDSISSGDYYWGWIRQPPGKGLEWIGHIYYSGVTYYNPSLKSRVTISVDTSRNQFSLKLSSVTAADTAVYYCTREDSSNWRSRGQGTLVTVSSLEIQNPDPAVYQLRDSKSSDKSVCLFTDFDSQTNVSQSKDSDVYITDKCVLDMRSMDFKSNSAVAWSNKSDFACANAFNNSIIPEDTFFPSPESSDSTDHVKPKETENTKQPSKSCHKPKAIVHTEKVNMMSLTVLGLRMLFAKTVAVNFLLTAKLFFLLTARAKRSGSGVKQTLNFDLLKLAGDVESNPGPTSMDWIWRILFLVGAATGAHSFEVQLVESGGGVVQPGRSLRLSCAASGFSFSGYGMHWVRQAPGKGLEWVAYISYDGSNKYYADSVKGRFTISRDNSKNTLYLQMNSLRAEDTAVYYCAKDPAWGLRLGESSSYDFDIWGQGTMVTVSSTREDLKNVFPPEVAVFEPSEAEISHTQKATLVCLATGFYPDHVELSWWVNGKEVHSGVCTDPQPLKEQPALNDSRYCLSSRLRVSATFWQNPRNHFRCQVQFYGLSENDEWTQDRAKPVTQIVSAEAWGRADDVIKIHWQEKKSNTILGSQEGNTMKTNDTYMKFSWLTVPEKSLDKEHRCIVRHENNKNGVDQEIIFPPIKTDVITMDPKDNCSKDANDTLLLQLTNTSAYYMYLLLLLKSVVYFAIITCCLLMAMVKRKDSRG

SEQ ID NO: 15392 - protein, 730 aa, synthetic construct
MALPVTALLLPLALLLHAARPQLQLQESGPGLVKPSETLSLTCTVSGDSISSGDYYWGWIRQPPGKGLEWIGHIYYSGVTYYNPSLKSRVTISVDTSRNQFSLKLSSVTAADTAVYYCTREDSSNWRSRGQGTLVTVSSLEDLKNVFPPEVAVFEPSEAEISHTQKATLVCLATGFYPDHVELSWWVNGKEVHSGVCTDPQPLKEQPALNDSRYCLSSRLRVSATFWQNPRNHFRCQVQFYGLSENDEWTQDRAKPVTQIVSAEAWGRADDVIKIHWQEKKSNTILGSQEGNTMKTNDTYMKFSWLTVPEKSLDKEHRCIVRHENNKNGVDQEIIFPPIKTDVITMDPKDNCSKDANDTLLLQLTNTSAYYMYLLLLLKSVVYFAIITCCLLMAMVKRKDSRGRAKRSGSGATNFSLLKQAGDVEENPGPTSMDWIWRILFLVGAATGAHSFEVQLVESGGGLVQPGGSLRLSCAASGFSFSDFWMSWVRQAPGKGLEWVATISQAGSEKDYVDSVKGRFTISRDNAKKSLYLQMNSLRAEDTAVYYCASGVYSFDYRGQGTLVTVSSTRIQNPDPAVYQLRDSKSSDKSVCLFTDFDSQTNVSQSKDSDVYITDKCVLDMRSMDFKSNSAVAWSNKSDFACANAFNNSIIPEDTFFPSPESSDSTDHVKPKETENTKQPSKSCHKPKAIVHTEKVNMMSLTVLGLRMLFAKTVAVNFLLTAKLFFLLTA

SEQ ID NO: 15393 - protein, 734 aa, synthetic construct
MALPVTALLLPLALLLHAARPQLQLQESGPGLVKPSETLSLTCTVSGDSISSGDYYWGWIRQPPGKGLEWIGHIYYSGVTYYNPSLKSRVTISVDTSRNQFSLKLSSVTAADTAVYYCTREDSSNWRSRGQGTLVTVSSLEIQNPDPAVYQLRDSKSSDKSVCLFTDFDSQTNVSQSKDSDVYITDKCVLDMRSMDFKSNSAVAWSNKSDFACANAFNNSIIPEDTFFPSPESSDSTDHVKPKETENTKQPSKSCHKPKAIVHTEKVNMMSLTVLGLRMLFAKTVAVNFLLTAKLFFLLTARAKRSGSGVKQTLNFDLLKLAGDVESNPGPTSMDWIWRILFLVGAATGAHSFEVQLVESGGGLVQPGGSLRLSCAASGFSFSDFWMSWVRQAPGKGLEWVATISQAGSEKDYVDSVKGRFTISRDNAKKSLYLQMNSLRAEDTAVYYCASGVYSFDYRGQGTLVTVSSTREDLKNVFPPEVAVFEPSEAEISHTQKATLVCLATGFYPDHVELSWWVNGKEVHSGVCTDPQPLKEQPALNDSRYCLSSRLRVSATFWQNPRNHFRCQVQFYGLSENDEWTQDRAKPVTQIVSAEAWGRADDVIKIHWQEKKSNTILGSQEGNTMKTNDTYMKFSWLTVPEKSLDKEHRCIVRHENNKNGVDQEIIFPPIKTDVITMDPKDNCSKDANDTLLLQLTNTSAYYMYLLLLLKSVVYFAIITCCLLMAMVKRKDSRG

SEQ ID NO: 15394 - protein, 732 aa, synthetic construct
MALPVTALLLPLALLLHAARPQLQLQESGPGLVKPSETLSLTCTVSGDSISSGDYYWGWIRQPPGKGLEWIGHIYYSGVTYYNPSLKSRVTISVDTSRNQFSLKLSSVTAADTAVYYCTREDSSNWRSRGQGTLVTVSSLEDLKNVFPPEVAVFEPSEAEISHTQKATLVCLATGFYPDHVELSWWVNGKEVHSGVCTDPQPLKEQPALNDSRYCLSSRLRVSATFWQNPRNHFRCQVQFYGLSENDEWTQDRAKPVTQIVSAEAWGRADDVIKIHWQEKKSNTILGSQEGNTMKTNDTYMKFSWLTVPEKSLDKEHRCIVRHENNKNGVDQEIIFPPIKTDVITMDPKDNCSKDANDTLLLQLTNTSAYYMYLLLLLKSVVYFAIITCCLLMAMVKRKDSRGRAKRSGSGATNFSLLKQAGDVEENPGPTSMDWIWRILFLVGAATGAHSFQVQLVESGGGLVQPGGSLRLSCAASGFTFTNHAMSWVRQAPGKGLELVSSISGNGRTTYYADSVKGRFTISRDISKNTLDLQMNSLRAEDTAVYYCAKDGGETLVDSRGQGTLVTVSSTRIQNPDPAVYQLRDSKSSDKSVCLFTDFDSQTNVSQSKDSDVYITDKCVLDMRSMDFKSNSAVAWSNKSDFACANAFNNSIIPEDTFFPSPESSDSTDHVKPKETENTKQPSKSCHKPKAIVHTEKVNMMSLTVLGLRMLFAKTVAVNFLLTAKLFFLLTA

SEQ ID NO: 15395 - protein, 736 aa, synthetic construct
MALPVTALLLPLALLLHAARPQLQLQESGPGLVKPSETLSLTCTVSGDSISSGDYYWGWIRQPPGKGLEWIGHIYYSGVTYYNPSLKSRVTISVDTSRNQFSLKLSSVTAADTAVYYCTREDSSNWRSRGQGTLVTVSSLEIQNPDPAVYQLRDSKSSDKSVCLFTDFDSQTNVSQSKDSDVYITDKCVLDMRSMDFKSNSAVAWSNKSDFACANAFNNSIIPEDTFFPSPESSDSTDHVKPKETENTKQPSKSCHKPKAIVHTEKVNMMSLTVLGLRMLFAKTVAVNFLLTAKLFFLLTARAKRSGSGVKQTLNFDLLKLAGDVESNPGPTSMDWIWRILFLVGAATGAHSFQVQLVESGGGLVQPGGSLRLSCAASGFTFTNHAMSWVRQAPGKGLELVSSISGNGRTTYYADSVKGRFTISRDISKNTLDLQMNSLRAEDTAVYYCAKDGGETLVDSRGQGTLVTVSSTREDLKNVFPPEVAVFEPSEAEISHTQKATLVCLATGFYPDHVELSWWVNGKEVHSGVCTDPQPLKEQPALNDSRYCLSSRLRVSATFWQNPRNHFRCQVQFYGLSENDEWTQDRAKPVTQIVSAEAWGRADDVIKIHWQEKKSNTILGSQEGNTMKTNDTYMKFSWLTVPEKSLDKEHRCIVRHENNKNGVDQEIIFPPIKTDVITMDPKDNCSKDANDTLLLQLTNTSAYYMYLLLLLKSVVYFAIITCCLLMAMVKRKDSRG

SEQ ID NO: 15396 - protein, 731 aa, synthetic construct
MALPVTALLLPLALLLHAARPEVQLLESGGGLIQPGGSLRLSCAASGFTFSSHAMTWVRQAPGKGLEWVSAISGSGDYTHYADSVKGRFTISRDNSKNTVYLQMNSLRAEDSAVYYCAKDEDGGSLLGHRGQGTLVTVSSLEDLKNVFPPEVAVFEPSEAEISHTQKATLVCLATGFYPDHVELSWWVNGKEVHSGVCTDPQPLKEQPALNDSRYCLSSRLRVSATFWQNPRNHFRCQVQFYGLSENDEWTQDRAKPVTQIVSAEAWGRADDVIKIHWQEKKSNTILGSQEGNTMKTNDTYMKFSWLTVPEKSLDKEHRCIVRHENNKNGVDQEIIFPPIKTDVITMDPKDNCSKDANDTLLLQLTNTSAYYMYLLLLLKSVVYFAIITCCLLMAMVKRKDSRGRAKRSGSGATNFSLLKQAGDVEENPGPTSMDWIWRILFLVGAATGAHSFEVQLVESGGGLVQPGGSLRLSCAASGFSFSDFWMSWVRQAPGKGLEWVATISQAGSEKDYVDSVKGRFTISRDNAKKSLYLQMNSLRAEDTAVYYCASGVYSFDYRGQGTLVTVSSTRIQNPDPAVYQLRDSKSSDKSVCLFTDFDSQTNVSQSKDSDVYITDKCVLDMRSMDFKSNSAVAWSNKSDFACANAFNNSIIPEDTFFPSPESSDSTDHVKPKETENTKQPSKSCHKPKAIVHTEKVNMMSLTVLGLRMLFAKTVAVNFLLTAKLFFLLTA

SEQ ID NO: 15397 - protein, 735 aa, synthetic construct
MALPVTALLLPLALLLHAARPEVQLLESGGGLIQPGGSLRLSCAASGFTFSSHAMTWVRQAPGKGLEWVSAISGSGDYTHYADSVKGRFTISRDNSKNTVYLQMNSLRAEDSAVYYCAKDEDGGSLLGHRGQGTLVTVSSLEIQNPDPAVYQLRDSKSSDKSVCLFTDFDSQTNVSQSKDSDVYITDKCVLDMRSMDFKSNSAVAWSNKSDFACANAFNNSIIPEDTFFPSPESSDSTDHVKPKETENTKQPSKSCHKPKAIVHTEKVNMMSLTVLGLRMLFAKTVAVNFLLTAKLFFLLTARAKRSGSGVKQTLNFDLLKLAGDVESNPGPTSMDWIWRILFLVGAATGAHSFEVQLVESGGGLVQPGGSLRLSCAASGFSFSDFWMSWVRQAPGKGLEWVATISQAGSEKDYVDSVKGRFTISRDNAKKSLYLQMNSLRAEDTAVYYCASGVYSFDYRGQGTLVTVSSTREDLKNVFPPEVAVFEPSEAEISHTQKATLVCLATGFYPDHVELSWWVNGKEVHSGVCTDPQPLKEQPALNDSRYCLSSRLRVSATFWQNPRNHFRCQVQFYGLSENDEWTQDRAKPVTQIVSAEAWGRADDVIKIHWQEKKSNTILGSQEGNTMKTNDTYMKFSWLTVPEKSLDKEHRCIVRHENNKNGVDQEIIFPPIKTDVITMDPKDNCSKDANDTLLLQLTNTSAYYMYLLLLLKSVVYFAIITCCLLMAMVKRKDSRG

SEQ ID NO: 15398 - protein, 737 aa, synthetic construct
MALPVTALLLPLALLLHAARPQVQLVESGGGLVQPGGSLRLSCAASGFTFTNHAMSWVRQAPGKGLELVSSISGNGRTTYYADSVKGRFTISRDISKNTLDLQMNSLRAEDTAVYYCAKDGGETLVDSRGQGTLVTVSSLEDLKNVFPPEVAVFEPSEAEISHTQKATLVCLATGFYPDHVELSWWVNGKEVHSGVCTDPQPLKEQPALNDSRYCLSSRLRVSATFWQNPRNHFRCQVQFYGLSENDEWTQDRAKPVTQIVSAEAWGRADDVIKIHWQEKKSNTILGSQEGNTMKTNDTYMKFSWLTVPEKSLDKEHRCIVRHENNKNGVDQEIIFPPIKTDVITMDPKDNCSKDANDTLLLQLTNTSAYYMYLLLLLKSVVYFAIITCCLLMAMVKRKDSRGRAKRSGSGATNFSLLKQAGDVEENPGPTSMDWIWRILFLVGAATGAHSFEEVQLLESGGGLVQPGGSLRLSCAASGFIFSSYAMSWVRQAPGKGQEWVSGVSGTGVNTYYADSVKGRFTISRDNSKNTLYLQMNSLRAEDTAVYYCASGKGWDSGSWYEDYRGQGTLVTVSSTRIQNPDPAVYQLRDSKSSDKSVCLFTDFDSQTNVSQSKDSDVYITDKCVLDMRSMDFKSNSAVAWSNKSDFACANAFNNSIIPEDTFFPSPESSDSTDHVKPKETENTKQPSKSCHKPKAIVHTEKVNMMSLTVLGLRMLFAKTVAVNFLLTAKLFFLLTA

SEQ ID NO: 15399 - protein, 741 aa, synthetic construct
MALPVTALLLPLALLLHAARPQVQLVESGGGLVQPGGSLRLSCAASGFTFTNHAMSWVRQAPGKGLELVSSISGNGRTTYYADSVKGRFTISRDISKNTLDLQMNSLRAEDTAVYYCAKDGGETLVDSRGQGTLVTVSSLEIQNPDPAVYQLRDSKSSDKSVCLFTDFDSQTNVSQSKDSDVYITDKCVLDMRSMDFKSNSAVAWSNKSDFACANAFNNSIIPEDTFFPSPESSDSTDHVKPKETENTKQPSKSCHKPKAIVHTEKVNMMSLTVLGLRMLFAKTVAVNFLLTAKLFFLLTARAKRSGSGVKQTLNFDLLKLAGDVESNPGPTSMDWIWRILFLVGAATGAHSFEEVQLLESGGGLVQPGGSLRLSCAASGFIFSSYAMSWVRQAPGKGQEWVSGVSGTGVNTYYADSVKGRFTISRDNSKNTLYLQMNSLRAEDTAVYYCASGKGWDSGSWYEDYRGQGTLVTVSSTREDLKNVFPPEVAVFEPSEAEISHTQKATLVCLATGFYPDHVELSWWVNGKEVHSGVCTDPQPLKEQPALNDSRYCLSSRLRVSATFWQNPRNHFRCQVQFYGLSENDEWTQDRAKPVTQIVSAEAWGRADDVIKIHWQEKKSNTILGSQEGNTMKTNDTYMKFSWLTVPEKSLDKEHRCIVRHENNKNGVDQEIIFPPIKTDVITMDPKDNCSKDANDTLLLQLTNTSAYYMYLLLLLKSVVYFAIITCCLLMAMVKRKDSRG

SEQ ID NO: 15400 - protein, 733 aa, synthetic construct
MALPVTALLLPLALLLHAARPEVQLVESGGGLVQAGGSLRLSCAASGRTFSMGWFRQAPGKEREFVAAITYSGGSPYYADSVKGRFTISRDNAKNTVYLQMNSLKPEDTAVYYCAANPTYGSDWNAENWGQGTQVTVSSLEDLKNVFPPEVAVFEPSEAEISHTQKATLVCLATGFYPDHVELSWWVNGKEVHSGVCTDPQPLKEQPALNDSRYCLSSRLRVSATFWQNPRNHFRCQVQFYGLSENDEWTQDRAKPVTQIVSAEAWGRADDVIKIHWQEKKSNTILGSQEGNTMKTNDTYMKFSWLTVPEKSLDKEHRCIVRHENNKNGVDQEIIFPPIKTDVITMDPKDNCSKDANDTLLLQLTNTSAYYMYLLLLLKSVVYFAIITCCLLMAMVKRKDSRGRAKRSGSGATNFSLLKQAGDVEENPGPTSMDWIWRILFLVGAATGAHSFEQLQLQESGPGLVKPSETLSLTCTVSGGSISSGDYYWGWIRQPPGKGLEWIGSISYSGSTYYNPSLKSRVTISVDTSRNQFSLKLSSVTAADTAVYYCTREDSSNWRSRGQGTLVTVSSTRIQNPDPAVYQLRDSKSSDKSVCLFTDFDSQTNVSQSKDSDVYITDKCVLDMRSMDFKSNSAVAWSNKSDFACANAFNNSIIPEDTFFPSPESSDSTDHVKPKETENTKQPSKSCHKPKAIVHTEKVNMMSLTVLGLRMLFAKTVAVNFLLTAKLFFLLTA

SEQ ID NO: 15401 - protein, 737 aa, synthetic construct
MALPVTALLLPLALLLHAARPEVQLVESGGGLVQAGGSLRLSCAASGRTFSMGWFRQAPGKEREFVAAITYSGGSPYYADSVKGRFTISRDNAKNTVYLQMNSLKPEDTAVYYCAANPTYGSDWNAENWGQGTQVTVSSLEIQNPDPAVYQLRDSKSSDKSVCLFTDFDSQTNVSQSKDSDVYITDKCVLDMRSMDFKSNSAVAWSNKSDFACANAFNNSIIPEDTFFPSPESSDSTDHVKPKETENTKQPSKSCHKPKAIVHTEKVNMMSLTVLGLRMLFAKTVAVNFLLTAKLFFLLTARAKRSGSGVKQTLNFDLLKLAGDVESNPGPTSMDWIWRILFLVGAATGAHSFEQLQLQESGPGLVKPSETLSLTCTVSGGSISSGDYYWGWIRQPPGKGLEWIGSISYSGSTYYNPSLKSRVTISVDTSRNQFSLKLSSVTAADTAVYYCTREDSSNWRSRGQGTLVTVSSTREDLKNVFPPEVAVFEPSEAEISHTQKATLVCLATGFYPDHVELSWWVNGKEVHSGVCTDPQPLKEQPALNDSRYCLSSRLRVSATFWQNPRNHFRCQVQFYGLSENDEWTQDRAKPVTQIVSAEAWGRADDVIKIHWQEKKSNTILGSQEGNTMKTNDTYMKFSWLTVPEKSLDKEHRCIVRHENNKNGVDQEIIFPPIKTDVITMDPKDNCSKDANDTLLLQLTNTSAYYMYLLLLLKSVVYFAIITCCLLMAMVKRKDSRG

SEQ ID NO: 15402 - protein, 1235 aa, synthetic construct
MALPVTALLLPLALLLHAARPEVQLVESGGGLVQAGGSLRLSCAASGRTFSMGWFRQAPGKEREFVAAITYSGGSPYYADSVKGRFTISRDNAKNTVYLQMNSLKPEDTAVYYCAANPTYGSDWNAENWGQGTQVTVSSGTGGGGSGGGGSGGGGSEFDIQMTQSPSSLSASVGDRVTITCKASDHINNWLAWYQQKPGQAPKLLIYGATTLETGVPSRFSGSGSGTDYTLTISSLQPEDFATYYCQQSWNTPWTFGQGTKLEIKRLEDLKNVFPPEVAVFEPSEAEISHTQKATLVCLATGFYPDHVELSWWVNGKEVHSGVCTDPQPLKEQPALNDSRYCLSSRLRVSATFWQNPRNHFRCQVQFYGLSENDEWTQDRAKPVTQIVSAEAWGRADDVIKIHWQEKKSNTILGSQEGNTMKTNDTYMKFSWLTVPEKSLDKEHRCIVRHENNKNGVDQEIIFPPIKTDVITMDPKDNCSKDANDTLLLQLTNTSAYYMYLLLLLKSVVYFAIITCCLLMAMVKRKDSRGRAKRSGSGATNFSLLKQAGDVEENPGPTSATMDWIWRILFLVGAATGAHSGPEVQLVESGGGLVQAGGSLRLSCAASGRTFTMGWFRQAPGKEREFVAAISLSPTLAYYADSVKGRFTISRDNAKNTVVLQMNSLKPEDTALYYCAADRKSVMSIRPDYWGQGTQVTVSSGSGGGGSGGGGSGGGGSFEQVQLQQPGAELVKPGASVKMSCKASGYAFSSYWINWMKQKPGQGLEWIGQIYPGDGDTNYNGKFKGRATLTADTSSSTAYMQLSSLTSEDSAVYFCARSITTVVGCAMDYWGQGTSVTVSSTRIQNPDPAVYQLRDSKSSDKSVCLFTDFDSQTNVSQSKDSDVYITDKCVLDMRSMDFKSNSAVAWSNKSDFACANAFNNSIIPEDTFFPSPESSDSTDHVKPKETENTKQPSKSCHKPKAIVHTEKVNMMSLTVLGLRMLFAKTVAVNFLLTAKLFFLLTARAKRSGSGVKQTLNFDLLKLAGDVESNPGPSRGHMTEYKPTVRLATRDDVPRAVRTLAAAFADYPATRHTVDPDRHIERVTELQELFLTRVGLDIGKVWVADDGAAVAVWTTPESVEAGAVFAEIGPRMAELSGSRLAAQQQMEGLLAPHRPKEPAWFLATVGVSPDHQGKGLGSAVVLPGVEAAERAGVPAFLETSAPRNLPFYERLGFTVTADVEVPEGPRTWCMTRKPGA

SEQ ID NO: 15403 - protein, 873 aa, synthetic construct
MALPVTALLLPLALLLHAARPEVQLVESGGGLVQPGGSLRLSCAASGFASDYYIIGWFRQAPGKEREGVSCISSRYANTNYADSVKGRFTISRDNAKNTVYLQMNSLKPEDTAVYYCAADTRRYTCPDIATMHRNFDSWGQGTLVTVSSGTGGGGSGGGGSGGGGSEFDIQMTQSPSSLSASVGDRVTITCKASDHINNWLAWYQQKPGQAPKLLIYGATTLETGVPSRFSGSGSGTDYTLTISSLQPEDFATYYCQQSWNTPWTFGQGTKLEIKRLEDLKNVFPPEVAVFEPSEAEISHTQKATLVCLATGFYPDHVELSWWVNGKEVHSGVCTDPQPLKEQPALNDSRYCLSSRLRVSATFWQNPRNHFRCQVQFYGLSENDEWTQDRAKPVTQIVSAEAWGRADDVIKIHWQEKKSNTILGSQEGNTMKTNDTYMKFSWLTVPEKSLDKEHRCIVRHENNKNGVDQEIIFPPIKTDVITMDPKDNCSKDANDTLLLQLTNTSAYYMYLLLLLKSVVYFAIITCCLLMAMVKRKDSRGRAKRSGSGATNFSLLKQAGDVEENPGPTSMDWIWRILFLVGAATGAHSFEQVQLQQPGAELVKPGASVKMSCKASGYAFSSYWINWMKQKPGQGLEWIGQIYPGDGDTNYNGKFKGRATLTADTSSSTAYMQLSSLTSEDSAVYFCARSITTVVGCAMDYWGQGTSVTVSSTRIQNPDPAVYQLRDSKSSDKSVCLFTDFDSQTNVSQSKDSDVYITDKCVLDMRSMDFKSNSAVAWSNKSDFACANAFNNSIIPEDTFFPSPESSDSTDHVKPKETENTKQPSKSCHKPKAIVHTEKVNMMSLTVLGLRMLFAKTVAVNFLLTAKLFFLLTA

SEQ ID NO: 15404 - protein, 873 aa, synthetic construct
MALPVTALLLPLALLLHAARPEVQLVESGGGLVQPGGSLRLSCEASGFASDDYIIGWFRQAPGKEREGVSCISSKYANTVYTDSVKGRFRLSRGTAKNTVYLQMSALKPEDTAVYYCAMDSRRVTCPEISTMHRNFDSWGQGTLVTVSSGTGGGGSGGGGSGGGGSEFDIQMTQSPSSLSASVGDRVTITCKASDHINNWLAWYQQKPGQAPKLLIYGATTLETGVPSRFSGSGSGTDYTLTISSLQPEDFATYYCQQSWNTPWTFGQGTKLEIKRLEDLKNVFPPEVAVFEPSEAEISHTQKATLVCLATGFYPDHVELSWWVNGKEVHSGVCTDPQPLKEQPALNDSRYCLSSRLRVSATFWQNPRNHFRCQVQFYGLSENDEWTQDRAKPVTQIVSAEAWGRADDVIKIHWQEKKSNTILGSQEGNTMKTNDTYMKFSWLTVPEKSLDKEHRCIVRHENNKNGVDQEIIFPPIKTDVITMDPKDNCSKDANDTLLLQLTNTSAYYMYLLLLLKSVVYFAIITCCLLMAMVKRKDSRGRAKRSGSGATNFSLLKQAGDVEENPGPTSMDWIWRILFLVGAATGAHSFEQVQLQQPGAELVKPGASVKMSCKASGYAFSSYWINWMKQKPGQGLEWIGQIYPGDGDTNYNGKFKGRATLTADTSSSTAYMQLSSLTSEDSAVYFCARSITTVVGCAMDYWGQGTSVTVSSTRIQNPDPAVYQLRDSKSSDKSVCLFTDFDSQTNVSQSKDSDVYITDKCVLDMRSMDFKSNSAVAWSNKSDFACANAFNNSIIPEDTFFPSPESSDSTDHVKPKETENTKQPSKSCHKPKAIVHTEKVNMMSLTVLGLRMLFAKTVAVNFLLTAKLFFLLTA

SEQ ID NO: 15405 - protein, 877 aa, synthetic construct
MALPVTALLLPLALLLHAARPEVQLVESGGGLVQPGGSLRLSCAASGFASDYYIIGWFRQAPGKEREGVSCISSRYANTNYADSVKGRFTISRDNAKNTVYLQMNSLKPEDTAVYYCAADTRRYTCPDIATMHRNFDSWGQGTLVTVSSGTGGGGSGGGGSGGGGSEFDIQMTQSPSSLSASVGDRVTITCKASDHINNWLAWYQQKPGQAPKLLIYGATTLETGVPSRFSGSGSGTDYTLTISSLQPEDFATYYCQQSWNTPWTFGQGTKLEIKRLEIQNPDPAVYQLRDSKSSDKSVCLFTDFDSQTNVSQSKDSDVYITDKCVLDMRSMDFKSNSAVAWSNKSDFACANAFNNSIIPEDTFFPSPESSDSTDHVKPKETENTKQPSKSCHKPKAIVHTEKVNMMSLTVLGLRMLFAKTVAVNFLLTAKLFFLLTARAKRSGSGVKQTLNFDLLKLAGDVESNPGPTSMDWIWRILFLVGAATGAHSFEQVQLQQPGAELVKPGASVKMSCKASGYAFSSYWINWMKQKPGQGLEWIGQIYPGDGDTNYNGKFKGRATLTADTSSSTAYMQLSSLTSEDSAVYFCARSITTVVGCAMDYWGQGTSVTVSSTREDLKNVFPPEVAVFEPSEAEISHTQKATLVCLATGFYPDHVELSWWVNGKEVHSGVCTDPQPLKEQPALNDSRYCLSSRLRVSATFWQNPRNHFRCQVQFYGLSENDEWTQDRAKPVTQIVSAEAWGRADDVIKIHWQEKKSNTILGSQEGNTMKTNDTYMKFSWLTVPEKSLDKEHRCIVRHENNKNGVDQEIIFPPIKTDVITMDPKDNCSKDANDTLLLQLTNTSAYYMYLLLLLKSVVYFAIITCCLLMAMVKRKDSRG

SEQ ID NO: 15406 - protein, 773 aa, synthetic construct; identical to SEQ ID NO: 14369

SEQ ID NO: 15407 - protein, 760 aa, synthetic construct; identical to SEQ ID NO: 13334

SEQ ID NO: 15408 - protein, 865 aa, synthetic construct
MALPVTALLLPLALLLHAARPDIQMTQSPSSLSASVGDRVTITCKASDHINNWLAWYQQKPGQAPKLLIYGATTLETGVPSRFSGSGSGTDYTLTISSLQPEDFATYYCQQSWNTPWTFGQGTKLEIKRLEDLKNVFPPEVAVFEPSEAEISHTQKATLVCLATGFYPDHVELSWWVNGKEVHSGVCTDPQPLKEQPALNDSRYCLSSRLRVSATFWQNPRNHFRCQVQFYGLSENDEWTQDRAKPVTQIVSAEAWGRADDVIKIHWQEKKSNTILGSQEGNTMKTNDTYMKFSWLTVPEKSLDKEHRCIVRHENNKNGVDQEIIFPPIKTDVITMDPKDNCSKDANDTLLLQLTNTSAYYMYLLLLLKSVVYFAIITCCLLMAMVKRKDSRGRAKRSGSGATNFSLLKQAGDVEENPGPTSATMDWIWRILFLVGAATGAHSGPEVQLVESGGGLVQAGGSLRLSCAASGRTFSMGWFRQAPGKEREFVAAITYSGGSPYYADSVKGRFTISRDNAKNTVYLQMNSLKPEDTAVYYCAANPTYGSDWNAENWGQGTQVTVSSGSGGGGSGGGGSGGGGSFEQVQLQQPGAELVKPGASVKMSCKASGYAFSSYWINWMKQKPGQGLEWIGQIYPGDGDTNYNGKFKGRATLTADTSSSTAYMQLSSLTSEDSAVYFCARSITTVVGCAMDYWGQGTSVTVSSTRIQNPDPAVYQLRDSKSSDKSVCLFTDFDSQTNVSQSKDSDVYITDKCVLDMRSMDFKSNSAVAWSNKSDFACANAFNNSIIPEDTFFPSPESSDSTDHVKPKETENTKQPSKSCHKPKAIVHTEKVNMMSLTVLGLRMLFAKTVAVNFLLTAKLFFLLTA

SEQ ID NO: 15409 - protein, 866 aa, synthetic construct
MALPVTALLLPLALLLHAARPDIQMTQSPSSLSASVGDRVTITCKASDHINNWLAWYQQKPGQAPKLLIYGATTLETGVPSRFSGSGSGTDYTLTISSLQPEDFATYYCQQSWNTPWTFGQGTKLEIKRLEDLKNVFPPEVAVFEPSEAEISHTQKATLVCLATGFYPDHVELSWWVNGKEVHSGVCTDPQPLKEQPALNDSRYCLSSRLRVSATFWQNPRNHFRCQVQFYGLSENDEWTQDRAKPVTQIVSAEAWGRADDVIKIHWQEKKSNTILGSQEGNTMKTNDTYMKFSWLTVPEKSLDKEHRCIVRHENNKNGVDQEIIFPPIKTDVITMDPKDNCSKDANDTLLLQLTNTSAYYMYLLLLLKSVVYFAIITCCLLMAMVKRKDSRGRAKRSGSGATNFSLLKQAGDVEENPGPTSATMDWIWRILFLVGAATGAHSGPEVQLVESGGGLVQPGGSLRLSCAASGSIFGFNDMAWYRQAPGKQRELVALISRVGVTSSADSVKGRFTISRVNAKDTVYLQMNSLKPEDTAVYYCYMDQRLDGSTLAYWGQGTQVTVSSGSGGGGSGGGGSGGGGSFEQVQLQQPGAELVKPGASVKMSCKASGYAFSSYWINWMKQKPGQGLEWIGQIYPGDGDTNYNGKFKGRATLTADTSSSTAYMQLSSLTSEDSAVYFCARSITTVVGCAMDYWGQGTSVTVSSTRIQNPDPAVYQLRDSKSSDKSVCLFTDFDSQTNVSQSKDSDVYITDKCVLDMRSMDFKSNSAVAWSNKSDFACANAFNNSIIPEDTFFPSPESSDSTDHVKPKETENTKQPSKSCHKPKAIVHTEKVNMMSLTVLGLRMLFAKTVAVNFLLTAKLFFLLTA

SEQ ID NO: 15410 - protein, 862 aa, synthetic construct
MALPVTALLLPLALLLHAARPDIQMTQSPSSLSASVGDRVTITCKASDHINNWLAWYQQKPGQAPKLLIYGATTLETGVPSRFSGSGSGTDYTLTISSLQPEDFATYYCQQSWNTPWTFGQGTKLEIKRLEDLKNVFPPEVAVFEPSEAEISHTQKATLVCLATGFYPDHVELSWWVNGKEVHSGVCTDPQPLKEQPALNDSRYCLSSRLRVSATFWQNPRNHFRCQVQFYGLSENDEWTQDRAKPVTQIVSAEAWGRADDVIKIHWQEKKSNTILGSQEGNTMKTNDTYMKFSWLTVPEKSLDKEHRCIVRHENNKNGVDQEIIFPPIKTDVITMDPKDNCSKDANDTLLLQLTNTSAYYMYLLLLLKSVVYFAIITCCLLMAMVKRKDSRGRAKRSGSGATNFSLLKQAGDVEENPGPTSATMDWIWRILFLVGAATGAHSGPEVQLVESGGGLVQAGGSLRLSCAASGSVFSGNVMGWYRQAPGKEREWVAAIASGGSIYYRDSVKGRFTISRDNAKNTVYLQMNSLKPEDTAVYYCNSHPPTLPYWGLGTQVTVSSGSGGGGSGGGGSGGGGSFEQVQLQQPGAELVKPGASVKMSCKASGYAFSSYWINWMKQKPGQGLEWIGQIYPGDGDTNYNGKFKGRATLTADTSSSTAYMQLSSLTSEDSAVYFCARSITTVVGCAMDYWGQGTSVTVSSTRIQNPDPAVYQLRDSKSSDKSVCLFTDFDSQTNVSQSKDSDVYITDKCVLDMRSMDFKSNSAVAWSNKSDFACANAFNNSIIPEDTFFPSPESSDSTDHVKPKETENTKQPSKSCHKPKAIVHTEKVNMMSLTVLGLRMLFAKTVAVNFLLTAKLFFLLTA

SEQ ID NO: 15411 - protein, 860 aa, synthetic construct
MALPVTALLLPLALLLHAARPDIQMTQSPSSLSASVGDRVTITCKASDHINNWLAWYQQKPGQAPKLLIYGATTLETGVPSRFSGSGSGTDYTLTISSLQPEDFATYYCQQSWNTPWTFGQGTKLEIKRLEDLKNVFPPEVAVFEPSEAEISHTQKATLVCLATGFYPDHVELSWWVNGKEVHSGVCTDPQPLKEQPALNDSRYCLSSRLRVSATFWQNPRNHFRCQVQFYGLSENDEWTQDRAKPVTQIVSAEAWGRADDVIKIHWQEKKSNTILGSQEGNTMKTNDTYMKFSWLTVPEKSLDKEHRCIVRHENNKNGVDQEIIFPPIKTDVITMDPKDNCSKDANDTLLLQLTNTSAYYMYLLLLLKSVVYFAIITCCLLMAMVKRKDSRGRAKRSGSGATNFSLLKQAGDVEENPGPTSATMDWIWRILFLVGAATGAHSGPEVQLLESGGGLVQPGGSLRLSCAASGFSFSSYALSWVRQAPGKGLEWVSSIGENDGTTDYADAVKGRFTISRDNSKNTLYLQMNSLRVEDTAVYYCVKDGIHWGQGTLVTVSSGSGGGGSGGGGSGGGGSFEQVQLQQPGAELVKPGASVKMSCKASGYAFSSYWINWMKQKPGQGLEWIGQIYPGDGDTNYNGKFKGRATLTADTSSSTAYMQLSSLTSEDSAVYFCARSITTVVGCAMDYWGQGTSVTVSSTRIQNPDPAVYQLRDSKSSDKSVCLFTDFDSQTNVSQSKDSDVYITDKCVLDMRSMDFKSNSAVAWSNKSDFACANAFNNSIIPEDTFFPSPESSDSTDHVKPKETENTKQPSKSCHKPKAIVHTEKVNMMSLTVLGLRMLFAKTVAVNFLLTAKLFFLLTA

SEQ ID NO: 15412 - protein, 1229 aa, synthetic construct
MGPRLLFWALLCLLGTGPVEAGVTQSPTHLIKTRGQQATLRCSPISGHTSVYWYQQALGLGLQFLLWYDEGEERNRGNFPPRFSGRQFPNYSSELNVNALELEDSALYLCASSLGGPRGLAGLRGDEQFFGPGTRLTVLEGTGGGGSGGGEFDIQMTQSPSSLSASVGDRVTITCKASDHINNWLAWYQQKPGQAPKLLIYGATTLETGVPSRFSGSGSGTDYTLTISSLQPEDFATYYCQQSWNTPWTFGQGTKLEIKRLEDLKNVFPPEVAVFEPSEAEISHTQKATLVCLATGFYPDHVELSWWVNGKEVHSGVCTDPQPLKEQPALNDSRYCLSSRLRVSATFWQNPRNHFRCQVQFYGLSENDEWTQDRAKPVTQIVSAEAWGRADDVIKIHWQEKKSNTILGSQEGNTMKTNDTYMKFSWLTVPEKSLDKEHRCIVRHENNKNGVDQEIIFPPIKTDVITMDPKDNCSKDANDTLLLQLTNTSAYYMYLLLLLKSVVYFAIITCCLLMAMVKRKDSRGRAKRSGSGATNFSLLKQAGDVEENPGPTSATMDWIWRILFLVGAATGAHSGPEVQLVESGGGLVQAGGSLRLSCAASGRTFSMGWFRQAPGKEREFVAAITYSGGSPYYADSVKGRFTISRDNAKNTVYLQMNSLKPEDTAVYYCAANPTYGSDWNAENWGQGTQVTVSSGSGGGGSGGGGSGGGGSFEQVQLQQPGAELVKPGASVKMSCKASGYAFSSYWINWMKQKPGQGLEWIGQIYPGDGDTNYNGKFKGRATLTADTSSSTAYMQLSSLTSEDSAVYFCARSITTVVGCAMDYWGQGTSVTVSSTRIQNPDPAVYQLRDSKSSDKSVCLFTDFDSQTNVSQSKDSDVYITDKCVLDMRSMDFKSNSAVAWSNKSDFACANAFNNSIIPEDTFFPSPESSDSTDHVKPKETENTKQPSKSCHKPKAIVHTEKVNMMSLTVLGLRMLFAKTVAVNFLLTAKLFFLLTARAKRSGSGVKQTLNFDLLKLAGDVESNPGPSRGHMTEYKPTVRLATRDDVPRAVRTLAAAFADYPATRHTVDPDRHIERVTELQELFLTRVGLDIGKVWVADDGAAVAVWTTPESVEAGAVFAEIGPRMAELSGSRLAAQQQMEGLLAPHRPKEPAWFLATVGVSPDHQGKGLGSAVVLPGVEAAERAGVPAFLETSAPRNLPFYERLGFTVTADVEVPEGPRTWCMTRKPGA

SEQ ID NO: 15413 - protein, 1228 aa, synthetic construct
MGPRLLFWALLCLLGTGPVEAGVTQSPTHLIKTRGQQATLRCSPISGHTSVYWYQQALGLGLQFLLWYDEGEERNRGNFPPRFSGRQFPNYSSELNVNALELEDSALYLCASSLGGDELGADGNEQFFGPGTRLTVLEGTGGGGSGGGSEFDIQMTQSPSSLSASVGDRVTITCKASDHINNWLAWYQQKPGQAPKLLIYGATTLETGVPSRFSGSGSGTDYTLTISSLQPEDFATYYCQQSWNTPWTFGQGTKLEIKRLEDLKNVFPPEVAVFEPSEAEISHTQKATLVCLATGFYPDHVELSWWVNGKEVHSGVCTDPQPLKEQPALNDSRYCLSSRLRVSATFWQNPRNHFRCQVQFYGLSENDEWTQDRAKPVTQIVSAEAWGRADDVIKIHWQEKKSNTILGSQEGNTMKTNDTYMKFSWLTVPEKSLDKEHRCIVRHENNKNGVDQEIIFPPIKTDVITMDPKDNCSKDANDTLLLQLTNTSAYYMYLLLLLKSVVYFAIITCCLLMAMVKRKDSRGRAKRSGSGATNFSLLKQAGDVEENPGPTSATMDWIWRILFLVGAATGAHSGPEVQLVESGGGLVQAGGSLRLSCAASGRTFSMGWFRQAPGKEREFVAAITYSGGSPYYADSVKGRFTISRDNAKNTVYLQMNSLKPEDTAVYYCAANPTYGSDWNAENWGQGTQVTVSSGSGGGGSGGGGSGGGGSFEQVQLQQPGAELVKPGASVKMSCKASGYAFSSYWINWMKQKPGQGLEWIGQIYPGDGDTNYNGKFKGRATLTADTSSSTAYMQLSSLTSEDSAVYFCARSITTVVGCAMDYWGQGTSVTVSSTRIQNPDPAVYQLRDSKSSDKSVCLFTDFDSQTNVSQSKDSDVYITDKCVLDMRSMDFKSNSAVAWSNKSDFACANAFNNSIIPEDTFFPSPESSDSTDHVKPKETENTKQPSKSCHKPKAIVHTEKVNMMSLTVLGLRMLFAKTVAVNFLLTAKLFFLLTARAKRSGSGVKQTLNFDLLKLAGDVESNPGPSRGHMTEYKPTVRLATRDDVPRAVRTLAAAFADYPATRHTVDPDRHIERVTELQELFLTRVGLDIGKVWVADDGAAVAVWTTPESVEAGAVFAEIGPRMAELSGSRLAAQQQMEGLLAPHRPKEPAWFLATVGVSPDHQGKGLGSAVVLPGVEAAERAGVPAFLETSAPRNLPFYERLGFTVTADVEVPEGPRTWCMTRKPGA

SEQ ID NO: 15414 - protein, 1003 aa, synthetic construct
MALPVTALLLPLALLLHAARPACLFNQEVQIPLTESYCGPCPKNWICYKNNCYQFFDESKNWYESQASCMSQNASLLKVYSKEDQDLLKLVKSAHWMGLVHIPTNGSWQWEDGSILSPNLLTIIEMQKGDCALYASSFKGYIENCSTPNTYICMQRTVLEDLKNVFPPEVAVFEPSEAEISHTQKATLVCLATGFYPDHVELSWWVNGKEVHSGVCTDPQPLKEQPALNDSRYCLSSRLRVSATFWQNPRNHFRCQVQFYGLSENDEWTQDRAKPVTQIVSAEAWGRADDVIKIHWQEKKSNTILGSQEGNTMKTNDTYMKFSWLTVPEKSLDKEHRCIVRHENNKNGVDQEIIFPPIKTDVITMDPKDNCSKDANDTLLLQLTNTSAYYMYLLLLLKSVVYFAIITCCLLMAMVKRKDSRGRAKRSGSGATNFSLLKQAGDVEENPGPTSMDWIWRILFLVGAATGAHSFEDLFNQEVQIPLTESYCGPCPKNWICYKNNCYQFFDESKNWYESQASCMSQNASLLKVYSKEDQDLLKLVKSAHWMGLVHIPTNGSWQWEDGSILSPNLLTIIEMQKGDCALYASSFKGFIENCSTPNTYICMQRTVTRIQNPDPAVYQLRDSKSSDKSVCLFTDFDSQTNVSQSKDSDVYITDKCVLDMRSMDFKSNSAVAWSNKSDFACANAFNNSIIPEDTFFPSPESSDSTDHVKPKETENTKQPSKSCHKPKAIVHTEKVNMMSLTVLGLRMLFAKTVAVNFLLTAKLFFLLTARAKRSGSGVKQTLNFDLLKLAGDVESNPGPSRGHMTEYKPTVRLATRDDVPRAVRTLAAAFADYPATRHTVDPDRHIERVTELQELFLTRVGLDIGKVWVADDGAAVAVWTTPESVEAGAVFAEIGPRMAELSGSRLAAQQQMEGLLAPHRPKEPAWFLATVGVSPDHQGKGLGSAVVLPGVEAAERAGVPAFLETSAPRNLPFYERLGFTVTADVEVPEGPRTWCMTRKPGA

SEQ ID NO: 15415 - protein, 1053 aa, synthetic construct
MALPVTALLLPLALLLHAARPDIQMTQSPSSLSASVGDRVTITCKASDHINNWLAWYQQKPGQAPKLLIYGATTLETGVPSRFSGSGSGTDYTLTISSLQPEDFATYYCQQSWNTPWTFGQGTKLEIKRLEDLKNVFPPEVAVFEPSEAEISHTQKATLVCLATGFYPDHVELSWWVNGKEVHSGVCTDPQPLKEQPALNDSRYCLSSRLRVSATFWQNPRNHFRCQVQFYGLSENDEWTQDRAKPVTQIVSAEAWGRADDVIKIHWQEKKSNTILGSQEGNTMKTNDTYMKFSWLTVPEKSLDKEHRCIVRHENNKNGVDQEIIFPPIKTDVITMDPKDNCSKDANDTLLLQLTNTSAYYMYLLLLLKSVVYFAIITCCLLMAMVKRKDSRGRAKRSGSGATNFSLLKQAGDVEENPGPTSATMDWIWRILFLVGAATGAHSGPMGSWLEFYHRLNAIDSRLWALGGSEAELAAFEKEIAAFESELQAYKGKGNPEVESLRDHAAHIREWLQAYRHNGSGGGGSGGGGSGGGGSFEQVQLQQPGAELVKPGASVKMSCKASGYAFSSYWINWMKQKPGQGLEWIGQIYPGDGDTNYNGKFKGRATLTADTSSSTAYMQLSSLTSEDSAVYFCARSITTVVGCAMDYWGQGTSVTVSSTRIQNPDPAVYQLRDSKSSDKSVCLFTDFDSQTNVSQSKDSDVYITDKCVLDMRSMDFKSNSAVAWSNKSDFACANAFNNSIIPEDTFFPSPESSDSTDHVKPKETENTKQPSKSCHKPKAIVHTEKVNMMSLTVLGLRMLFAKTVAVNFLLTAKLFFLLTARAKRSGSGVKQTLNFDLLKLAGDVESNPGPSRGHMTEYKPTVRLATRDDVPRAVRTLAAAFADYPATRHTVDPDRHIERVTELQELFLTRVGLDIGKVWVADDGAAVAVWTTPESVEAGAVFAEIGPRMAELSGSRLAAQQQMEGLLAPHRPKEPAWFLATVGVSPDHQGKGLGSAVVLPGVEAAERAGVPAFLETSAPRNLPFYERLGFTVTADVEVPEGPRTWCMTRKPGA

SEQ ID NO: 15416 - protein, 1053 aa, synthetic construct
MALPVTALLLPLALLLHAARPACMGSWFEFYDRLNAIDARLWALGGSEAELAAFEKEIAAFESELQAYKGKGNPEVENLRVHAAAIREWLQAYRHNGTGGGGSGGGGSGGGGSEFDIQMTQSPSSLSASVGDRVTITCKASDHINNWLAWYQQKPGQAPKLLIYGATTLETGVPSRFSGSGSGTDYTLTISSLQPEDFATYYCQQSWNTPWTFGQGTKLEIKRLEDLKNVFPPEVAVFEPSEAEISHTQKATLVCLATGFYPDHVELSWWVNGKEVHSGVCTDPQPLKEQPALNDSRYCLSSRLRVSATFWQNPRNHFRCQVQFYGLSENDEWTQDRAKPVTQIVSAEAWGRADDVIKIHWQEKKSNTILGSQEGNTMKTNDTYMKFSWLTVPEKSLDKEHRCIVRHENNKNGVDQEIIFPPIKTDVITMDPKDNCSKDANDTLLLQLTNTSAYYMYLLLLLKSVVYFAIITCCLLMAMVKRKDSRGRAKRSGSGATNFSLLKQAGDVEENPGPTSMDWIWRILFLVGAATGAHSFEQVQLQQPGAELVKPGASVKMSCKASGYAFSSYWINWMKQKPGQGLEWIGQIYPGDGDTNYNGKFKGRATLTADTSSSTAYMQLSSLTSEDSAVYFCARSITTVVGCAMDYWGQGTSVTVSSTRIQNPDPAVYQLRDSKSSDKSVCLFTDFDSQTNVSQSKDSDVYITDKCVLDMRSMDFKSNSAVAWSNKSDFACANAFNNSIIPEDTFFPSPESSDSTDHVKPKETENTKQPSKSCHKPKAIVHTEKVNMMSLTVLGLRMLFAKTVAVNFLLTAKLFFLLTARAKRSGSGVKQTLNFDLLKLAGDVESNPGPSRGHMTEYKPTVRLATRDDVPRAVRTLAAAFADYPATRHTVDPDRHIERVTELQELFLTRVGLDIGKVWVADDGAAVAVWTTPESVEAGAVFAEIGPRMAELSGSRLAAQQQMEGLLAPHRPKEPAWFLATVGVSPDHQGKGLGSAVVLPGVEAAERAGVPAFLETSAPRNLPFYERLGFTVTADVEVPEGPRTWCMTRKPGA

SEQ ID NO: 15417 - protein, 1170 aa, synthetic construct
MALPVTALLLPLALLLHAARPACMDPDLEIRAAFLRQRNTALRTEVAELEQEVQRLENEVSQYETRYGPLGGGKGTGGGGSGGGGSGGGGSEFDIQMTQSPSSLSASVGDRVTITCKASDHINNWLAWYQQKPGQAPKLLIYGATTLETGVPSRFSGSGSGTDYTLTISSLQPEDFATYYCQQSWNTPWTFGQGTKLEIKRLEDLKNVFPPEVAVFEPSEAEISHTQKATLVCLATGFYPDHVELSWWVNGKEVHSGVCTDPQPLKEQPALNDSRYCLSSRLRVSATFWQNPRNHFRCQVQFYGLSENDEWTQDRAKPVTQIVSAEAWGRADDVIKIHWQEKKSNTILGSQEGNTMKTNDTYMKFSWLTVPEKSLDKEHRCIVRHENNKNGVDQEIIFPPIKTDVITMDPKDNCSKDANDTLLLQLTNTSAYYMYLLLLLKSVVYFAIITCCLLMAMVKRKDSRGRAKRSGSGATNFSLLKQAGDVEENPGPTSATMDWIWRILFLVGAATGAHSGPEVQLVESGGGLVQAGGSLRLSCAASGRTFSMGWFRQAPGKEREFVAAITYSGGSPYYADSVKGRFTISRDNAKNTVYLQMNSLKPEDTAVYYCAANPTYGSDWNAENWGQGTQVTVSSGSGGGGSGGGGSGGGGSFEQVQLQQPGAELVKPGASVKMSCKASGYAFSSYWINWMKQKPGQGLEWIGQIYPGDGDTNYNGKFKGRATLTADTSSSTAYMQLSSLTSEDSAVYFCARSITTVVGCAMDYWGQGTSVTVSSTRIQNPDPAVYQLRDSKSSDKSVCLFTDFDSQTNVSQSKDSDVYITDKCVLDMRSMDFKSNSAVAWSNKSDFACANAFNNSIIPEDTFFPSPESSDSTDHVKPKETENTKQPSKSCHKPKAIVHTEKVNMMSLTVLGLRMLFAKTVAVNFLLTAKLFFLLTARAKRSGSGVKQTLNFDLLKLAGDVESNPGPSRGHMTEYKPTVRLATRDDVPRAVRTLAAAFADYPATRHTVDPDRHIERVTELQELFLTRVGLDIGKVWVADDGAAVAVWTTPESVEAGAVFAEIGPRMAELSGSRLAAQQQMEGLLAPHRPKEPAWFLATVGVSPDHQGKGLGSAVVLPGVEAAERAGVPAFLETSAPRNLPFYERLGFTVTADVEVPEGPRTWCMTRKPGA

SEQ ID NO: 15418 - protein, 1053 aa, synthetic construct
MALPVTALLLPLALLLHAARPDIQMTQSPSSLSASVGDRVTITCKASDHINNWLAWYQQKPGQAPKLLIYGATTLETGVPSRFSGSGSGTDYTLTISSLQPEDFATYYCQQSWNTPWTFGQGTKLEIKRLEDLKNVFPPEVAVFEPSEAEISHTQKATLVCLATGFYPDHVELSWWVNGKEVHSGVCTDPQPLKEQPALNDSRYCLSSRLRVSATFWQNPRNHFRCQVQFYGLSENDEWTQDRAKPVTQIVSAEAWGRADDVIKIHWQEKKSNTILGSQEGNTMKTNDTYMKFSWLTVPEKSLDKEHRCIVRHENNKNGVDQEIIFPPIKTDVITMDPKDNCSKDANDTLLLQLTNTSAYYMYLLLLLKSVVYFAIITCCLLMAMVKRKDSRGRAKRSGSGATNFSLLKQAGDVEENPGPTSATMDWIWRILFLVGAATGAHSGPMGSWSEFYDRLHAIHHRLYALGGSEAELAAFEKEIAAFESELQAYKGKGNPEVEALRDTAAFIRTRLQAYRHNGSGGGGSGGGGSGGGGSFEQVQLQQPGAELVKPGASVKMSCKASGYAFSSYWINWMKQKPGQGLEWIGQIYPGDGDTNYNGKFKGRATLTADTSSSTAYMQLSSLTSEDSAVYFCARSITTVVGCAMDYWGQGTSVTVSSTRIQNPDPAVYQLRDSKSSDKSVCLFTDFDSQTNVSQSKDSDVYITDKCVLDMRSMDFKSNSAVAWSNKSDFACANAFNNSIIPEDTFFPSPESSDSTDHVKPKETENTKQPSKSCHKPKAIVHTEKVNMMSLTVLGLRMLFAKTVAVNFLLTAKLFFLLTARAKRSGSGVKQTLNFDLLKLAGDVESNPGPSRGHMTEYKPTVRLATRDDVPRAVRTLAAAFADYPATRHTVDPDRHIERVTELQELFLTRVGLDIGKVWVADDGAAVAVWTTPESVEAGAVFAEIGPRMAELSGSRLAAQQQMEGLLAPHRPKEPAWFLATVGVSPDHQGKGLGSAVVLPGVEAAERAGVPAFLETSAPRNLPFYERLGFTVTADVEVPEGPRTWCMTRKPGA

SEQ ID NO: 15419 - protein, 1263 aa, synthetic construct
MALPVTALLLPLALLLHAARPDIQMTQSPSSLSASVGDRVTITCKASDHINNWLAWYQQKPGQAPKLLIYGATTLETGVPSRFSGSGSGTDYTLTISSLQPEDFATYYCQQSWNTPWTFGQGTKLEIKRLEDLKNVFPPEVAVFEPSEAEISHTQKATLVCLATGFYPDHVELSWWVNGKEVHSGVCTDPQPLKEQPALNDSRYCLSSRLRVSATFWQNPRNHFRCQVQFYGLSENDEWTQDRAKPVTQIVSAEAWGRADDVIKIHWQEKKSNTILGSQEGNTMKTNDTYMKFSWLTVPEKSLDKEHRCIVRHENNKNGVDQEIIFPPIKTDVITMDPKDNCSKDANDTLLLQLTNTSAYYMYLLLLLKSVVYFAIITCCLLMAMVKRKDSRGRAKRSGSGATNFSLLKQAGDVEENPGPTSTMDWIWRILFLVGAATGAHSLFNQEVQIPLTESYCGPCPKNWICYKNNCYQFFDESKNWYESQASCMSQNASLLKVYSKEDQDLLKLVKSAHWMGLVHIPTNGSWQWEDGSILSPNLLTIIEMQKGDCALYASSFKGYIENCSTPNTYICMQRTVSGGGGSGGGGSGGGGDLFNQEVQIPLTESYCGPCPKNWICYKNNCYQFFDESKNWYESQASCMSQNASLLKVYSKEDQDLLKLVKSAHWMGLVHIPTNGSWQWEDGSILSPNLLTIIEMQKGDCALYASSFKGYIENCSTPNTYICMQRTVGSGGGGSGGGGSGGGGSFEQVQLQQPGAELVKPGASVKMSCKASGYAFSSYWINWMKQKPGQGLEWIGQIYPGDGDTNYNGKFKGRATLTADTSSSTAYMQLSSLTSEDSAVYFCARSITTVVGCAMDYWGQGTSVTVSSTRIQNPDPAVYQLRDSKSSDKSVCLFTDFDSQTNVSQSKDSDVYITDKCVLDMRSMDFKSNSAVAWSNKSDFACANAFNNSIIPEDTFFPSPESSDSTDHVKPKETENTKQPSKSCHKPKAIVHTEKVNMMSLTVLGLRMLFAKTVAVNFLLTAKLFFLLTARAKRSGSGVKQTLNFDLLKLAGDVESNPGPSRGHMTEYKPTVRLATRDDVPRAVRTLAAAFADYPATRHTVDPDRHIERVTELQELFLTRVGLDIGKVWVADDGAAVAVWTTPESVEAGAVFAEIGPRMAELSGSRLAAQQQMEGLLAPHRPKEPAWFLATVGVSPDHQGKGLGSAVVLPGVEAAERAGVPAFLETSAPRNLPFYERLGFTVTADVEVPEGPRTWCMTRKPGA

SEQ ID NO: 15420 - protein, 721 aa, synthetic construct
MALPVTALLLPLALLLHAARPDIQMTQTTSSLSASLGDRVTISCRASQDISKYLNWYQQKPDGTVKLLIYHTSRLHSGVPSRFSGSGSGTDYSLTISNLEQEDIATYFCQQGNTLPYTFGGGTKLEITLEDLKNVFPPEVAVFEPSEAEISHTQKATLVCLATGFYPDHVELSWWVNGKEVHSGVCTDPQPLKEQPALNDSRYCLSSRLRVSATFWQNPRNHFRCQVQFYGLSENDEWTQDRAKPVTQIVSAEAWGRADDVIKIHWQEKKSNTILGSQEGNTMKTNDTYMKFSWLTVPEKSLDKEHRCIVRHENNKNGVDQEIIFPPIKTDVITMDPKDNCSKDANDTLLLQLTNTSAYYMYLLLLLKSVVYFAIITCCLLRRTAFCCNGEKSRAKRSGSGATNFSLLKQAGDVEENPGPTSMDWIWRILFLVGAATGAHSFEVKLQESGPGLVAPSQSLSVTCTVSGVSLPDYGVSWIRQPPRKGLEWLGVIWGSETTYYNSALKSRLTIIKDNSKSQVFLKMNSLQTDDTAIYYCAKHYYYGGSYAMDYWGQGTSVTVSSTRIQNPDPAVYQLRDSKSSDKSVCLFTDFDSQTNVSQSKDSDVYITDKCVLDMRSMDFKSNSAVAWSNKSDFACANAFNNSIIPEDTFFPSPESSDSTDHVKPKETENTKQPSKSCHKPKAIVHTEKVNMMSLTVLGLRMLFAKTVAVNFLLTAKLFFL

SEQ ID NO: 15421 - protein, 722 aa, synthetic construct
MALPVTALLLPLALLLHAARPEIVMTQSPATLSLSPGERATLSCRASQDISKYLNWYQQKPGQAPRLLIYHTSRLHSGIPARFSGSGSGTDYTLTISSLQPEDFAVYFCQQGNTLPYTFGQGTKLEIKLEDLKNVFPPEVAVFEPSEAEISHTQKATLVCLATGFYPDHVELSWWVNGKEVHSGVCTDPQPLKEQPALNDSRYCLSSRLRVSATFWQNPRNHFRCQVQFYGLSENDEWTQDRAKPVTQIVSAEAWGRADDVIKIHWQEKKSNTILGSQEGNTMKTNDTYMKFSWLTVPEKSLDKEHRCIVRHENNKNGVDQEIIFPPIKTDVITMDPKDNCSKDANDTLLLQLTNTSAYYMYLLLLLKSVVYFAIITCCLLRRTAFCCNGEKSRAKRSGSGATNFSLLKQAGDVEENPGPTSMDWIWRILFLVGAATGAHSFEQVQLQESGPGLVKPSETLSLTCTVSGVSLPDYGVSWIRQPPGKGLEWIGVIWGSETTYYNSSLKSRVTISKDNSKNQVSLKLSSVTAADTAVYYCAKHYYYGGSYAMDYWGQGTLVTVSSTRIQNPDPAVYQLRDSKSSDKSVCLFTDFDSQTNVSQSKDSDVYITDKCVLDMRSMDFKSNSAVAWSNKSDFACANAFNNSIIPEDTFFPSPESSDSTDHVKPKETENTKQPSKSCHKPKAIVHTEKVNMMSLTVLGLRMLFAKTVAVNFLLTAKLFFL

SEQ ID NO: 15422 - protein, 723 aa, synthetic construct
MALPVTALLLPLALLLHAARPDEIVLTQSPATLSLSPGERATLSCSASSSVSYMHWYQQKPGQAPRLLIYDTSKLASGIPARFSGSGSGTDFTLTISSLEPEDVAVYYCFQGSVYPFTFGQGTKLEIKRLEDLKNVFPPEVAVFEPSEAEISHTQKATLVCLATGFYPDHVELSWWVNGKEVHSGVCTDPQPLKEQPALNDSRYCLSSRLRVSATFWQNPRNHFRCQVQFYGLSENDEWTQDRAKPVTQIVSAEAWGRADDVIKIHWQEKKSNTILGSQEGNTMKTNDTYMKFSWLTVPEKSLDKEHRCIVRHENNKNGVDQEIIFPPIKTDVITMDPKDNCSKDANDTLLLQLTNTSAYYMYLLLLLKSVVYFAIITCCLLRRTAFCCNGEKSRAKRSGSGATNFSLLKQAGDVEENPGPTSMDWIWRILFLVGAATGAHSFEQVQLQESGPGLVKPSQTLSLTCTVSGGSISTSGMGVGWIRQHPGKGLEWIGHIWWDDDKRYNPALKSRVTISVDTSKNQFSLKLSSVTAADTAVYYCARMELWSYYFDYWGQGTLVTVSSTRIQNPDPAVYQLRDSKSSDKSVCLFTDFDSQTNVSQSKDSDVYITDKCVLDMRSMDFKSNSAVAWSNKSDFACANAFNNSIIPEDTFFPSPESSDSTDHVKPKETENTKQPSKSCHKPKAIVHTEKVNMMSLTVLGLRMLFAKTVAVNFLLTAKLFFL

SEQ ID NO: 15423 - protein, 721 aa, synthetic construct
MALPVTALLLPLALLLHAARPDYIHVTQSPSSLSVSIGDRVTINCQTSQGVGSDLHWYQHKPGRAPKLLIHHASSVEDGVPSRFSGTGFHTSFNLTINDLQADDIGTYYCQVLQSFGRGSRLDTKLEDLKNVFPPEVAVFEPSEAEISHTQKATLVCLATGFYPDHVELSWWVNGKEVHSGVCTDPQPLKEQPALNDSRYCLSSRLRVSATFWQNPRNHFRCQVQFYGLSENDEWTQDRAKPVTQIVSAEAWGRADDVIKIHWQEKKSNTILGSQEGNTMKTNDTYMKFSWLTVPEKSLDKEHRCIVRHENNKNGVDQEIIFPPIKTDVITMDPKDNCSKDANDTLLLQLTNTSAYYMYLLLLLKSVVYFAIITCCLLRRTAFCCNGEKSRAKRSGSGATNFSLLKQAGDVEENPGPTSMDWIWRILFLVGAATGAHSFERAHLVQSGTAMKKPGASVRVSCQTSGYTFTAHILFWFRQAPGRGLEWVGWIKPQYGAVNFGGGFRDRVTLTRDVYREIAYMDIRGLKPDDTAVYYCARDRSYGDSSWALDAWGQGTTVVVSATRIQNPDPAVYQLRDSKSSDKSVCLFTDFDSQTNVSQSKDSDVYITDKCVLDMRSMDFKSNSAVAWSNKSDFACANAFNNSIIPEDTFFPSPESSDSTDHVKPKETENTKQPSKSCHKPKAIVHTEKVNMMSLTVLGLRMLFAKTVAVNFLLTAKLFFL

SEQ ID NO: 15424 - protein, 731 aa, synthetic construct
MALPVTALLLPLALLLHAARPDVQMIQTPDSLAVSLGQRATISCRASESVDNYGISFMHWYQQKPGQSPKLLIYRASNLESGIPARFSGSGSRTDFTLTINPVETDDVATYYCQQNNKDPPTFGGGTKLEIKLEDLKNVFPPEVAVFEPSEAEISHTQKATLVCLATGFYPDHVELSWWVNGKEVHSGVCTDPQPLKEQPALNDSRYCLSSRLRVSATFWQNPRNHFRCQVQFYGLSENDEWTQDRAKPVTQIVSAEAWGRADDVIKIHWQEKKSNTILGSQEGNTMKTNDTYMKFSWLTVPEKSLDKEHRCIVRHENNKNGVDQEIIFPPIKTDVITMDPKDNCSKDANDTLLLQLTNTSAYYMYLLLLLKSVVYFAIITCCLLRRTAFCCNGEKSRAKRSGSGATNFSLLKQAGDVEENPGPTSMDWIWRILFLVGAATGAHSFEGGGGSQVQLQQSGAELVKPGASVKISCKASGYAFSSYWMNWVKQRPGKGLEWIGQIYPGDGDTTYNGKFKGKATLTADKSSSTVYMQLNSLTSEDSAVYFCVRYYYGSSGYFDYWGQGTTLTVSSTRIQNPDPAVYQLRDSKSSDKSVCLFTDFDSQTNVSQSKDSDVYITDKCVLDMRSMDFKSNSAVAWSNKSDFACANAFNNSIIPEDTFFPSPESSDSTDHVKPKETENTKQPSKSCHKPKAIVHTEKVNMMSLTVLGLRMLFAKTVAVNFLLTAKLFFL

SEQ ID NO: 15425 - protein, 722 aa, synthetic construct
MALPVTALLLPLALLLHAARPDVQMIQTPSSLSASLGDRVTISCRASQDIGNYLNWYQQKPDGTVKLLIYYTSRLHSGVPSRFSGSGSGTEYSLTISNLEQEDIATYFCQQGSALPPTFGGGTKLEINLEDLKNVFPPEVAVFEPSEAEISHTQKATLVCLATGFYPDHVELSWWVNGKEVHSGVCTDPQPLKEQPALNDSRYCLSSRLRVSATFWQNPRNHFRCQVQFYGLSENDEWTQDRAKPVTQIVSAEAWGRADDVIKIHWQEKKSNTILGSQEGNTMKTNDTYMKFSWLTVPEKSLDKEHRCIVRHENNKNGVDQEIIFPPIKTDVITMDPKDNCSKDANDTLLLQLTNTSAYYMYLLLLLKSVVYFAIITCCLLRRTAFCCNGEKSRAKRSGSGATNFSLLKQAGDVEENPGPTSMDWIWRILFLVGAATGAHSFEALQLQQSGAELVRPGASVTLSCKASGYTFTDYEMHWVKQTPVHGLEWIGAIDPETGGTAYNQKFEGKAILTADKSSSTAYMELRSLTSEDSPVYYCARRRYYGSSSFDYWGQGTTLTVSSTRIQNPDPAVYQLRDSKSSDKSVCLFTDFDSQTNVSQSKDSDVYITDKCVLDMRSMDFKSNSAVAWSNKSDFACANAFNNSIIPEDTFFPSPESSDSTDHVKPKETENTKQPSKSCHKPKAIVHTEKVNMMSLTVLGLRMLFAKTVAVNFLLTAKLFFL

SEQ ID NO: 15426 - protein, 726 aa, synthetic construct
MALPVTALLLPLALLLHAARPDIVLTQSPASLAVSLGQRATISCRASKSVSTSGYSYLHWYQQKPGQPPKLLIYLASNLESGVPARFSGSGSGTDFTLNIHPVEEEDAATYYCQHSRELPFTFGSGTKLEIKLEDLKNVFPPEVAVFEPSEAEISHTQKATLVCLATGFYPDHVELSWWVNGKEVHSGVCTDPQPLKEQPALNDSRYCLSSRLRVSATFWQNPRNHFRCQVQFYGLSENDEWTQDRAKPVTQIVSAEAWGRADDVIKIHWQEKKSNTILGSQEGNTMKTNDTYMKFSWLTVPEKSLDKEHRCIVRHENNKNGVDQEIIFPPIKTDVITMDPKDNCSKDANDTLLLQLTNTSAYYMYLLLLLKSVVYFAIITCCLLRRTAFCCNGEKSRAKRSGSGATNFSLLKQAGDVEENPGPTSMDWIWRILFLVGAATGAHSFEQVQLVESGGGLVQPGGSLKLSCAASGFDFSRYWMSWVRQAPGKGLEWIGEINPTSSTINFTPSLKDKVFISRDNAKNTLYLQMSKVRSEDTALYYCARGNYYRYGDAMDYWGQGTSVTVSTRIQNPDPAVYQLRDSKSSDKSVCLFTDFDSQTNVSQSKDSDVYITDKCVLDMRSMDFKSNSAVAWSNKSDFACANAFNNSIIPEDTFFPSPESSDSTDHVKPKETENTKQPSKSCHKPKAIVHTEKVNMMSLTVLGLRMLFAKTVAVNFLLTAKLFFL

SEQ ID NO: 15427 - protein, 724 aa, synthetic construct
MALPVTALLLPLALLLHAARPDIQMTQSPSSLSASVGDRVTITCSASQDISNYLNWYQQKPGKAPKLLIYYTSNLHSGVPSRFSGSGSGTDFTLTISSLQPEDFATYYCQQYRKLPWTFGQGTKLEIKRLEDLKNVFPPEVAVFEPSEAEISHTQKATLVCLATGFYPDHVELSWWVNGKEVHSGVCTDPQPLKEQPALNDSRYCLSSRLRVSATFWQNPRNHFRCQVQFYGLSENDEWTQDRAKPVTQIVSAEAWGRADDVIKIHWQEKKSNTILGSQEGNTMKTNDTYMKFSWLTVPEKSLDKEHRCIVRHENNKNGVDQEIIFPPIKTDVITMDPKDNCSKDANDTLLLQLTNTSAYYMYLLLLLKSVVYFAIITCCLLRRTAFCCNGEKSRAKRSGSGATNFSLLKQAGDVEENPGPTSMDWIWRILFLVGAATGAHSFEQVQLVQSGAEVKKPGSSVKVSCKASGGTFSNYWMHWVRQAPGQGLEWMGATYRGHSDTYYNQKFKGRVTITADKSTSTAYMELSSLRSEDTAVYYCARGAIYDGYDVLDNWGQGTLVTVSSTRIQNPDPAVYQLRDSKSSDKSVCLFTDFDSQTNVSQSKDSDVYITDKCVLDMRSMDFKSNSAVAWSNKSDFACANAFNNSIIPEDTFFPSPESSDSTDHVKPKETENTKQPSKSCHKPKAIVHTEKVNMMSLTVLGLRMLFAKTVAVNFLLTAKLFFL

SEQ ID NO: 15428 - protein, 724 aa, synthetic construct
MALPVTALLLPLALLLHAARPDIVLTQSPATLSLSPGDRATISCRASESVTILGSHLIYWYQQKPGQPPRLLIQLASNVQTGVPARFSGSGSRTDFTLTISSVEPEDFAVYYCLQSRTIPRTFGQGTKLEIKRLEDLKNVFPPEVAVFEPSEAEISHTQKATLVCLATGFYPDHVELSWWVNGKEVHSGVCTDPQPLKEQPALNDSRYCLSSRLRVSATFWQNPRNHFRCQVQFYGLSENDEWTQDRAKPVTQIVSAEAWGRADDVIKIHWQEKKSNTILGSQEGNTMKTNDTYMKFSWLTVPEKSLDKEHRCIVRHENNKNGVDQEIIFPPIKTDVITMDPKDNCSKDANDTLLLQLTNTSAYYMYLLLLLKSVVYFAIITCCLLRRTAFCCNGEKSRAKRSGSGATNFSLLKQAGDVEENPGPTSMDWIWRILFLVGAATGAHSFEQVQLVQSGPEVKKPGESVKISCKASGYTFRHYSMNWVKQAPGQGLKWMGRINTESGVPIYADDFKGRFSFTVDTSASTAYLEISSLTSEDTAVYFCSNDYLYSLDFWGQGTTLTVSSTRIQNPDPAVYQLRDSKSSDKSVCLFTDFDSQTNVSQSKDSDVYITDKCVLDMRSMDFKSNSAVAWSNKSDFACANAFNNSIIPEDTFFPSPESSDSTDHVKPKETENTKQPSKSCHKPKAIVHTEKVNMMSLTVLGLRMLFAKTVAVNFLLTAKLFFL

SEQ ID NO: 15429 - protein, 725 aa, synthetic construct
MALPVTALLLPLALLLHAARPQSVLTQPPSVSGAPGQRVTISCTGSSSNIGAGFDVHWYQQLPGTAPKLLIYGNSNRPSGVPDRFSGSKSGTSASLAITGLQAEDEADYYCQSYDSSLSGYVFGTGTKVTVLGLEDLKNVFPPEVAVFEPSEAEISHTQKATLVCLATGFYPDHVELSWWVNGKEVHSGVCTDPQPLKEQPALNDSRYCLSSRLRVSATFWQNPRNHFRCQVQFYGLSENDEWTQDRAKPVTQIVSAEAWGRADDVIKIHWQEKKSNTILGSQEGNTMKTNDTYMKFSWLTVPEKSLDKEHRCIVRHENNKNGVDQEIIFPPIKTDVITMDPKDNCSKDANDTLLLQLTNTSAYYMYLLLLLKSVVYFAIITCCLLRRTAFCCNGEKSRAKRSGSGATNFSLLKQAGDVEENPGPTSMDWIWRILFLVGAATGAHSFEQVQLVQSGAEVKKPGASVKVSCKASGYTFTDYYMHWVRQAPGQRLEWMGWINPNSGGTNYAQKFQDRITVTRDTSSNTGYMELTRLRSDDTAVYYCARSPYSGVLDKWGQGTLVTVSSTRIQNPDPAVYQLRDSKSSDKSVCLFTDFDSQTNVSQSKDSDVYITDKCVLDMRSMDFKSNSAVAWSNKSDFACANAFNNSIIPEDTFFPSPESSDSTDHVKPKETENTKQPSKSCHKPKAIVHTEKVNMMSLTVLGLRMLFAKTVAVNFLLTAKLFFL

SEQ ID NO: 15430 - protein, 722 aa, synthetic construct
MALPVTALLLPLALLLHAARPQAVLTQPPSASGTPGQRVTISCSGSSSNIGSYTVSWYQQLPGTAPKFLIYSNNQRPSGVPDRFSGSKSGTSASLAISGLQSEDEADYYCAAWDDSLNGYVFGTGTKVTVLGLEDLKNVFPPEVAVFEPSEAEISHTQKATLVCLATGFYPDHVELSWWVNGKEVHSGVCTDPQPLKEQPALNDSRYCLSSRLRVSATFWQNPRNHFRCQVQFYGLSENDEWTQDRAKPVTQIVSAEAWGRADDVIKIHWQEKKSNTILGSQEGNTMKTNDTYMKFSWLTVPEKSLDKEHRCIVRHENNKNGVDQEIIFPPIKTDVITMDPKDNCSKDANDTLLLQLTNTSAYYMYLLLLLKSVVYFAIITCCLLRRTAFCCNGEKSRAKRSGSGATNFSLLKQAGDVEENPGPTSMDWIWRILFLVGAATGAHSFEVQLVQSGAEVKKPGESLKISCKGSGYDFTTYWIGWVRQMPGKGLEWMGIIYPGDSDTRYSPSVRGRVTISADKSINTAYLQWSSLEASDTAMYYCARMWTFSQDGWGQGTLVTVSSTRIQNPDPAVYQLRDSKSSDKSVCLFTDFDSQTNVSQSKDSDVYITDKCVLDMRSMDFKSNSAVAWSNKSDFACANAFNNSIIPEDTFFPSPESSDSTDHVKPKETENTKQPSKSCHKPKAIVHTEKVNMMSLTVLGLRMLFAKTVAVNFLLTAKLFFL

SEQ ID NO: 15431 - protein, 725 aa, synthetic construct
MALPVTALLLPLALLLHAARPDIVMTQSPDSLAVSLGERATINCKSSQSILYSSNQKNYLAWYQQKPGQSPKLLIYWASTRESGVPDRFSGSGSGTDFTLTISSLQAEDVAVYYCHQYISSYTFGQGTKLEIKLEDLKNVFPPEVAVFEPSEAEISHTQKATLVCLATGFYPDHVELSWWVNGKEVHSGVCTDPQPLKEQPALNDSRYCLSSRLRVSATFWQNPRNHFRCQVQFYGLSENDEWTQDRAKPVTQIVSAEAWGRADDVIKIHWQEKKSNTILGSQEGNTMKTNDTYMKFSWLTVPEKSLDKEHRCIVRHENNKNGVDQEIIFPPIKTDVITMDPKDNCSKDANDTLLLQLTNTSAYYMYLLLLLKSVVYFAIITCCLLRRTAFCCNGEKSRAKRSGSGATNFSLLKQAGDVEENPGPTSMDWIWRILFLVGAATGAHSFEQVQLVQSGAEVKKPGASVKVSCKASGYTFASQWMHWMRQAPGQGLEWIGWINPGNVNTKYNEKFKGRATLTVDTSTNTAYMELSSLRSEDTAVYYCARSTWYRPLDYWGQGTLVTVSSTRIQNPDPAVYQLRDSKSSDKSVCLFTDFDSQTNVSQSKDSDVYITDKCVLDMRSMDFKSNSAVAWSNKSDFACANAFNNSIIPEDTFFPSPESSDSTDHVKPKETENTKQPSKSCHKPKAIVHTEKVNMMSLTVLGLRMLFAKTVAVNFLLTAKLFFL

SEQ ID NO: 15432 - protein, 725 aa, synthetic construct
MALPVTALLLPLALLLHAARPDHIVLTQSPSSLSASLGDRVTISCRASQDISTYLNWYQQKPDGTVKLLIFYTSRLHAGVPSRFSGSGSGTHHSLTISNLEQEDIATYFCQQGNSLPFTFGSGTKLEIKRLEDLKNVFPPEVAVFEPSEAEISHTQKATLVCLATGFYPDHVELSWWVNGKEVHSGVCTDPQPLKEQPALNDSRYCLSSRLRVSATFWQNPRNHFRCQVQFYGLSENDEWTQDRAKPVTQIVSAEAWGRADDVIKIHWQEKKSNTILGSQEGNTMKTNDTYMKFSWLTVPEKSLDKEHRCIVRHENNKNGVDQEIIFPPIKTDVITMDPKDNCSKDANDTLLLQLTNTSAYYMYLLLLLKSVVYFAIITCCLLRRTAFCCNGEKSRAKRSGSGATNFSLLKQAGDVEENPGPTSMDWIWRILFLVGAATGAHSFEQVQLKESGPELEKPGASVKISCKASGYSFTAYSMNWVKQNNGMSLEWIGSIDPYYGDTKYAQKFKGKATLTVDKASSTAYLQLKSLTSEDSAVYYCARRMITTGDWYFDVWGAGTTVTVSSTRIQNPDPAVYQLRDSKSSDKSVCLFTDFDSQTNVSQSKDSDVYITDKCVLDMRSMDFKSNSAVAWSNKSDFACANAFNNSIIPEDTFFPSPESSDSTDHVKPKETENTKQPSKSCHKPKAIVHTEKVNMMSLTVLGLRMLFAKTVAVNFLLTAKLFFL

SEQ ID NO: 15433 - protein, 725 aa, synthetic construct; identical to SEQ ID NO: 15432

SEQ ID NO: 15434 - protein, 725 aa, synthetic construct
MALPVTALLLPLALLLHAARPDEIVLTQSPATLSLSPGERATLSCRASQSVSSYLAWYQQKPGQAPRLLIYDASNRATGIPARFSGSGSGTDFTLTISSLEPEDFAVYYCQQRSNWPITFGQGTRLEIKLEDLKNVFPPEVAVFEPSEAEISHTQKATLVCLATGFYPDHVELSWWVNGKEVHSGVCTDPQPLKEQPALNDSRYCLSSRLRVSATFWQNPRNHFRCQVQFYGLSENDEWTQDRAKPVTQIVSAEAWGRADDVIKIHWQEKKSNTILGSQEGNTMKTNDTYMKFSWLTVPEKSLDKEHRCIVRHENNKNGVDQEIIFPPIKTDVITMDPKDNCSKDANDTLLLQLTNTSAYYMYLLLLLKSVVYFAIITCCLLRRTAFCCNGEKSRAKRSGSGATNFSLLKQAGDVEENPGPTSMDWIWRILFLVGAATGAHSFEEVQLVESGGGLVQPGRSLRLSCAASGFTFNDYAMHWVRQAPGKGLEWVSTISWNSGSIGYADSVKGRFTISRDNAKKSLYLQMNSLRAEDTALYYCAKDIQYGNYYYGMDVWGQGTTVTVSSTRIQNPDPAVYQLRDSKSSDKSVCLFTDFDSQTNVSQSKDSDVYITDKCVLDMRSMDFKSNSAVAWSNKSDFACANAFNNSIIPEDTFFPSPESSDSTDHVKPKETENTKQPSKSCHKPKAIVHTEKVNMMSLTVLGLRMLFAKTVAVNFLLTAKLFFL

SEQ ID NO: 15435 - protein, 727 aa, synthetic construct
MALPVTALLLPLALLLHAARPDIVMTQTPLSLPVTPGEPASISCRSSKSLLHSNGITYLYWYLQKPGQSPQLLIYQMSNLVSGVPDRFSGSGSGTDFTLKISRVEAEDVGVYYCAQNLELPYTFGGGTKVEIKRLEDLKNVFPPEVAVFEPSEAEISHTQKATLVCLATGFYPDHVELSWWVNGKEVHSGVCTDPQPLKEQPALNDSRYCLSSRLRVSATFWQNPRNHFRCQVQFYGLSENDEWTQDRAKPVTQIVSAEAWGRADDVIKIHWQEKKSNTILGSQEGNTMKTNDTYMKFSWLTVPEKSLDKEHRCIVRHENNKNGVDQEIIFPPIKTDVITMDPKDNCSKDANDTLLLQLTNTSAYYMYLLLLLKSVVYFAIITCCLLRRTAFCCNGEKSRAKRSGSGATNFSLLKQAGDVEENPGPTSMDWIWRILFLVGAATGAHSFEQVQLVQSGAEVKKPGSSVKVSCKASGYAFSYSWINWVRQAPGQGLEWMGRIFPGDGDTDYNGKFKGRVTITADKSTSTAYMELSSLRSEDTAVYYCARNVFDGYWLVYWGQGTLVTVSSTRIQNPDPAVYQLRDSKSSDKSVCLFTDFDSQTNVSQSKDSDVYITDKCVLDMRSMDFKSNSAVAWSNKSDFACANAFNNSIIPEDTFFPSPESSDSTDHVKPKETENTKQPSKSCHKPKAIVHTEKVNMMSLTVLGLRMLFAKTVAVNFLLTAKLFFL

SEQ ID NO: 15436 - protein, 728 aa, synthetic construct
MALPVTALLLPLALLLHAARPDIQMTQSPSSLSASVGDRVTITCRSSQSIVHSVGNTFLEWYQQKPGKAPKLLIYKVSNRFSGVPSRFSGSGSGTDFTLTISSLQPEDFATYYCFQGSQFPYTFGQGTKVEIKRLEDLKNVFPPEVAVFEPSEAEISHTQKATLVCLATGFYPDHVELSWWVNGKEVHSGVCTDPQPLKEQPALNDSRYCLSSRLRVSATFWQNPRNHFRCQVQFYGLSENDEWTQDRAKPVTQIVSAEAWGRADDVIKIHWQEKKSNTILGSQEGNTMKTNDTYMKFSWLTVPEKSLDKEHRCIVRHENNKNGVDQEIIFPPIKTDVITMDPKDNCSKDANDTLLLQLTNTSAYYMYLLLLLKSVVYFAIITCCLLRRTAFCCNGEKSRAKRSGSGATNFSLLKQAGDVEENPGPTSMDWIWRILFLVGAATGAHSFEEVQLVESGGGLVQPGGSLRLSCAASGYEFSRSWMNWVRQAPGKGLEWVGRIYPGDGDTNYSGKFKGRFTISADTSKNTAYLQMNSLRAEDTAVYYCARDGSSWDWYFDVWGQGTLVTVSSTRIQNPDPAVYQLRDSKSSDKSVCLFTDFDSQTNVSQSKDSDVYITDKCVLDMRSMDFKSNSAVAWSNKSDFACANAFNNSIIPEDTFFPSPESSDSTDHVKPKETENTKQPSKSCHKPKAIVHTEKVNMMSLTVLGLRMLFAKTVAVNFLLTAKLFFL

SEQ ID NO: 15437 - protein, 726 aa, synthetic construct
MALPVTALLLPLALLLHAARPDIQMTQSPSSLSASVGDRVTITCRASQTIWSYLNWYQQRPGKAPNLLIYAASSLQSGVPSRFSGRGSGTDFTLTISSLQAEDFATYYCQQSYSIPQIFGQGTKLEIKLEDLKNVFPPEVAVFEPSEAEISHTQKATLVCLATGFYPDHVELSWWVNGKEVHSGVCTDPQPLKEQPALNDSRYCLSSRLRVSATFWQNPRNHFRCQVQFYGLSENDEWTQDRAKPVTQIVSAEAWGRADDVIKIHWQEKKSNTILGSQEGNTMKTNDTYMKFSWLTVPEKSLDKEHRCIVRHENNKNGVDQEIIFPPIKTDVITMDPKDNCSKDANDTLLLQLTNTSAYYMYLLLLLKSVVYFAIITCCLLRRTAFCCNGEKSRAKRSGSGATNFSLLKQAGDVEENPGPTSMDWIWRILFLVGAATGAHSFEQVQLQQSGPGLVKPSQTLSLTCAISGDSVSSNSAAWNWIRQSPSRGLEWLGRTYYRSKWYNDYAVSVKSRITINPDTSKNQFSLQLNSVTPEDTAVYYCAREVTGDLEDAFDIWGQGTMVTVSSTRIQNPDPAVYQLRDSKSSDKSVCLFTDFDSQTNVSQSKDSDVYITDKCVLDMRSMDFKSNSAVAWSNKSDFACANAFNNSIIPEDTFFPSPESSDSTDHVKPKETENTKQPSKSCHKPKAIVHTEKVNMMSLTVLGLRMLFAKTVAVNFLLTAKLFFL

SEQ ID NO: 15438 - protein, 719 aa, synthetic construct
MALPVTALLLPLALLLHAARPDIQMTQSPATIENTSLSASVGDRVTITCRASQGISSWLTWYQQKPEKAPKSLIYAASSLQSGVPSRFSGSGSGTDFTLTISSLQPEDFATYYCQQYDSYPITFGQGTRLEIKLEDLKNVFPPEVAVFEPSEAEISHTQKATLVCLATGFYPDHVELSWWVNGKEVHSGVCTDPQPLKEQPALNDSRYCLSSRLRVSATFWQNPRNHFRCQVQFYGLSENDEWTQDRAKPVTQIVSAEAWGRADDVIKIHWQEKKSNTILGSQEGNTMKTNDTYMKFSWLTVPEKSLDKEHRCIVRHENNKNGVDQEIIFPPIKTDVITMDPKDNCSKDANDTLLLQLTNTSAYYMYLLLLLKSVVYFAIITCCLLRRTAFCCNGEKSRAKRSGSGATNFSLLKQAGDVEENPGPTSMDWIWRILFLVGAATGAHSFEQVQLQQWGAGLLKPSETLSLTCAVYGGSFSAYYWSWIRQPPGKGLEWIGDINHGGGTNYNPSLKSRVTISVDTSKNQFSLKLNSVTAADTAVYYCASLTAYWGQGSLVTVSSTRIQNPDPAVYQLRDSKSSDKSVCLFTDFDSQTNVSQSKDSDVYITDKCVLDMRSMDFKSNSAVAWSNKSDFACANAFNNSIIPEDTFFPSPESSDSTDHVKPKETENTKQPSKSCHKPKAIVHTEKVNMMSLTVLGLRMLFAKTVAVNFLLTAKLFFL

SEQ ID NO: 15439 - protein, 724 aa, synthetic construct
MALPVTALLLPLALLLHAARPDEIVLTQSPDSLAVSLGERATINCKASQSVDFDGDSYLNWYQQKPGQPPKVLIYAASTLQSGVPSRFSGSGSGTDFTLTINSLEAEDAATYYCQQSNEDPWTFGGGTKVEIKLEDLKNVFPPEVAVFEPSEAEISHTQKATLVCLATGFYPDHVELSWWVNGKEVHSGVCTDPQPLKEQPALNDSRYCLSSRLRVSATFWQNPRNHFRCQVQFYGLSENDEWTQDRAKPVTQIVSAEAWGRADDVIKIHWQEKKSNTILGSQEGNTMKTNDTYMKFSWLTVPEKSLDKEHRCIVRHENNKNGVDQEIIFPPIKTDVITMDPKDNCSKDANDTLLLQLTNTSAYYMYLLLLLKSVVYFAIITCCLLRRTAFCCNGEKSRAKRSGSGATNFSLLKQAGDVEENPGPTSMDWIWRILFLVGAATGAHSFEQVQLVQSGAEVKKPGASVKVSCKVSGYTFTDYYITWVRQAPGQALEWMGWIYPGSGNTKYSQKFQGRFVFSVDTSASTAYLQLSSLKAEDTAVYYCANYGNYWFAYWGQGTLVTVSSTRIQNPDPAVYQLRDSKSSDKSVCLFTDFDSQTNVSQSKDSDVYITDKCVLDMRSMDFKSNSAVAWSNKSDFACANAFNNSIIPEDTFFPSPESSDSTDHVKPKETENTKQPSKSCHKPKAIVHTEKVNMMSLTVLGLRMLFAKTVAVNFLLTAKLFFL

SEQ ID NO: 15440 - protein, 721 aa, synthetic construct
MALPVTALLLPLALLLHAARPDIQMTQSPSSLSASVGDRVTITCRASQGISSWLAWYQQKPEKAPKSLIYAASSLQSGVPSRFSGSGSGTDFTLTISSLQPEDFATYYCQQYNSYPPTFGGGTKVEIKLEDLKNVFPPEVAVFEPSEAEISHTQKATLVCLATGFYPDHVELSWWVNGKEVHSGVCTDPQPLKEQPALNDSRYCLSSRLRVSATFWQNPRNHFRCQVQFYGLSENDEWTQDRAKPVTQIVSAEAWGRADDVIKIHWQEKKSNTILGSQEGNTMKTNDTYMKFSWLTVPEKSLDKEHRCIVRHENNKNGVDQEIIFPPIKTDVITMDPKDNCSKDANDTLLLQLTNTSAYYMYLLLLLKSVVYFAIITCCLLRRTAFCCNGEKSRAKRSGSGATNFSLLKQAGDVEENPGPTSMDWIWRILFLVGAATGAHSFEEVQLVQSGGGLVHPGGSLRLSCAGSGFAFSSSTMHWIRQAPGKGLEWISLIGSGGGIYYGDSVKGRFTISRDNAKNSLYLQMNSLRAEDMAVYYCVRGYFDWVDYFDYWGQGTLVTVSSTRIQNPDPAVYQLRDSKSSDKSVCLFTDFDSQTNVSQSKDSDVYITDKCVLDMRSMDFKSNSAVAWSNKSDFACANAFNNSIIPEDTFFPSPESSDSTDHVKPKETENTKQPSKSCHKPKAIVHTEKVNMMSLTVLGLRMLFAKTVAVNFLLTAKLFFL

SEQ ID NO: 15441 - protein, 731 aa, synthetic construct
MALPVTALLLPLALLLHAARPDDIVMTQSPDSLTVSLGERTTINCKSSQSVLDSSKNKNSLAWYQQKPGQPPKLLLSWASTRESGIPDRFSGSGSGTDFTLTIDSLQPEDSATYYCQQSAHFPITFGQGTRLEIKLEDLKNVFPPEVAVFEPSEAEISHTQKATLVCLATGFYPDHVELSWWVNGKEVHSGVCTDPQPLKEQPALNDSRYCLSSRLRVSATFWQNPRNHFRCQVQFYGLSENDEWTQDRAKPVTQIVSAEAWGRADDVIKIHWQEKKSNTILGSQEGNTMKTNDTYMKFSWLTVPEKSLDKEHRCIVRHENNKNGVDQEIIFPPIKTDVITMDPKDNCSKDANDTLLLQLTNTSAYYMYLLLLLKSVVYFAIITCCLLRRTAFCCNGEKSRAKRSGSGATNFSLLKQAGDVEENPGPTSMDWIWRILFLVGAATGAHSFEQVQLVQSGAEVKKPGASVKVSCKASGYTFTNYGMNWVKQAPGQGLKWMGWINTYTGEPTYADDFKGRVTMTSDTSTSTAYLELHNLRSDDTAVYYCARWSWSDGYYVYFDYWGQGTTVTVSSTRIQNPDPAVYQLRDSKSSDKSVCLFTDFDSQTNVSQSKDSDVYITDKCVLDMRSMDFKSNSAVAWSNKSDFACANAFNNSIIPEDTFFPSPESSDSTDHVKPKETENTKQPSKSCHKPKAIVHTEKVNMMSLTVLGLRMLFAKTVAVNFLLTAKLFFL

SEQ ID NO: 15442 - protein, 727 aa, synthetic construct
MALPVTALLLPLALLLHAARPDEIVLTQSPGSLAVSPGERVTMSCKSSQSVFFSSSQKNYLAWYQQIPGQSPRLLIYWASTRESGVPDRFTGSGSGTDFTLTISSVQPEDLAIYYCHQYLSSRTFGQGTKLEIKRLEDLKNVFPPEVAVFEPSEAEISHTQKATLVCLATGFYPDHVELSWWVNGKEVHSGVCTDPQPLKEQPALNDSRYCLSSRLRVSATFWQNPRNHFRCQVQFYGLSENDEWTQDRAKPVTQIVSAEAWGRADDVIKIHWQEKKSNTILGSQEGNTMKTNDTYMKFSWLTVPEKSLDKEHRCIVRHENNKNGVDQEIIFPPIKTDVITMDPKDNCSKDANDTLLLQLTNTSAYYMYLLLLLKSVVYFAIITCCLLRRTAFCCNGEKSRAKRSGSGATNFSLLKQAGDVEENPGPTSMDWIWRILFLVGAATGAHSFEQVQLQQPGAEVVKPGASVKMSCKASGYTFTSYYIHWIKQTPGQGLEWVGVIYPGNDDISYNQKFQGKATLTADKSSTTAYMQLSSLTSEDSAVYYCAREVRLRYFDVWGQGTTVTVSSTRIQNPDPAVYQLRDSKSSDKSVCLFTDFDSQTNVSQSKDSDVYITDKCVLDMRSMDFKSNSAVAWSNKSDFACANAFNNSIIPEDTFFPSPESSDSTDHVKPKETENTKQPSKSCHKPKAIVHTEKVNMMSLTVLGLRMLFAKTVAVNFLLTAKLFFL

SEQ ID NO: 15443 - protein, 731 aa, synthetic construct
MALPVTALLLPLALLLHAARPDVLLTQSPLSLPVTLGQPASISCRSSQTIVHSNGNTYLEWFQQRPGQSPRLLIYQVSNRFSGVPDRFSGSGSGTDFTLKISRVEAEDVGVYYCFQGSHVPRTFGGGTKVEIKRALEDLKNVFPPEVAVFEPSEAEISHTQKATLVCLATGFYPDHVELSWWVNGKEVHSGVCTDPQPLKEQPALNDSRYCLSSRLRVSATFWQNPRNHFRCQVQFYGLSENDEWTQDRAKPVTQIVSAEAWGRADDVIKIHWQEKKSNTILGSQEGNTMKTNDTYMKFSWLTVPEKSLDKEHRCIVRHENNKNGVDQEIIFPPIKTDVITMDPKDNCSKDANDTLLLQLTNTSAYYMYLLLLLKSVVYFAIITCCLLRRTAFCCNGEKSRAKRSGSGATNFSLLKQAGDVEENPGPTSMDWIWRILFLVGAATGAHSFEQIQLVQSGSELKKPGASVKVSCKASGYTFTNYGMNWVRQAPGQGLKWMGWINTNTGEPKYAEEFKGRFALSLDTSVSTAYLQINSLKAEDTAVYFCARGYGNYARGAWLAYWGQGTLVTVSSTRIQNPDPAVYQLRDSKSSDKSVCLFTDFDSQTNVSQSKDSDVYITDKCVLDMRSMDFKSNSAVAWSNKSDFACANAFNNSIIPEDTFFPSPESSDSTDHVKPKETENTKQPSKSCHKPKAIVHTEKVNMMSLTVLGLRMLFAKTVAVNFLLTAKLFFL

SEQ ID NO: 15444 - protein, 716 aa, synthetic construct
MALPVTALLLPLALLLHAARPDEIVLTQSPATLSLSPGERATLSCSASSSINYIYWLQQKPGQAPRILIYLTSNLASGVPARFSGSGSGTDFTLTISSLEPEDFAVYYCLQWSSNPLTFGGGTKVEIKLEDLKNVFPPEVAVFEPSEAEISHTQKATLVCLATGFYPDHVELSWWVNGKEVHSGVCTDPQPLKEQPALNDSRYCLSSRLRVSATFWQNPRNHFRCQVQFYGLSENDEWTQDRAKPVTQIVSAEAWGRADDVIKIHWQEKKSNTILGSQEGNTMKTNDTYMKFSWLTVPEKSLDKEHRCIVRHENNKNGVDQEIIFPPIKTDVITMDPKDNCSKDANDTLLLQLTNTSAYYMYLLLLLKSVVYFAIITCCLLRRTAFCCNGEKSRAKRSGSGATNFSLLKQAGDVEENPGPTSMDWIWRILFLVGAATGAHSFEEVQLVESGGGLVKPGGSLRLSCAASGFTFSSYDMSWVRQAPGKGLEWVSTISSGGSYTYYLDSIKGRFTISRDNAKNSLYLQMNSLRAEDTAVYYCARQGLDYWGRGTLVTVSSTRIQNPDPAVYQLRDSKSSDKSVCLFTDFDSQTNVSQSKDSDVYITDKCVLDMRSMDFKSNSAVAWSNKSDFACANAFNNSIIPEDTFFPSPESSDSTDHVKPKETENTKQPSKSCHKPKAIVHTEKVNMMSLTVLGLRMLFAKTVAVNFLLTAKLFFL

SEQ ID NO: 15445 - protein, 725 aa, synthetic construct
MALPVTALLLPLALLLHAARPDIVMTQSPDSLAVSLGERATINCRASKSVSTSGYSFMHWYQQKPGQPPKLLIYLASNLESGVPDRFSGSGSGTDFTLTISSLQAEDVAVYYCQHSREVPWTFGQGTKVEIKRLEDLKNVFPPEVAVFEPSEAEISHTQKATLVCLATGFYPDHVELSWWVNGKEVHSGVCTDPQPLKEQPALNDSRYCLSSRLRVSATFWQNPRNHFRCQVQFYGLSENDEWTQDRAKPVTQIVSAEAWGRADDVIKIHWQEKKSNTILGSQEGNTMKTNDTYMKFSWLTVPEKSLDKEHRCIVRHENNKNGVDQEIIFPPIKTDVITMDPKDNCSKDANDTLLLQLTNTSAYYMYLLLLLKSVVYFAIITCCLLRRTAFCCNGEKSRAKRSGSGATNFSLLKQAGDVEENPGPTSMDWIWRILFLVGAATGAHSFEQVQLVQSGAEVKKPGASVKVSCKASGYTFTNYGMNWVRQAPGQGLEWMGWINTYTGEPTYADAFKGRFAFSLDTSTSTAYLQINSLRSDDTAVYYCARDYGDYGMDYWGQGTTVTVSSTRIQNPDPAVYQLRDSKSSDKSVCLFTDFDSQTNVSQSKDSDVYITDKCVLDMRSMDFKSNSAVAWSNKSDFACANAFNNSIIPEDTFFPSPESSDSTDHVKPKETENTKQPSKSCHKPKAIVHTEKVNMMSLTVLGLRMLFAKTVAVNFLLTAKLFFL

SEQ ID NO: 15446 - protein, 721 aa, synthetic construct
MALPVTALLLPLALLLHAARPDIVMTQTPLTLSVTIGQPASISCKSSQSLLDSDGKTYLNWLLQRPGQSPERLIYLVSKLDSGVPDRFTGSGSGTDFTLKISRVEAEDLGVYCCWQGTHFPYTFGGGTKVEIKGLEDLKNVFPPEVAVFEPSEAEISHTQKATLVCLATGFYPDHVELSWWVNGKEVHSGVCTDPQPLKEQPALNDSRYCLSSRLRVSATFWQNPRNHFRCQVQFYGLSENDEWTQDRAKPVTQIVSAEAWGRADDVIKIHWQEKKSNTILGSQEGNTMKTNDTYMKFSWLTVPEKSLDKEHRCIVRHENNKNGVDQEIIFPPIKTDVITMDPKDNCSKDANDTLLLQLTNTSAYYMYLLLLLKSVVYFAIITCCLLRRTAFCCNGEKSRAKRSGSGATNFSLLKQAGDVEENPGPTSMDWIWRILFLVGAATGAHSFEQVQLQQPGAELVRPGASVKLSCKASGYTFTSYWMNWVKQRPGQGLEWIGMIDPSDSETHYNHIFKDKATLTVDKSSSTAYLQLSSLTSEDSAVYYCARNLYLWGQGTSVTVSSTRIQNPDPAVYQLRDSKSSDKSVCLFTDFDSQTNVSQSKDSDVYITDKCVLDMRSMDFKSNSAVAWSNKSDFACANAFNNSIIPEDTFFPSPESSDSTDHVKPKETENTKQPSKSCHKPKAIVHTEKVNMMSLTVLGLRMLFAKTVAVNFLLTAKLFFL

SEQ ID NO: 15447 - protein, 729 aa, synthetic construct
MALPVTALLLPLALLLHAARPDIVMTQSPDSLAVSLGERATINCESSQSLLNSGNQKNYLTWYQQKPGQPPKPLIYWASTRESGVPDRFSGSGSGTDFTLTISSLQAEDVAVYYCQNDYSYPYTFGQGTKLEIKRLEDLKNVFPPEVAVFEPSEAEISHTQKATLVCLATGFYPDHVELSWWVNGKEVHSGVCTDPQPLKEQPALNDSRYCLSSRLRVSATFWQNPRNHFRCQVQFYGLSENDEWTQDRAKPVTQIVSAEAWGRADDVIKIHWQEKKSNTILGSQEGNTMKTNDTYMKFSWLTVPEKSLDKEHRCIVRHENNKNGVDQEIIFPPIKTDVITMDPKDNCSKDANDTLLLQLTNTSAYYMYLLLLLKSVVYFAIITCCLLRRTAFCCNGEKSRAKRSGSGATNFSLLKQAGDVEENPGPTSMDWIWRILFLVGAATGAHSFEEVQLVQSGAEVKKPGESLKISCKGSGYSFTDYYMKWARQMPGKGLEWMGDIIPSNGATFYNQKFKGQVTISADKSISTTYLQWSSLKASDTAMYYCARSHLLRASWFAYWGQGTMVTVSSTRIQNPDPAVYQLRDSKSSDKSVCLFTDFDSQTNVSQSKDSDVYITDKCVLDMRSMDFKSNSAVAWSNKSDFACANAFNNSIIPEDTFFPSPESSDSTDHVKPKETENTKQPSKSCHKPKAIVHTEKVNMMSLTVLGLRMLFAKTVAVNFLLTAKLFFL

SEQ ID NO: 15448 - protein, 724 aa, synthetic construct
MALPVTALLLPLALLLHAARPDIQMTQSTSSLSASLGDRVTISCSASQGINNYLNWYQQKPDGTVELLIYYTSTLQSGVPSRFSGSGSGTDYSLTISNLEPEDIGTYYCQQYSKLPRTFGGGTKLEIKLEDLKNVFPPEVAVFEPSEAEISHTQKATLVCLATGFYPDHVELSWWVNGKEVHSGVCTDPQPLKEQPALNDSRYCLSSRLRVSATFWQNPRNHFRCQVQFYGLSENDEWTQDRAKPVTQIVSAEAWGRADDVIKIHWQEKKSNTILGSQEGNTMKTNDTYMKFSWLTVPEKSLDKEHRCIVRHENNKNGVDQEIIFPPIKTDVITMDPKDNCSKDANDTLLLQLTNTSAYYMYLLLLLKSVVYFAIITCCLLRRTAFCCNGEKSRAKRSGSGATNFSLLKQAGDVEENPGPTSMDWIWRILFLVGAATGAHSFEQVQLQQSGSELMMPGASVKISCKATGYTFSNYWIEWVKQRPGHGLEWIGEILPGTGRTIYNEKFKGKATFTADISSNTVQMQLSSLTSEDSAVYYCARRDYYGNFYYAMDYWGQGTSVTVSSTRIQNPDPAVYQLRDSKSSDKSVCLFTDFDSQTNVSQSKDSDVYITDKCVLDMRSMDFKSNSAVAWSNKSDFACANAFNNSIIPEDTFFPSPESSDSTDHVKPKETENTKQPSKSCHKPKAIVHTEKVNMMSLTVLGLRMLFAKTVAVNFLLTAKLFFL

SEQ ID NO: 15449 - protein, 719 aa, synthetic construct
MALPVTALLLPLALLLHAARPDIQMTQSPASLSVSVGETVTITCRASENIYSNLAWYQQKQGKSPQLLVYAATNLADGVPSRFSGSGSGTQYSLKINSLQSEDFGSYYCQHFWGTWTFGGGTTLEIKLEDLKNVFPPEVAVFEPSEAEISHTQKATLVCLATGFYPDHVELSWWVNGKEVHSGVCTDPQPLKEQPALNDSRYCLSSRLRVSATFWQNPRNHFRCQVQFYGLSENDEWTQDRAKPVTQIVSAEAWGRADDVIKIHWQEKKSNTILGSQEGNTMKTNDTYMKFSWLTVPEKSLDKEHRCIVRHENNKNGVDQEIIFPPIKTDVITMDPKDNCSKDANDTLLLQLTNTSAYYMYLLLLLKSVVYFAIITCCLLRRTAFCCNGEKSRAKRSGSGATNFSLLKQAGDVEENPGPTSMDWIWRILFLVGAATGAHSFEEVQLQQSGPELVKPGASVKMSCKASGYTFTDYYMKWMKQSHGKSLEWIGDINPNNGGTTYNQKFKGKATLTVDKSSSTAYMQLNSLTSEDSAVYYCARDYGYGYFDYWGQGTTLTVSSTRIQNPDPAVYQLRDSKSSDKSVCLFTDFDSQTNVSQSKDSDVYITDKCVLDMRSMDFKSNSAVAWSNKSDFACANAFNNSIIPEDTFFPSPESSDSTDHVKPKETENTKQPSKSCHKPKAIVHTEKVNMMSLTVLGLRMLFAKTVAVNFLLTAKLFFL

SEQ ID NO: 15450 - protein, 722 aa, synthetic construct
MALPVTALLLPLALLLHAARPEIVLTQSPGTLSLSPGERATLSCRASQSVGGYLAWYQQKPGQAPRLLIYDASNRATGIPARFSGSGSGTDFTLTISSLEPEDFAVYYCQQRNNWPPMYTFGQGTKLEIKRLEDLKNVFPPEVAVFEPSEAEISHTQKATLVCLATGFYPDHVELSWWVNGKEVHSGVCTDPQPLKEQPALNDSRYCLSSRLRVSATFWQNPRNHFRCQVQFYGLSENDEWTQDRAKPVTQIVSAEAWGRADDVIKIHWQEKKSNTILGSQEGNTMKTNDTYMKFSWLTVPEKSLDKEHRCIVRHENNKNGVDQEIIFPPIKTDVITMDPKDNCSKDANDTLLLQLTNTSAYYMYLLLLLKSVVYFAIITCCLLRRTAFCCNGEKSRAKRSGSGATNFSLLKQAGDVEENPGPTSMDWIWRILFLVGAATGAHSFEQVQLVQSGAEVKKPGSSVKVSCKASGGTFSSYAISWVRQAPGQGLEWMGGIIPILGTANYAQKFQGRVTITADESTSTAYMELSSLRSEDTAVYYCARWGGGAFDIWGQGTMVTVSSTRIQNPDPAVYQLRDSKSSDKSVCLFTDFDSQTNVSQSKDSDVYITDKCVLDMRSMDFKSNSAVAWSNKSDFACANAFNNSIIPEDTFFPSPESSDSTDHVKPKETENTKQPSKSCHKPKAIVHTEKVNMMSLTVLGLRMLFAKTVAVNFLLTAKLFFL

SEQ ID NO: 15451 - protein, 717 aa, synthetic construct
MALPVTALLLPLALLLHAARPQIVLTQSPALMSASPGEKVTMTCSASSSVRYMYWYQQKPRSSPKPWIHLTSNLASGVPARFSGSGSGTSYSLTISSMEAEDAATYYCQQWSSHPFTFGSGTKLEIKLEDLKNVFPPEVAVFEPSEAEISHTQKATLVCLATGFYPDHVELSWWVNGKEVHSGVCTDPQPLKEQPALNDSRYCLSSRLRVSATFWQNPRNHFRCQVQFYGLSENDEWTQDRAKPVTQIVSAEAWGRADDVIKIHWQEKKSNTILGSQEGNTMKTNDTYMKFSWLTVPEKSLDKEHRCIVRHENNKNGVDQEIIFPPIKTDVITMDPKDNCSKDANDTLLLQLTNTSAYYMYLLLLLKSVVYFAIITCCLLRRTAFCCNGEKSRAKRSGSGATNFSLLKQAGDVEENPGPTSMDWIWRILFLVGAATGAHSFEDVQLQESGPGLVKPSQSLSLTCTVTGFSITSDYSWNWIRQFPGNKLEWMGYISYSGHTSYNPSLESRISITRDTSKNQFFLQLNSVTTEDTATYYCTRGNWDVVYWGQGTLVTVSATRIQNPDPAVYQLRDSKSSDKSVCLFTDFDSQTNVSQSKDSDVYITDKCVLDMRSMDFKSNSAVAWSNKSDFACANAFNNSIIPEDTFFPSPESSDSTDHVKPKETENTKQPSKSCHKPKAIVHTEKVNMMSLTVLGLRMLFAKTVAVNFLLTAKLFFL

SEQ ID NO: 15452 - protein, 727 aa, synthetic construct
MALPVTALLLPLALLLHAARPDVVMTQSPLSLPVTLGQPASISCRSSQSIVHSDGNTYLEWYQQRPGQSPRRLIYKVSNRFSGVPDRFSGSGSGTDFTLKISRVEAEDVGVYYCFQGSHAPWTFGGGTKVEIKLEDLKNVFPPEVAVFEPSEAEISHTQKATLVCLATGFYPDHVELSWWVNGKEVHSGVCTDPQPLKEQPALNDSRYCLSSRLRVSATFWQNPRNHFRCQVQFYGLSENDEWTQDRAKPVTQIVSAEAWGRADDVIKIHWQEKKSNTILGSQEGNTMKTNDTYMKFSWLTVPEKSLDKEHRCIVRHENNKNGVDQEIIFPPIKTDVITMDPKDNCSKDANDTLLLQLTNTSAYYMYLLLLLKSVVYFAIITCCLLRRTAFCCNGEKSRAKRSGSGATNFSLLKQAGDVEENPGPTSMDWIWRILFLVGAATGAHSFEEVQLVESGGGLVQPGGSLRLSCAASGFTFSSYGMHWVRQAPGKGLEWVAYITTRSSTIYYADSVKGRFTISRDNAKNSLYLQMNSLRAEDTAVYYCTREPLTGYYAMDYWGQGTSVTVSSTRIQNPDPAVYQLRDSKSSDKSVCLFTDFDSQTNVSQSKDSDVYITDKCVLDMRSMDFKSNSAVAWSNKSDFACANAFNNSIIPEDTFFPSPESSDSTDHVKPKETENTKQPSKSCHKPKAIVHTEKVNMMSLTVLGLRMLFAKTVAVNFLLTAKLFFL

SEQ ID NO: 15453 - protein, 719 aa, synthetic construct
MALPVTALLLPLALLLHAARPDIQMTQSPSSLSASVGDRVTITCRASQSISLWLNWYQQKPGKAPKLLIYAASTLQSGVPSRFSGSGSGTDFTLTISSLQPEDFATYYCQQYYTSPYTFGQGTKVEIKRLEDLKNVFPPEVAVFEPSEAEISHTQKATLVCLATGFYPDHVELSWWVNGKEVHSGVCTDPQPLKEQPALNDSRYCLSSRLRVSATFWQNPRNHFRCQVQFYGLSENDEWTQDRAKPVTQIVSAEAWGRADDVIKIHWQEKKSNTILGSQEGNTMKTNDTYMKFSWLTVPEKSLDKEHRCIVRHENNKNGVDQEIIFPPIKTDVITMDPKDNCSKDANDTLLLQLTNTSAYYMYLLLLLKSVVYFAIITCCLLRRTAFCCNGEKSRAKRSGSGATNFSLLKQAGDVEENPGPTSMDWIWRILFLVGAATGAHSFEQVQLLESGGGLVQPGGSLRLSCAASGFTFSSYAMSWVRQAPGKGLEWVSVIRSSGSSTYYADSVKGRFTISRDNSKNTLYLQMNSLRAEDTAVYYCARGGGYFDYWGQGTLVTVSSTRIQNPDPAVYQLRDSKSSDKSVCLFTDFDSQTNVSQSKDSDVYITDKCVLDMRSMDFKSNSAVAWSNKSDFACANAFNNSIIPEDTFFPSPESSDSTDHVKPKETENTKQPSKSCHKPKAIVHTEKVNMMSLTVLGLRMLFAKTVAVNFLLTAKLFFL

SEQ ID NO: 15454 - protein, 722 aa, synthetic construct
MALPVTALLLPLALLLHAARPDIQMTQSPSSLSASVGDRVTITCRASQSISSYLNWYQQKPGKAPKLLIYAVSTLQSGVPSRFSGSGSGTDFTLTISSLQPEDFATYYCQQSGTFPPTTFGQGTKVEIKRLEDLKNVFPPEVAVFEPSEAEISHTQKATLVCLATGFYPDHVELSWWVNGKEVHSGVCTDPQPLKEQPALNDSRYCLSSRLRVSATFWQNPRNHFRCQVQFYGLSENDEWTQDRAKPVTQIVSAEAWGRADDVIKIHWQEKKSNTILGSQEGNTMKTNDTYMKFSWLTVPEKSLDKEHRCIVRHENNKNGVDQEIIFPPIKTDVITMDPKDNCSKDANDTLLLQLTNTSAYYMYLLLLLKSVVYFAIITCCLLRRTAFCCNGEKSRAKRSGSGATNFSLLKQAGDVEENPGPTSMDWIWRILFLVGAATGAHSFEQVQLLESGGGLVQPGGSLRLSCAASGFTFSSHGMHWVRQAPGKGLEWVSVISGSGSNTGYADSVKGRFTISRDNSKNTLYLQMNSLRAEDTAVYYCARQWGSYAFDSWGQGTLVTVSSTRIQNPDPAVYQLRDSKSSDKSVCLFTDFDSQTNVSQSKDSDVYITDKCVLDMRSMDFKSNSAVAWSNKSDFACANAFNNSIIPEDTFFPSPESSDSTDHVKPKETENTKQPSKSCHKPKAIVHTEKVNMMSLTVLGLRMLFAKTVAVNFLLTAKLFFL

SEQ ID NO: 15455 - protein, 732 aa, synthetic construct
MALPVTALLLPLALLLHAARPDIVMSQSPSSLAVSVGEKVTMSCKSSQSLLHSSNQKNYLAWYQQKPGQSPKVLIYWASTRESGVPDRFTGSGSGTDFTLTITSVKSEDLAVYYCQQYYSYPWTFGGGTRLEIKRLEDLKNVFPPEVAVFEPSEAEISHTQKATLVCLATGFYPDHVELSWWVNGKEVHSGVCTDPQPLKEQPALNDSRYCLSSRLRVSATFWQNPRNHFRCQVQFYGLSENDEWTQDRAKPVTQIVSAEAWGRADDVIKIHWQEKKSNTILGSQEGNTMKTNDTYMKFSWLTVPEKSLDKEHRCIVRHENNKNGVDQEIIFPPIKTDVITMDPKDNCSKDANDTLLLQLTNTSAYYMYLLLLLKSVVYFAIITCCLLRRTAFCCNGEKSRAKRSGSGATNFSLLKQAGDVEENPGPTSMDWIWRILFLVGAATGAHSFEEVQLQQSVAELVKPGASVKMSCKVSGYTLTDHTIHWMKQRPEQGLEWIGYIYPRDGITGYNEKFKGKATLTADTSSSTAYMQLNSLTSEDSAVYFCARWGYSYRNYAYYYDYWGQGTTLTVSSTRIQNPDPAVYQLRDSKSSDKSVCLFTDFDSQTNVSQSKDSDVYITDKCVLDMRSMDFKSNSAVAWSNKSDFACANAFNNSIIPEDTFFPSPESSDSTDHVKPKETENTKQPSKSCHKPKAIVHTEKVNMMSLTVLGLRMLFAKTVAVNFLLTAKLFFL

SEQ ID NO: 15456 - protein, 729 aa, synthetic construct
MALPVTALLLPLALLLHAARPEIVLTQSPGTLSLSPGERATLSCRASQSVSSSYLAWYQQKPGQAPRLLIYGTSSRATGIPDRFSGSGSGTDFTLTISRLEPEDFAVYYCQQYGSSPFTFGGGTKVEIKRLEDLKNVFPPEVAVFEPSEAEISHTQKATLVCLATGFYPDHVELSWWVNGKEVHSGVCTDPQPLKEQPALNDSRYCLSSRLRVSATFWQNPRNHFRCQVQFYGLSENDEWTQDRAKPVTQIVSAEAWGRADDVIKIHWQEKKSNTILGSQEGNTMKTNDTYMKFSWLTVPEKSLDKEHRCIVRHENNKNGVDQEIIFPPIKTDVITMDPKDNCSKDANDTLLLQLTNTSAYYMYLLLLLKSVVYFAIITCCLLRRTAFCCNGEKSRAKRSGSGATNFSLLKQAGDVEENPGPTSMDWIWRILFLVGAATGAHSFEQVQLQESGPGLAKPSETLSLTCTVSGDSITSYYWSWIRQPPGKGLEWIGYIYYSGSTNYNPSLKSRVTISVDTSKNQFSLKLSSVTAADTAVYYCARDQRRIAAAGTHFYGMDVWGQGTTVTVSSTRIQNPDPAVYQLRDSKSSDKSVCLFTDFDSQTNVSQSKDSDVYITDKCVLDMRSMDFKSNSAVAWSNKSDFACANAFNNSIIPEDTFFPSPESSDSTDHVKPKETENTKQPSKSCHKPKAIVHTEKVNMMSLTVLGLRMLFAKTVAVNFLLTAKLFFL

SEQ ID NO: 15457 - protein, 721 aa, synthetic construct
MALPVTALLLPLALLLHAARPDILLTQSPVILSVSPGERVSFSCRASQSIGTNIHWYQQRTNGSPRLLIKYASESISGIPSRFSGSGSGTDFTLSINSVESEDIADYYCQQNNNWPTTFGAGTKLELKLEDLKNVFPPEVAVFEPSEAEISHTQKATLVCLATGFYPDHVELSWWVNGKEVHSGVCTDPQPLKEQPALNDSRYCLSSRLRVSATFWQNPRNHFRCQVQFYGLSENDEWTQDRAKPVTQIVSAEAWGRADDVIKIHWQEKKSNTILGSQEGNTMKTNDTYMKFSWLTVPEKSLDKEHRCIVRHENNKNGVDQEIIFPPIKTDVITMDPKDNCSKDANDTLLLQLTNTSAYYMYLLLLLKSVVYFAIITCCLLRRTAFCCNGEKSRAKRSGSGATNFSLLKQAGDVEENPGPTSMDWIWRILFLVGAATGAHSFEQVQLKQSGPGLVQPSQSLSITCTVSGFSLTNYGVHWVRQSPGKGLEWLGVIWSGGNTDYNTPFTSRLSINKDNSKSQVFFKMNSLQSNDTAIYYCARALTYYDYEFAYWGQGTLVTVSATRIQNPDPAVYQLRDSKSSDKSVCLFTDFDSQTNVSQSKDSDVYITDKCVLDMRSMDFKSNSAVAWSNKSDFACANAFNNSIIPEDTFFPSPESSDSTDHVKPKETENTKQPSKSCHKPKAIVHTEKVNMMSLTVLGLRMLFAKTVAVNFLLTAKLFFL

SEQ ID NO: 15458 - protein, 714 aa, synthetic construct
MALPVTALLLPLALLLHAARPMTQSPKFLLVSAGDRVTLTCKASQSVNNDVYWYQQEPGQSPKLLIYWASTRESGVPDRFTGSGSGTDFTLTISSVQAEDLAVYYCKQSYNLYTFGGGTKLEIKRLEDLKNVFPPEVAVFEPSEAEISHTQKATLVCLATGFYPDHVELSWWVNGKEVHSGVCTDPQPLKEQPALNDSRYCLSSRLRVSATFWQNPRNHFRCQVQFYGLSENDEWTQDRAKPVTQIVSAEAWGRADDVIKIHWQEKKSNTILGSQEGNTMKTNDTYMKFSWLTVPEKSLDKEHRCIVRHENNKNGVDQEIIFPPIKTDVITMDPKDNCSKDANDTLLLQLTNTSAYYMYLLLLLKSVVYFAIITCCLLRRTAFCCNGEKSRAKRSGSGATNFSLLKQAGDVEENPGPTSMDWIWRILFLVGAATGAHSFEESGRGLVQPGGSRKLSCAASGFTFSTSGMHWVRQAPEKGLEWVAYISSGSTTIYHADTVKGRFTISRDNPKNTLFLQMTSLRSEDTAMYYCCARSGQFGNYFDYWGQGTTLTVSSTRIQNPDPAVYQLRDSKSSDKSVCLFTDFDSQTNVSQSKDSDVYITDKCVLDMRSMDFKSNSAVAWSNKSDFACANAFNNSIIPEDTFFPSPESSDSTDHVKPKETENTKQPSKSCHKPKAIVHTEKVNMMSLTVLGLRMLFAKTVAVNFLLTAKLFFL

SEQ ID NO: 15459 - protein, 719 aa, synthetic construct
MALPVTALLLPLALLLHAARPQSPSSLAVSAGEKVTMSCKSSQSLLNSRTRKNYLAWYQQKPGQSPKLLIYWASTRESGVPDRFTGSGSGTDFTLTISSVQAEDLAVYYCKQSNLYTFGGGTKLEIKLEDLKNVFPPEVAVFEPSEAEISHTQKATLVCLATGFYPDHVELSWWVNGKEVHSGVCTDPQPLKEQPALNDSRYCLSSRLRVSATFWQNPRNHFRCQVQFYGLSENDEWTQDRAKPVTQIVSAEAWGRADDVIKIHWQEKKSNTILGSQEGNTMKTNDTYMKFSWLTVPEKSLDKEHRCIVRHENNKNGVDQEIIFPPIKTDVITMDPKDNCSKDANDTLLLQLTNTSAYYMYLLLLLKSVVYFAIITCCLLRRTAFCCNGEKSRAKRSGSGATNFSLLKQAGDVEENPGPTSMDWIWRILFLVGAATGAHSFEQVQLEESGPELVKPGASVKLSCKASGYTFTEYIIHWVKQRSGQGLEWIGWFYPGSGSIKYNEKFKDKATLTADKSSSTVYMELSGLTSEDSAVYFCARHDGYSYFDYWGQGTTLTVSSTRIQNPDPAVYQLRDSKSSDKSVCLFTDFDSQTNVSQSKDSDVYITDKCVLDMRSMDFKSNSAVAWSNKSDFACANAFNNSIIPEDTFFPSPESSDSTDHVKPKETENTKQPSKSCHKPKAIVHTEKVNMMSLTVLGLRMLFAKTVAVNFLLTAKLFFL

SEQ ID NO: 15460 - protein, 722 aa, synthetic construct
MALPVTALLLPLALLLHAARPDIQMTQSPSSLSASLGERVSLTCRATQELSGYLSWLQQKPDGTIKRLIYAASTLDSGVPKRFSGNRSGSDYSLTISSLESEDFADYYCLQYAIYPYTFGGGTKLEIKLEDLKNVFPPEVAVFEPSEAEISHTQKATLVCLATGFYPDHVELSWWVNGKEVHSGVCTDPQPLKEQPALNDSRYCLSSRLRVSATFWQNPRNHFRCQVQFYGLSENDEWTQDRAKPVTQIVSAEAWGRADDVIKIHWQEKKSNTILGSQEGNTMKTNDTYMKFSWLTVPEKSLDKEHRCIVRHENNKNGVDQEIIFPPIKTDVITMDPKDNCSKDANDTLLLQLTNTSAYYMYLLLLLKSVVYFAIITCCLLRRTAFCCNGEKSRAKRSGSGATNFSLLKQAGDVEENPGPTSMDWIWRILFLVGAATGAHSFEEVQLQQSGPELVKPGASVKMSCKASGYTFTSYFIHWVKQKPGQGLEWIGFINPYNDGSKYNEKFKGKATLTSDKSSSTAYMELSSLTSEDSAVYYCTRDDGYYGYAMDYWGQGTSVTVSSTRIQNPDPAVYQLRDSKSSDKSVCLFTDFDSQTNVSQSKDSDVYITDKCVLDMRSMDFKSNSAVAWSNKSDFACANAFNNSIIPEDTFFPSPESSDSTDHVKPKETENTKQPSKSCHKPKAIVHTEKVNMMSLTVLGLRMLFAKTVAVNFLLTAKLFFL

SEQ ID NO: 15461 - protein, 727 aa, synthetic construct
MALPVTALLLPLALLLHAARPDTIVLTQSPASLAVSLGQRATISCRASESVDSYGNSFMHWYQQKPGQPPKLLIYLASNLESGVPARFSGSGSRTDFTLTIDPVEADDAATYYCQQNNYDPWTFGGGTKLEIKLEDLKNVFPPEVAVFEPSEAEISHTQKATLVCLATGFYPDHVELSWWVNGKEVHSGVCTDPQPLKEQPALNDSRYCLSSRLRVSATFWQNPRNHFRCQVQFYGLSENDEWTQDRAKPVTQIVSAEAWGRADDVIKIHWQEKKSNTILGSQEGNTMKTNDTYMKFSWLTVPEKSLDKEHRCIVRHENNKNGVDQEIIFPPIKTDVITMDPKDNCSKDANDTLLLQLTNTSAYYMYLLLLLKSVVYFAIITCCLLRRTAFCCNGEKSRAKRSGSGATNFSLLKQAGDVEENPGPTSMDWIWRILFLVGAATGAHSFEEVQLQQSGPELVKPGASVKMSCKASGYTFTSYVMHWVKQKPGQGLEWIGYINPYNDGTKYNEKFKGKATLTSDTSSSTAYMELNSLTSEDSAVYFCARPIYFDNDYFDYWGQGTTLKVSSTRIQNPDPAVYQLRDSKSSDKSVCLFTDFDSQTNVSQSKDSDVYITDKCVLDMRSMDFKSNSAVAWSNKSDFACANAFNNSIIPEDTFFPSPESSDSTDHVKPKETENTKQPSKSCHKPKAIVHTEKVNMMSLTVLGLRMLFAKTVAVNFLLTAKLFFL

SEQ ID NO: 15462 - protein, 722 aa, synthetic construct
MALPVTALLLPLALLLHAARPDIQMTQSPSSLSASVGDRVTITCKASQDVGIAVAWYQQKPGKVPKLLIYWASTRHTGVPDRFSGSGSGTDFTLTISSLQPEDVATYYCQQYSSYPYTFGQGTKVEIKRLEDLKNVFPPEVAVFEPSEAEISHTQKATLVCLATGFYPDHVELSWWVNGKEVHSGVCTDPQPLKEQPALNDSRYCLSSRLRVSATFWQNPRNHFRCQVQFYGLSENDEWTQDRAKPVTQIVSAEAWGRADDVIKIHWQEKKSNTILGSQEGNTMKTNDTYMKFSWLTVPEKSLDKEHRCIVRHENNKNGVDQEIIFPPIKTDVITMDPKDNCSKDANDTLLLQLTNTSAYYMYLLLLLKSVVYFAIITCCLLRRTAFCCNGEKSRAKRSGSGATNFSLLKQAGDVEENPGPTSMDWIWRILFLVGAATGAHSFEEVQLVESGGGLVQPGGSLRLSCAASGFDFSRYWMSWVRQAPGKGLEWIGEINPDSSTINYAPSLKDKFIISRDNAKNSLYLQMNSLRAEDTAVYYCARPDGNYWYFDVWGQGTLVTVSSTRIQNPDPAVYQLRDSKSSDKSVCLFTDFDSQTNVSQSKDSDVYITDKCVLDMRSMDFKSNSAVAWSNKSDFACANAFNNSIIPEDTFFPSPESSDSTDHVKPKETENTKQPSKSCHKPKAIVHTEKVNMMSLTVLGLRMLFAKTVAVNFLLTAKLFFL

SEQ ID NO: 15463 - protein, 722 aa, synthetic construct
MALPVTALLLPLALLLHAARPDIVMTQSQKSMSTSVGDRVSITCKASQDVITGVAWYQQKPGQSPKLLIYSASYRYTGVPDRFTGSGSGTDFTFTISNVQAEDLAVYYCQQHYSTPLTFGAGTKLELKLEDLKNVFPPEVAVFEPSEAEISHTQKATLVCLATGFYPDHVELSWWVNGKEVHSGVCTDPQPLKEQPALNDSRYCLSSRLRVSATFWQNPRNHFRCQVQFYGLSENDEWTQDRAKPVTQIVSAEAWGRADDVIKIHWQEKKSNTILGSQEGNTMKTNDTYMKFSWLTVPEKSLDKEHRCIVRHENNKNGVDQEIIFPPIKTDVITMDPKDNCSKDANDTLLLQLTNTSAYYMYLLLLLKSVVYFAIITCCLLRRTAFCCNGEKSRAKRSGSGATNFSLLKQAGDVEENPGPTSMDWIWRILFLVGAATGAHSFEQVQLQQPGAELVRPGASVKLSCKASGYSFTTYWMNWVKQRPGQGLEWIGMIHPSDSETRLNQKFKDKATLTVDKSSSTAYMQLSSPTSEDSAVYYCARSTMIATRAMDYWGQGTSVTVSSTRIQNPDPAVYQLRDSKSSDKSVCLFTDFDSQTNVSQSKDSDVYITDKCVLDMRSMDFKSNSAVAWSNKSDFACANAFNNSIIPEDTFFPSPESSDSTDHVKPKETENTKQPSKSCHKPKAIVHTEKVNMMSLTVLGLRMLFAKTVAVNFLLTAKLFFL

SEQ ID NO: 15464 - protein, 728 aa, synthetic construct
MALPVTALLLPLALLLHAARPQSVLTQPPSVSGAPGQRVTISCTGSGSNIGAPYDVSWYQQLPGTAPKLLIYHNNKRPSGVPDRFSGSKSGTSASLAITGLQAEDEADYYCATVEAGLSGSVFGGGTKLTVLGALEDLKNVFPPEVAVFEPSEAEISHTQKATLVCLATGFYPDHVELSWWVNGKEVHSGVCTDPQPLKEQPALNDSRYCLSSRLRVSATFWQNPRNHFRCQVQFYGLSENDEWTQDRAKPVTQIVSAEAWGRADDVIKIHWQEKKSNTILGSQEGNTMKTNDTYMKFSWLTVPEKSLDKEHRCIVRHENNKNGVDQEIIFPPIKTDVITMDPKDNCSKDANDTLLLQLTNTSAYYMYLLLLLKSVVYFAIITCCLLRRTAFCCNGEKSRAKRSGSGATNFSLLKQAGDVEENPGPTSMDWIWRILFLVGAATGAHSFEQVQLVQSGAEVKKPGASVKVSCKVSGYTLTELSIHWVRQAPGKGLEWMGGFDPEENEIVYAQRFQGRVTMTEDTSTDTAYMELSSLRSEDTAVYYCAIVGSFSPLTLGLWGQGTMVTVSSTRIQNPDPAVYQLRDSKSSDKSVCLFTDFDSQTNVSQSKDSDVYITDKCVLDMRSMDFKSNSAVAWSNKSDFACANAFNNSIIPEDTFFPSPESSDSTDHVKPKETENTKQPSKSCHKPKAIVHTEKVNMMSLTVLGLRMLFAKTVAVNFLLTAKLFFL

SEQ ID NO: 15465 - protein, 728 aa, synthetic construct
MALPVTALLLPLALLLHAARPQSVLTQPPSVSGAPGQRVTISCTGSGSNIGAPYDVSWYQQLPGTAPKLLIYHNNKRPSGVPDRFSGSKSGTSASLAITGLQAEDEADYYCQSYDSSSISTIFGGGTKLTVLGALEDLKNVFPPEVAVFEPSEAEISHTQKATLVCLATGFYPDHVELSWWVNGKEVHSGVCTDPQPLKEQPALNDSRYCLSSRLRVSATFWQNPRNHFRCQVQFYGLSENDEWTQDRAKPVTQIVSAEAWGRADDVIKIHWQEKKSNTILGSQEGNTMKTNDTYMKFSWLTVPEKSLDKEHRCIVRHENNKNGVDQEIIFPPIKTDVITMDPKDNCSKDANDTLLLQLTNTSAYYMYLLLLLKSVVYFAIITCCLLRRTAFCCNGEKSRAKRSGSGATNFSLLKQAGDVEENPGPTSMDWIWRILFLVGAATGAHSFEQVQLVQSGAEVKKPGASVKVSCKVSGYTLTELSIHWVRQAPGKGLEWMGGFDPEENEIVYAQRFQGRVTMTEDTSTDTAYMELSSLRSEDTAVYYCAIVGSFSGIAYRPWGQGTMVTVSSTRIQNPDPAVYQLRDSKSSDKSVCLFTDFDSQTNVSQSKDSDVYITDKCVLDMRSMDFKSNSAVAWSNKSDFACANAFNNSIIPEDTFFPSPESSDSTDHVKPKETENTKQPSKSCHKPKAIVHTEKVNMMSLTVLGLRMLFAKTVAVNFLLTAKLFFL

SEQ ID NO: 15466 - protein, 716 aa, synthetic construct
MALPVTALLLPLALLLHAARPDIQMTQSPSSLSASVGDRVTITCRASQGIRNNLAWYQQKPGKAPKRLIYAASNLQSGVPSRFTGSGSGTEFTLIVSSLQPEDFATYYCLQHHSYPLTSGGGTKVELEDLKNVFPPEVAVFEPSEAEISHTQKATLVCLATGFYPDHVELSWWVNGKEVHSGVCTDPQPLKEQPALNDSRYCLSSRLRVSATFWQNPRNHFRCQVQFYGLSENDEWTQDRAKPVTQIVSAEAWGRADDVIKIHWQEKKSNTILGSQEGNTMKTNDTYMKFSWLTVPEKSLDKEHRCIVRHENNKNGVDQEIIFPPIKTDVITMDPKDNCSKDANDTLLLQLTNTSAYYMYLLLLLKSVVYFAIITCCLLRRTAFCCNGEKSRAKRSGSGATNFSLLKQAGDVEENPGPTSMDWIWRILFLVGAATGAHSFEEVQVLESGGGLVQPGGSLRLSCAASGFTFSSYAMSWVRQAPGKGLEWVSAISGSGGSTNYADSVKGRFTISRDNSKNTLYLQMNSLRAEDTAVYYCAGSSGWSEYWGQGTLVTVSSTRIQNPDPAVYQLRDSKSSDKSVCLFTDFDSQTNVSQSKDSDVYITDKCVLDMRSMDFKSNSAVAWSNKSDFACANAFNNSIIPEDTFFPSPESSDSTDHVKPKETENTKQPSKSCHKPKAIVHTEKVNMMSLTVLGLRMLFAKTVAVNFLLTAKLFFL

SEQ ID NO: 15467 - protein, 722 aa, synthetic construct
MALPVTALLLPLALLLHAARPDEIQLVQSGAEVKKPGESLRISCKGSGFNIEDYYIHWVRQMPGKGLEWMGRIDPENDETKYGPIFQGHVTISADTSINTVYLQWSSLKASDTAMYYCAFRGGVYWGQGTTVTVSSLEDLKNVFPPEVAVFEPSEAEISHTQKATLVCLATGFYPDHVELSWWVNGKEVHSGVCTDPQPLKEQPALNDSRYCLSSRLRVSATFWQNPRNHFRCQVQFYGLSENDEWTQDRAKPVTQIVSAEAWGRADDVIKIHWQEKKSNTILGSQEGNTMKTNDTYMKFSWLTVPEKSLDKEHRCIVRHENNKNGVDQEIIFPPIKTDVITMDPKDNCSKDANDTLLLQLTNTSAYYMYLLLLLKSVVYFAIITCCLLRRTAFCCNGEKSRAKRSGSGATNFSLLKQAGDVEENPGPTSMDWIWRILFLVGAATGAHSFEDVVMTQSPDSLAVSLGERATINCKSSQSLLDSDGKTYLNWLQQKPGQPPKRLISLVSKLDSGVPDRFSGSGSGTDFTLTISSLQAEDVAVYYCWQGTHFPGTFGGGTKVEIKTRIQNPDPAVYQLRDSKSSDKSVCLFTDFDSQTNVSQSKDSDVYITDKCVLDMRSMDFKSNSAVAWSNKSDFACANAFNNSIIPEDTFFPSPESSDSTDHVKPKETENTKQPSKSCHKPKAIVHTEKVNMMSLTVLGLRMLFAKTVAVNFLLTAKLFFL

SEQ ID NO: 15468 - protein, 729 aa, synthetic construct
MALPVTALLLPLALLLHAARPDELVMTQSPSSLTVTAGEKVTMSCKSSQSLLNSGNQKNYLTWYQQKPGQPPKLLIYWASTRESGVPDRFTGSGSGTDFTLTISSVQAEDLAVYYCQNDYSYPLTFGAGTKLEIKLEDLKNVFPPEVAVFEPSEAEISHTQKATLVCLATGFYPDHVELSWWVNGKEVHSGVCTDPQPLKEQPALNDSRYCLSSRLRVSATFWQNPRNHFRCQVQFYGLSENDEWTQDRAKPVTQIVSAEAWGRADDVIKIHWQEKKSNTILGSQEGNTMKTNDTYMKFSWLTVPEKSLDKEHRCIVRHENNKNGVDQEIIFPPIKTDVITMDPKDNCSKDANDTLLLQLTNTSAYYMYLLLLLKSVVYFAIITCCLLRRTAFCCNGEKSRAKRSGSGATNFSLLKQAGDVEENPGPTSMDWIWRILFLVGAATGAHSFEEVQLLEQSGAELVRPGTSVKISCKASGYAFTNYWLGWVKQRPGHGLEWIGDIFPGSGNIHYNEKFKGKATLTADKSSSTAYMQLSSLTFEDSAVYFCARLRNWDEPMDYWGQGTTVTVSSTRIQNPDPAVYQLRDSKSSDKSVCLFTDFDSQTNVSQSKDSDVYITDKCVLDMRSMDFKSNSAVAWSNKSDFACANAFNNSIIPEDTFFPSPESSDSTDHVKPKETENTKQPSKSCHKPKAIVHTEKVNMMSLTVLGLRMLFAKTVAVNFLLTAKLFFL

SEQ ID NO: 15469 - protein, 730 aa, synthetic construct
MALPVTALLLPLALLLHAARPDELQMTQSPSSLSASVGDRVTITCRASQSISSYLNWYQQKPGQPPKLLIYWASTRESGVPDRFSGSESGTNYTLTISSLQPEDFATYFCQQSDSLPITFGQGTRLDIQLEDLKNVFPPEVAVFEPSEAEISHTQKATLVCLATGFYPDHVELSWWVNGKEVHSGVCTDPQPLKEQPALNDSRYCLSSRLRVSATFWQNPRNHFRCQVQFYGLSENDEWTQDRAKPVTQIVSAEAWGRADDVIKIHWQEKKSNTILGSQEGNTMKTNDTYMKFSWLTVPEKSLDKEHRCIVRHENNKNGVDQEIIFPPIKTDVITMDPKDNCSKDANDTLLLQLTNTSAYYMYLLLLLKSVVYFAIITCCLLRRTAFCCNGEKSRAKRSGSGATNFSLLKQAGDVEENPGPTSMDWIWRILFLVGAATGAHSFEEVQLLESGGGVVQPGRSLRLSCAASGFTFSSYGMHWVRQAPGKGLEWVAVISYDGSNKYYADSVKGRFTISRDNSKNTLYLQMNSLRAEDTAVYYCAKDMGWGSGWRPYYYYGMDVWGQGTTVTVSSTRIQNPDPAVYQLRDSKSSDKSVCLFTDFDSQTNVSQSKDSDVYITDKCVLDMRSMDFKSNSAVAWSNKSDFACANAFNNSIIPEDTFFPSPESSDSTDHVKPKETENTKQPSKSCHKPKAIVHTEKVNMMSLTVLGLRMLFAKTVAVNFLLTAKLFFL

SEQ ID NO: 15470 - protein, 727 aa, synthetic construct
MALPVTALLLPLALLLHAARPDDIQMTQSPSSLSASVGDRVTITCRASQSISSYLNWYQQKPGKAPKLLIYAASSLQSGVPSRFSGSGSGTDFTLTISSLQPEDLATYYCQQSYSTPFTFGPGTKVDIKLEDLKNVFPPEVAVFEPSEAEISHTQKATLVCLATGFYPDHVELSWWVNGKEVHSGVCTDPQPLKEQPALNDSRYCLSSRLRVSATFWQNPRNHFRCQVQFYGLSENDEWTQDRAKPVTQIVSAEAWGRADDVIKIHWQEKKSNTILGSQEGNTMKTNDTYMKFSWLTVPEKSLDKEHRCIVRHENNKNGVDQEIIFPPIKTDVITMDPKDNCSKDANDTLLLQLTNTSAYYMYLLLLLKSVVYFAIITCCLLRRTAFCCNGEKSRAKRSGSGATNFSLLKQAGDVEENPGPTSMDWIWRILFLVGAATGAHSFEVHEVQLVQSGAEVKKPGSSVKVSCKASGGTFSSYAISWVRQAPGQGLEWMGGIIPIFGTANYAQKFQGRVTITADKSTSTAYMELSSLRSEDTAVYYCATFALFGFREQAFDIWGQGTTVTVSSTRIQNPDPAVYQLRDSKSSDKSVCLFTDFDSQTNVSQSKDSDVYITDKCVLDMRSMDFKSNSAVAWSNKSDFACANAFNNSIIPEDTFFPSPESSDSTDHVKPKETENTKQPSKSCHKPKAIVHTEKVNMMSLTVLGLRMLFAKTVAVNFLLTAKLFFL

SEQ ID NO: 15471 - protein, 725 aa, synthetic construct
MALPVTALLLPLALLLHAARPDIVLTQSPLSLAVSLGQPAIISCKASQSVSFAGTSLMHWYHQKPGQQPRLLIYRASNLEAGVPDRFSGSGSKTDFTLTISPVEAEDAATYYCQQSREYPYTFGGGTKLEIKRLEDLKNVFPPEVAVFEPSEAEISHTQKATLVCLATGFYPDHVELSWWVNGKEVHSGVCTDPQPLKEQPALNDSRYCLSSRLRVSATFWQNPRNHFRCQVQFYGLSENDEWTQDRAKPVTQIVSAEAWGRADDVIKIHWQEKKSNTILGSQEGNTMKTNDTYMKFSWLTVPEKSLDKEHRCIVRHENNKNGVDQEIIFPPIKTDVITMDPKDNCSKDANDTLLLQLTNTSAYYMYLLLLLKSVVYFAIITCCLLRRTAFCCNGEKSRAKRSGSGATNFSLLKQAGDVEENPGPTSMDWIWRILFLVGAATGAHSFEQVQLVQSGAEVVKPGASVKISCKASGYTFTGYFMNWVKQSPGQSLEWIGRIHPYDGDTFYNQKFQGKATLTVDKSSNTAHMELLSLTSEDFAVYYCTRYDGSRAMDYWGQGTTVTVSSTRIQNPDPAVYQLRDSKSSDKSVCLFTDFDSQTNVSQSKDSDVYITDKCVLDMRSMDFKSNSAVAWSNKSDFACANAFNNSIIPEDTFFPSPESSDSTDHVKPKETENTKQPSKSCHKPKAIVHTEKVNMMSLTVLGLRMLFAKTVAVNFLLTAKLFFL

SEQ ID NO: 15472 - protein, 722 aa, synthetic construct
MALPVTALLLPLALLLHAARPDDVVMTQTPLSLPVTPGEPASISCRSSQSLVHRNGNTYLHWYLQKPGQSPKLLIHKVSNRFSGVPDRFSGSGSGTDFTLKISRVEAEDLGVYFCSQSTHVPPLTFGAGTKLELKLEDLKNVFPPEVAVFEPSEAEISHTQKATLVCLATGFYPDHVELSWWVNGKEVHSGVCTDPQPLKEQPALNDSRYCLSSRLRVSATFWQNPRNHFRCQVQFYGLSENDEWTQDRAKPVTQIVSAEAWGRADDVIKIHWQEKKSNTILGSQEGNTMKTNDTYMKFSWLTVPEKSLDKEHRCIVRHENNKNGVDQEIIFPPIKTDVITMDPKDNCSKDANDTLLLQLTNTSAYYMYLLLLLKSVVYFAIITCCLLRRTAFCCNGEKSRAKRSGSGATNFSLLKQAGDVEENPGPTSMDWIWRILFLVGAATGAHSFEEVQLVQSGAEVEKPGASVKISCKASGSSFTGYNMNWVRQNIGKSLEWIGAIDPYYGGTSYNQKFKGRATLTVDKSTSTAYMHLKSLRSEDTAVYYCVSGMEYWGQGTSVTVSSTRIQNPDPAVYQLRDSKSSDKSVCLFTDFDSQTNVSQSKDSDVYITDKCVLDMRSMDFKSNSAVAWSNKSDFACANAFNNSIIPEDTFFPSPESSDSTDHVKPKETENTKQPSKSCHKPKAIVHTEKVNMMSLTVLGLRMLFAKTVAVNFLLTAKLFFL

SEQ ID NO: 15473 - protein, 720 aa, synthetic construct
MALPVTALLLPLALLLHAARPDEIVMTQTPATLSVSAGERVTITCKASQSVSNDVTWYQQKPGQAPRLLIYSASNRYSGVPARFSGSGYGTEFTFTISSVQSEDFAVYFCQQDYSSFGQGTKLEIKRLEDLKNVFPPEVAVFEPSEAEISHTQKATLVCLATGFYPDHVELSWWVNGKEVHSGVCTDPQPLKEQPALNDSRYCLSSRLRVSATFWQNPRNHFRCQVQFYGLSENDEWTQDRAKPVTQIVSAEAWGRADDVIKIHWQEKKSNTILGSQEGNTMKTNDTYMKFSWLTVPEKSLDKEHRCIVRHENNKNGVDQEIIFPPIKTDVITMDPKDNCSKDANDTLLLQLTNTSAYYMYLLLLLKSVVYFAIITCCLLRRTAFCCNGEKSRAKRSGSGATNFSLLKQAGDVEENPGPTSMDWIWRILFLVGAATGAHSFEQVQLVESGPGVVQPGRSLRISCAVSGFSVTNYGVHWVRQPPGKGLEWLGVIWAGGITNYNSAFMSRLTISKDNSKNTVYLQMNSLRAEDTAMYYCASRGGHYGYALDYWGQGTLVTVSSTRIQNPDPAVYQLRDSKSSDKSVCLFTDFDSQTNVSQSKDSDVYITDKCVLDMRSMDFKSNSAVAWSNKSDFACANAFNNSIIPEDTFFPSPESSDSTDHVKPKETENTKQPSKSCHKPKAIVHTEKVNMMSLTVLGLRMLFAKTVAVNFLLTAKLFFL

SEQ ID NO: 15474 - protein, 722 aa, synthetic construct
MALPVTALLLPLALLLHAARPDIQMTQTASSLPASLGDRVTISCSASQDISNYLNWYQQKPDGTVKLLIFYSSNLHSGVPSRFSGGGSGTDYSLTISNLEPEDIATYFCHQYSKLPWTFGGGTKLEIKRLEDLKNVFPPEVAVFEPSEAEISHTQKATLVCLATGFYPDHVELSWWVNGKEVHSGVCTDPQPLKEQPALNDSRYCLSSRLRVSATFWQNPRNHFRCQVQFYGLSENDEWTQDRAKPVTQIVSAEAWGRADDVIKIHWQEKKSNTILGSQEGNTMKTNDTYMKFSWLTVPEKSLDKEHRCIVRHENNKNGVDQEIIFPPIKTDVITMDPKDNCSKDANDTLLLQLTNTSAYYMYLLLLLKSVVYFAIITCCLLRRTAFCCNGEKSRAKRSGSGATNFSLLKQAGDVEENPGPTSMDWIWRILFLVGAATGAHSFEEVTLVESGGDFVKPGGSLKVSCAASGFAFSHYAMSWVRQTPAKRLEWVAYISSGGSGTYYSDSVKGRFTISRDNAKNTLYLQMRSLRSEDSAMYFCTRVKLGTYYFDSWGQGTTLTVSSTRIQNPDPAVYQLRDSKSSDKSVCLFTDFDSQTNVSQSKDSDVYITDKCVLDMRSMDFKSNSAVAWSNKSDFACANAFNNSIIPEDTFFPSPESSDSTDHVKPKETENTKQPSKSCHKPKAIVHTEKVNMMSLTVLGLRMLFAKTVAVNFLLTAKLFFL

SEQ ID NO: 15475 - protein, 724 aa, synthetic construct
MALPVTALLLPLALLLHAARPQFVLTQSPSASAALGASAKLTCTLSSAHKTYTIDWYQQQKGKAPRYLIQVKSDGTYTKATGVPDRFSGSSSGADRYLIIPSVQADDEADYYCGTDYTGGYVFGGGTQLTVTLEDLKNVFPPEVAVFEPSEAEISHTQKATLVCLATGFYPDHVELSWWVNGKEVHSGVCTDPQPLKEQPALNDSRYCLSSRLRVSATFWQNPRNHFRCQVQFYGLSENDEWTQDRAKPVTQIVSAEAWGRADDVIKIHWQEKKSNTILGSQEGNTMKTNDTYMKFSWLTVPEKSLDKEHRCIVRHENNKNGVDQEIIFPPIKTDVITMDPKDNCSKDANDTLLLQLTNTSAYYMYLLLLLKSVVYFAIITCCLLRRTAFCCNGEKSRAKRSGSGATNFSLLKQAGDVEENPGPTSMDWIWRILFLVGAATGAHSFEEQLKESGGGLFKPTDTLTLTCTVSGFSLSYYGVNWVRQAPGNGLEWIGTIGGSGDTYYASWAKSRSTIIRNTNENTVTLKMTSLTAADTATYFCVRYANIGYEYFNVWGPGTLVTVSSTRIQNPDPAVYQLRDSKSSDKSVCLFTDFDSQTNVSQSKDSDVYITDKCVLDMRSMDFKSNSAVAWSNKSDFACANAFNNSIIPEDTFFPSPESSDSTDHVKPKETENTKQPSKSCHKPKAIVHTEKVNMMSLTVLGLRMLFAKTVAVNFLLTAKLFFL

SEQ ID NO: 15476 - protein, 729 aa, synthetic construct
MALPVTALLLPLALLLHAARPQFVLTQSPSVSAALGASAKLTCTLSSAHKTYTIDWYQQQQGEAPRYLMQVKSDGSYTKGTGVPDRFSGSSSGADRYLIIPSVQADDEAGYVCGADDNGGYVFGGGTQLTVTLEDLKNVFPPEVAVFEPSEAEISHTQKATLVCLATGFYPDHVELSWWVNGKEVHSGVCTDPQPLKEQPALNDSRYCLSSRLRVSATFWQNPRNHFRCQVQFYGLSENDEWTQDRAKPVTQIVSAEAWGRADDVIKIHWQEKKSNTILGSQEGNTMKTNDTYMKFSWLTVPEKSLDKEHRCIVRHENNKNGVDQEIIFPPIKTDVITMDPKDNCSKDANDTLLLQLTNTSAYYMYLLLLLKSVVYFAIITCCLLRRTAFCCNGEKSRAKRSGSGATNFSLLKQAGDVEENPGPTSMDWIWRILFLVGAATGAHSFEQSVKESEGGLFKPTDTLTLTCTVSGFSLSRHALTWVRQAPGNGLEWIGAIDNAGTTYYASWAKSRSTITRNTDLHTVTLKMTSLTASDTATYFCARVFYDINSGYYLDGMDLWGPGTLVTVSSTRIQNPDPAVYQLRDSKSSDKSVCLFTDFDSQTNVSQSKDSDVYITDKCVLDMRSMDFKSNSAVAWSNKSDFACANAFNNSIIPEDTFFPSPESSDSTDHVKPKETENTKQPSKSCHKPKAIVHTEKVNMMSLTVLGLRMLFAKTVAVNFLLTAKLFFL

SEQ ID NO: 15477 - protein, 723 aa, synthetic construct
MALPVTALLLPLALLLHAARPDIQMTQSPSSLSASVGDRVTITCRASQGISSWLAWYQQKPEKAPKSLIYAASSLQSGVPSRFSGSGSGTDFTLTISSLQPEDFATYYCQQYNSYPPTFGGGTKVEIKLEDLKNVFPPEVAVFEPSEAEISHTQKATLVCLATGFYPDHVELSWWVNGKEVHSGVCTDPQPLKEQPALNDSRYCLSSRLRVSATFWQNPRNHFRCQVQFYGLSENDEWTQDRAKPVTQIVSAEAWGRADDVIKIHWQEKKSNTILGSQEGNTMKTNDTYMKFSWLTVPEKSLDKEHRCIVRHENNKNGVDQEIIFPPIKTDVITMDPKDNCSKDANDTLLLQLTNTSAYYMYLLLLLKSVVYFAIITCCLLRRTAFCCNGEKSRAKRSGSGATNFSLLKQAGDVEENPGPTSMDWIWRILFLVGAATGAHSFEEVQLVESGGGLVQPGESLRLSCVASGFTFSRYKMNWVRQAPGKGLEWVSYISRSGRDIYYADSVKGRFTISRDNAKNSLYLQMNSLRDEDTAVYYCAGTVTTYYYFGMDVWGHGTTVTVSSTRIQNPDPAVYQLRDSKSSDKSVCLFTDFDSQTNVSQSKDSDVYITDKCVLDMRSMDFKSNSAVAWSNKSDFACANAFNNSIIPEDTFFPSPESSDSTDHVKPKETENTKQPSKSCHKPKAIVHTEKVNMMSLTVLGLRMLFAKTVAVNFLLTAKLFFL

SEQ ID NO: 15478 - protein, 724 aa, synthetic construct
MALPVTALLLPLALLLHAARPDIQMTQSPSSLSASVGDRVTITCRASQGISSWLAWYQQKPEKAPKSLIYAASSLQSGVPSRFSGSGSGTDFTLTISSLQPEDFATYYCQQYNSYPPTFGGGTKVEIKLEDLKNVFPPEVAVFEPSEAEISHTQKATLVCLATGFYPDHVELSWWVNGKEVHSGVCTDPQPLKEQPALNDSRYCLSSRLRVSATFWQNPRNHFRCQVQFYGLSENDEWTQDRAKPVTQIVSAEAWGRADDVIKIHWQEKKSNTILGSQEGNTMKTNDTYMKFSWLTVPEKSLDKEHRCIVRHENNKNGVDQEIIFPPIKTDVITMDPKDNCSKDANDTLLLQLTNTSAYYMYLLLLLKSVVYFAIITCCLLRRTAFCCNGEKSRAKRSGSGATNFSLLKQAGDVEENPGPTSMDWIWRILFLVGAATGAHSFEEVQLVESGGGSVQPGESLRLSCVASGFTFSRYKMNWVRQAPGKGLEWVSYISRSGRDIYYADSVKGRFTISRDNAKNSLYLQMNSLRDEDTAVYYCAGTVTTYYYDFGMDVWGQGTTVTVSSTRIQNPDPAVYQLRDSKSSDKSVCLFTDFDSQTNVSQSKDSDVYITDKCVLDMRSMDFKSNSAVAWSNKSDFACANAFNNSIIPEDTFFPSPESSDSTDHVKPKETENTKQPSKSCHKPKAIVHTEKVNMMSLTVLGLRMLFAKTVAVNFLLTAKLFFL

SEQ ID NO: 15479 - protein, 722 aa, synthetic construct
MALPVTALLLPLALLLHAARPQSVLTQPPSASGTPGQRVTISCSGSRSNVGGNYVFWYQQVPGATPKLLIYRSNQRPSGVPDRFAGSKSGSSASLAISGLRSEDEADYYCATWDDSLSGFVFGTGTKVTVLGLEDLKNVFPPEVAVFEPSEAEISHTQKATLVCLATGFYPDHVELSWWVNGKEVHSGVCTDPQPLKEQPALNDSRYCLSSRLRVSATFWQNPRNHFRCQVQFYGLSENDEWTQDRAKPVTQIVSAEAWGRADDVIKIHWQEKKSNTILGSQEGNTMKTNDTYMKFSWLTVPEKSLDKEHRCIVRHENNKNGVDQEIIFPPIKTDVITMDPKDNCSKDANDTLLLQLTNTSAYYMYLLLLLKSVVYFAIITCCLLRRTAFCCNGEKSRAKRSGSGATNFSLLKQAGDVEENPGPTSMDWIWRILFLVGAATGAHSFEVQLVESGGGLVKPGGSLRLSCAASGFTFSDYYMSWIRQAPGKGLEWVSYISSSGSTIYYADSVKGRFTISRDNAKNSLYLQMNSLRAEDTAVYYCARGYGKAYDQWGQGTLVTVSSTRIQNPDPAVYQLRDSKSSDKSVCLFTDFDSQTNVSQSKDSDVYITDKCVLDMRSMDFKSNSAVAWSNKSDFACANAFNNSIIPEDTFFPSPESSDSTDHVKPKETENTKQPSKSCHKPKAIVHTEKVNMMSLTVLGLRMLFAKTVAVNFLLTAKLFFL

SEQ ID NO: 15480 - protein, 721 aa, synthetic construct
MALPVTALLLPLALLLHAARPQSVVTQPPSMSAAPGQQVTISCSGGNSNIERNYVSWYLQLPGTAPKLVIFDNDRRPSGIPDRFSGSKSGTSATLGITGLQTGDEADYYCGTWDSSLRGWVFGGGTKLTVLGLEDLKNVFPPEVAVFEPSEAEISHTQKATLVCLATGFYPDHVELSWWVNGKEVHSGVCTDPQPLKEQPALNDSRYCLSSRLRVSATFWQNPRNHFRCQVQFYGLSENDEWTQDRAKPVTQIVSAEAWGRADDVIKIHWQEKKSNTILGSQEGNTMKTNDTYMKFSWLTVPEKSLDKEHRCIVRHENNKNGVDQEIIFPPIKTDVITMDPKDNCSKDANDTLLLQLTNTSAYYMYLLLLLKSVVYFAIITCCLLRRTAFCCNGEKSRAKRSGSGATNFSLLKQAGDVEENPGPTSMDWIWRILFLVGAATGAHSFEVQLVESGGGLIQPGGSLRLSCAASGFTFSNYAMNWVRQAPGKGLEWVSTINGRGSSTIYADSVKGRFTISRDNSKNTLYLQMNSLRAEDTATYYCARYISRGLGDSWGQGTLVTVTRIQNPDPAVYQLRDSKSSDKSVCLFTDFDSQTNVSQSKDSDVYITDKCVLDMRSMDFKSNSAVAWSNKSDFACANAFNNSIIPEDTFFPSPESSDSTDHVKPKETENTKQPSKSCHKPKAIVHTEKVNMMSLTVLGLRMLFAKTVAVNFLLTAKLFFL

SEQ ID NO: 15481 - protein, 722 aa, synthetic construct
MALPVTALLLPLALLLHAARPDVVMTQTPLSLPVSLGDQASISCRSSQSLVHSNGNTYLHWYLQKPGQSPKLLIYKVSNRFSGVPDRFSGSGSGTDFTLKISRVEAEDLGVYFCSQNTPVPPKFGSGTKLEIKLEDLKNVFPPEVAVFEPSEAEISHTQKATLVCLATGFYPDHVELSWWVNGKEVHSGVCTDPQPLKEQPALNDSRYCLSSRLRVSATFWQNPRNHFRCQVQFYGLSENDEWTQDRAKPVTQIVSAEAWGRADDVIKIHWQEKKSNTILGSQEGNTMKTNDTYMKFSWLTVPEKSLDKEHRCIVRHENNKNGVDQEIIFPPIKTDVITMDPKDNCSKDANDTLLLQLTNTSAYYMYLLLLLKSVVYFAIITCCLLRRTAFCCNGEKSRAKRSGSGATNFSLLKQAGDVEENPGPTSMDWIWRILFLVGAATGAHSFEQVQLQQSGAELVRPGASVKLSCKASGYTFNDYEMHWVKQTPVHGLKWIGALEPKTGDTAYSQKFKGKATLTADKSSSTAYMELRSLTSEDSAVYYCTSCYYYTYSGQGTLVTVSATRIQNPDPAVYQLRDSKSSDKSVCLFTDFDSQTNVSQSKDSDVYITDKCVLDMRSMDFKSNSAVAWSNKSDFACANAFNNSIIPEDTFFPSPESSDSTDHVKPKETENTKQPSKSCHKPKAIVHTEKVNMMSLTVLGLRMLFAKTVAVNFLLTAKLFFL

SEQ ID NO: 15482 - protein, 721 aa, synthetic construct
MALPVTALLLPLALLLHAARPDIQLTQSPSSLSASVGDRVTITCRASQGIRNDLGWYQQKPGKAPKRLIYAASSLQNGVPSRFSGSGSGTEFTLTISSLQPEDFATYYCLQHNTYPAFGQGTKVEIKRLEDLKNVFPPEVAVFEPSEAEISHTQKATLVCLATGFYPDHVELSWWVNGKEVHSGVCTDPQPLKEQPALNDSRYCLSSRLRVSATFWQNPRNHFRCQVQFYGLSENDEWTQDRAKPVTQIVSAEAWGRADDVIKIHWQEKKSNTILGSQEGNTMKTNDTYMKFSWLTVPEKSLDKEHRCIVRHENNKNGVDQEIIFPPIKTDVITMDPKDNCSKDANDTLLLQLTNTSAYYMYLLLLLKSVVYFAIITCCLLRRTAFCCNGEKSRAKRSGSGATNFSLLKQAGDVEENPGPTSMDWIWRILFLVGAATGAHSFEQVQLQESGPGLVKPSQTLSLTCTVSGGSISSFNYYWSWIRHHPGKGLEWIGYIYYSGSTYSNPSLKSRVTISVDTSKNQFSLTLSSVTAADTAVYYCARGYNWNYFDYWGQGTLVTVSSTRIQNPDPAVYQLRDSKSSDKSVCLFTDFDSQTNVSQSKDSDVYITDKCVLDMRSMDFKSNSAVAWSNKSDFACANAFNNSIIPEDTFFPSPESSDSTDHVKPKETENTKQPSKSCHKPKAIVHTEKVNMMSLTVLGLRMLFAKTVAVNFLLTAKLFFL

SEQ ID NO: 15483 - protein, 723 aa, synthetic construct
MALPVTALLLPLALLLHAARPDDIVLTQSPASLAVSLGQSVTISCRASESVEYYGTSLMQWYQQKPGQPPKLLIYATSNVESGVPARFSGSGSGTDFSLNIHPVEEDDIAMYFCQQSRKLPSTFGGGTKLEIKLEDLKNVFPPEVAVFEPSEAEISHTQKATLVCLATGFYPDHVELSWWVNGKEVHSGVCTDPQPLKEQPALNDSRYCLSSRLRVSATFWQNPRNHFRCQVQFYGLSENDEWTQDRAKPVTQIVSAEAWGRADDVIKIHWQEKKSNTILGSQEGNTMKTNDTYMKFSWLTVPEKSLDKEHRCIVRHENNKNGVDQEIIFPPIKTDVITMDPKDNCSKDANDTLLLQLTNTSAYYMYLLLLLKSVVYFAIITCCLLRRTAFCCNGEKSRAKRSGSGATNFSLLKQAGDVEENPGPTSMDWIWRILFLVGAATGAHSFEDVRLQESGPGQVKPSQTVSLTCSVTGYSITNGNHWWNWIRQVSGSKLEWIGYISSSGSTDSNPSLKSRISITRDTSKNQLFLQLNSVTTEDIATYYCARGYYFDYWGQGTTLTVSSTRIQNPDPAVYQLRDSKSSDKSVCLFTDFDSQTNVSQSKDSDVYITDKCVLDMRSMDFKSNSAVAWSNKSDFACANAFNNSIIPEDTFFPSPESSDSTDHVKPKETENTKQPSKSCHKPKAIVHTEKVNMMSLTVLGLRMLFAKTVAVNFLLTAKLFFL

SEQ ID NO: 15484 - protein, 722 aa, synthetic construct
MALPVTALLLPLALLLHAARPDIQMTQSPSSLSASVGDRVTITCRASQDVNTAVAWYQQKPGKAPKLLIYSASFLESGVPSRFSGSRSGTDFTLTISSLQPEDFATYYCQQHYTTPPTFGQTKVEIKRLEDLKNVFPPEVAVFEPSEAEISHTQKATLVCLATGFYPDHVELSWWVNGKEVHSGVCTDPQPLKEQPALNDSRYCLSSRLRVSATFWQNPRNHFRCQVQFYGLSENDEWTQDRAKPVTQIVSAEAWGRADDVIKIHWQEKKSNTILGSQEGNTMKTNDTYMKFSWLTVPEKSLDKEHRCIVRHENNKNGVDQEIIFPPIKTDVITMDPKDNCSKDANDTLLLQLTNTSAYYMYLLLLLKSVVYFAIITCCLLRRTAFCCNGEKSRAKRSGSGATNFSLLKQAGDVEENPGPTSMDWIWRILFLVGAATGAHSFEEVQLVESGGGLVQPGGSLRLSCAASGFNIKDTYIHWVRQAPGKGLEWVARIYPTNGYTRYADSVKGRFTISADTSKNTAYLQMNSLRAEDTAVYYCSRWGGDGFYAMDVWGQGTLVTVSSTRIQNPDPAVYQLRDSKSSDKSVCLFTDFDSQTNVSQSKDSDVYITDKCVLDMRSMDFKSNSAVAWSNKSDFACANAFNNSIIPEDTFFPSPESSDSTDHVKPKETENTKQPSKSCHKPKAIVHTEKVNMMSLTVLGLRMLFAKTVAVNFLLTAKLFFL

SEQ ID NO: 15485 - protein, 721 aa, synthetic construct
MALPVTALLLPLALLLHAARPDQSVLTQPPSVSVAPGKTARIPCEGNYIGSSNVHWYQQKPGQAPVLVIHFDSDRPSGIPDRFSGSNSGNMATLTISRVEAGDEADYYCQVWENHGWVFGGGTKLTVLSLEDLKNVFPPEVAVFEPSEAEISHTQKATLVCLATGFYPDHVELSWWVNGKEVHSGVCTDPQPLKEQPALNDSRYCLSSRLRVSATFWQNPRNHFRCQVQFYGLSENDEWTQDRAKPVTQIVSAEAWGRADDVIKIHWQEKKSNTILGSQEGNTMKTNDTYMKFSWLTVPEKSLDKEHRCIVRHENNKNGVDQEIIFPPIKTDVITMDPKDNCSKDANDTLLLQLTNTSAYYMYLLLLLKSVVYFAIITCCLLRRTAFCCNGEKSRAKRSGSGATNFSLLKQAGDVEENPGPTSMDWIWRILFLVGAATGAHSFEEVQLVETGGGLVQPGESLRLSCAASGFTFSDYEMNWVRQAPGKGLEWVSYISSSGSTIYYADSVKGRFTIYRDNAKNSLYLQMNSLRAEDTALYYCARAWGVGPPDYWGQGTLVTVSSTRIQNPDPAVYQLRDSKSSDKSVCLFTDFDSQTNVSQSKDSDVYITDKCVLDMRSMDFKSNSAVAWSNKSDFACANAFNNSIIPEDTFFPSPESSDSTDHVKPKETENTKQPSKSCHKPKAIVHTEKVNMMSLTVLGLRMLFAKTVAVNFLLTAKLFFL

SEQ ID NO: 15486 - protein, 729 aa, synthetic construct
MALPVTALLLPLALLLHAARPDIQMTQSPSSLSASVGDTVTITCQANGYLNWYQQRRGKAPKLLIYDGSKLERGVPSRFSGRRWGQEYNLTINNLQPEDIATYFCQVYEFVVPGTRLDLKRTVAAPLEDLKNVFPPEVAVFEPSEAEISHTQKATLVCLATGFYPDHVELSWWVNGKEVHSGVCTDPQPLKEQPALNDSRYCLSSRLRVSATFWQNPRNHFRCQVQFYGLSENDEWTQDRAKPVTQIVSAEAWGRADDVIKIHWQEKKSNTILGSQEGNTMKTNDTYMKFSWLTVPEKSLDKEHRCIVRHENNKNGVDQEIIFPPIKTDVITMDPKDNCSKDANDTLLLQLTNTSAYYMYLLLLLKSVVYFAIITCCLLRRTAFCCNGEKSRAKRSGSGATNFSLLKQAGDVEENPGPTSMDWIWRILFLVGAATGAHSFEQVQLLQSGAAVTKPGASVRVSCEASGYNIRDYFIHWWRQAPGQGLQWVGWINPKTGQPNNPRQFQGRVSLTRHASWDFDTFSFYMDLKALRSDDTAVYFCARQRSDYWDFDVWGSGTQVTVSSASTKGPTRIQNPDPAVYQLRDSKSSDKSVCLFTDFDSQTNVSQSKDSDVYITDKCVLDMRSMDFKSNSAVAWSNKSDFACANAFNNSIIPEDTFFPSPESSDSTDHVKPKETENTKQPSKSCHKPKAIVHTEKVNMMSLTVLGLRMLFAKTVAVNFLLTAKLFFL

SEQ ID NO: 15487 - protein, 735 aa, synthetic construct
MALPVTALLLPLALLLHAARPQSALTQPPSASGSPGQSITISCTGTSNNFVSWYQQHAGKAPKLVIYDVNKRPSGVPDRFSGSKSGNTASLTVSGLQTDDEAVYYCGSLVGNWDVIFGGGTKLTVLLEDLKNVFPPEVAVFEPSEAEISHTQKATLVCLATGFYPDHVELSWWVNGKEVHSGVCTDPQPLKEQPALNDSRYCLSSRLRVSATFWQNPRNHFRCQVQFYGLSENDEWTQDRAKPVTQIVSAEAWGRADDVIKIHWQEKKSNTILGSQEGNTMKTNDTYMKFSWLTVPEKSLDKEHRCIVRHENNKNGVDQEIIFPPIKTDVITMDPKDNCSKDANDTLLLQLTNTSAYYMYLLLLLKSVVYFAIITCCLLRRTAFCCNGEKSRAKRSGSGATNFSLLKQAGDVEENPGPTSMDWIWRILFLVGAATGAHSFEQPQLQESGPTLVEASETLSLTCAVSGDSTAACNSFWGWVRQPPGKGLEWVGSLSHCASYWNRGWTYHNPSLKSRLTLALDTPKNLVFLKLNSVTAADTATYYCARFGGEVLRYTDWPKPAWVDLWGRGTLVTVSSTRIQNPDPAVYQLRDSKSSDKSVCLFTDFDSQTNVSQSKDSDVYITDKCVLDMRSMDFKSNSAVAWSNKSDFACANAFNNSIIPEDTFFPSPESSDSTDHVKPKETENTKQPSKSCHKPKAIVHTEKVNMMSLTVLGLRMLFAKTVAVNFLLTAKLFFL

SEQ ID NO: 15488 - protein, 720 aa, synthetic construct
MALPVTALLLPLALLLHAARPEIVLTQSPGTLSLSPGETAIISCRTSQYGSLAWYQQRPGQAPRLVIYSGSTRAAGIPDRFSGSRWGPDYNLTISNLESGDFGVYYCQQYEFFGQGTKVQVDIKRLEDLKNVFPPEVAVFEPSEAEISHTQKATLVCLATGFYPDHVELSWWVNGKEVHSGVCTDPQPLKEQPALNDSRYCLSSRLRVSATFWQNPRNHFRCQVQFYGLSENDEWTQDRAKPVTQIVSAEAWGRADDVIKIHWQEKKSNTILGSQEGNTMKTNDTYMKFSWLTVPEKSLDKEHRCIVRHENNKNGVDQEIIFPPIKTDVITMDPKDNCSKDANDTLLLQLTNTSAYYMYLLLLLKSVVYFAIITCCLLRRTAFCCNGEKSRAKRSGSGATNFSLLKQAGDVEENPGPTSMDWIWRILFLVGAATGAHSFEQVQLVQSGGQMKKPGESMRISCRASGYEFIDCTLNWIRLAPGKRPEWMGWLKPRGGAVNYARPLQGRVTMTRDVYSDTAFLELRSLTVDDTAVYFCTRGKNCDYNWDFEHWGRGTPVIVSSTRIQNPDPAVYQLRDSKSSDKSVCLFTDFDSQTNVSQSKDSDVYITDKCVLDMRSMDFKSNSAVAWSNKSDFACANAFNNSIIPEDTFFPSPESSDSTDHVKPKETENTKQPSKSCHKPKAIVHTEKVNMMSLTVLGLRMLFAKTVAVNFLLTAKLFFL

SEQ ID NO: 15489 - protein, 730 aa, synthetic construct
MALPVTALLLPLALLLHAARPELVLTQSPGTLSLSAGERATLSCRASQSVSSGSLAWYQQKPGQAPRLLIYGASTRATGIPDRFSGSGSGTDFTLTIGRLEPEDLAVYYCQQYGTSPYTFGQGTKLEILEDLKNVFPPEVAVFEPSEAEISHTQKATLVCLATGFYPDHVELSWWVNGKEVHSGVCTDPQPLKEQPALNDSRYCLSSRLRVSATFWQNPRNHFRCQVQFYGLSENDEWTQDRAKPVTQIVSAEAWGRADDVIKIHWQEKKSNTILGSQEGNTMKTNDTYMKFSWLTVPEKSLDKEHRCIVRHENNKNGVDQEIIFPPIKTDVITMDPKDNCSKDANDTLLLQLTNTSAYYMYLLLLLKSVVYFAIITCCLLRRTAFCCNGEKSRAKRSGSGATNFSLLKQAGDVEENPGPTSMDWIWRILFLVGAATGAHSFELEQSGAEVKKPGSSVQVSCKASGGTFSMYGFNWVRQAPGHGLEWMGGIIPIFGTSNYAQKFRGRVTFTADQATSTAYMELTNLRSDDTAVYYCARDFGPDWEDGDSYDGSGRGFFDFWGQGTLVTVSSTRIQNPDPAVYQLRDSKSSDKSVCLFTDFDSQTNVSQSKDSDVYITDKCVLDMRSMDFKSNSAVAWSNKSDFACANAFNNSIIPEDTFFPSPESSDSTDHVKPKETENTKQPSKSCHKPKAIVHTEKVNMMSLTVLGLRMLFAKTVAVNFLLTAKLFFL

SEQ ID NO: 15490 - protein, 710 aa, synthetic construct
MALPVTALLLPLALLLHAARPDIQMTQSPSSLSASVGDRVTITCQASQDINNYLNWYQQKPGKAPKLLIYDASNLQTGVPSRFSGSGSGTDFTFTIEDIATYYCQQYTFGPGTKVDIKLEDLKNVFPPEVAVFEPSEAEISHTQKATLVCLATGFYPDHVELSWWVNGKEVHSGVCTDPQPLKEQPALNDSRYCLSSRLRVSATFWQNPRNHFRCQVQFYGLSENDEWTQDRAKPVTQIVSAEAWGRADDVIKIHWQEKKSNTILGSQEGNTMKTNDTYMKFSWLTVPEKSLDKEHRCIVRHENNKNGVDQEIIFPPIKTDVITMDPKDNCSKDANDTLLLQLTNTSAYYMYLLLLLKSVVYFAIITCCLLRRTAFCCNGEKSRAKRSGSGATNFSLLKQAGDVEENPGPTSMDWIWRILFLVGAATGAHSFEEVQLLESGGGLVQPGGSLRLSCAASGFTFSWYSMTWVRQAPGKGLEWVSSIVPWGDFTQYADSVKGRFTISRDNSKNTLYLQMNSLRAEDTAVYYCAKGPGWGSFDLWGRGTLVTVSSTRIQNPDPAVYQLRDSKSSDKSVCLFTDFDSQTNVSQSKDSDVYITDKCVLDMRSMDFKSNSAVAWSNKSDFACANAFNNSIIPEDTFFPSPESSDSTDHVKPKETENTKQPSKSCHKPKAIVHTEKVNMMSLTVLGLRMLFAKTVAVNFLLTAKLFFL

SEQ ID NO: 15491 - protein, 720 aa, synthetic construct
MALPVTALLLPLALLLHAARPDIQMTQSPSSLSASVGDRVTITCTASLSVSSTYLHWYQQKPGSSPKLWIYSTSNLASGVPSRFSGSGSGTSYTLTISSLQPEDFATYYCHQYHRSPLTFGGGTKVEIKRLEDLKNVFPPEVAVFEPSEAEISHTQKATLVCLATGFYPDHVELSWWVNGKEVHSGVCTDPQPLKEQPALNDSRYCLSSRLRVSATFWQNPRNHFRCQVQFYGLSENDEWTQDRAKPVTQIVSAEAWGRADDVIKIHWQEKKSNTILGSQEGNTMKTNDTYMKFSWLTVPEKSLDKEHRCIVRHENNKNGVDQEIIFPPIKTDVITMDPKDNCSKDANDTLLLQLTNTSAYYMYLLLLLKSVVYFAIITCCLLRRTAFCCNGEKSRAKRSGSGATNFSLLKQAGDVEENPGPTSMDWIWRILFLVGAATGAHSFEEVQLVESGGGLVQPGGSLRLSCAASGFSLTKYGVHWVRQAPGKGLEWVGVKWAGGSTDYNSALMSRFTISKDNAKNSLYLQMNSLRAEDTAVYYCARDHRDAMDYWGQGTLVTVSSTRIQNPDPAVYQLRDSKSSDKSVCLFTDFDSQTNVSQSKDSDVYITDKCVLDMRSMDFKSNSAVAWSNKSDFACANAFNNSIIPEDTFFPSPESSDSTDHVKPKETENTKQPSKSCHKPKAIVHTEKVNMMSLTVLGLRMLFAKTVAVNFLLTAKLFFL

SEQ ID NO: 15492 - protein, 724 aa, synthetic construct
MALPVTALLLPLALLLHAARPDIQMTQSPSSLSASVGDRVTITCKASQDVGTAVAWYQQKPGKAPKLLIYSASYRSTGVPSRFSGSGSGTDFTLTISSLQPEDFATYYCQHHYSAPWTFGGGTKVEIKLEDLKNVFPPEVAVFEPSEAEISHTQKATLVCLATGFYPDHVELSWWVNGKEVHSGVCTDPQPLKEQPALNDSRYCLSSRLRVSATFWQNPRNHFRCQVQFYGLSENDEWTQDRAKPVTQIVSAEAWGRADDVIKIHWQEKKSNTILGSQEGNTMKTNDTYMKFSWLTVPEKSLDKEHRCIVRHENNKNGVDQEIIFPPIKTDVITMDPKDNCSKDANDTLLLQLTNTSAYYMYLLLLLKSVVYFAIITCCLLRRTAFCCNGEKSRAKRSGSGATNFSLLKQAGDVEENPGPTSMDWIWRILFLVGAATGAHSFEEVQLVESGGGLVQPGGSLRLSCAASGFTFSRNGMSWVRQAPGKGLEWVATVSSGGSYIYYADSVKGRFTISRDNAKNSLYLQMNSLRAEDTAVYYCARQGTTALATRFFDVWGQGTLVTVSSTRIQNPDPAVYQLRDSKSSDKSVCLFTDFDSQTNVSQSKDSDVYITDKCVLDMRSMDFKSNSAVAWSNKSDFACANAFNNSIIPEDTFFPSPESSDSTDHVKPKETENTKQPSKSCHKPKAIVHTEKVNMMSLTVLGLRMLFAKTVAVNFLLTAKLFFL

SEQ ID NO: 15493 - protein, 720 aa, synthetic construct
MALPVTALLLPLALLLHAARPDIQMTQSPPSLSASVGGKVTITCKASQDIDRYMAWYQDKPGKGPKLLIHDTSTLQPGIPSRFSGSGSGRDYSFSISNLEPEDIATYYCLQYDNLWTFGGGTKLEIKRLEDLKNVFPPEVAVFEPSEAEISHTQKATLVCLATGFYPDHVELSWWVNGKEVHSGVCTDPQPLKEQPALNDSRYCLSSRLRVSATFWQNPRNHFRCQVQFYGLSENDEWTQDRAKPVTQIVSAEAWGRADDVIKIHWQEKKSNTILGSQEGNTMKTNDTYMKFSWLTVPEKSLDKEHRCIVRHENNKNGVDQEIIFPPIKTDVITMDPKDNCSKDANDTLLLQLTNTSAYYMYLLLLLKSVVYFAIITCCLLRRTAFCCNGEKSRAKRSGSGATNFSLLKQAGDVEENPGPTSMDWIWRILFLVGAATGAHSFEQVQLVQSGAELVKPGASVKMSCKASGYIFTNYNIHWVKKSPGQGLEWIGAIYPGNGDAPYSQKFQDRATLTADTSSSTTYMELSSLTSEDSAVYYCVRANWDVAFAYWGQGTLVSVSSTRIQNPDPAVYQLRDSKSSDKSVCLFTDFDSQTNVSQSKDSDVYITDKCVLDMRSMDFKSNSAVAWSNKSDFACANAFNNSIIPEDTFFPSPESSDSTDHVKPKETENTKQPSKSCHKPKAIVHTEKVNMMSLTVLGLRMLFAKTVAVNFLLTAKLFFL

SEQ ID NO: 15494 - protein, 721 aa, synthetic construct
MALPVTALLLPLALLLHAARPDIQMTQSPASLSASVGETVTITCRVSGNIHNYLAWYQQKQGKSPQLLVYNAKTLADGVPSRFSGSGSGTQYSLKINSLQPEDFGSYYCQHFWSNPYTFGGGTKLEIKLEDLKNVFPPEVAVFEPSEAEISHTQKATLVCLATGFYPDHVELSWWVNGKEVHSGVCTDPQPLKEQPALNDSRYCLSSRLRVSATFWQNPRNHFRCQVQFYGLSENDEWTQDRAKPVTQIVSAEAWGRADDVIKIHWQEKKSNTILGSQEGNTMKTNDTYMKFSWLTVPEKSLDKEHRCIVRHENNKNGVDQEIIFPPIKTDVITMDPKDNCSKDANDTLLLQLTNTSAYYMYLLLLLKSVVYFAIITCCLLRRTAFCCNGEKSRAKRSGSGATNFSLLKQAGDVEENPGPTSMDWIWRILFLVGAATGAHSFEQVQLQQSGASVKVSCKASELVRPGTGYAFTNYLIEWVKQRPGQGLEWIGVINPGSGGTNYNEKFKGKATLTADKSSSTAYMQLSSLTSDDSAVYFCARYRSYDWYFDVWGAGTTVTVSSTRIQNPDPAVYQLRDSKSSDKSVCLFTDFDSQTNVSQSKDSDVYITDKCVLDMRSMDFKSNSAVAWSNKSDFACANAFNNSIIPEDTFFPSPESSDSTDHVKPKETENTKQPSKSCHKPKAIVHTEKVNMMSLTVLGLRMLFAKTVAVNFLLTAKLFFL

SEQ ID NO: 15495 - protein, 720 aa, synthetic construct
MALPVTALLLPLALLLHAARPDIQMTQSFSSLSASVGDRVTITCRASQDISNYLNWYQQKPGKAPKLLIYYTSRLHSGVPSRFSGSGSGTDYTLTISSLQPEDFATYFCQQGNTLPWTFGGGTKLEIKRLEDLKNVFPPEVAVFEPSEAEISHTQKATLVCLATGFYPDHVELSWWVNGKEVHSGVCTDPQPLKEQPALNDSRYCLSSRLRVSATFWQNPRNHFRCQVQFYGLSENDEWTQDRAKPVTQIVSAEAWGRADDVIKIHWQEKKSNTILGSQEGNTMKTNDTYMKFSWLTVPEKSLDKEHRCIVRHENNKNGVDQEIIFPPIKTDVITMDPKDNCSKDANDTLLLQLTNTSAYYMYLLLLLKSVVYFAIITCCLLRRTAFCCNGEKSRAKRSGSGATNFSLLKQAGDVEENPGPTSMDWIWRILFLVGAATGAHSFEEVQLVQSGGGLVQSGGSLRLSCRASGYTFTRYWMLWVRQRPGKGLEWVAEINPRNDRTNYNEKFKTRFTISVDRSKNTLYLQMDSLRAEDTAVYFCALGGGYAMDYWGQGTLVTVSSTRIQNPDPAVYQLRDSKSSDKSVCLFTDFDSQTNVSQSKDSDVYITDKCVLDMRSMDFKSNSAVAWSNKSDFACANAFNNSIIPEDTFFPSPESSDSTDHVKPKETENTKQPSKSCHKPKAIVHTEKVNMMSLTVLGLRMLFAKTVAVNFLLTAKLFFL

SEQ ID NO: 15496 - protein, 721 aa, synthetic construct
MALPVTALLLPLALLLHAARPDIQMTQSPASLSASVGETVTIICRASVNIYSYLAWYQQKQGKSPQLLVYNAKILAEGVPSRFSGSGSGTQFSLKINSLQPEDFGSYYCQHHYGTFTFGSGTKLEIKRLEDLKNVFPPEVAVFEPSEAEISHTQKATLVCLATGFYPDHVELSWWVNGKEVHSGVCTDPQPLKEQPALNDSRYCLSSRLRVSATFWQNPRNHFRCQVQFYGLSENDEWTQDRAKPVTQIVSAEAWGRADDVIKIHWQEKKSNTILGSQEGNTMKTNDTYMKFSWLTVPEKSLDKEHRCIVRHENNKNGVDQEIIFPPIKTDVITMDPKDNCSKDANDTLLLQLTNTSAYYMYLLLLLKSVVYFAIITCCLLRRTAFCCNGEKSRAKRSGSGATNFSLLKQAGDVEENPGPTSMDWIWRILFLVGAATGAHSFEQVQLKESGPGLVAPSQSLSITCTISGFSLTSYGVHWVRQPPGKGLEWLVVIWSDGSTTYNSALKSRLSISKDNSKSQVFLKMNSLQTDDTAIYYCASHYGSTLAFASWGHGTLVTVSAATRIQNPDPAVYQLRDSKSSDKSVCLFTDFDSQTNVSQSKDSDVYITDKCVLDMRSMDFKSNSAVAWSNKSDFACANAFNNSIIPEDTFFPSPESSDSTDHVKPKETENTKQPSKSCHKPKAIVHTEKVNMMSLTVLGLRMLFAKTVAVNFLLTAKLFFL

SEQ ID NO: 15497 - protein, 729 aa, synthetic construct
MALPVTALLLPLALLLHAARPDIVMTQSHKFMSTSVGDRVSVTCKASQNVGNNVAWYQQKPGQSPKVLIYSASYRYSGVPDRFTGSGSGTDFTLTISNVQSEDLAEYFCQQYNTYPFTFGSGTKLEIKLEDLKNVFPPEVAVFEPSEAEISHTQKATLVCLATGFYPDHVELSWWVNGKEVHSGVCTDPQPLKEQPALNDSRYCLSSRLRVSATFWQNPRNHFRCQVQFYGLSENDEWTQDRAKPVTQIVSAEAWGRADDVIKIHWQEKKSNTILGSQEGNTMKTNDTYMKFSWLTVPEKSLDKEHRCIVRHENNKNGVDQEIIFPPIKTDVITMDPKDNCSKDANDTLLLQLTNTSAYYMYLLLLLKSVVYFAIITCCLLRRTAFCCNGEKSRAKRSGSGATNFSLLKQAGDVEENPGPTSMDWIWRILFLVGAATGAHSFEEVQLEESGGGLVQPGGSMKLSCVASGFTFSNYWMNWVRQSPEKGLEWVAEIRFKSHNYATHFAESVKGRFTISRDDSKSSVYLQMNNLRAEDTGIYYCTRRIGNSDYDWWYFDVWGAGTSVTVSSASTRIQNPDPAVYQLRDSKSSDKSVCLFTDFDSQTNVSQSKDSDVYITDKCVLDMRSMDFKSNSAVAWSNKSDFACANAFNNSIIPEDTFFPSPESSDSTDHVKPKETENTKQPSKSCHKPKAIVHTEKVNMMSLTVLGLRMLFAKTVAVNFLLTAKLFFL

SEQ ID NO: 15498 - protein, 722 aa, synthetic construct
MALPVTALLLPLALLLHAARPDQIVLTQSPAIMSASPGEKVTISCSASSSVSYMYWYQQKPGSSPKPWIYRTSNLASGVPARFSGSGSGTSYSLTISNMEAEDAAAYYCQQYHSYPTTFGGGTKLEVKLEDLKNVFPPEVAVFEPSEAEISHTQKATLVCLATGFYPDHVELSWWVNGKEVHSGVCTDPQPLKEQPALNDSRYCLSSRLRVSATFWQNPRNHFRCQVQFYGLSENDEWTQDRAKPVTQIVSAEAWGRADDVIKIHWQEKKSNTILGSQEGNTMKTNDTYMKFSWLTVPEKSLDKEHRCIVRHENNKNGVDQEIIFPPIKTDVITMDPKDNCSKDANDTLLLQLTNTSAYYMYLLLLLKSVVYFAIITCCLLRRTAFCCNGEKSRAKRSGSGATNFSLLKQAGDVEENPGPTSMDWIWRILFLVGAATGAHSFEEVQLVESGGGLVQPKGSLKLSCAASGFSFNTYAMNWVRQAPGKGLEWIAHIRSKSNNFATYYADSVKDRFSISRDASENILFLQMNNLKTEDTAMYYCVRQGGDFPMDYWGQGTSVTVSSTRIQNPDPAVYQLRDSKSSDKSVCLFTDFDSQTNVSQSKDSDVYITDKCVLDMRSMDFKSNSAVAWSNKSDFACANAFNNSIIPEDTFFPSPESSDSTDHVKPKETENTKQPSKSCHKPKAIVHTEKVNMMSLTVLGLRMLFAKTVAVNFLLTAKLFFL

SEQ ID NO: 15499 - protein, 721 aa, synthetic construct
MALPVTALLLPLALLLHAARPDDIQMTQSSSSFSVSLGDRVTITCMASEDIYIRLAWYQQKPGNAPRLLISAATSLETGVPSRFSGSGSGKDYTLSITSLQTEDVGTYYCQQYWSSPWTFGGGTKLEINLEDLKNVFPPEVAVFEPSEAEISHTQKATLVCLATGFYPDHVELSWWVNGKEVHSGVCTDPQPLKEQPALNDSRYCLSSRLRVSATFWQNPRNHFRCQVQFYGLSENDEWTQDRAKPVTQIVSAEAWGRADDVIKIHWQEKKSNTILGSQEGNTMKTNDTYMKFSWLTVPEKSLDKEHRCIVRHENNKNGVDQEIIFPPIKTDVITMDPKDNCSKDANDTLLLQLTNTSAYYMYLLLLLKSVVYFAIITCCLLRRTAFCCNGEKSRAKRSGSGATNFSLLKQAGDVEENPGPTSMDWIWRILFLVGAATGAHSFEDVQLQESGPGLVKPSQSLSLTCTVTGYSITSDYTWNWIRQFPGNKLEWMGYITYSGSTSYNPSLKSRNSITRDTSKNQFFLQLNSVTTEDTATYYCARLGRRYTMDYWGQGTSVTVSSTRIQNPDPAVYQLRDSKSSDKSVCLFTDFDSQTNVSQSKDSDVYITDKCVLDMRSMDFKSNSAVAWSNKSDFACANAFNNSIIPEDTFFPSPESSDSTDHVKPKETENTKQPSKSCHKPKAIVHTEKVNMMSLTVLGLRMLFAKTVAVNFLLTAKLFFL

SEQ ID NO: 15500 - protein, 724 aa, synthetic construct
MALPVTALLLPLALLLHAARPDDIQMTQSPSSLSASVGDRVTITCRASQSISSYLNWYQQKPGKAPKLLIYDASNLETGVPSRFSGSGSGTDFTFTISSLQPEDIATYYCQQYDNLPLTFGGGTKVDIKRLEDLKNVFPPEVAVFEPSEAEISHTQKATLVCLATGFYPDHVELSWWVNGKEVHSGVCTDPQPLKEQPALNDSRYCLSSRLRVSATFWQNPRNHFRCQVQFYGLSENDEWTQDRAKPVTQIVSAEAWGRADDVIKIHWQEKKSNTILGSQEGNTMKTNDTYMKFSWLTVPEKSLDKEHRCIVRHENNKNGVDQEIIFPPIKTDVITMDPKDNCSKDANDTLLLQLTNTSAYYMYLLLLLKSVVYFAIITCCLLRRTAFCCNGEKSRAKRSGSGATNFSLLKQAGDVEENPGPTSMDWIWRILFLVGAATGAHSFEQVQLVESGGGVVQPGRSLRLSCAASGFTFSSYAMHWVRQAPGKGLEWVAVISYDGSNKYYADSVKGRFTISRDNSKNTLYLQMNSLRAEDTAVYYCARAHNSSSWSFDYWGQGTLVTVSSTRIQNPDPAVYQLRDSKSSDKSVCLFTDFDSQTNVSQSKDSDVYITDKCVLDMRSMDFKSNSAVAWSNKSDFACANAFNNSIIPEDTFFPSPESSDSTDHVKPKETENTKQPSKSCHKPKAIVHTEKVNMMSLTVLGLRMLFAKTVAVNFLLTAKLFFL

SEQ ID NO: 15501 - protein, 733 aa, synthetic construct
MALPVTALLLPLALLLHAARPDDVVMTQSPLSLPVSLGDQASISCRSSQRLVHSNGNTYLHWYLQKPGQSPKLLIYRVSNRFPGVPDRFSGSGSGTDFTLKISRVEAEDLGIYFCSQSTHVPYTFGGGTKLEIKRLEDLKNVFPPEVAVFEPSEAEISHTQKATLVCLATGFYPDHVELSWWVNGKEVHSGVCTDPQPLKEQPALNDSRYCLSSRLRVSATFWQNPRNHFRCQVQFYGLSENDEWTQDRAKPVTQIVSAEAWGRADDVIKIHWQEKKSNTILGSQEGNTMKTNDTYMKFSWLTVPEKSLDKEHRCIVRHENNKNGVDQEIIFPPIKTDVITMDPKDNCSKDANDTLLLQLTNTSAYYMYLLLLLKSVVYFAIITCCLLRRTAFCCNGEKSRAKRSGSGATNFSLLKQAGDVEENPGPTSMDWIWRILFLVGAATGAHSFEEVRLQQSGPDLIKPGASVKMSCKASGYTFTGYVMHWVKQRPGQGLEWIGFINPYNDDIQSNERFRGKATLTSDKSSTTAYMELSSLTSEDSAVYYCARGAGYNFDGAYRFFDFWGQGTTLTVSSTRIQNPDPAVYQLRDSKSSDKSVCLFTDFDSQTNVSQSKDSDVYITDKCVLDMRSMDFKSNSAVAWSNKSDFACANAFNNSIIPEDTFFPSPESSDSTDHVKPKETENTKQPSKSCHKPKAIVHTEKVNMMSLTVLGLRMLFAKTVAVNFLLTAKLFFL

SEQ ID NO: 15502 - protein, 724 aa, synthetic construct
MALPVTALLLPLALLLHAARPDSYELTQPPSVSVSPGQTATISCSGDQLGGKYGHWYQKKPGQSPVLVLYQDRKRPAGIPERFSGSSSGNTITLTISGTQAVDEADYYCQAWDTNLGGVFGGGTKVTVLGQLEDLKNVFPPEVAVFEPSEAEISHTQKATLVCLATGFYPDHVELSWWVNGKEVHSGVCTDPQPLKEQPALNDSRYCLSSRLRVSATFWQNPRNHFRCQVQFYGLSENDEWTQDRAKPVTQIVSAEAWGRADDVIKIHWQEKKSNTILGSQEGNTMKTNDTYMKFSWLTVPEKSLDKEHRCIVRHENNKNGVDQEIIFPPIKTDVITMDPKDNCSKDANDTLLLQLTNTSAYYMYLLLLLKSVVYFAIITCCLLRRTAFCCNGEKSRAKRSGSGATNFSLLKQAGDVEENPGPTSMDWIWRILFLVGAATGAHSFEQVQLVESGAEVKKPGASVKVSCKASGYTFTGYYMHWVRQAPGQGLEWMGRINPNSGGTNYAQKFQGRVTMTRDTSISTAYMELSRLRSDDTAVYYCASPRGRGSAFDIWGQGTLVTVSSTRIQNPDPAVYQLRDSKSSDKSVCLFTDFDSQTNVSQSKDSDVYITDKCVLDMRSMDFKSNSAVAWSNKSDFACANAFNNSIIPEDTFFPSPESSDSTDHVKPKETENTKQPSKSCHKPKAIVHTEKVNMMSLTVLGLRMLFAKTVAVNFLLTAKLFFL

SEQ ID NO: 15503 - protein, 727 aa, synthetic construct
MALPVTALLLPLALLLHAARPDNFMLTQPHSVSESPGKTVTISCTRSSGSIASKYVQWYQQRPGSSPTTVIYEDNQRPSGVPDRFSGSIDTSSNSASLTISGLRTEDEADYYCHSYDSNNHSVFGGGTKVTVLGQLEDLKNVFPPEVAVFEPSEAEISHTQKATLVCLATGFYPDHVELSWWVNGKEVHSGVCTDPQPLKEQPALNDSRYCLSSRLRVSATFWQNPRNHFRCQVQFYGLSENDEWTQDRAKPVTQIVSAEAWGRADDVIKIHWQEKKSNTILGSQEGNTMKTNDTYMKFSWLTVPEKSLDKEHRCIVRHENNKNGVDQEIIFPPIKTDVITMDPKDNCSKDANDTLLLQLTNTSAYYMYLLLLLKSVVYFAIITCCLLRRTAFCCNGEKSRAKRSGSGATNFSLLKQAGDVEENPGPTSMDWIWRILFLVGAATGAHSFEEVQLVESGGGVVQPGGSLRLSCAASGFTFSSYAMSWVRQAPGKGLEWVSAISGSGGSTYYADSVKGRFSISRDNSKNTLYLQMNSLRAEDTAVYYCARTRSSGAFDIWGQGTLVTVSSTRIQNPDPAVYQLRDSKSSDKSVCLFTDFDSQTNVSQSKDSDVYITDKCVLDMRSMDFKSNSAVAWSNKSDFACANAFNNSIIPEDTFFPSPESSDSTDHVKPKETENTKQPSKSCHKPKAIVHTEKVNMMSLTVLGLRMLFAKTVAVNFLLTAKLFFL

SEQ ID NO: 15504 - protein, 722 aa, synthetic construct
MALPVTALLLPLALLLHAARPDIQMNQSPSSLSASLGDTITITCHASQNINVWLSWYQQKPGNIPKLLIYKASNLHTGVPSRFSGSGSGTGFTITISSLQPEDIATYYCQQGQSYPWTFGGGTKLEIKRLEDLKNVFPPEVAVFEPSEAEISHTQKATLVCLATGFYPDHVELSWWVNGKEVHSGVCTDPQPLKEQPALNDSRYCLSSRLRVSATFWQNPRNHFRCQVQFYGLSENDEWTQDRAKPVTQIVSAEAWGRADDVIKIHWQEKKSNTILGSQEGNTMKTNDTYMKFSWLTVPEKSLDKEHRCIVRHENNKNGVDQEIIFPPIKTDVITMDPKDNCSKDANDTLLLQLTNTSAYYMYLLLLLKSVVYFAIITCCLLRRTAFCCNGEKSRAKRSGSGATNFSLLKQAGDVEENPGPTSMDWIWRILFLVGAATGAHSFEEVQLQQSGPELVKPGASVKISCKASGYSFTGYFMNWVKQSHGKSLEYIGRFNPYNGETLYNQKFKGKATLTVDKSSSTVHMELLSVTSEDSAVYYCGRSGNDDAMDYWGQGTSVTVSSATRIQNPDPAVYQLRDSKSSDKSVCLFTDFDSQTNVSQSKDSDVYITDKCVLDMRSMDFKSNSAVAWSNKSDFACANAFNNSIIPEDTFFPSPESSDSTDHVKPKETENTKQPSKSCHKPKAIVHTEKVNMMSLTVLGLRMLFAKTVAVNFLLTAKLFFL

SEQ ID NO: 15505 - protein, 723 aa, synthetic construct
MALPVTALLLPLALLLHAARPEIVLTQSPATLSLSPGERATLSCRASQSVRSYLAWYQQKPGQAPRLLIYDASNRATGIPARFSGSGSGTDFTLTISSLEPEDFAVYYCQQRSNWPPTFGQGTKVEIKLEDLKNVFPPEVAVFEPSEAEISHTQKATLVCLATGFYPDHVELSWWVNGKEVHSGVCTDPQPLKEQPALNDSRYCLSSRLRVSATFWQNPRNHFRCQVQFYGLSENDEWTQDRAKPVTQIVSAEAWGRADDVIKIHWQEKKSNTILGSQEGNTMKTNDTYMKFSWLTVPEKSLDKEHRCIVRHENNKNGVDQEIIFPPIKTDVITMDPKDNCSKDANDTLLLQLTNTSAYYMYLLLLLKSVVYFAIITCCLLRRTAFCCNGEKSRAKRSGSGATNFSLLKQAGDVEENPGPTSMDWIWRILFLVGAATGAHSFEQLQVQESGPGLVKPSETLSLTCTVSGGSISNSYFSWGWIRQPPGKGLEWIGSFYYGEKTYYNPSLKSRATISIDTSKSQFSLKLSSVTAADTAVYYCPRGPTMIRGVIDSWGQGTLVTVSSTRIQNPDPAVYQLRDSKSSDKSVCLFTDFDSQTNVSQSKDSDVYITDKCVLDMRSMDFKSNSAVAWSNKSDFACANAFNNSIIPEDTFFPSPESSDSTDHVKPKETENTKQPSKSCHKPKAIVHTEKVNMMSLTVLGLRMLFAKTVAVNFLLTAKLFFL

SEQ ID NO: 15506 - protein, 732 aa, synthetic construct
MALPVTALLLPLALLLHAARPDIVMTQTPLSLPVTPGEPASISCRSSRSLLDSDDGNTYLDWYLQKPGQSPQLLIYTLSYRASGVPDRFSGSGSGTDFTLKISRVEAEDVGVYYCMQRVEFPITFGQGTRLEIKRLEDLKNVFPPEVAVFEPSEAEISHTQKATLVCLATGFYPDHVELSWWVNGKEVHSGVCTDPQPLKEQPALNDSRYCLSSRLRVSATFWQNPRNHFRCQVQFYGLSENDEWTQDRAKPVTQIVSAEAWGRADDVIKIHWQEKKSNTILGSQEGNTMKTNDTYMKFSWLTVPEKSLDKEHRCIVRHENNKNGVDQEIIFPPIKTDVITMDPKDNCSKDANDTLLLQLTNTSAYYMYLLLLLKSVVYFAIITCCLLRRTAFCCNGEKSRAKRSGSGATNFSLLKQAGDVEENPGPTSMDWIWRILFLVGAATGAHSFEQVQLVESGGGVVQPGRSLRLSCAASGFIFSRYGMHWVRQAPGKGLKWVAVIWYDGSNKLYADSVKGRFTISRDNSKNTLYLQMNSLRAEDTAVYYCARDYYDNSRHHWGFDYWGQGTLVTVSSTRIQNPDPAVYQLRDSKSSDKSVCLFTDFDSQTNVSQSKDSDVYITDKCVLDMRSMDFKSNSAVAWSNKSDFACANAFNNSIIPEDTFFPSPESSDSTDHVKPKETENTKQPSKSCHKPKAIVHTEKVNMMSLTVLGLRMLFAKTVAVNFLLTAKLFFL

SEQ ID NO: 15507 - protein, 722 aa, synthetic construct
MALPVTALLLPLALLLHAARPEIQMTQSPSSMSASLGDTITITCQATQDIFKNLNWYQQKPGKPPSLLIYYATELAEGVPSRFSGSGSGSDYSLTISNLESEDFAAYYCLQFFEFPFTFGSGTKLEMKLEDLKNVFPPEVAVFEPSEAEISHTQKATLVCLATGFYPDHVELSWWVNGKEVHSGVCTDPQPLKEQPALNDSRYCLSSRLRVSATFWQNPRNHFRCQVQFYGLSENDEWTQDRAKPVTQIVSAEAWGRADDVIKIHWQEKKSNTILGSQEGNTMKTNDTYMKFSWLTVPEKSLDKEHRCIVRHENNKNGVDQEIIFPPIKTDVITMDPKDNCSKDANDTLLLQLTNTSAYYMYLLLLLKSVVYFAIITCCLLRRTAFCCNGEKSRAKRSGSGATNFSLLKQAGDVEENPGPTSMDWIWRILFLVGAATGAHSFEQVQLQQSGAELVRPGTSVKVSCKASGYVFTNYWIEWIKQRPGQGLEWIGVMNPGSGETTYNEKFKGKATLTADKSSSTAYMQLSSLTSVDSAVYFCARDHDRDYYAMDYWGQGTSVTVSSTRIQNPDPAVYQLRDSKSSDKSVCLFTDFDSQTNVSQSKDSDVYITDKCVLDMRSMDFKSNSAVAWSNKSDFACANAFNNSIIPEDTFFPSPESSDSTDHVKPKETENTKQPSKSCHKPKAIVHTEKVNMMSLTVLGLRMLFAKTVAVNFLLTAKLFFL

SEQ ID NO: 15508 - protein, 719 aa, synthetic construct
MALPVTALLLPLALLLHAARPDILLTQSPAILSVSPGERVSFSCRASQNIGTSIHWYQQRTNGSPRLLIKYASESVSGIPSRFSGSGSGTDFTLSINSVESEDIADYYCQHTNSWPTTFGGGTKLEIKRLEDLKNVFPPEVAVFEPSEAEISHTQKATLVCLATGFYPDHVELSWWVNGKEVHSGVCTDPQPLKEQPALNDSRYCLSSRLRVSATFWQNPRNHFRCQVQFYGLSENDEWTQDRAKPVTQIVSAEAWGRADDVIKIHWQEKKSNTILGSQEGNTMKTNDTYMKFSWLTVPEKSLDKEHRCIVRHENNKNGVDQEIIFPPIKTDVITMDPKDNCSKDANDTLLLQLTNTSAYYMYLLLLLKSVVYFAIITCCLLRRTAFCCNGEKSRAKRSGSGATNFSLLKQAGDVEENPGPTSMDWIWRILFLVGAATGAHSFEQVQLQQSDAELVKPGASVKISCKASGYTFTDHAIHWVKQKPEQGLEWIGYFSPGNGDIKYNEKFKGKATLTADKSSSTAYMQLNSLTSEDSAVYFCKRSYGNYDYWGQGTTLTVSSTRIQNPDPAVYQLRDSKSSDKSVCLFTDFDSQTNVSQSKDSDVYITDKCVLDMRSMDFKSNSAVAWSNKSDFACANAFNNSIIPEDTFFPSPESSDSTDHVKPKETENTKQPSKSCHKPKAIVHTEKVNMMSLTVLGLRMLFAKTVAVNFLLTAKLFFL

SEQ ID NO: 15509 - protein, 724 aa, synthetic construct
MALPVTALLLPLALLLHAARPDIVMTQSPDSLAVSLGERATINCKSSQSLLNSGDQKNYLTWYQQKPGQPPKLLIYWASTRESGVPDRFSGSGSGTDFTLTISSLQAEDVAVYYCQNDYSYPLTFGQGTKVEIKLEDLKNVFPPEVAVFEPSEAEISHTQKATLVCLATGFYPDHVELSWWVNGKEVHSGVCTDPQPLKEQPALNDSRYCLSSRLRVSATFWQNPRNHFRCQVQFYGLSENDEWTQDRAKPVTQIVSAEAWGRADDVIKIHWQEKKSNTILGSQEGNTMKTNDTYMKFSWLTVPEKSLDKEHRCIVRHENNKNGVDQEIIFPPIKTDVITMDPKDNCSKDANDTLLLQLTNTSAYYMYLLLLLKSVVYFAIITCCLLRRTAFCCNGEKSRAKRSGSGATNFSLLKQAGDVEENPGPTSMDWIWRILFLVGAATGAHSFEQVQLVQSGAEVKKTGSSVKVSCKASGYTFTDHAIHVWRQAPGQALEWMGHFSPGNTDIKYNDKFKGRVTLTVDRSMSTAYMELSSLRSEDTAMYYCKTSTFFFDYWGQGTMVTVSSTRIQNPDPAVYQLRDSKSSDKSVCLFTDFDSQTNVSQSKDSDVYITDKCVLDMRSMDFKSNSAVAWSNKSDFACANAFNNSIIPEDTFFPSPESSDSTDHVKPKETENTKQPSKSCHKPKAIVHTEKVNMMSLTVLGLRMLFAKTVAVNFLLTAKLFFL

SEQ ID NO: 15510 - protein, 723 aa, synthetic construct
MALPVTALLLPLALLLHAARPDIQMTQSPSSLSASVGDRVTITCKASQDVSIAVAWYQQKPGKAPKVLIYSASYRYTGVPDRFSGSGSGTDFTFTISSLQPEDIAVYYCQQHYITPLTFGGGTKVEIKLEDLKNVFPPEVAVFEPSEAEISHTQKATLVCLATGFYPDHVELSWWVNGKEVHSGVCTDPQPLKEQPALNDSRYCLSSRLRVSATFWQNPRNHFRCQVQFYGLSENDEWTQDRAKPVTQIVSAEAWGRADDVIKIHWQEKKSNTILGSQEGNTMKTNDTYMKFSWLTVPEKSLDKEHRCIVRHENNKNGVDQEIIFPPIKTDVITMDPKDNCSKDANDTLLLQLTNTSAYYMYLLLLLKSVVYFAIITCCLLRRTAFCCNGEKSRAKRSGSGATNFSLLKQAGDVEENPGPTSMDWIWRILFLVGAATGAHSFEQIQLVQSGHEVKKPGASVKVSCKASGYTFTNYGMNWVRQAPGQGLEWMGWINTKTGEPTYAEEFKGRFVFSLETSASTAYLQISSLKAEDTAMYFCGRGGYGSSYWYFDVWGQGTTVTVSSTRIQNPDPAVYQLRDSKSSDKSVCLFTDFDSQTNVSQSKDSDVYITDKCVLDMRSMDFKSNSAVAWSNKSDFACANAFNNSIIPEDTFFPSPESSDSTDHVKPKETENTKQPSKSCHKPKAIVHTEKVNMMSLTVLGLRMLFAKTVAVNFLLTAKLFFL

SEQ ID NO: 15511 - protein, 725 aa, synthetic construct
MALPVTALLLPLALLLHAARPDIVMTQSPDSLAVSLGERATINCRASKSVSTSGYSYMHWYQQKPGQPPKLLIYLASNLESGVPDRFSGSGSGTDFTLTISSLQAEDVAVYYCQHSRELPYTFGQGTKLEIKLEDLKNVFPPEVAVFEPSEAEISHTQKATLVCLATGFYPDHVELSWWVNGKEVHSGVCTDPQPLKEQPALNDSRYCLSSRLRVSATFWQNPRNHFRCQVQFYGLSENDEWTQDRAKPVTQIVSAEAWGRADDVIKIHWQEKKSNTILGSQEGNTMKTNDTYMKFSWLTVPEKSLDKEHRCIVRHENNKNGVDQEIIFPPIKTDVITMDPKDNCSKDANDTLLLQLTNTSAYYMYLLLLLKSVVYFAIITCCLLRRTAFCCNGEKSRAKRSGSGATNFSLLKQAGDVEENPGPTSMDWIWRILFLVGAATGAHSFEQVQLQESGPGLVKPSETLSLTCTVSGGSISSYGVHWIRQPPGKGLEWIGVIWTSGVTDYNSALMGRVTISVDTSKNQFSLKLSSVTAADTAVYYCARDGDYDRYTMDYWGQGTLVTVSSTRIQNPDPAVYQLRDSKSSDKSVCLFTDFDSQTNVSQSKDSDVYITDKCVLDMRSMDFKSNSAVAWSNKSDFACANAFNNSIIPEDTFFPSPESSDSTDHVKPKETENTKQPSKSCHKPKAIVHTEKVNMMSLTVLGLRMLFAKTVAVNFLLTAKLFFL

SEQ ID NO: 15512 - protein, 725 aa, synthetic construct
MALPVTALLLPLALLLHAARPDIQMTQSPSSLSASVGDRVTITCRASQSIGTSLHWYQQKPGKAPKLLIKFASRLQSGVPSRFSGSGSGTDFTLTISSLQPEDFATYYCQQSPGFPPTFGQGTKLEIKRLEDLKNVFPPEVAVFEPSEAEISHTQKATLVCLATGFYPDHVELSWWVNGKEVHSGVCTDPQPLKEQPALNDSRYCLSSRLRVSATFWQNPRNHFRCQVQFYGLSENDEWTQDRAKPVTQIVSAEAWGRADDVIKIHWQEKKSNTILGSQEGNTMKTNDTYMKFSWLTVPEKSLDKEHRCIVRHENNKNGVDQEIIFPPIKTDVITMDPKDNCSKDANDTLLLQLTNTSAYYMYLLLLLKSVVYFAIITCCLLRRTAFCCNGEKSRAKRSGSGATNFSLLKQAGDVEENPGPTSMDWIWRILFLVGAATGAHSFEQVQLVESGGGLVKPGGSLRLSCAASGFSITTSGYYWTWIRQFPGKGLEWMGYIGYNSKTYYNPALKSRITISRDNAKNSLYLQMNSLRAEDTAVYYCARSLYGGYKDAFDSWGQGTLVTVSSTRIQNPDPAVYQLRDSKSSDKSVCLFTDFDSQTNVSQSKDSDVYITDKCVLDMRSMDFKSNSAVAWSNKSDFACANAFNNSIIPEDTFFPSPESSDSTDHVKPKETENTKQPSKSCHKPKAIVHTEKVNMMSLTVLGLRMLFAKTVAVNFLLTAKLFFL

SEQ ID NO: 15513 - protein, 730 aa, synthetic construct
MALPVTALLLPLALLLHAARPDEIVLTQSPLSLPVTPGEPASISCRSSQSLLHSIGYNYLDWYLQKPGQSPQLLIYLGSNRASGVPDRFSGSGSGTDFTLKISRVEAEDVGVYYCMQALQTPLTFGGGTKVEIKRLEDLKNVFPPEVAVFEPSEAEISHTQKATLVCLATGFYPDHVELSWWVNGKEVHSGVCTDPQPLKEQPALNDSRYCLSSRLRVSATFWQNPRNHFRCQVQFYGLSENDEWTQDRAKPVTQIVSAEAWGRADDVIKIHWQEKKSNTILGSQEGNTMKTNDTYMKFSWLTVPEKSLDKEHRCIVRHENNKNGVDQEIIFPPIKTDVITMDPKDNCSKDANDTLLLQLTNTSAYYMYLLLLLKSVVYFAIITCCLLRRTAFCCNGEKSRAKRSGSGATNFSLLKQAGDVEENPGPTSMDWIWRILFLVGAATGAHSFEEVQLVESGGGVVQPGRSLRLSCAASGFTFRSYGMHWVRQAPGKGLEWVAVISYDGSNKYYTDSVNGRFTISRDNSKNTLYLQMNSLRAEDTAVYYCARGGGYYETSGPDYWGQGTLVTVSSTRIQNPDPAVYQLRDSKSSDKSVCLFTDFDSQTNVSQSKDSDVYITDKCVLDMRSMDFKSNSAVAWSNKSDFACANAFNNSIIPEDTFFPSPESSDSTDHVKPKETENTKQPSKSCHKPKAIVHTEKVNMMSLTVLGLRMLFAKTVAVNFLLTAKLFFL

SEQ ID NO: 15514 - protein, 728 aa, synthetic construct
MALPVTALLLPLALLLHAARPDDVVMTQSPLSLPVTPGEPASISCRSSQSLLHSIGYNYLHWFLQKPGQSPQLLIYLGSNRASGVPDRFSGSGSGTDFTLKISRVEAEDVGVYYCMQALQTPPTFGQGTRLEIKRLEDLKNVFPPEVAVFEPSEAEISHTQKATLVCLATGFYPDHVELSWWVNGKEVHSGVCTDPQPLKEQPALNDSRYCLSSRLRVSATFWQNPRNHFRCQVQFYGLSENDEWTQDRAKPVTQIVSAEAWGRADDVIKIHWQEKKSNTILGSQEGNTMKTNDTYMKFSWLTVPEKSLDKEHRCIVRHENNKNGVDQEIIFPPIKTDVITMDPKDNCSKDANDTLLLQLTNTSAYYMYLLLLLKSVVYFAIITCCLLRRTAFCCNGEKSRAKRSGSGATNFSLLKQAGDVEENPGPTSMDWIWRILFLVGAATGAHSFEQLQLQESGPGLVKPSGTLSLTCAVSGGSISSSNWWSWVRQPPGKGLEWIGEIYHSGSTNYNPSLKSRVTISVDKSKNQFSLKLSSVTAADTAVYYCVGSPYGDYVLDYWGQGTLVTVSSTRIQNPDPAVYQLRDSKSSDKSVCLFTDFDSQTNVSQSKDSDVYITDKCVLDMRSMDFKSNSAVAWSNKSDFACANAFNNSIIPEDTFFPSPESSDSTDHVKPKETENTKQPSKSCHKPKAIVHTEKVNMMSLTVLGLRMLFAKTVAVNFLLTAKLFFL

SEQ ID NO: 15515 - protein, 726 aa, synthetic construct
MALPVTALLLPLALLLHAARPDEIVLTQSPGTLSLSLGERATLSCRASQSISSSFLAWYQQKPGQAPKLLIYAASTRATGIPDRFSGSGSGTDFTLTISRLEPEDFAVYYCQQYGRSLSFGGGTKVEVKLEDLKNVFPPEVAVFEPSEAEISHTQKATLVCLATGFYPDHVELSWWVNGKEVHSGVCTDPQPLKEQPALNDSRYCLSSRLRVSATFWQNPRNHFRCQVQFYGLSENDEWTQDRAKPVTQIVSAEAWGRADDVIKIHWQEKKSNTILGSQEGNTMKTNDTYMKFSWLTVPEKSLDKEHRCIVRHENNKNGVDQEIIFPPIKTDVITMDPKDNCSKDANDTLLLQLTNTSAYYMYLLLLLKSVVYFAIITCCLLRRTAFCCNGEKSRAKRSGSGATNFSLLKQAGDVEENPGPTSMDWIWRILFLVGAATGAHSFEQVQLQQSGPGLVKPSQTLSLTCAISGDSVSGNSATWNWIRQSPSRGLEWLGRTYYRSKWNHDYAESVKSRITINPDTSKNQFSLQLNSVTPEDTAVYYCARGDSSSWYAFDYWGQGTLVTVSSTRIQNPDPAVYQLRDSKSSDKSVCLFTDFDSQTNVSQSKDSDVYITDKCVLDMRSMDFKSNSAVAWSNKSDFACANAFNNSIIPEDTFFPSPESSDSTDHVKPKETENTKQPSKSCHKPKAIVHTEKVNMMSLTVLGLRMLFAKTVAVNFLLTAKLFFL

SEQ ID NO: 15516 - protein, 725 aa, synthetic construct
MALPVTALLLPLALLLHAARPDQSVVTQPPSVSVAPGKTARITCGRNNIGSKSVHWYQQKPGQAPVLVVYDDSDRPSGIPERFSGSNSGNTATLTISRVEAGDEADYYCQVWDSSSDHVVFGGGTKLTVLGLEDLKNVFPPEVAVFEPSEAEISHTQKATLVCLATGFYPDHVELSWWVNGKEVHSGVCTDPQPLKEQPALNDSRYCLSSRLRVSATFWQNPRNHFRCQVQFYGLSENDEWTQDRAKPVTQIVSAEAWGRADDVIKIHWQEKKSNTILGSQEGNTMKTNDTYMKFSWLTVPEKSLDKEHRCIVRHENNKNGVDQEIIFPPIKTDVITMDPKDNCSKDANDTLLLQLTNTSAYYMYLLLLLKSVVYFAIITCCLLRRTAFCCNGEKSRAKRSGSGATNFSLLKQAGDVEENPGPTSMDWIWRILFLVGAATGAHSFEVQLVQSGGGVMRPGGSLRLSCAASGFTFDDYGMSWVRQAPGKGLEWVSGINWNGGSTGYADSVRGRFTISRDNAKNSLYLQMNSLRAEDTALYYCARERGYGYHDPHDYWGQGTLVTVSSTRIQNPDPAVYQLRDSKSSDKSVCLFTDFDSQTNVSQSKDSDVYITDKCVLDMRSMDFKSNSAVAWSNKSDFACANAFNNSIIPEDTFFPSPESSDSTDHVKPKETENTKQPSKSCHKPKAIVHTEKVNMMSLTVLGLRMLFAKTVAVNFLLTAKLFFL

SEQ ID NO: 15517 - protein, 738 aa, synthetic construct
MALPVTALLLPLALLLHAARPEQKLISEEDLEFQAVVTQPPSASGTPGQRVTISCSGSSSNIGSNTVNWYQQVPGTAPKLLIYSNNQRPSGVPDRFSGSKSGTSASLAISGLQSEDEADYYCAAWDDSLNGWVFGGGTKLTVLLEDLKNVFPPEVAVFEPSEAEISHTQKATLVCLATGFYPDHVELSWWVNGKEVHSGVCTDPQPLKEQPALNDSRYCLSSRLRVSATFWQNPRNHFRCQVQFYGLSENDEWTQDRAKPVTQIVSAEAWGRADDVIKIHWQEKKSNTILGSQEGNTMKTNDTYMKFSWLTVPEKSLDKEHRCIVRHENNKNGVDQEIIFPPIKTDVITMDPKDNCSKDANDTLLLQLTNTSAYYMYLLLLLKSVVYFAIITCCLLRRTAFCCNGEKSRAKRSGSGATNFSLLKQAGDVEENPGPTSMDWIWRILFLVGAATGAHSFEQMQLVQSGAEVKEPGESLRISCKGSGYSFTNFWISWVRQMPGKGLEWMGRVDPGYSYSTYSPSFQGHVTISADKSTSTAYLQWNSLKASDTAMYYCARVQYSGYYDWFDPWGQGTLVTVSSTRIQNPDPAVYQLRDSKSSDKSVCLFTDFDSQTNVSQSKDSDVYITDKCVLDMRSMDFKSNSAVAWSNKSDFACANAFNNSIIPEDTFFPSPESSDSTDHVKPKETENTKQPSKSCHKPKAIVHTEKVNMMSLTVLGLRMLFAKTVAVNFLLTAKLFFL

SEQ ID NO: 15518 - protein, 732 aa, synthetic construct
MALPVTALLLPLALLLHAARPEQKLISEEDLEFDIQMTQSPSTLSASVGDRVTITCRASQNINKWLAWYQQRPGKAPQLLIYKASSLESGVPSRFSGSGSGTEYTLTISSLQPDDFATYYCQQYNSYATFGQGTKVEIKRLEDLKNVFPPEVAVFEPSEAEISHTQKATLVCLATGFYPDHVELSWWVNGKEVHSGVCTDPQPLKEQPALNDSRYCLSSRLRVSATFWQNPRNHFRCQVQFYGLSENDEWTQDRAKPVTQIVSAEAWGRADDVIKIHWQEKKSNTILGSQEGNTMKTNDTYMKFSWLTVPEKSLDKEHRCIVRHENNKNGVDQEIIFPPIKTDVITMDPKDNCSKDANDTLLLQLTNTSAYYMYLLLLLKSVVYFAIITCCLLRRTAFCCNGEKSRAKRSGSGATNFSLLKQAGDVEENPGPTSMDWIWRILFLVGAATGAHSFEQVQLVQSGAEVKKPGESLKISCKGSGYNFSNKWIGWVRQLPGRGLEWIAIIYPGYSDITYSPSFQGRVTISADTSINTAYLHWHSLKASDTAMYYCVRHTALAGFDYWGLGTLVTVSSTRIQNPDPAVYQLRDSKSSDKSVCLFTDFDSQTNVSQSKDSDVYITDKCVLDMRSMDFKSNSAVAWSNKSDFACANAFNNSIIPEDTFFPSPESSDSTDHVKPKETENTKQPSKSCHKPKAIVHTEKVNMMSLTVLGLRMLFAKTVAVNFLLTAKLFFL

SEQ ID NO: 15519 - protein, 723 aa, synthetic construct
MALPVTALLLPLALLLHAARPIVLTQSPASLAVSLGQRATISCRASESVDNYGNTFMHWYQQKPGQPPKLLIYRASNLESGIPARFSGSGSRTDFTLTINPVEADDVATYYCQQSNEDPPTFGAGTKLELKLEDLKNVFPPEVAVFEPSEAEISHTQKATLVCLATGFYPDHVELSWWVNGKEVHSGVCTDPQPLKEQPALNDSRYCLSSRLRVSATFWQNPRNHFRCQVQFYGLSENDEWTQDRAKPVTQIVSAEAWGRADDVIKIHWQEKKSNTILGSQEGNTMKTNDTYMKFSWLTVPEKSLDKEHRCIVRHENNKNGVDQEIIFPPIKTDVITMDPKDNCSKDANDTLLLQLTNTSAYYMYLLLLLKSVVYFAIITCCLLRRTAFCCNGEKSRAKRSGSGATNFSLLKQAGDVEENPGPTSMDWIWRILFLVGAATGAHSFEQIQLVQSGPELKKPGETVKISCKASGYIFTNYGMNWVKQAPGKSFKWMGWINTYTGESTYSADFKGRFAFSLETSASTAYLHINDLKNEDTATYFCARSGGYDPMDYWGQGTSVTVSSTRIQNPDPAVYQLRDSKSSDKSVCLFTDFDSQTNVSQSKDSDVYITDKCVLDMRSMDFKSNSAVAWSNKSDFACANAFNNSIIPEDTFFPSPESSDSTDHVKPKETENTKQPSKSCHKPKAIVHTEKVNMMSLTVLGLRMLFAKTVAVNFLLTAKLFFL

SEQ ID NO: 15520 - protein, 722 aa, synthetic construct
MALPVTALLLPLALLLHAARPEIVLTQSPGTLSLSPGERATLSCRASQSVSNTYLAWYHQRPGQAPRLLIYGASSRATGIPDRFSGSGSGTDFALTISSLEPEDFAVYYCQQYSNSWTFGQGTKVEIKRLEDLKNVFPPEVAVFEPSEAEISHTQKATLVCLATGFYPDHVELSWWVNGKEVHSGVCTDPQPLKEQPALNDSRYCLSSRLRVSATFWQNPRNHFRCQVQFYGLSENDEWTQDRAKPVTQIVSAEAWGRADDVIKIHWQEKKSNTILGSQEGNTMKTNDTYMKFSWLTVPEKSLDKEHRCIVRHENNKNGVDQEIIFPPIKTDVITMDPKDNCSKDANDTLLLQLTNTSAYYMYLLLLLKSVVYFAIITCCLLRRTAFCCNGEKSRAKRSGSGATNFSLLKQAGDVEENPGPTSMDWIWRILFLVGAATGAHSFEQVQLVESGGGVVQPGRSLRLSCAASGFTFSSYDMHWVRQAPGKGLEWVAVISYDGTNEYYADSVKGRFTISRDTSKNTLYLQMNSLRAEDTAVYYCARERYFDWSFDYWGQGTLVSVSSTRIQNPDPAVYQLRDSKSSDKSVCLFTDFDSQTNVSQSKDSDVYITDKCVLDMRSMDFKSNSAVAWSNKSDFACANAFNNSIIPEDTFFPSPESSDSTDHVKPKETENTKQPSKSCHKPKAIVHTEKVNMMSLTVLGLRMLFAKTVAVNFLLTAKLFFL

SEQ ID NO: 15521 - protein, 721 aa, synthetic construct
MALPVTALLLPLALLLHAARPELTQDPAVSVALGQTVRITCQGDSLRSNYANWYQQKPGQAPVLVIYGQNNRPSGIPDRFSGSSSGNTASLTITGAQAADEADYYCDSRVSTGNHVVFGGGTKLTVLGQLEDLKNVFPPEVAVFEPSEAEISHTQKATLVCLATGFYPDHVELSWWVNGKEVHSGVCTDPQPLKEQPALNDSRYCLSSRLRVSATFWQNPRNHFRCQVQFYGLSENDEWTQDRAKPVTQIVSAEAWGRADDVIKIHWQEKKSNTILGSQEGNTMKTNDTYMKFSWLTVPEKSLDKEHRCIVRHENNKNGVDQEIIFPPIKTDVITMDPKDNCSKDANDTLLLQLTNTSAYYMYLLLLLKSVVYFAIITCCLLRRTAFCCNGEKSRAKRSGSGATNFSLLKQAGDVEENPGPTSMDWIWRILFLVGAATGAHSFEEVQLVQSGAEVKKPGASVKVSCKASGYTFTSYAMHWVRQAPGQRLEWMGWINAGNGNTKYSQKFQGRVTITRDTSASTAYMELSSLRSEDTAVYYCARDISYGSFDYWGQGTLVTVSSTRIQNPDPAVYQLRDSKSSDKSVCLFTDFDSQTNVSQSKDSDVYITDKCVLDMRSMDFKSNSAVAWSNKSDFACANAFNNSIIPEDTFFPSPESSDSTDHVKPKETENTKQPSKSCHKPKAIVHTEKVNMMSLTVLGLRMLFAKTVAVNFLLTAKLFFL

SEQ ID NO: 15522 - protein, 723 aa, synthetic construct
MALPVTALLLPLALLLHAARPDIVLTQTPATLSVTPGDSVSLSCRASQSISNNLHWYQQKSHESPRLLIKNASQSISGIPSKFSGSGSGTDFTLRINSVETEDFGMYFCQQSNSWPYTFGSGTKLEIKLEDLKNVFPPEVAVFEPSEAEISHTQKATLVCLATGFYPDHVELSWWVNGKEVHSGVCTDPQPLKEQPALNDSRYCLSSRLRVSATFWQNPRNHFRCQVQFYGLSENDEWTQDRAKPVTQIVSAEAWGRADDVIKIHWQEKKSNTILGSQEGNTMKTNDTYMKFSWLTVPEKSLDKEHRCIVRHENNKNGVDQEIIFPPIKTDVITMDPKDNCSKDANDTLLLQLTNTSAYYMYLLLLLKSVVYFAIITCCLLRRTAFCCNGEKSRAKRSGSGATNFSLLKQAGDVEENPGPTSMDWIWRILFLVGAATGAHSFEQVKLQQSGPELVKPGASVKISCKASGYSFTGYYMHWVKQSHGNILDWIGYIYPYNGVSSYNQKFKGKATLTVDKSSSTAYMELRSLTSEDSAVYYCARERGLYQLRAMDYWGQGTSVTVSSTRIQNPDPAVYQLRDSKSSDKSVCLFTDFDSQTNVSQSKDSDVYITDKCVLDMRSMDFKSNSAVAWSNKSDFACANAFNNSIIPEDTFFPSPESSDSTDHVKPKETENTKQPSKSCHKPKAIVHTEKVNMMSLTVLGLRMLFAKTVAVNFLLTAKLFFL

SEQ ID NO: 15523 - protein, 714 aa, synthetic construct
MALPVTALLLPLALLLHAARPDIVMTQTPAIMSASPGQKVTITCSASSSVNYMHWYQQKLGSSPKLWIYDTSKLAPGVPARFSGSGSGTSYSLTISSMEAEDAASYFCHQWSSYPYTFGSGTKLEIKLEDLKNVFPPEVAVFEPSEAEISHTQKATLVCLATGFYPDHVELSWWVNGKEVHSGVCTDPQPLKEQPALNDSRYCLSSRLRVSATFWQNPRNHFRCQVQFYGLSENDEWTQDRAKPVTQIVSAEAWGRADDVIKIHWQEKKSNTILGSQEGNTMKTNDTYMKFSWLTVPEKSLDKEHRCIVRHENNKNGVDQEIIFPPIKTDVITMDPKDNCSKDANDTLLLQLTNTSAYYMYLLLLLKSVVYFAIITCCLLRRTAFCCNGEKSRAKRSGSGATNFSLLKQAGDVEENPGPTSMDWIWRILFLVGAATGAHSFEEVQLQESGPDLVKPSQSLSLTCTVTGYSITSGYGWHWIRQFPGNKLEWMGYIHYSGSTTYNPSLKSRISISRDTSKNQFFLQLNSVTTEDTATYYCARSLRYWGQGTTLTVSSTRIQNPDPAVYQLRDSKSSDKSVCLFTDFDSQTNVSQSKDSDVYITDKCVLDMRSMDFKSNSAVAWSNKSDFACANAFNNSIIPEDTFFPSPESSDSTDHVKPKETENTKQPSKSCHKPKAIVHTEKVNMMSLTVLGLRMLFAKTVAVNFLLTAKLFFL

SEQ ID NO: 15524 - protein, 717 aa, synthetic construct
MALPVTALLLPLALLLHAARPDIQMTQSPSSLSASVGDRVTITCSATSSISYMHWYQQKPGKAPKGWIYDTSKLAHGVPSRFSGSGSGTDFTLTISSLQPEDFATYYCHQRRSYPFTFGQGTKVEIKLEDLKNVFPPEVAVFEPSEAEISHTQKATLVCLATGFYPDHVELSWWVNGKEVHSGVCTDPQPLKEQPALNDSRYCLSSRLRVSATFWQNPRNHFRCQVQFYGLSENDEWTQDRAKPVTQIVSAEAWGRADDVIKIHWQEKKSNTILGSQEGNTMKTNDTYMKFSWLTVPEKSLDKEHRCIVRHENNKNGVDQEIIFPPIKTDVITMDPKDNCSKDANDTLLLQLTNTSAYYMYLLLLLKSVVYFAIITCCLLRRTAFCCNGEKSRAKRSGSGATNFSLLKQAGDVEENPGPTSMDWIWRILFLVGAATGAHSFEEVQLVQSGAEVKKPGASVKVSCKASGYTFTNFWIHWVRQAPGQGLEWIGEIDPSDSYTNYNQKFKGRVTITRDTSTSTAYLELSSLRSEDTAVYYCAREITTVDYWGQGTLVTVSSTRIQNPDPAVYQLRDSKSSDKSVCLFTDFDSQTNVSQSKDSDVYITDKCVLDMRSMDFKSNSAVAWSNKSDFACANAFNNSIIPEDTFFPSPESSDSTDHVKPKETENTKQPSKSCHKPKAIVHTEKVNMMSLTVLGLRMLFAKTVAVNFLLTAKLFFL

SEQ ID NO: 15525 - protein, 724 aa, synthetic construct
MALPVTALLLPLALLLHAARPDIQMTQSPSSLSASVGDRVTITCKASQGFNKYVAWYQQKPGKAPKLLIYYTSTLQPGVPSRFSGSGSGRDYTLTISSLQPEDFATYYCLQYGNLLYAFGQGTKVEIKRLEDLKNVFPPEVAVFEPSEAEISHTQKATLVCLATGFYPDHVELSWWVNGKEVHSGVCTDPQPLKEQPALNDSRYCLSSRLRVSATFWQNPRNHFRCQVQFYGLSENDEWTQDRAKPVTQIVSAEAWGRADDVIKIHWQEKKSNTILGSQEGNTMKTNDTYMKFSWLTVPEKSLDKEHRCIVRHENNKNGVDQEIIFPPIKTDVITMDPKDNCSKDANDTLLLQLTNTSAYYMYLLLLLKSVVYFAIITCCLLRRTAFCCNGEKSRAKRSGSGATNFSLLKQAGDVEENPGPTSMDWIWRILFLVGAATGAHSFEEVQLVQSGAEVKKPGASVKVSCKASGYTFTSYWIGWVRQAPGQGLEWIGDIYPGGGYTNYNEKFKGRVTITRDTSTSTAYLELSSLRSEDTAVYYCARLDGSSYRGAMDSWGQGTLVTVSSTRIQNPDPAVYQLRDSKSSDKSVCLFTDFDSQTNVSQSKDSDVYITDKCVLDMRSMDFKSNSAVAWSNKSDFACANAFNNSIIPEDTFFPSPESSDSTDHVKPKETENTKQPSKSCHKPKAIVHTEKVNMMSLTVLGLRMLFAKTVAVNFLLTAKLFFL

SEQ ID NO: 15526 - protein, 720 aa, synthetic construct
MALPVTALLLPLALLLHAARPDIQMTQSPSSLSASVGDRVTITCRASQDIRYYLNWYQQKPGKAPKLLIYVASSLQSGVPSRFSGSGSGTEFTLTVSSLQPEDFATYYCLQVYSTPRTFGQGTKVEIKLEDLKNVFPPEVAVFEPSEAEISHTQKATLVCLATGFYPDHVELSWWVNGKEVHSGVCTDPQPLKEQPALNDSRYCLSSRLRVSATFWQNPRNHFRCQVQFYGLSENDEWTQDRAKPVTQIVSAEAWGRADDVIKIHWQEKKSNTILGSQEGNTMKTNDTYMKFSWLTVPEKSLDKEHRCIVRHENNKNGVDQEIIFPPIKTDVITMDPKDNCSKDANDTLLLQLTNTSAYYMYLLLLLKSVVYFAIITCCLLRRTAFCCNGEKSRAKRSGSGATNFSLLKQAGDVEENPGPTSMDWIWRILFLVGAATGAHSFEEVQLVESGGGLAKPGGSLRLSCAASGFRFTFNNYYMDWVRQAPGQGLEWVSRISSSGDPTWYADSVKGRFTISRENAKNTLFLQMNSLRAEDTAVYYCASLTTGSDSWGQGVLVTVSSTRIQNPDPAVYQLRDSKSSDKSVCLFTDFDSQTNVSQSKDSDVYITDKCVLDMRSMDFKSNSAVAWSNKSDFACANAFNNSIIPEDTFFPSPESSDSTDHVKPKETENTKQPSKSCHKPKAIVHTEKVNMMSLTVLGLRMLFAKTVAVNFLLTAKLFFL

SEQ ID NO: 15527 - protein, 721 aa, synthetic construct
MALPVTALLLPLALLLHAARPEIVMTQSPATLSVSPGERATLSCRASQSVSRNLAWYQQKPGQAPRLLIYGASTRATGIPARFSGSGSGTEFTLTIGSLQSEDFAVYYCQQYKTWPRTFGQGTNVEIKLEDLKNVFPPEVAVFEPSEAEISHTQKATLVCLATGFYPDHVELSWWVNGKEVHSGVCTDPQPLKEQPALNDSRYCLSSRLRVSATFWQNPRNHFRCQVQFYGLSENDEWTQDRAKPVTQIVSAEAWGRADDVIKIHWQEKKSNTILGSQEGNTMKTNDTYMKFSWLTVPEKSLDKEHRCIVRHENNKNGVDQEIIFPPIKTDVITMDPKDNCSKDANDTLLLQLTNTSAYYMYLLLLLKSVVYFAIITCCLLRRTAFCCNGEKSRAKRSGSGATNFSLLKQAGDVEENPGPTSMDWIWRILFLVGAATGAHSFEQVQLQQWGAGLLKPSETLSLTCAVFGGSFSGYYWSWIRQPPGKGLEWIGEINHRGNTNDNPSLKSRVTISVDTSKNQFALKLSSVTAADTAVYYCARERGYTYGNFDHWGQGTLVTVSSTRIQNPDPAVYQLRDSKSSDKSVCLFTDFDSQTNVSQSKDSDVYITDKCVLDMRSMDFKSNSAVAWSNKSDFACANAFNNSIIPEDTFFPSPESSDSTDHVKPKETENTKQPSKSCHKPKAIVHTEKVNMMSLTVLGLRMLFAKTVAVNFLLTAKLFFL

SEQ ID NO: 15528 - protein, 722 aa, synthetic construct
MALPVTALLLPLALLLHAARPEIVMTPSSATLSVSPGERATLSCRASQSVSRNLAWYQQKPGQAPRLLIYGASTRATGIPARFSGSGSGTEFTLTISSLQSEDFAVYYCHQYSNWMCSFGQGTKLEIKLEDLKNVFPPEVAVFEPSEAEISHTQKATLVCLATGFYPDHVELSWWVNGKEVHSGVCTDPQPLKEQPALNDSRYCLSSRLRVSATFWQNPRNHFRCQVQFYGLSENDEWTQDRAKPVTQIVSAEAWGRADDVIKIHWQEKKSNTILGSQEGNTMKTNDTYMKFSWLTVPEKSLDKEHRCIVRHENNKNGVDQEIIFPPIKTDVITMDPKDNCSKDANDTLLLQLTNTSAYYMYLLLLLKSVVYFAIITCCLLRRTAFCCNGEKSRAKRSGSGATNFSLLKQAGDVEENPGPTSMDWIWRILFLVGAATGAHSFEEVQLLESGGGLVQPGGSLRLSCAASGFTFSRYAMNWVRQAPGKGLEWVSGISGSGGRTYYADSVKGRFTISRDNSKNTLYLQMNSLRAEDTAVYYCAKDRDFWSGPFDYWGQGTLVTVSSTRIQNPDPAVYQLRDSKSSDKSVCLFTDFDSQTNVSQSKDSDVYITDKCVLDMRSMDFKSNSAVAWSNKSDFACANAFNNSIIPEDTFFPSPESSDSTDHVKPKETENTKQPSKSCHKPKAIVHTEKVNMMSLTVLGLRMLFAKTVAVNFLLTAKLFFL

SEQ ID NO: 15529 - protein, 727 aa, synthetic construct
MALPVTALLLPLALLLHAARPDIQMTQSPSSLSASVGDRVTITCKASKNIRSYLAWYQQKPGKAPKLLIYSGSTLHSGVPSRFSGSGSGTDFTLTISSLQPEDFATYYCQQHHEYPLTFGQGTKVEIKRLEDLKNVFPPEVAVFEPSEAEISHTQKATLVCLATGFYPDHVELSWWVNGKEVHSGVCTDPQPLKEQPALNDSRYCLSSRLRVSATFWQNPRNHFRCQVQFYGLSENDEWTQDRAKPVTQIVSAEAWGRADDVIKIHWQEKKSNTILGSQEGNTMKTNDTYMKFSWLTVPEKSLDKEHRCIVRHENNKNGVDQEIIFPPIKTDVITMDPKDNCSKDANDTLLLQLTNTSAYYMYLLLLLKSVVYFAIITCCLLRRTAFCCNGEKSRAKRSGSGATNFSLLKQAGDVEENPGPTSMDWIWRILFLVGAATGAHSFEQVQLQESGPGLVKPSETLSLTCTVSGYTITSGYDWSWIRQPPGKGLEWIGYINYGGSTNYKPSLGSRVTISVDTSKNQFSLKLSSVTAADTAVYYCARYNEYKSYIYDWYFDFWGQGTLVTVSSTRIQNPDPAVYQLRDSKSSDKSVCLFTDFDSQTNVSQSKDSDVYITDKCVLDMRSMDFKSNSAVAWSNKSDFACANAFNNSIIPEDTFFPSPESSDSTDHVKPKETENTKQPSKSCHKPKAIVHTEKVNMMSLTVLGLRMLFAKTVAVNFLLTAKLFFL

SEQ ID NO: 15530 - protein, 729 aa, synthetic construct
MALPVTALLLPLALLLHAARPQSVVTQPPSVSAAPGQKVTISCSGSSSNIGNNYVSWYQQLPGTAPKLLIYDNNKRPSGIPDRFSGSKSGTSATLGITGLQTGDEADYYCGTWDGSLYTMLFGGGTKLTVLLEDLKNVFPPEVAVFEPSEAEISHTQKATLVCLATGFYPDHVELSWWVNGKEVHSGVCTDPQPLKEQPALNDSRYCLSSRLRVSATFWQNPRNHFRCQVQFYGLSENDEWTQDRAKPVTQIVSAEAWGRADDVIKIHWQEKKSNTILGSQEGNTMKTNDTYMKFSWLTVPEKSLDKEHRCIVRHENNKNGVDQEIIFPPIKTDVITMDPKDNCSKDANDTLLLQLTNTSAYYMYLLLLLKSVVYFAIITCCLLRRTAFCCNGEKSRAKRSGSGATNFSLLKQAGDVEENPGPTSMDWIWRILFLVGAATGAHSFEEVQLVESGGGLVKPGGSLRLSCAASGFTFSNAWMSWVRQAPGKGLEWVGFIRSKAYGGTTEYAASVKGRFTISRDDSKSIAYLQMNNLKTEDTAVYYCARDGLYSSSWYDSDYWGQGTLVTVSSTRIQNPDPAVYQLRDSKSSDKSVCLFTDFDSQTNVSQSKDSDVYITDKCVLDMRSMDFKSNSAVAWSNKSDFACANAFNNSIIPEDTFFPSPESSDSTDHVKPKETENTKQPSKSCHKPKAIVHTEKVNMMSLTVLGLRMLFAKTVAVNFLLTAKLFFL

SEQ ID NO: 15531 - protein, 734 aa, synthetic construct
MALPVTALLLPLALLLHAARPQSVLTQPPSVSGAPGQRVTISCTGSSSNIGAGYDVHWYQQLPGTAPKLLIFGNSNRPSGVPDRFSGFKSGTSASLAITGLQAEDEADYFCQSYDSSLSGSGVFGTGTKVTVLGLEDLKNVFPPEVAVFEPSEAEISHTQKATLVCLATGFYPDHVELSWWVNGKEVHSGVCTDPQPLKEQPALNDSRYCLSSRLRVSATFWQNPRNHFRCQVQFYGLSENDEWTQDRAKPVTQIVSAEAWGRADDVIKIHWQEKKSNTILGSQEGNTMKTNDTYMKFSWLTVPEKSLDKEHRCIVRHENNKNGVDQEIIFPPIKTDVITMDPKDNCSKDANDTLLLQLTNTSAYYMYLLLLLKSVVYFAIITCCLLRRTAFCCNGEKSRAKRSGSGATNFSLLKQAGDVEENPGPTSMDWIWRILFLVGAATGAHSFEQMQLVQSGGGLVQPGRSLRLSCAASGFTFDDYAMHWVRQAPGKGLEWVSGISWNSGSIGYADSVKGRFTISRDNAKNSLYLQMNSLRAEDTALYYCAKDIHSGSYYGLLYYAMDVWGQGTTVTVSSTRIQNPDPAVYQLRDSKSSDKSVCLFTDFDSQTNVSQSKDSDVYITDKCVLDMRSMDFKSNSAVAWSNKSDFACANAFNNSIIPEDTFFPSPESSDSTDHVKPKETENTKQPSKSCHKPKAIVHTEKVNMMSLTVLGLRMLFAKTVAVNFLLTAKLFFL

SEQ ID NO: 15532 - protein, 734 aa, synthetic construct
MALPVTALLLPLALLLHAARPLPVLTQPPSASGTPGQRVTISCSGRSSNIGSNSVNWYRQLPGAAPKLLIYSNNQRPPGVPVRFSGSKSGTSASLAISGLQSEDEATYYCATWDDNLNVHYVFGTGTKVTVLGSRLEDLKNVFPPEVAVFEPSEAEISHTQKATLVCLATGFYPDHVELSWWVNGKEVHSGVCTDPQPLKEQPALNDSRYCLSSRLRVSATFWQNPRNHFRCQVQFYGLSENDEWTQDRAKPVTQIVSAEAWGRADDVIKIHWQEKKSNTILGSQEGNTMKTNDTYMKFSWLTVPEKSLDKEHRCIVRHENNKNGVDQEIIFPPIKTDVITMDPKDNCSKDANDTLLLQLTNTSAYYMYLLLLLKSVVYFAIITCCLLRRTAFCCNGEKSRAKRSGSGATNFSLLKQAGDVEENPGPTSMDWIWRILFLVGAATGAHSFELEMAQVQLVQSGAEVKKPGSSVKVSCKASGGTFSSYAISWVRQAPGQGLEWMGRIIPILGIANYAQKFQGRVTITADKSTSTAYMELSSLRSEDTAVYYCARGGYYSHDMWSEDWGQGTLVTVSSTRIQNPDPAVYQLRDSKSSDKSVCLFTDFDSQTNVSQSKDSDVYITDKCVLDMRSMDFKSNSAVAWSNKSDFACANAFNNSIIPEDTFFPSPESSDSTDHVKPKETENTKQPSKSCHKPKAIVHTEKVNMMSLTVLGLRMLFAKTVAVNFLLTAKLFFL

SEQ ID NO: 15533 - protein, 728 aa, synthetic construct
MALPVTALLLPLALLLHAARPDFVMTQSPDSLAVSLGERVTMSCKSSQSLLNSGNQKNYLTWYQQKPGQPPKLLIYWASTRESGVPDRFSGSGSGTDFTLTISSLQAEDVAVYYCQNDYSYPYTFGQGTKLEIKLEDLKNVFPPEVAVFEPSEAEISHTQKATLVCLATGFYPDHVELSWWVNGKEVHSGVCTDPQPLKEQPALNDSRYCLSSRLRVSATFWQNPRNHFRCQVQFYGLSENDEWTQDRAKPVTQIVSAEAWGRADDVIKIHWQEKKSNTILGSQEGNTMKTNDTYMKFSWLTVPEKSLDKEHRCIVRHENNKNGVDQEIIFPPIKTDVITMDPKDNCSKDANDTLLLQLTNTSAYYMYLLLLLKSVVYFAIITCCLLRRTAFCCNGEKSRAKRSGSGATNFSLLKQAGDVEENPGPTSMDWIWRILFLVGAATGAHSFEEVQLVQSGAELKKPGASVKVSCKASGYTFTDYYMKWVRQAPGQGLEWIGDIIPSNGATFYNQKFKGRVTITVDKSTSTAYMELSSLRSEDTAVYYCARSHLLRASWFAYWGQGTLVTVSSTRIQNPDPAVYQLRDSKSSDKSVCLFTDFDSQTNVSQSKDSDVYITDKCVLDMRSMDFKSNSAVAWSNKSDFACANAFNNSIIPEDTFFPSPESSDSTDHVKPKETENTKQPSKSCHKPKAIVHTEKVNMMSLTVLGLRMLFAKTVAVNFLLTAKLFFL

SEQ ID NO: 15534 - protein, 728 aa, synthetic construct
MALPVTALLLPLALLLHAARPDFVMTQSPDSLAVSLGERVTMSCKSSQSLLNSGNQKNYLTWYQQKPGQPPKLLIYWASTRESGVPDRFSGSGSGTDFTLTISSLQAEDVAVYYCQNDYSYPYTFGQGTKLEIKLEDLKNVFPPEVAVFEPSEAEISHTQKATLVCLATGFYPDHVELSWWVNGKEVHSGVCTDPQPLKEQPALNDSRYCLSSRLRVSATFWQNPRNHFRCQVQFYGLSENDEWTQDRAKPVTQIVSAEAWGRADDVIKIHWQEKKSNTILGSQEGNTMKTNDTYMKFSWLTVPEKSLDKEHRCIVRHENNKNGVDQEIIFPPIKTDVITMDPKDNCSKDANDTLLLQLTNTSAYYMYLLLLLKSVVYFAIITCCLLRRTAFCCNGEKSRAKRSGSGATNFSLLKQAGDVEENPGPTSMDWIWRILFLVGAATGAHSFEQVQLVQSGAELKKPGASVKVSCKASGYTFTDYYMKWVRQAPGQGLEWIGDIIPSNGATFYNQKFKGRVTITVDKSTSTAYMELSSLRSEDTAVYYCARSHLLRASWFAYWGQGTLVTVSSTRIQNPDPAVYQLRDSKSSDKSVCLFTDFDSQTNVSQSKDSDVYITDKCVLDMRSMDFKSNSAVAWSNKSDFACANAFNNSIIPEDTFFPSPESSDSTDHVKPKETENTKQPSKSCHKPKAIVHTEKVNMMSLTVLGLRMLFAKTVAVNFLLTAKLFFL

SEQ ID NO: 15535 - protein, 718 aa, synthetic construct
MALPVTALLLPLALLLHAARPDVQITQSPSYLAASPGETITINCRASKSISKDLAWYQEKPGKTNKLLIYSGSTLQSGIPSRFSGSGSGTDFTLTISSLEPEDFAMYYCQQHNKYPYTFGGGTKLEIKRLEDLKNVFPPEVAVFEPSEAEISHTQKATLVCLATGFYPDHVELSWWVNGKEVHSGVCTDPQPLKEQPALNDSRYCLSSRLRVSATFWQNPRNHFRCQVQFYGLSENDEWTQDRAKPVTQIVSAEAWGRADDVIKIHWQEKKSNTILGSQEGNTMKTNDTYMKFSWLTVPEKSLDKEHRCIVRHENNKNGVDQEIIFPPIKTDVITMDPKDNCSKDANDTLLLQLTNTSAYYMYLLLLLKSVVYFAIITCCLLRRTAFCCNGEKSRAKRSGSGATNFSLLKQAGDVEENPGPTSMDWIWRILFLVGAATGAHSFEQVQLQQPGAELVRPGASVKLSCKASGYTFTSYWMNWVKQRPDQGLEWIGRIDPYDSETHYNQKFKDKAILTVDKSSSTAYMQLSSLTSEDSAVYYCARGNWDDYWGQGTTLTVSSTRIQNPDPAVYQLRDSKSSDKSVCLFTDFDSQTNVSQSKDSDVYITDKCVLDMRSMDFKSNSAVAWSNKSDFACANAFNNSIIPEDTFFPSPESSDSTDHVKPKETENTKQPSKSCHKPKAIVHTEKVNMMSLTVLGLRMLFAKTVAVNFLLTAKLFFL

SEQ ID NO: 15536 - protein, 720 aa, synthetic construct
MALPVTALLLPLALLLHAARPEIVLTQSPTSMTASPGEQVTITCRASSSINYMHWYQQKPGASPRPWIYETSKLASGVPDRFSGSASGTSYSLTINNMEAEDAATYYCQQWNYPSWTFGGGTKLELKLEDLKNVFPPEVAVFEPSEAEISHTQKATLVCLATGFYPDHVELSWWVNGKEVHSGVCTDPQPLKEQPALNDSRYCLSSRLRVSATFWQNPRNHFRCQVQFYGLSENDEWTQDRAKPVTQIVSAEAWGRADDVIKIHWQEKKSNTILGSQEGNTMKTNDTYMKFSWLTVPEKSLDKEHRCIVRHENNKNGVDQEIIFPPIKTDVITMDPKDNCSKDANDTLLLQLTNTSAYYMYLLLLLKSVVYFAIITCCLLRRTAFCCNGEKSRAKRSGSGATNFSLLKQAGDVEENPGPTSMDWIWRILFLVGAATGAHSFEEVQLVESGGGLVQPGRSLKLSCAASGFTFSDYNMAWVRQAPKKGLEWVATILYDGGRTYYRGSVKGRFTISRDNAKSTLYLRMDSLRSEDTATYYCATHSRGTDYFDYWGQGVMVTVSSTRIQNPDPAVYQLRDSKSSDKSVCLFTDFDSQTNVSQSKDSDVYITDKCVLDMRSMDFKSNSAVAWSNKSDFACANAFNNSIIPEDTFFPSPESSDSTDHVKPKETENTKQPSKSCHKPKAIVHTEKVNMMSLTVLGLRMLFAKTVAVNFLLTAKLFFL

SEQ ID NO: 15537 - protein, 729 aa, synthetic construct
MALPVTALLLPLALLLHAARPDIVMTQSPSSLAVSEGETVTINCKSSQSFLSSGDGKNYVAWYQYKPGQSPKLLIYWASTRQSGVPDRFIGSGSGTDFTLTISTVQAEDLAIYYCQQYYDTPLTFGSGTKLEIKLEDLKNVFPPEVAVFEPSEAEISHTQKATLVCLATGFYPDHVELSWWVNGKEVHSGVCTDPQPLKEQPALNDSRYCLSSRLRVSATFWQNPRNHFRCQVQFYGLSENDEWTQDRAKPVTQIVSAEAWGRADDVIKIHWQEKKSNTILGSQEGNTMKTNDTYMKFSWLTVPEKSLDKEHRCIVRHENNKNGVDQEIIFPPIKTDVITMDPKDNCSKDANDTLLLQLTNTSAYYMYLLLLLKSVVYFAIITCCLLRRTAFCCNGEKSRAKRSGSGATNFSLLKQAGDVEENPGPTSMDWIWRILFLVGAATGAHSFEEVKLQESGPSLVQSSQTLSLTCTVSGFSLTSYHIHWVRQTPGKGLEWMGVMWSDGDTSYNSALKSRLSISRDTSQSQVFLKMNSLQTEDTATYYCARGYYSSYLYLWFAYWGQGTLVTVSSTRIQNPDPAVYQLRDSKSSDKSVCLFTDFDSQTNVSQSKDSDVYITDKCVLDMRSMDFKSNSAVAWSNKSDFACANAFNNSIIPEDTFFPSPESSDSTDHVKPKETENTKQPSKSCHKPKAIVHTEKVNMMSLTVLGLRMLFAKTVAVNFLLTAKLFFL

SEQ ID NO: 15538 - protein, 733 aa, synthetic construct
MALPVTALLLPLALLLHAARPDVLMTQTPVSLPVSLGGQVSISCRSSQSLVHSDGDTYLHWYLQKPGQSPQLLIYRVSNRFSGVPDRFSGSGSGTDFTLKISRVEPEDLGLYYCLQTTHFPPWTFGGGTKLEMKLEDLKNVFPPEVAVFEPSEAEISHTQKATLVCLATGFYPDHVELSWWVNGKEVHSGVCTDPQPLKEQPALNDSRYCLSSRLRVSATFWQNPRNHFRCQVQFYGLSENDEWTQDRAKPVTQIVSAEAWGRADDVIKIHWQEKKSNTILGSQEGNTMKTNDTYMKFSWLTVPEKSLDKEHRCIVRHENNKNGVDQEIIFPPIKTDVITMDPKDNCSKDANDTLLLQLTNTSAYYMYLLLLLKSVVYFAIITCCLLRRTAFCCNGEKSRAKRSGSGATNFSLLKQAGDVEENPGPTSMDWIWRILFLVGAATGAHSFEQVQLQQSGPELRRPGSSVRLSCKASGYRIKDFLIHWIKNRPEHGLEWIGWIDPEDGETKYAQKFQTKATLTADTSSNTAYMQLSSLTSEDTATYFCARWGDVYYGLMRGHVMDAWGQGTSVTVSSTRIQNPDPAVYQLRDSKSSDKSVCLFTDFDSQTNVSQSKDSDVYITDKCVLDMRSMDFKSNSAVAWSNKSDFACANAFNNSIIPEDTFFPSPESSDSTDHVKPKETENTKQPSKSCHKPKAIVHTEKVNMMSLTVLGLRMLFAKTVAVNFLLTAKLFFL

SEQ ID NO: 15539 - protein, 728 aa, synthetic construct
MALPVTALLLPLALLLHAARPDIVMTQSPATLSLSPGERATLSCRSSKSLQNVNGNTYLYWFQQKPGQSPQLLIYRMSNLNSGVPDRFSGSGSGTEFTLTISSLEPEDFAVYYCMQHLEYPITFGAGTKLEIKLEDLKNVFPPEVAVFEPSEAEISHTQKATLVCLATGFYPDHVELSWWVNGKEVHSGVCTDPQPLKEQPALNDSRYCLSSRLRVSATFWQNPRNHFRCQVQFYGLSENDEWTQDRAKPVTQIVSAEAWGRADDVIKIHWQEKKSNTILGSQEGNTMKTNDTYMKFSWLTVPEKSLDKEHRCIVRHENNKNGVDQEIIFPPIKTDVITMDPKDNCSKDANDTLLLQLTNTSAYYMYLLLLLKSVVYFAIITCCLLRRTAFCCNGEKSRAKRSGSGATNFSLLKQAGDVEENPGPTSMDWIWRILFLVGAATGAHSFEEVQLVESGGGLVKPGGSLKLSCAASGYTFTSYVMHWVRQAPGKGLEWIGYINPYNDGTKYNEKFQGRVTISSDKSISTAYMELSSLRSEDTAMYYCARGTYYYGTRVFDYWGQGTLVTVSSTRIQNPDPAVYQLRDSKSSDKSVCLFTDFDSQTNVSQSKDSDVYITDKCVLDMRSMDFKSNSAVAWSNKSDFACANAFNNSIIPEDTFFPSPESSDSTDHVKPKETENTKQPSKSCHKPKAIVHTEKVNMMSLTVLGLRMLFAKTVAVNFLLTAKLFFL

SEQ ID NO: 15540 - protein, 724 aa, synthetic construct
MALPVTALLLPLALLLHAARPDIQMTQSPSSLSASVGDRVTITCKASDHINNWLAWYQQKPGQAPKLLIYGATTLETGVPSRFSGSGSGTDYTLTISSLQPEDFATYYCQQSWNTPWTFGQGTKLEIKRLEDLKNVFPPEVAVFEPSEAEISHTQKATLVCLATGFYPDHVELSWWVNGKEVHSGVCTDPQPLKEQPALNDSRYCLSSRLRVSATFWQNPRNHFRCQVQFYGLSENDEWTQDRAKPVTQIVSAEAWGRADDVIKIHWQEKKSNTILGSQEGNTMKTNDTYMKFSWLTVPEKSLDKEHRCIVRHENNKNGVDQEIIFPPIKTDVITMDPKDNCSKDANDTLLLQLTNTSAYYMYLLLLLKSVVYFAIITCCLLRRTAFCCNGEKSRAKRSGSGATNFSLLKQAGDVEENPGPTSMDWIWRILFLVGAATGAHSFEQVQLQQPGAELVKPGASVKMSCKASGYAFSSYWINWMKQKPGQGLEWIGQIYPGDGDTNYNGKFKGRATLTADTSSSTAYMQLSSLTSEDSAVYFCARSITTVVGCAMDYWGQGTSVTVSSTRIQNPDPAVYQLRDSKSSDKSVCLFTDFDSQTNVSQSKDSDVYITDKCVLDMRSMDFKSNSAVAWSNKSDFACANAFNNSIIPEDTFFPSPESSDSTDHVKPKETENTKQPSKSCHKPKAIVHTEKVNMMSLTVLGLRMLFAKTVAVNFLLTAKLFFL

SEQ ID NO: 15541 - protein, 726 aa, synthetic construct
MALPVTALLLPLALLLHAARPQIVLSQSPAILSASPGEKVTMTCRASSSVSYMHWYQQKPGSSPKPWIYATSNLASGVPARFSGSGSGTSYSFTISRVEAEDAATYYCQQWTFNPPTFGGGTRLEIKRTVAALEDLKNVFPPEVAVFEPSEAEISHTQKATLVCLATGFYPDHVELSWWVNGKEVHSGVCTDPQPLKEQPALNDSRYCLSSRLRVSATFWQNPRNHFRCQVQFYGLSENDEWTQDRAKPVTQIVSAEAWGRADDVIKIHWQEKKSNTILGSQEGNTMKTNDTYMKFSWLTVPEKSLDKEHRCIVRHENNKNGVDQEIIFPPIKTDVITMDPKDNCSKDANDTLLLQLTNTSAYYMYLLLLLKSVVYFAIITCCLLRRTAFCCNGEKSRAKRSGSGATNFSLLKQAGDVEENPGPTSMDWIWRILFLVGAATGAHSFEQAYLQQSGAELVRPGASVKMSCKASGYTFTSYNMHWVKQTPRQGLEWIGGIYPGNGDTSYNQKFKGKATLTVGKSSSTAYMQLSSLTSEDSAVYFCARYDYNYAMDYWGQGTSVTVSSASTRIQNPDPAVYQLRDSKSSDKSVCLFTDFDSQTNVSQSKDSDVYITDKCVLDMRSMDFKSNSAVAWSNKSDFACANAFNNSIIPEDTFFPSPESSDSTDHVKPKETENTKQPSKSCHKPKAIVHTEKVNMMSLTVLGLRMLFAKTVAVNFLLTAKLFFL

SEQ ID NO: 15542 - protein, 724 aa, synthetic construct
MALPVTALLLPLALLLHAARPEIVLTQSPATLSLSPGERATLSCRASQSVSSYLAWYQQKPGQAPRLLIYDASNRATGIPARFSGSGSGTDFTLTISSLEPEDFAVYYCQQRSNWPITFGQGTRLEIKLEDLKNVFPPEVAVFEPSEAEISHTQKATLVCLATGFYPDHVELSWWVNGKEVHSGVCTDPQPLKEQPALNDSRYCLSSRLRVSATFWQNPRNHFRCQVQFYGLSENDEWTQDRAKPVTQIVSAEAWGRADDVIKIHWQEKKSNTILGSQEGNTMKTNDTYMKFSWLTVPEKSLDKEHRCIVRHENNKNGVDQEIIFPPIKTDVITMDPKDNCSKDANDTLLLQLTNTSAYYMYLLLLLKSVVYFAIITCCLLRRTAFCCNGEKSRAKRSGSGATNFSLLKQAGDVEENPGPTSMDWIWRILFLVGAATGAHSFEEVQLVESGGGLVQPDRSLRLSCAASGFTFHDYAMHWVRQAPGKGLEWVSTISWNSGTIGYADSVKGRFTISRDNAKNSLYLQMNSLRAEDTALYYCAKDIQYGNYYYGMDVWGQGTTVTVSSTRIQNPDPAVYQLRDSKSSDKSVCLFTDFDSQTNVSQSKDSDVYITDKCVLDMRSMDFKSNSAVAWSNKSDFACANAFNNSIIPEDTFFPSPESSDSTDHVKPKETENTKQPSKSCHKPKAIVHTEKVNMMSLTVLGLRMLFAKTVAVNFLLTAKLFFL

SEQ ID NO: 15543 - protein, 719 aa, synthetic construct
MALPVTALLLPLALLLHAARPDIQMTQSPSSLSASVGDRVTINCKASQDINSYLSWFQQKPGKAPKTLIYRANRLVDGVPSRFSGSGSGQDYTLTISSLQPEDFATYYCLQYDEFPLTFGGGTKVEIKLEDLKNVFPPEVAVFEPSEAEISHTQKATLVCLATGFYPDHVELSWWVNGKEVHSGVCTDPQPLKEQPALNDSRYCLSSRLRVSATFWQNPRNHFRCQVQFYGLSENDEWTQDRAKPVTQIVSAEAWGRADDVIKIHWQEKKSNTILGSQEGNTMKTNDTYMKFSWLTVPEKSLDKEHRCIVRHENNKNGVDQEIIFPPIKTDVITMDPKDNCSKDANDTLLLQLTNTSAYYMYLLLLLKSVVYFAIITCCLLRRTAFCCNGEKSRAKRSGSGATNFSLLKQAGDVEENPGPTSMDWIWRILFLVGAATGAHSFEQVQLVQSGAEVKKPGASVKVSCKASGYTFTNYDINWVRQAPGQGLEWIGWIYPGDGSTKYNEKFKAKATLTADTSTSTAYMELRSLRSDDTAVYYCASGYEDAMDYWGQGTTVTVSSTRIQNPDPAVYQLRDSKSSDKSVCLFTDFDSQTNVSQSKDSDVYITDKCVLDMRSMDFKSNSAVAWSNKSDFACANAFNNSIIPEDTFFPSPESSDSTDHVKPKETENTKQPSKSCHKPKAIVHTEKVNMMSLTVLGLRMLFAKTVAVNFLLTAKLFFL

SEQ ID NO: 15544 - protein, 721 aa, synthetic construct
MALPVTALLLPLALLLHAARPDIVMTQTPLSLSVTPGQPASISCKSSQSLLDGDGKTYLNWLLQKPGQSPQRLIYLVSKLDSGVPDRFSGSGSGTDFTLKISRVEAEDVGVYYCWQGTHFPRTFGQGTKLEIKLEDLKNVFPPEVAVFEPSEAEISHTQKATLVCLATGFYPDHVELSWWVNGKEVHSGVCTDPQPLKEQPALNDSRYCLSSRLRVSATFWQNPRNHFRCQVQFYGLSENDEWTQDRAKPVTQIVSAEAWGRADDVIKIHWQEKKSNTILGSQEGNTMKTNDTYMKFSWLTVPEKSLDKEHRCIVRHENNKNGVDQEIIFPPIKTDVITMDPKDNCSKDANDTLLLQLTNTSAYYMYLLLLLKSVVYFAIITCCLLRRTAFCCNGEKSRAKRSGSGATNFSLLKQAGDVEENPGPTSMDWIWRILFLVGAATGAHSFEQVQLVQSGAEVKKPGASVKVSCKASGYTFKDTYIHWVRQAPGQGLEWMGRIDPANGNTKYDPKFQGRVTMTRDTSISTAYMELSRLRSDDTAVYYCARRGGVDWGQGTLVTVSSTRIQNPDPAVYQLRDSKSSDKSVCLFTDFDSQTNVSQSKDSDVYITDKCVLDMRSMDFKSNSAVAWSNKSDFACANAFNNSIIPEDTFFPSPESSDSTDHVKPKETENTKQPSKSCHKPKAIVHTEKVNMMSLTVLGLRMLFAKTVAVNFLLTAKLFFL

SEQ ID NO: 15545 - protein, 722 aa, synthetic construct
MALPVTALLLPLALLLHAARPDIQMTQSPSSLSASVGDRVTITCKASQDVSTAVAWFQQKPGKAPKLLIYSPSYRYTGVPSRFSGSGSGTDFTLTISSLQPEDFTYYCQQLYSTPYTFGQGTKVEIKLEDLKNVFPPEVAVFEPSEAEISHTQKATLVCLATGFYPDHVELSWWVNGKEVHSGVCTDPQPLKEQPALNDSRYCLSSRLRVSATFWQNPRNHFRCQVQFYGLSENDEWTQDRAKPVTQIVSAEAWGRADDVIKIHWQEKKSNTILGSQEGNTMKTNDTYMKFSWLTVPEKSLDKEHRCIVRHENNKNGVDQEIIFPPIKTDVITMDPKDNCSKDANDTLLLQLTNTSAYYMYLLLLLKSVVYFAIITCCLLRRTAFCCNGEKSRAKRSGSGATNFSLLKQAGDVEENPGPTSMDWIWRILFLVGAATGAHSFEEVQLVQSGAEVKKPGASVKVSCKASGYTFTDYYLDVVVRQAPGQGLEWIGRVNPYNGGTIYNQKFKGRVTLTRDTSTSTAYLELSSLRSEDTAVYYCARDHYRYDPLLDYWGQGTLVTVSSTRIQNPDPAVYQLRDSKSSDKSVCLFTDFDSQTNVSQSKDSDVYITDKCVLDMRSMDFKSNSAVAWSNKSDFACANAFNNSIIPEDTFFPSPESSDSTDHVKPKETENTKQPSKSCHKPKAIVHTEKVNMMSLTVLGLRMLFAKTVAVNFLLTAKLFFL

SEQ ID NO: 15546 - protein, 728 aa, synthetic construct
MALPVTALLLPLALLLHAARPDIQMTQSPSSLSASVGDRVTITCRASQSVSTSSYNYMHWYQQKPGKPPKLLIKYASNLESGVPSRFSGSGSGTDFTLTISSLQPEDFATYYCQHSWEIPLTFGQGTKVEIKLEDLKNVFPPEVAVFEPSEAEISHTQKATLVCLATGFYPDHVELSWWVNGKEVHSGVCTDPQPLKEQPALNDSRYCLSSRLRVSATFWQNPRNHFRCQVQFYGLSENDEWTQDRAKPVTQIVSAEAWGRADDVIKIHWQEKKSNTILGSQEGNTMKTNDTYMKFSWLTVPEKSLDKEHRCIVRHENNKNGVDQEIIFPPIKTDVITMDPKDNCSKDANDTLLLQLTNTSAYYMYLLLLLKSVVYFAIITCCLLRRTAFCCNGEKSRAKRSGSGATNFSLLKQAGDVEENPGPTSMDWIWRILFLVGAATGAHSFEEVQLVQSGAEVKKPGASVKVSCKASGYSFTDYYMHWVRQAPGQGLEWIGRINPYNGAAFYSQNFKDRVTLTVDTSTSTAYLELSSLRSEDTAVYYCAIERGADLEGYAMDYWGQGTLVTVSSTRIQNPDPAVYQLRDSKSSDKSVCLFTDFDSQTNVSQSKDSDVYITDKCVLDMRSMDFKSNSAVAWSNKSDFACANAFNNSIIPEDTFFPSPESSDSTDHVKPKETENTKQPSKSCHKPKAIVHTEKVNMMSLTVLGLRMLFAKTVAVNFLLTAKLFFL

SEQ ID NO: 15547 - protein, 726 aa, synthetic construct
MALPVTALLLPLALLLHAARPEIVLTQSPATLSASPGERVTLTCRASSNVISSYVHWYQQKPGSSPRLFLYSTSNLASGVPSRFSGSGSGTDFTFTISSLEAEDAATYYCQQYSGYPLTFGQGTRLEIKLEDLKNVFPPEVAVFEPSEAEISHTQKATLVCLATGFYPDHVELSWWVNGKEVHSGVCTDPQPLKEQPALNDSRYCLSSRLRVSATFWQNPRNHFRCQVQFYGLSENDEWTQDRAKPVTQIVSAEAWGRADDVIKIHWQEKKSNTILGSQEGNTMKTNDTYMKFSWLTVPEKSLDKEHRCIVRHENNKNGVDQEIIFPPIKTDVITMDPKDNCSKDANDTLLLQLTNTSAYYMYLLLLLKSVVYFAIITCCLLRRTAFCCNGEKSRAKRSGSGATNFSLLKQAGDVEENPGPTSMDWIWRILFLVGAATGAHSFEQVQLQESGPGLVKPSETLSLTCAVSGYSITSAYYWNWIRQPPGKGLEWIGYISYDGRNNYNPSLKNRITINPDTSKNQFSLQLNSVTPEDTAVYYCAREGDYDVGNYYAMDYWGQGTLVTVSSTRIQNPDPAVYQLRDSKSSDKSVCLFTDFDSQTNVSQSKDSDVYITDKCVLDMRSMDFKSNSAVAWSNKSDFACANAFNNSIIPEDTFFPSPESSDSTDHVKPKETENTKQPSKSCHKPKAIVHTEKVNMMSLTVLGLRMLFAKTVAVNFLLTAKLFFL

SEQ ID NO: 15548 - protein, 726 aa, synthetic construct
MALPVTALLLPLALLLHAARPEIVLTQSPATLSLSPGERATLSCRASSNVISSYVHWYQQKPGQAPRLLIYSTSNLASGIPARFSGSGSGTDFTLTISSLEPEDFAVYYCQQYSGYPLTFGQGTRLEIKLEDLKNVFPPEVAVFEPSEAEISHTQKATLVCLATGFYPDHVELSWWVNGKEVHSGVCTDPQPLKEQPALNDSRYCLSSRLRVSATFWQNPRNHFRCQVQFYGLSENDEWTQDRAKPVTQIVSAEAWGRADDVIKIHWQEKKSNTILGSQEGNTMKTNDTYMKFSWLTVPEKSLDKEHRCIVRHENNKNGVDQEIIFPPIKTDVITMDPKDNCSKDANDTLLLQLTNTSAYYMYLLLLLKSVVYFAIITCCLLRRTAFCCNGEKSRAKRSGSGATNFSLLKQAGDVEENPGPTSMDWIWRILFLVGAATGAHSFEEVQLVESGGGLVQPGRSLRLSCAASGYSITSAYYWNWVRQAPGKGLEWVSYISYDGRNNYNPSLKNRFTISRDNAKKSLYLQMNSLRAEDTALYYCAKEGDYDVGNYYAMDYWGQGTTVTVSSTRIQNPDPAVYQLRDSKSSDKSVCLFTDFDSQTNVSQSKDSDVYITDKCVLDMRSMDFKSNSAVAWSNKSDFACANAFNNSIIPEDTFFPSPESSDSTDHVKPKETENTKQPSKSCHKPKAIVHTEKVNMMSLTVLGLRMLFAKTVAVNFLLTAKLFFL

SEQ ID NO: 15549 - protein, 725 aa, synthetic construct
MALPVTALLLPLALLLHAARPDVVMTQTPLSLPVSLGDQASISCRSSQSLVHSNGNTYLRWYLQKPGQSPKVLIYKVSNRVSGVPDRFSGSGSGTDFTLKINRVEAEDLGVYFCSQSTHVPWTFGGGTKLEIKLEDLKNVFPPEVAVFEPSEAEISHTQKATLVCLATGFYPDHVELSWWVNGKEVHSGVCTDPQPLKEQPALNDSRYCLSSRLRVSATFWQNPRNHFRCQVQFYGLSENDEWTQDRAKPVTQIVSAEAWGRADDVIKIHWQEKKSNTILGSQEGNTMKTNDTYMKFSWLTVPEKSLDKEHRCIVRHENNKNGVDQEIIFPPIKTDVITMDPKDNCSKDANDTLLLQLTNTSAYYMYLLLLLKSVVYFAIITCCLLRRTAFCCNGEKSRAKRSGSGATNFSLLKQAGDVEENPGPTSMDWIWRILFLVGAATGAHSFEGVKLDETGGGLVQPGGAMKLSCVTSGFTFGHYWMNWVRQSPEKGLEWVAQFRNKPYNYETYYSDSVKGRFTISRDDSKSSVYLQMNNLRVEDTGIYYCTGASYGMEYLGQGTSVTVSTTRIQNPDPAVYQLRDSKSSDKSVCLFTDFDSQTNVSQSKDSDVYITDKCVLDMRSMDFKSNSAVAWSNKSDFACANAFNNSIIPEDTFFPSPESSDSTDHVKPKETENTKQPSKSCHKPKAIVHTEKVNMMSLTVLGLRMLFAKTVAVNFLLTAKLFFL

SEQ ID NO: 15550 - protein, 731 aa, synthetic construct
MALPVTALLLPLALLLHAARPQVQLVESGGNLVQPGGSLRLSCAASGFTFGSFSMSWVRQAPGGGLEWVAGLSARSSLTHYADSVKGRFTISRDNAKNSVYLQMNSLRVEDTAVYYCARRSYDSSGYWGHFYSYMDVWGQGTLVTVSLEDLKNVFPPEVAVFEPSEAEISHTQKATLVCLATGFYPDHVELSWWVNGKEVHSGVCTDPQPLKEQPALNDSRYCLSSRLRVSATFWQNPRNHFRCQVQFYGLSENDEWTQDRAKPVTQIVSAEAWGRADDVIKIHWQEKKSNTILGSQEGNTMKTNDTYMKFSWLTVPEKSLDKEHRCIVRHENNKNGVDQEIIFPPIKTDVITMDPKDNCSKDANDTLLLQLTNTSAYYMYLLLLLKSVVYFAIITCCLLRRTAFCCNGEKSRAKRSGSGATNFSLLKQAGDVEENPGPTSMDWIWRILFLVGAATGAHSFESVLTQPSSVSAAPGQKVTISCSGSTSNIGNNYVSWYQQHPGKAPKLMIYDVSKRPSGVPDRFSGSKSGNSASLDISGLQSEDEADYYCAAWDDSLSEFLFGTGTKLTVLGTRIQNPDPAVYQLRDSKSSDKSVCLFTDFDSQTNVSQSKDSDVYITDKCVLDMRSMDFKSNSAVAWSNKSDFACANAFNNSIIPEDTFFPSPESSDSTDHVKPKETENTKQPSKSCHKPKAIVHTEKVNMMSLTVLGLRMLFAKTVAVNFLLTAKLFFL

SEQ ID NO: 15551 - protein, 726 aa, synthetic construct
MALPVTALLLPLALLLHAARPDVVMTQSPSSLSASVGDRVTITCQSSLDISHYLNWYQQKPGKAPKLLIYDASNLETGVPSRFSGSGSGTHFTFTISSLQPEDFATYYCQQYDNLPLTFGGGTKLEIKRLEDLKNVFPPEVAVFEPSEAEISHTQKATLVCLATGFYPDHVELSWWVNGKEVHSGVCTDPQPLKEQPALNDSRYCLSSRLRVSATFWQNPRNHFRCQVQFYGLSENDEWTQDRAKPVTQIVSAEAWGRADDVIKIHWQEKKSNTILGSQEGNTMKTNDTYMKFSWLTVPEKSLDKEHRCIVRHENNKNGVDQEIIFPPIKTDVITMDPKDNCSKDANDTLLLQLTNTSAYYMYLLLLLKSVVYFAIITCCLLRRTAFCCNGEKSRAKRSGSGATNFSLLKQAGDVEENPGPTSMDWIWRILFLVGAATGAHSFEQVQLVQSGGGVVQPGGSLRVSCAASGVTLSDYGMHWVRQAPGKGLEWVAFIRNDGSDKYYADSVKGRFTISRDNSEKTVSLQMSSLRAEDTAVYYCAKNGESGPLDYWYLDLWGRGTLVTVSSTRIQNPDPAVYQLRDSKSSDKSVCLFTDFDSQTNVSQSKDSDVYITDKCVLDMRSMDFKSNSAVAWSNKSDFACANAFNNSIIPEDTFFPSPESSDSTDHVKPKETENTKQPSKSCHKPKAIVHTEKVNMMSLTVLGLRMLFAKTVAVNFLLTAKLFFL

SEQ ID NO: 15552 - protein, 730 aa, synthetic construct
MALPVTALLLPLALLLHAARPSYELTQPPSVSGTPGQRVAISCSGSSSNIGTRMVTWYQHVPGTAPKLLIFNNNQRPSGVPDRFSASKSGTSASLAIIGLQSDDEADYYCATWDDNVKSYVFGTGTKVTVLGSRLEDLKNVFPPEVAVFEPSEAEISHTQKATLVCLATGFYPDHVELSWWVNGKEVHSGVCTDPQPLKEQPALNDSRYCLSSRLRVSATFWQNPRNHFRCQVQFYGLSENDEWTQDRAKPVTQIVSAEAWGRADDVIKIHWQEKKSNTILGSQEGNTMKTNDTYMKFSWLTVPEKSLDKEHRCIVRHENNKNGVDQEIIFPPIKTDVITMDPKDNCSKDANDTLLLQLTNTSAYYMYLLLLLKSVVYFAIITCCLLRRTAFCCNGEKSRAKRSGSGATNFSLLKQAGDVEENPGPTSMDWIWRILFLVGAATGAHSFELEMAQVQLQQWGAGLLKPSETLSLTCAVYGGSFSGYYWSWIRQPPGKGLEWIGEINHSGSTNYNPSLKSRVTISVDTSKNQFSLKLSSVTAADTAVYYCARAPQSWYVGDVWGQGTLVTVSSTRIQNPDPAVYQLRDSKSSDKSVCLFTDFDSQTNVSQSKDSDVYITDKCVLDMRSMDFKSNSAVAWSNKSDFACANAFNNSIIPEDTFFPSPESSDSTDHVKPKETENTKQPSKSCHKPKAIVHTEKVNMMSLTVLGLRMLFAKTVAVNFLLTAKLFFL

SEQ ID NO: 15553 - protein, 727 aa, synthetic construct
MALPVTALLLPLALLLHAARPQSVLTQPPSLSVAPGKTASITCGGNNIGMKSVHWYQQRPGQAPVLVIYYDSDRPSGIPGRFSGSNSGNTATLTISRVEAGDEADYYCQVWDTTGDHPGYVFGTGTKVTVLLEDLKNVFPPEVAVFEPSEAEISHTQKATLVCLATGFYPDHVELSWWVNGKEVHSGVCTDPQPLKEQPALNDSRYCLSSRLRVSATFWQNPRNHFRCQVQFYGLSENDEWTQDRAKPVTQIVSAEAWGRADDVIKIHWQEKKSNTILGSQEGNTMKTNDTYMKFSWLTVPEKSLDKEHRCIVRHENNKNGVDQEIIFPPIKTDVITMDPKDNCSKDANDTLLLQLTNTSAYYMYLLLLLKSVVYFAIITCCLLRRTAFCCNGEKSRAKRSGSGATNFSLLKQAGDVEENPGPTSMDWIWRILFLVGAATGAHSFEQVQLVQSGAEVKKPGSSVKVSCKASGGTFSSYAISWVRQAPGQGLEWMGGIIPIFGTANYAQKFQGRVTITADESTSTAYMELSSLRSEDTAVYYCARGVYGYSGSAPYDEWGQGTLVTVSSTRIQNPDPAVYQLRDSKSSDKSVCLFTDFDSQTNVSQSKDSDVYITDKCVLDMRSMDFKSNSAVAWSNKSDFACANAFNNSIIPEDTFFPSPESSDSTDHVKPKETENTKQPSKSCHKPKAIVHTEKVNMMSLTVLGLRMLFAKTVAVNFLLTAKLFFL

SEQ ID NO: 15554 - protein, 725 aa, synthetic construct
MALPVTALLLPLALLLHAARPEVQLVESGGGLVQPGRSLRLSCAASGFTFDDYAMHWVRQAPGKGLEWVSGISWNSGSIGYADSVKGRFTISRDNAKNSLYLQMNSLRAEDTALYYCAKDKGGGYYDFWSGSDYWGQGTLVTVSSLEDLKNVFPPEVAVFEPSEAEISHTQKATLVCLATGFYPDHVELSWWVNGKEVHSGVCTDPQPLKEQPALNDSRYCLSSRLRVSATFWQNPRNHFRCQVQFYGLSENDEWTQDRAKPVTQIVSAEAWGRADDVIKIHWQEKKSNTILGSQEGNTMKTNDTYMKFSWLTVPEKSLDKEHRCIVRHENNKNGVDQEIIFPPIKTDVITMDPKDNCSKDANDTLLLQLTNTSAYYMYLLLLLKSVVYFAIITCCLLRRTAFCCNGEKSRAKRSGSGATNFSLLKQAGDVEENPGPTSMDWIWRILFLVGAATGAHSFESSELTQDPAVSVALGQTVRITCQGDSLRSYYASWYQQKPGQAPVLVIYGKNNRPSGIPDRFSGSSSGNTASLTITGAQAEDEADYYCNSRDSSGWVFGGGTKLTVLTRIQNPDPAVYQLRDSKSSDKSVCLFTDFDSQTNVSQSKDSDVYITDKCVLDMRSMDFKSNSAVAWSNKSDFACANAFNNSIIPEDTFFPSPESSDSTDHVKPKETENTKQPSKSCHKPKAIVHTEKVNMMSLTVLGLRMLFAKTVAVNFLLTAKLFFL

SEQ ID NO: 15555 - protein, 734 aa, synthetic construct
MALPVTALLLPLALLLHAARPEVQLQQSGPGLVKPSQTLSLTCAISGDSVLSNSDTWNWIRQSPSRGLEWLGRTYHRSTWYDDYASSVRGRVSINVDTSKNQYSLQLNAVTPEDTGVYYCARDRLQDGNSWSDAFDVWGQGTMVTVSSLEDLKNVFPPEVAVFEPSEAEISHTQKATLVCLATGFYPDHVELSWWVNGKEVHSGVCTDPQPLKEQPALNDSRYCLSSRLRVSATFWQNPRNHFRCQVQFYGLSENDEWTQDRAKPVTQIVSAEAWGRADDVIKIHWQEKKSNTILGSQEGNTMKTNDTYMKFSWLTVPEKSLDKEHRCIVRHENNKNGVDQEIIFPPIKTDVITMDPKDNCSKDANDTLLLQLTNTSAYYMYLLLLLKSVVYFAIITCCLLRRTAFCCNGEKSRAKRSGSGATNFSLLKQAGDVEENPGPTSMDWIWRILFLVGAATGAHSFEQSALTQPASVSGSPGQSITISCTGTSSDVGGYNYVSWYQQHPGKAPKLMIYDVSNRPSGVSNRFSGSKSGNTASLTISGLQAEDEADYYCSSYTSSSTLVYVFGTGTKVTVLTRIQNPDPAVYQLRDSKSSDKSVCLFTDFDSQTNVSQSKDSDVYITDKCVLDMRSMDFKSNSAVAWSNKSDFACANAFNNSIIPEDTFFPSPESSDSTDHVKPKETENTKQPSKSCHKPKAIVHTEKVNMMSLTVLGLRMLFAKTVAVNFLLTAKLFFL

SEQ ID NO: 15556 - protein, 712 aa, synthetic construct
MALPVTALLLPLALLLHAARPQVQLVQSGAEVKKPGASVKVSCKASGYTFTSYDINWVRQATGQGLEWMGWMNPNSGNTGYAQKFQGRVTMTRNTSISTAYMELSSLRSEDTAVYYCARGDSTKVEIKLEDLKNVFPPEVAVFEPSEAEISHTQKATLVCLATGFYPDHVELSWWVNGKEVHSGVCTDPQPLKEQPALNDSRYCLSSRLRVSATFWQNPRNHFRCQVQFYGLSENDEWTQDRAKPVTQIVSAEAWGRADDVIKIHWQEKKSNTILGSQEGNTMKTNDTYMKFSWLTVPEKSLDKEHRCIVRHENNKNGVDQEIIFPPIKTDVITMDPKDNCSKDANDTLLLQLTNTSAYYMYLLLLLKSVVYFAIITCCLLRRTAFCCNGEKSRAKRSGSGATNFSLLKQAGDVEENPGPTSMDWIWRILFLVGAATGAHSFEQSVLTQPRSVSGSPGQSVTISCTGTSSDVGGYNYVSWYQQHPGEAPKLIIYDADKRPSGISNRFSSGKSGNTASLTISGLQVEDEADYYCCSYAGGSTWVFGGGTKVTVLTRIQNPDPAVYQLRDSKSSDKSVCLFTDFDSQTNVSQSKDSDVYITDKCVLDMRSMDFKSNSAVAWSNKSDFACANAFNNSIIPEDTFFPSPESSDSTDHVKPKETENTKQPSKSCHKPKAIVHTEKVNMMSLTVLGLRMLFAKTVAVNFLLTAKLFFL

SEQ ID NO: 15557 - protein, 734 aa, synthetic construct
MALPVTALLLPLALLLHAARPEVQLQQSGPGLVKPSQTLSLTCAISGDSVSSNSAAWNWIRQSPSRGLEWLGRTYYRSKWYSDYAVSVKSRITINPDTSKNQFSLQLNSVTPEDTAVYYCARDPYDFWSGYPDAFDIWGQGTMVTVSSLEDLKNVFPPEVAVFEPSEAEISHTQKATLVCLATGFYPDHVELSWWVNGKEVHSGVCTDPQPLKEQPALNDSRYCLSSRLRVSATFWQNPRNHFRCQVQFYGLSENDEWTQDRAKPVTQIVSAEAWGRADDVIKIHWQEKKSNTILGSQEGNTMKTNDTYMKFSWLTVPEKSLDKEHRCIVRHENNKNGVDQEIIFPPIKTDVITMDPKDNCSKDANDTLLLQLTNTSAYYMYLLLLLKSVVYFAIITCCLLRRTAFCCNGEKSRAKRSGSGATNFSLLKQAGDVEENPGPTSMDWIWRILFLVGAATGAHSFEQSALTQPASVSGSPGQSITISCTGTSSDVGGYNYVSWYQQHPGKAPKVIISEVNNRPSGVSHRFSGSKSGNTASLTISGLQAEDEADYFCSSYTSGRTLYVFGTGSKVTVLGTRIQNPDPAVYQLRDSKSSDKSVCLFTDFDSQTNVSQSKDSDVYITDKCVLDMRSMDFKSNSAVAWSNKSDFACANAFNNSIIPEDTFFPSPESSDSTDHVKPKETENTKQPSKSCHKPKAIVHTEKVNMMSLTVLGLRMLFAKTVAVNFLLTAKLFFL

SEQ ID NO: 15558 - protein, 733 aa, synthetic construct
MALPVTALLLPLALLLHAARPQSALTQPASASGSPGQSVTISCTGTSSDVGGYNYVSWYQQHPGKAPKLMIYDVSNRPSGVSNRFSGSKSGNTASLTISGLQAEDEADYYCSSYTSSSTLYVFGTGTQLTVLLEDLKNVFPPEVAVFEPSEAEISHTQKATLVCLATGFYPDHVELSWWVNGKEVHSGVCTDPQPLKEQPALNDSRYCLSSRLRVSATFWQNPRNHFRCQVQFYGLSENDEWTQDRAKPVTQIVSAEAWGRADDVIKIHWQEKKSNTILGSQEGNTMKTNDTYMKFSWLTVPEKSLDKEHRCIVRHENNKNGVDQEIIFPPIKTDVITMDPKDNCSKDANDTLLLQLTNTSAYYMYLLLLLKSVVYFAIITCCLLRRTAFCCNGEKSRAKRSGSGATNFSLLKQAGDVEENPGPTSMDWIWRILFLVGAATGAHSFEEVQLQQSGPGLVKPSQTLSLTCAISGDSMLSNSDTWNWIRQSPSRGLEWLGRTYHRSTWYDDYASSVRGRVSINVDTSKNQYSLQLNAVTPEDTGVYYCARVRLQDGNSWSDAFDVWGQGTMVTVSSTRIQNPDPAVYQLRDSKSSDKSVCLFTDFDSQTNVSQSKDSDVYITDKCVLDMRSMDFKSNSAVAWSNKSDFACANAFNNSIIPEDTFFPSPESSDSTDHVKPKETENTKQPSKSCHKPKAIVHTEKVNMMSLTVLGLRMLFAKTVAVNFLLTAKLFFL

SEQ ID NO: 15559 - protein, 733 aa, synthetic construct
MALPVTALLLPLALLLHAARPDVMLTQTPLSLPVSLGDQASISCRSSQSILHSTGDTYLEWYLQKPGQSPKLLINKVSNRLSGVPDRFSGSGSGTDFTLKISRVEAEDLGVYYCFQGSHVPWTFGGGTKLEIKRADAAPTVSIFPLEDLKNVFPPEVAVFEPSEAEISHTQKATLVCLATGFYPDHVELSWWVNGKEVHSGVCTDPQPLKEQPALNDSRYCLSSRLRVSATFWQNPRNHFRCQVQFYGLSENDEWTQDRAKPVTQIVSAEAWGRADDVIKIHWQEKKSNTILGSQEGNTMKTNDTYMKFSWLTVPEKSLDKEHRCIVRHENNKNGVDQEIIFPPIKTDVITMDPKDNCSKDANDTLLLQLTNTSAYYMYLLLLLKSVVYFAIITCCLLRRTAFCCNGEKSRAKRSGSGATNFSLLKQAGDVEENPGPTSMDWIWRILFLVGAATGAHSFEQVKLQQSGPSLVKPGASVKMSCKASGYTFTDFYMKWVKQSHGKSLEWIGDINPNIGDTFYNQKFKGKATLTVDKSSSTAYMQLNSLTSEDSAVYFCSVGYFDVWGAGTTVTVSSTRIQNPDPAVYQLRDSKSSDKSVCLFTDFDSQTNVSQSKDSDVYITDKCVLDMRSMDFKSNSAVAWSNKSDFACANAFNNSIIPEDTFFPSPESSDSTDHVKPKETENTKQPSKSCHKPKAIVHTEKVNMMSLTVLGLRMLFAKTVAVNFLLTAKLFFL

SEQ ID NO: 15560 - protein, 729 aa, synthetic construct
MALPVTALLLPLALLLHAARPEIVLTQSPATLSLSPGERATLSCRASQSVSIYLAWYQQKPGQAPRLLIYDASNRATGIPARFSGSGSGTDFTLTISSLEPEDFAVYYCQQRSNWPPFTFGPGTKVDIKLEDLKNVFPPEVAVFEPSEAEISHTQKATLVCLATGFYPDHVELSWWVNGKEVHSGVCTDPQPLKEQPALNDSRYCLSSRLRVSATFWQNPRNHFRCQVQFYGLSENDEWTQDRAKPVTQIVSAEAWGRADDVIKIHWQEKKSNTILGSQEGNTMKTNDTYMKFSWLTVPEKSLDKEHRCIVRHENNKNGVDQEIIFPPIKTDVITMDPKDNCSKDANDTLLLQLTNTSAYYMYLLLLLKSVVYFAIITCCLLRRTAFCCNGEKSRAKRSGSGATNFSLLKQAGDVEENPGPTSMDWIWRILFLVGAATGAHSFEQVQLVESGGGVVQPGRSLRLSCAASGFTFSSYGMHWVRQAPGKGLEWVAVIWDDGSNKYYVDSVKGRFTISRDNSKNTLYLQMNSLRAEDTAVYYCARDDYYGSGSFNSYYGTDVWGQGTTVTVSSTRIQNPDPAVYQLRDSKSSDKSVCLFTDFDSQTNVSQSKDSDVYITDKCVLDMRSMDFKSNSAVAWSNKSDFACANAFNNSIIPEDTFFPSPESSDSTDHVKPKETENTKQPSKSCHKPKAIVHTEKVNMMSLTVLGLRMLFAKTVAVNFLLTAKLFFL

SEQ ID NO: 15561 - protein, 714 aa, synthetic construct
MALPVTALLLPLALLLHAARPDIQMTQSPSSLSASVGDRVTITCRASQGISSWLAWYQQKPEKAPKSLIYAASSLQSGVPSRFSGSGSGTDFTLTISSLQPEDFATYYCQQYNSYPYTFGQGTKLEIKLEDLKNVFPPEVAVFEPSEAEISHTQKATLVCLATGFYPDHVELSWWVNGKEVHSGVCTDPQPLKEQPALNDSRYCLSSRLRVSATFWQNPRNHFRCQVQFYGLSENDEWTQDRAKPVTQIVSAEAWGRADDVIKIHWQEKKSNTILGSQEGNTMKTNDTYMKFSWLTVPEKSLDKEHRCIVRHENNKNGVDQEIIFPPIKTDVITMDPKDNCSKDANDTLLLQLTNTSAYYMYLLLLLKSVVYFAIITCCLLRRTAFCCNGEKSRAKRSGSGATNFSLLKQAGDVEENPGPTSMDWIWRILFLVGAATGAHSFEEVQLVQSGGGLVHPGGSLRLSCAGSGFTFSTYLMYWVRQAPGKTLEWVSAIGSGGDTYYADSVKGRFTISRDNAKNSLYLQMNSLRAEDMAVYYCARGLGYWGQGTLVTVSSTRIQNPDPAVYQLRDSKSSDKSVCLFTDFDSQTNVSQSKDSDVYITDKCVLDMRSMDFKSNSAVAWSNKSDFACANAFNNSIIPEDTFFPSPESSDSTDHVKPKETENTKQPSKSCHKPKAIVHTEKVNMMSLTVLGLRMLFAKTVAVNFLLTAKLFFL

SEQ ID NO: 15562 - protein, 733 aa, synthetic construct
MALPVTALLLPLALLLHAARPLPVLTQPPSVSVAPGKTARITCGGNNIGSKSVHWYQQKPGQAPVLVVYDDSDRPSGIPERFSGSNSGNTATLTISRVEAGDEADYYCQVWDSSSDYVVFGGGTKLTVLLEDLKNVFPPEVAVFEPSEAEISHTQKATLVCLATGFYPDHVELSWWVNGKEVHSGVCTDPQPLKEQPALNDSRYCLSSRLRVSATFWQNPRNHFRCQVQFYGLSENDEWTQDRAKPVTQIVSAEAWGRADDVIKIHWQEKKSNTILGSQEGNTMKTNDTYMKFSWLTVPEKSLDKEHRCIVRHENNKNGVDQEIIFPPIKTDVITMDPKDNCSKDANDTLLLQLTNTSAYYMYLLLLLKSVVYFAIITCCLLRRTAFCCNGEKSRAKRSGSGATNFSLLKQAGDVEENPGPTSMDWIWRILFLVGAATGAHSFEEVQLVQSGAEVKKPGESLKISCKGSGYSFTSYWIGWVRQMPGKGLEWMGIIYPGDSDTRYSPSFQGQVTISADKSISTAYLQWSSLKASDTAMYYCARQVWGWQGGMYPRSNWWYNLDSWGQGTLVTVSSTRIQNPDPAVYQLRDSKSSDKSVCLFTDFDSQTNVSQSKDSDVYITDKCVLDMRSMDFKSNSAVAWSNKSDFACANAFNNSIIPEDTFFPSPESSDSTDHVKPKETENTKQPSKSCHKPKAIVHTEKVNMMSLTVLGLRMLFAKTVAVNFLLTAKLFFL

SEQ ID NO: 15563 - protein, 726 aa, synthetic construct
MALPVTALLLPLALLLHAARPELVMTQSPASLAVSLGQRATISCRASESVDSYGKSFMHWYQLKPGQPPKLLIYRASNLESGVPARFSGSGSRTDFTLTIDPVEADDAATYYCQQNNEDPWTFGGGTKLEIKLEDLKNVFPPEVAVFEPSEAEISHTQKATLVCLATGFYPDHVELSWWVNGKEVHSGVCTDPQPLKEQPALNDSRYCLSSRLRVSATFWQNPRNHFRCQVQFYGLSENDEWTQDRAKPVTQIVSAEAWGRADDVIKIHWQEKKSNTILGSQEGNTMKTNDTYMKFSWLTVPEKSLDKEHRCIVRHENNKNGVDQEIIFPPIKTDVITMDPKDNCSKDANDTLLLQLTNTSAYYMYLLLLLKSVVYFAIITCCLLRRTAFCCNGEKSRAKRSGSGATNFSLLKQAGDVEENPGPTSMDWIWRILFLVGAATGAHSFEEVQLEQSGPELVKPGASVKMSCKASGYTFTNYYMKWVKQSHGKSLEWIGDLNPNNGDTFYNQKFKGKATLTVDKSSNTAYMQLNSLTSEDSAVYYCARTGRYEENAMDYWGQGTSVTVSSTRIQNPDPAVYQLRDSKSSDKSVCLFTDFDSQTNVSQSKDSDVYITDKCVLDMRSMDFKSNSAVAWSNKSDFACANAFNNSIIPEDTFFPSPESSDSTDHVKPKETENTKQPSKSCHKPKAIVHTEKVNMMSLTVLGLRMLFAKTVAVNFLLTAKLFFL

SEQ ID NO: 15564 - protein, 720 aa, synthetic construct
MALPVTALLLPLALLLHAARPDVVMTQSPSSLSASVGDRVTITCMASEDIYIRLAWYQQKPGNAPKLLIYAATSLETGVPSRFSGSGSGTDFTLTISSLQPEDFATYYCQQYWSSPWTFGGGTKVEIKLEDLKNVFPPEVAVFEPSEAEISHTQKATLVCLATGFYPDHVELSWWVNGKEVHSGVCTDPQPLKEQPALNDSRYCLSSRLRVSATFWQNPRNHFRCQVQFYGLSENDEWTQDRAKPVTQIVSAEAWGRADDVIKIHWQEKKSNTILGSQEGNTMKTNDTYMKFSWLTVPEKSLDKEHRCIVRHENNKNGVDQEIIFPPIKTDVITMDPKDNCSKDANDTLLLQLTNTSAYYMYLLLLLKSVVYFAIITCCLLRRTAFCCNGEKSRAKRSGSGATNFSLLKQAGDVEENPGPTSMDWIWRILFLVGAATGAHSFEQVQLQESGPGLVKPSQTLSLTCTVSGYSITSDYTWNWIRQPPGNGLEWIGYITYSGSTSYNPSLKSRVLISVDTSKNQVSLKLSSVTAADTAVYYCARLGRRYTMDYWGQGTTVTVSSTRIQNPDPAVYQLRDSKSSDKSVCLFTDFDSQTNVSQSKDSDVYITDKCVLDMRSMDFKSNSAVAWSNKSDFACANAFNNSIIPEDTFFPSPESSDSTDHVKPKETENTKQPSKSCHKPKAIVHTEKVNMMSLTVLGLRMLFAKTVAVNFLLTAKLFFL

SEQ ID NO: 15565 - protein, 724 aa, synthetic construct; identical to SEQ ID NO: 15428

SEQ ID NO: 15566 - protein, 724 aa, synthetic construct
MALPVTALLLPLALLLHAARPDIVLTQSPATLSLSPGDRATLSCRASESVTILGSHLIYWYQQKPGQAPRLLIQLASNVQTGIPARFSGSGSRTDFTLTISSLEPEDFAVYYCLQSRTIPRTFGQGTKLEIKRLEDLKNVFPPEVAVFEPSEAEISHTQKATLVCLATGFYPDHVELSWWVNGKEVHSGVCTDPQPLKEQPALNDSRYCLSSRLRVSATFWQNPRNHFRCQVQFYGLSENDEWTQDRAKPVTQIVSAEAWGRADDVIKIHWQEKKSNTILGSQEGNTMKTNDTYMKFSWLTVPEKSLDKEHRCIVRHENNKNGVDQEIIFPPIKTDVITMDPKDNCSKDANDTLLLQLTNTSAYYMYLLLLLKSVVYFAIITCCLLRRTAFCCNGEKSRAKRSGSGATNFSLLKQAGDVEENPGPTSMDWIWRILFLVGAATGAHSFEQVQLVQSGSELKKPGESVKISCKASGYTFTHYSMNWVRQAPGQGLEWMGRINTETGEPLYADDFKGRFVFSLDTSASTAYLQISSLKAEDTAVYYCSNDYLYSLDYWGQGTLVTVSSTRIQNPDPAVYQLRDSKSSDKSVCLFTDFDSQTNVSQSKDSDVYITDKCVLDMRSMDFKSNSAVAWSNKSDFACANAFNNSIIPEDTFFPSPESSDSTDHVKPKETENTKQPSKSCHKPKAIVHTEKVNMMSLTVLGLRMLFAKTVAVNFLLTAKLFFL

SEQ ID NO: 15567 - protein, 725 aa, synthetic construct
MALPVTALLLPLALLLHAARPDIQLTQSPSFLSASVGDRVTITCRASQGISTDLNWYQQKPGKAPKLLIYAASNLESGVPSRFSGSGSGTEFTLTISSLQPEDFATYYCQQSYNWPYTFGGGTKVEIKRLEDLKNVFPPEVAVFEPSEAEISHTQKATLVCLATGFYPDHVELSWWVNGKEVHSGVCTDPQPLKEQPALNDSRYCLSSRLRVSATFWQNPRNHFRCQVQFYGLSENDEWTQDRAKPVTQIVSAEAWGRADDVIKIHWQEKKSNTILGSQEGNTMKTNDTYMKFSWLTVPEKSLDKEHRCIVRHENNKNGVDQEIIFPPIKTDVITMDPKDNCSKDANDTLLLQLTNTSAYYMYLLLLLKSVVYFAIITCCLLRRTAFCCNGEKSRAKRSGSGATNFSLLKQAGDVEENPGPTSMDWIWRILFLVGAATGAHSFEEVQLVESGGGLVKPGGSLRLSCAASGFTFSNFEMNWVRQAPGKGLEWVSGISSNGRYINYADSVKGRFTISRDNAKNSLYLQMNSLRAEDTAVYYCARVVDFDQDYNGFDYWGQGTLVTVSSTRIQNPDPAVYQLRDSKSSDKSVCLFTDFDSQTNVSQSKDSDVYITDKCVLDMRSMDFKSNSAVAWSNKSDFACANAFNNSIIPEDTFFPSPESSDSTDHVKPKETENTKQPSKSCHKPKAIVHTEKVNMMSLTVLGLRMLFAKTVAVNFLLTAKLFFL

SEQ ID NO: 15568 - protein, 723 aa, synthetic construct
MALPVTALLLPLALLLHAARPDIQLTQSPSFLSASVGDRVTITCSLSLGISTWRDWFPPRLGRGLEPLTYAASTLQSGVPSRFSGSGSGTEFTLTISSLQPEDFATYYCQQLNSYPLTFGGGTKVEIKRLEDLKNVFPPEVAVFEPSEAEISHTQKATLVCLATGFYPDHVELSWWVNGKEVHSGVCTDPQPLKEQPALNDSRYCLSSRLRVSATFWQNPRNHFRCQVQFYGLSENDEWTQDRAKPVTQIVSAEAWGRADDVIKIHWQEKKSNTILGSQEGNTMKTNDTYMKFSWLTVPEKSLDKEHRCIVRHENNKNGVDQEIIFPPIKTDVITMDPKDNCSKDANDTLLLQLTNTSAYYMYLLLLLKSVVYFAIITCCLLRRTAFCCNGEKSRAKRSGSGATNFSLLKQAGDVEENPGPTSMDWIWRILFLVGAATGAHSFEEVQLVESGGGLVKPGGSLRLSCAASGFTFSTYGMSWVRQAPGKGLEWVAYINNGSGYIYYADSVKGRFTISRDNAKNSLYLQMNSLRAEDTAVYYCARGQWWSGGDFDYWGQGTLVTVSSTRIQNPDPAVYQLRDSKSSDKSVCLFTDFDSQTNVSQSKDSDVYITDKCVLDMRSMDFKSNSAVAWSNKSDFACANAFNNSIIPEDTFFPSPESSDSTDHVKPKETENTKQPSKSCHKPKAIVHTEKVNMMSLTVLGLRMLFAKTVAVNFLLTAKLFFL

SEQ ID NO: 15569 - protein, 724 aa, synthetic construct
MALPVTALLLPLALLLHAARPEIVLTQSPATLSLSPGERATLSCSASSSVSYMYWYQQKPGQAPRLLIYRTSNLASGIPARFSGSGSGTDFTLTISSLEPEDFAVYYCQQYHSYPTTFGQGTKVEIKRTVLEDLKNVFPPEVAVFEPSEAEISHTQKATLVCLATGFYPDHVELSWWVNGKEVHSGVCTDPQPLKEQPALNDSRYCLSSRLRVSATFWQNPRNHFRCQVQFYGLSENDEWTQDRAKPVTQIVSAEAWGRADDVIKIHWQEKKSNTILGSQEGNTMKTNDTYMKFSWLTVPEKSLDKEHRCIVRHENNKNGVDQEIIFPPIKTDVITMDPKDNCSKDANDTLLLQLTNTSAYYMYLLLLLKSVVYFAIITCCLLRRTAFCCNGEKSRAKRSGSGATNFSLLKQAGDVEENPGPTSMDWIWRILFLVGAATGAHSFEEVQLVESGGGLVQPGGSLRLSCAASGFSFNTYAMNWVRQAPGKGLEWVSHIRSKSNNFATYYADSVKDRFTISRDNAKNSLYLQMNSLRAEDTAVYYCARQGGDFPMDYWGQGTLVTVSSTRIQNPDPAVYQLRDSKSSDKSVCLFTDFDSQTNVSQSKDSDVYITDKCVLDMRSMDFKSNSAVAWSNKSDFACANAFNNSIIPEDTFFPSPESSDSTDHVKPKETENTKQPSKSCHKPKAIVHTEKVNMMSLTVLGLRMLFAKTVAVNFLLTAKLFFL

SEQ ID NO: 15570 - protein, 720 aa, synthetic construct
MALPVTALLLPLALLLHAARPDVVMTQSPSSLSASVGDRVTITCKASEDIYIRLAWYQQKPGKAPKLLIYAATSLETGVPSRFSGSGSGTDFTLTISSLQPEDFATYYCQQYWTTPWTFGGGTKVEIKLEDLKNVFPPEVAVFEPSEAEISHTQKATLVCLATGFYPDHVELSWWVNGKEVHSGVCTDPQPLKEQPALNDSRYCLSSRLRVSATFWQNPRNHFRCQVQFYGLSENDEWTQDRAKPVTQIVSAEAWGRADDVIKIHWQEKKSNTILGSQEGNTMKTNDTYMKFSWLTVPEKSLDKEHRCIVRHENNKNGVDQEIIFPPIKTDVITMDPKDNCSKDANDTLLLQLTNTSAYYMYLLLLLKSVVYFAIITCCLLRRTAFCCNGEKSRAKRSGSGATNFSLLKQAGDVEENPGPTSMDWIWRILFLVGAATGAHSFEQVQLQESGPGLVKPSQTLSLTCTVSGYSITIDYTWNWIRQPPGKGLEWIGYITYSGSTDYNPSLKSRVLISVDTSKNQVSLKLSSVTAADTAVYYCARLGRRYALDYWGQGTTVTVSSTRIQNPDPAVYQLRDSKSSDKSVCLFTDFDSQTNVSQSKDSDVYITDKCVLDMRSMDFKSNSAVAWSNKSDFACANAFNNSIIPEDTFFPSPESSDSTDHVKPKETENTKQPSKSCHKPKAIVHTEKVNMMSLTVLGLRMLFAKTVAVNFLLTAKLFFL

SEQ ID NO: 15571 - protein, 725 aa, synthetic construct
MALPVTALLLPLALLLHAARPDIQMTQTTSSLSASLGDRVTISCRASQDISNYLNWYQQKPDGTVKLLIYYTSILHSGVPSRFSGSGSGTDYSLTISNLEQEDFATYFCQQGNTLPWTFGGGTKLEIKALEDLKNVFPPEVAVFEPSEAEISHTQKATLVCLATGFYPDHVELSWWVNGKEVHSGVCTDPQPLKEQPALNDSRYCLSSRLRVSATFWQNPRNHFRCQVQFYGLSENDEWTQDRAKPVTQIVSAEAWGRADDVIKIHWQEKKSNTILGSQEGNTMKTNDTYMKFSWLTVPEKSLDKEHRCIVRHENNKNGVDQEIIFPPIKTDVITMDPKDNCSKDANDTLLLQLTNTSAYYMYLLLLLKSVVYFAIITCCLLRRTAFCCNGEKSRAKRSGSGATNFSLLKQAGDVEENPGPTSMDWIWRILFLVGAATGAHSFEEVQLVESGGGLVKPGGSLKLSCAASGFAFSIYDMSWVRQTPEKRLEWVAYISSGGGTYYPDTVKGRFTISRDNAKNTLYLQMSSLKSEDTAMYYCARHSGYGTHWGVLFAYWGQGTLVTVSATRIQNPDPAVYQLRDSKSSDKSVCLFTDFDSQTNVSQSKDSDVYITDKCVLDMRSMDFKSNSAVAWSNKSDFACANAFNNSIIPEDTFFPSPESSDSTDHVKPKETENTKQPSKSCHKPKAIVHTEKVNMMSLTVLGLRMLFAKTVAVNFLLTAKLFFL

SEQ ID NO: 15572 - protein, 735 aa, synthetic construct
MALPVTALLLPLALLLHAARPDIVMTQSPDSLAVSLGERATINCKSSQSLLYRSNQKNYLAWYQQKPGQPPKLLIYWASTRESGVPDRFSGSGSGTDFTLTISSLQAEDVAVYYCQQYYNYPRTFGQGTKVEIKRTVLEDLKNVFPPEVAVFEPSEAEISHTQKATLVCLATGFYPDHVELSWWVNGKEVHSGVCTDPQPLKEQPALNDSRYCLSSRLRVSATFWQNPRNHFRCQVQFYGLSENDEWTQDRAKPVTQIVSAEAWGRADDVIKIHWQEKKSNTILGSQEGNTMKTNDTYMKFSWLTVPEKSLDKEHRCIVRHENNKNGVDQEIIFPPIKTDVITMDPKDNCSKDANDTLLLQLTNTSAYYMYLLLLLKSVVYFAIITCCLLRRTAFCCNGEKSRAKRSGSGATNFSLLKQAGDVEENPGPTSMDWIWRILFLVGAATGAHSFEEVQLLESGGGLVQPGGSLRLSCAASGYSITSDYAWNWVRQAPGKGLEWVSYISNSGSTSYNPSLKSRFTISRDNSKNTLYLQMNSLRAEDTAVYYCAKERNYDYDDYYYAMDYWGQGTLVTVSSTRIQNPDPAVYQLRDSKSSDKSVCLFTDFDSQTNVSQSKDSDVYITDKCVLDMRSMDFKSNSAVAWSNKSDFACANAFNNSIIPEDTFFPSPESSDSTDHVKPKETENTKQPSKSCHKPKAIVHTEKVNMMSLTVLGLRMLFAKTVAVNFLLTAKLFFL

SEQ ID NO: 15573 - protein, 728 aa, synthetic construct
MALPVTALLLPLALLLHAARPDVVMTQSPLSLPVTLGQPASISCRSSQSLLHSSGNTYLEWYQQRPGQSPRPLIYKISTRFSGVPDRFSGSGSGTDFTLKISRVEAEDVGVYYCFQGSHVPYTFGGGTKVEIKRLEDLKNVFPPEVAVFEPSEAEISHTQKATLVCLATGFYPDHVELSWWVNGKEVHSGVCTDPQPLKEQPALNDSRYCLSSRLRVSATFWQNPRNHFRCQVQFYGLSENDEWTQDRAKPVTQIVSAEAWGRADDVIKIHWQEKKSNTILGSQEGNTMKTNDTYMKFSWLTVPEKSLDKEHRCIVRHENNKNGVDQEIIFPPIKTDVITMDPKDNCSKDANDTLLLQLTNTSAYYMYLLLLLKSVVYFAIITCCLLRRTAFCCNGEKSRAKRSGSGATNFSLLKQAGDVEENPGPTSMDWIWRILFLVGAATGAHSFEQVQLVQSGAEVKKPGASVKVSCKASGLTIEDYYMHWVRQAPGQGLEWMGWIDPENGDTEYGPKFQGRVTMTRDTSINTAYMELSRLRSDDTAVYYCAVHNAHYGTWFAYWGQGTLVTVSSTRIQNPDPAVYQLRDSKSSDKSVCLFTDFDSQTNVSQSKDSDVYITDKCVLDMRSMDFKSNSAVAWSNKSDFACANAFNNSIIPEDTFFPSPESSDSTDHVKPKETENTKQPSKSCHKPKAIVHTEKVNMMSLTVLGLRMLFAKTVAVNFLLTAKLFFL

SEQ ID NO: 15574 - protein, 720 aa, synthetic construct
MALPVTALLLPLALLLHAARPDIQMTQSPSSLSASVGDRVTITCRASENIYSNLAWYQQKPGKAPKLLIYAATNLADGVPSRFSGSGSGTDFTLTISSLQPEDFATYYCQHFWGTPTFGQGTKVEIKRTVLEDLKNVFPPEVAVFEPSEAEISHTQKATLVCLATGFYPDHVELSWWVNGKEVHSGVCTDPQPLKEQPALNDSRYCLSSRLRVSATFWQNPRNHFRCQVQFYGLSENDEWTQDRAKPVTQIVSAEAWGRADDVIKIHWQEKKSNTILGSQEGNTMKTNDTYMKFSWLTVPEKSLDKEHRCIVRHENNKNGVDQEIIFPPIKTDVITMDPKDNCSKDANDTLLLQLTNTSAYYMYLLLLLKSVVYFAIITCCLLRRTAFCCNGEKSRAKRSGSGATNFSLLKQAGDVEENPGPTSMDWIWRILFLVGAATGAHSFEEVQLVESGGGLVQPGGSLRLSCAASGFSLTNYGVHWVRQAPGKGLEWVSVIWSGGSTDYNAAFISRFTISADTSKNTAYLQMNSLRAEDTAVYYCARELIHAMDNWGQGTLVTVSSTRIQNPDPAVYQLRDSKSSDKSVCLFTDFDSQTNVSQSKDSDVYITDKCVLDMRSMDFKSNSAVAWSNKSDFACANAFNNSIIPEDTFFPSPESSDSTDHVKPKETENTKQPSKSCHKPKAIVHTEKVNMMSLTVLGLRMLFAKTVAVNFLLTAKLFFL

SEQ ID NO: 15575 - protein, 727 aa, synthetic construct
MALPVTALLLPLALLLHAARPDFVMTQSPLSLPVTPGEPASISCRSSQSIVHSNGNTYLEWYLQKPGQSPQLLIYKVSNRFSGVPDRFSGSGSGTDFTLKISRVEAEDVGVYYCFQGSHVPLTFGQGTKLEIKRLEDLKNVFPPEVAVFEPSEAEISHTQKATLVCLATGFYPDHVELSWWVNGKEVHSGVCTDPQPLKEQPALNDSRYCLSSRLRVSATFWQNPRNHFRCQVQFYGLSENDEWTQDRAKPVTQIVSAEAWGRADDVIKIHWQEKKSNTILGSQEGNTMKTNDTYMKFSWLTVPEKSLDKEHRCIVRHENNKNGVDQEIIFPPIKTDVITMDPKDNCSKDANDTLLLQLTNTSAYYMYLLLLLKSVVYFAIITCCLLRRTAFCCNGEKSRAKRSGSGATNFSLLKQAGDVEENPGPTSMDWIWRILFLVGAATGAHSFEEVQLVESGAEVKKPGASVKVSCKASGYTFTSYWIHWVRQAPGQGLEWMGENDPSNGRTNYNEKFKNRVTLTVDTSISTAYMELSRLRSDDTAVYYCARGPNYFYSMDYWGQGTMVTVSSTRIQNPDPAVYQLRDSKSSDKSVCLFTDFDSQTNVSQSKDSDVYITDKCVLDMRSMDFKSNSAVAWSNKSDFACANAFNNSIIPEDTFFPSPESSDSTDHVKPKETENTKQPSKSCHKPKAIVHTEKVNMMSLTVLGLRMLFAKTVAVNFLLTAKLFFL

SEQ ID NO: 15576 - protein, 720 aa, synthetic construct
MALPVTALLLPLALLLHAARPDIQLTQSPSFLSASVGDRVTITCSARSSISFMYWYQQKPGKAPKLLIYDTSNLASGVPSRFSGSGSGTEFTLTISSLEAEDAATYYCQQWSSYPLTFGQGTKLEIKLEDLKNVFPPEVAVFEPSEAEISHTQKATLVCLATGFYPDHVELSWWVNGKEVHSGVCTDPQPLKEQPALNDSRYCLSSRLRVSATFWQNPRNHFRCQVQFYGLSENDEWTQDRAKPVTQIVSAEAWGRADDVIKIHWQEKKSNTILGSQEGNTMKTNDTYMKFSWLTVPEKSLDKEHRCIVRHENNKNGVDQEIIFPPIKTDVITMDPKDNCSKDANDTLLLQLTNTSAYYMYLLLLLKSVVYFAIITCCLLRRTAFCCNGEKSRAKRSGSGATNFSLLKQAGDVEENPGPTSMDWIWRILFLVGAATGAHSFEQVQLVQSGAEVKKPGASVKVSCKASGYTFTGSWMNWVRQAPGQGLEWIGRIYPGDGETNYNGKFKDRVTITADKSTSTAYMELSSLRSEDTAVYYCARIYGNNVYFDVWGQGTTVTVSSTRIQNPDPAVYQLRDSKSSDKSVCLFTDFDSQTNVSQSKDSDVYITDKCVLDMRSMDFKSNSAVAWSNKSDFACANAFNNSIIPEDTFFPSPESSDSTDHVKPKETENTKQPSKSCHKPKAIVHTEKVNMMSLTVLGLRMLFAKTVAVNFLLTAKLFFL

SEQ ID NO: 15577 - protein, 728 aa, synthetic construct
MALPVTALLLPLALLLHAARPQLVLTQSPSASASLGSSVKLTCTLSSGHKTDTIDWYQQQPGKAPRYLMKLEGSGSYNKGSGVPDRFSGSSSGADWYLTISSLQSEDEADYYCGTDYPGNYLFGGGTQLTVLGLEDLKNVFPPEVAVFEPSEAEISHTQKATLVCLATGFYPDHVELSWWVNGKEVHSGVCTDPQPLKEQPALNDSRYCLSSRLRVSATFWQNPRNHFRCQVQFYGLSENDEWTQDRAKPVTQIVSAEAWGRADDVIKIHWQEKKSNTILGSQEGNTMKTNDTYMKFSWLTVPEKSLDKEHRCIVRHENNKNGVDQEIIFPPIKTDVITMDPKDNCSKDANDTLLLQLTNTSAYYMYLLLLLKSVVYFAIITCCLLRRTAFCCNGEKSRAKRSGSGATNFSLLKQAGDVEENPGPTSMDWIWRILFLVGAATGAHSFEQEQLVESGGGLVQPGGSLRLSCAASGFTFSDYYMSWIRQAPGKGLEWVATIYPSSGKTYYADSAKGRLTISSDNAKDSLYLQMNSLRAEDTAVYYCTRDSYADDAALFDIWGQGTTVTVSSTRIQNPDPAVYQLRDSKSSDKSVCLFTDFDSQTNVSQSKDSDVYITDKCVLDMRSMDFKSNSAVAWSNKSDFACANAFNNSIIPEDTFFPSPESSDSTDHVKPKETENTKQPSKSCHKPKAIVHTEKVNMMSLTVLGLRMLFAKTVAVNFLLTAKLFFL

SEQ ID NO: 15578 - protein, 720 aa, synthetic construct; identical to SEQ ID NO: 15574

SEQ ID NO: 15579 - protein, 727 aa, synthetic construct; identical to SEQ ID NO: 15575

SEQ ID NO: 15580 - protein, 720 aa, synthetic construct; identical to SEQ ID NO: 15576

SEQ ID NO: 15581 - protein, 728 aa, synthetic construct; identical to SEQ ID NO: 15577

SEQ ID NO: 15582 - protein, 727 aa, synthetic construct
MALPVTALLLPLALLLHAARPDIQLTQSPSSLSASVGDRVSFTCQASQDINNFLNWYQQKPGKAPKLLIYDASNLETGVPSRFSGSGSGTDFTFTISSLQPEDIATYYCQQYGNLPFTFGGGTKVEIKRLEDLKNVFPPEVAVFEPSEAEISHTQKATLVCLATGFYPDHVELSWWVNGKEVHSGVCTDPQPLKEQPALNDSRYCLSSRLRVSATFWQNPRNHFRCQVQFYGLSENDEWTQDRAKPVTQIVSAEAWGRADDVIKIHWQEKKSNTILGSQEGNTMKTNDTYMKFSWLTVPEKSLDKEHRCIVRHENNKNGVDQEIIFPPIKTDVITMDPKDNCSKDANDTLLLQLTNTSAYYMYLLLLLKSVVYFAIITCCLLRRTAFCCNGEKSRAKRSGSGATNFSLLKQAGDVEENPGPTSMDWIWRILFLVGAATGAHSFEQVQLQESGPGLVKPSQTLSLTCTVSGGSISSGGFYWSWIRQHPGKGLEWIGYIHHSGSTHYNPSLKSRVTISIDTSKNLFSLRLSSVTAADTAVYYCASLVYCGGDCYSGFDYWGQGTLVTVSSTRIQNPDPAVYQLRDSKSSDKSVCLFTDFDSQTNVSQSKDSDVYITDKCVLDMRSMDFKSNSAVAWSNKSDFACANAFNNSIIPEDTFFPSPESSDSTDHVKPKETENTKQPSKSCHKPKAIVHTEKVNMMSLTVLGLRMLFAKTVAVNFLLTAKLFFL

SEQ ID NO: 15583 - protein, 723 aa, synthetic construct
MALPVTALLLPLALLLHAARPDIQMTQSPSSLSASVGDRVTITCKSSQSVLYSSNQKNYLAWFQQKPGKAPKLLIYWASTRESGVPSRFSGSGSGTDFTLTISSLQPEDFATYFCHQYLSSYTFGQGTKVEIKRLEDLKNVFPPEVAVFEPSEAEISHTQKATLVCLATGFYPDHVELSWWVNGKEVHSGVCTDPQPLKEQPALNDSRYCLSSRLRVSATFWQNPRNHFRCQVQFYGLSENDEWTQDRAKPVTQIVSAEAWGRADDVIKIHWQEKKSNTILGSQEGNTMKTNDTYMKFSWLTVPEKSLDKEHRCIVRHENNKNGVDQEIIFPPIKTDVITMDPKDNCSKDANDTLLLQLTNTSAYYMYLLLLLKSVVYFAIITCCLLRRTAFCCNGEKSRAKRSGSGATNFSLLKQAGDVEENPGPTSMDWIWRILFLVGAATGAHSFEEVQLVESGGGLVQPGGSLRLSCAASGYTFTTYWMHWVRQAPGKGLEWVGYIRPSTGYTEYNQKFKDRFTISADTSKNTAYLQMNSLRAEDTAVYYCARSRWLLDYWGQGTLVTVSTRIQNPDPAVYQLRDSKSSDKSVCLFTDFDSQTNVSQSKDSDVYITDKCVLDMRSMDFKSNSAVAWSNKSDFACANAFNNSIIPEDTFFPSPESSDSTDHVKPKETENTKQPSKSCHKPKAIVHTEKVNMMSLTVLGLRMLFAKTVAVNFLLTAKLFFL

SEQ ID NO: 15584 - protein, 720 aa, synthetic construct
MALPVTALLLPLALLLHAARPDIQMTQSPSSLSASVGDRVTITCRASQDISNYLNWYQQKPGKAPKLLIYYTSRLHSGVPSRFSGSGSGTDFTLTISSLQPEDFATYYCQQGNTLPYTFGQGTKVEIKRLEDLKNVFPPEVAVFEPSEAEISHTQKATLVCLATGFYPDHVELSWWVNGKEVHSGVCTDPQPLKEQPALNDSRYCLSSRLRVSATFWQNPRNHFRCQVQFYGLSENDEWTQDRAKPVTQIVSAEAWGRADDVIKIHWQEKKSNTILGSQEGNTMKTNDTYMKFSWLTVPEKSLDKEHRCIVRHENNKNGVDQEIIFPPIKTDVITMDPKDNCSKDANDTLLLQLTNTSAYYMYLLLLLKSVVYFAIITCCLLRRTAFCCNGEKSRAKRSGSGATNFSLLKQAGDVEENPGPTSMDWIWRILFLVGAATGAHSFEEVQLVESGGGLVQPGGSLRLSCAASGFTFSDYFMSWVRQAPGKGLEWVATISNGGTYTYYPDSVKGRFTISRDNSKNTLYLQMNSLRAEDTAVYYCARFDGYIFDYWGQGTLVTVSSTRIQNPDPAVYQLRDSKSSDKSVCLFTDFDSQTNVSQSKDSDVYITDKCVLDMRSMDFKSNSAVAWSNKSDFACANAFNNSIIPEDTFFPSPESSDSTDHVKPKETENTKQPSKSCHKPKAIVHTEKVNMMSLTVLGLRMLFAKTVAVNFLLTAKLFFL

SEQ ID NO: 15585 - protein, 725 aa, synthetic construct
MALPVTALLLPLALLLHAARPDIQMTQTTSSLSASLGDRVTISCRASQDISKYLNWYQQKPDGTVKLLIYHTSRLHSGVPSRFSGSGSGTDYSLTISNLEQEDIATYFCQQGNTLPYTFGGGTKLEITLEIQNPDPAVYQLRDSKSSDKSVCLFTDFDSQTNVSQSKDSDVYITDKCVLDMRSMDFKSNSAVAWSNKSDFACANAFNNSIIPEDTFFPSPESSDSTDHVKPKETENTKQPSKSCHKPKAIVHTEKVNMMSLTVLGLRMLFAKTVAVNFLLTAKLFFLRAKRSGSGVKQTLNFDLLKLAGDVESNPGPTSMDWIWRILFLVGAATGAHSFEVKLQESGPGLVAPSQSLSVTCTVSGVSLPDYGVSWIRQPPRKGLEWLGVIWGSETTYYNSALKSRLTIIKDNSKSQVFLKMNSLQTDDTAIYYCAKHYYYGGSYAMDYWGQGTSVTVSSTREDLKNVFPPEVAVFEPSEAEISHTQKATLVCLATGFYPDHVELSWWVNGKEVHSGVCTDPQPLKEQPALNDSRYCLSSRLRVSATFWQNPRNHFRCQVQFYGLSENDEWTQDRAKPVTQIVSAEAWGRADDVIKIHWQEKKSNTILGSQEGNTMKTNDTYMKFSWLTVPEKSLDKEHRCIVRHENNKNGVDQEIIFPPIKTDVITMDPKDNCSKDANDTLLLQLTNTSAYYMYLLLLLKSVVYFAIITCCLLRRTAFCCNGEKS

SEQ ID NO: 15586 - protein, 726 aa, synthetic construct
MALPVTALLLPLALLLHAARPEIVMTQSPATLSLSPGERATLSCRASQDISKYLNWYQQKPGQAPRLLIYHTSRLHSGIPARFSGSGSGTDYTLTISSLQPEDFAVYFCQQGNTLPYTFGQGTKLEIKLEIQNPDPAVYQLRDSKSSDKSVCLFTDFDSQTNVSQSKDSDVYITDKCVLDMRSMDFKSNSAVAWSNKSDFACANAFNNSIIPEDTFFPSPESSDSTDHVKPKETENTKQPSKSCHKPKAIVHTEKVNMMSLTVLGLRMLFAKTVAVNFLLTAKLFFLRAKRSGSGVKQTLNFDLLKLAGDVESNPGPTSMDWIWRILFLVGAATGAHSFEQVQLQESGPGLVKPSETLSLTCTVSGVSLPDYGVSWIRQPPGKGLEWIGVIWGSETTYYNSSLKSRVTISKDNSKNQVSLKLSSVTAADTAVYYCAKHYYYGGSYAMDYWGQGTLVTVSSTREDLKNVFPPEVAVFEPSEAEISHTQKATLVCLATGFYPDHVELSWWVNGKEVHSGVCTDPQPLKEQPALNDSRYCLSSRLRVSATFWQNPRNHFRCQVQFYGLSENDEWTQDRAKPVTQIVSAEAWGRADDVIKIHWQEKKSNTILGSQEGNTMKTNDTYMKFSWLTVPEKSLDKEHRCIVRHENNKNGVDQEIIFPPIKTDVITMDPKDNCSKDANDTLLLQLTNTSAYYMYLLLLLKSVVYFAIITCCLLRRTAFCCNGEKS

SEQ ID NO: 15587 - protein, 727 aa, synthetic construct
MALPVTALLLPLALLLHAARPDEIVLTQSPATLSLSPGERATLSCSASSSVSYMHWYQQKPGQAPRLLIYDTSKLASGIPARFSGSGSGTDFTLTISSLEPEDVAVYYCFQGSVYPFTFGQGTKLEIKRLEIQNPDPAVYQLRDSKSSDKSVCLFTDFDSQTNVSQSKDSDVYITDKCVLDMRSMDFKSNSAVAWSNKSDFACANAFNNSIIPEDTFFPSPESSDSTDHVKPKETENTKQPSKSCHKPKAIVHTEKVNMMSLTVLGLRMLFAKTVAVNFLLTAKLFFLRAKRSGSGVKQTLNFDLLKLAGDVESNPGPTSMDWIWRILFLVGAATGAHSFEQVQLQESGPGLVKPSQTLSLTCTVSGGSISTSGMGVGWIRQHPGKGLEWIGHIWWDDDKRYNPALKSRVTISVDTSKNQFSLKLSSVTAADTAVYYCARMELWSYYFDYWGQGTLVTVSSTREDLKNVFPPEVAVFEPSEAEISHTQKATLVCLATGFYPDHVELSWWVNGKEVHSGVCTDPQPLKEQPALNDSRYCLSSRLRVSATFWQNPRNHFRCQVQFYGLSENDEWTQDRAKPVTQIVSAEAWGRADDVIKIHWQEKKSNTILGSQEGNTMKTNDTYMKFSWLTVPEKSLDKEHRCIVRHENNKNGVDQEIIFPPIKTDVITMDPKDNCSKDANDTLLLQLTNTSAYYMYLLLLLKSVVYFAIITCCLLRRTAFCCNGEKS

SEQ ID NO: 15588 - protein, 725 aa, synthetic construct
MALPVTALLLPLALLLHAARPDYIHVTQSPSSLSVSIGDRVTINCQTSQGVGSDLHWYQHKPGRAPKLLIHHASSVEDGVPSRFSGTGFHTSFNLTINDLQADDIGTYYCQVLQSFGRGSRLDTKLEIQNPDPAVYQLRDSKSSDKSVCLFTDFDSQTNVSQSKDSDVYITDKCVLDMRSMDFKSNSAVAWSNKSDFACANAFNNSIIPEDTFFPSPESSDSTDHVKPKETENTKQPSKSCHKPKAIVHTEKVNMMSLTVLGLRMLFAKTVAVNFLLTAKLFFLRAKRSGSGVKQTLNFDLLKLAGDVESNPGPTSMDWIWRILFLVGAATGAHSFERAHLVQSGTAMKKPGASVRVSCQTSGYTFTAHILFWFRQAPGRGLEWVGWIKPQYGAVNFGGGFRDRVTLTRDVYREIAYMDIRGLKPDDTAVYYCARDRSYGDSSWALDAWGQGTTVVVSATREDLKNVFPPEVAVFEPSEAEISHTQKATLVCLATGFYPDHVELSWWVNGKEVHSGVCTDPQPLKEQPALNDSRYCLSSRLRVSATFWQNPRNHFRCQVQFYGLSENDEWTQDRAKPVTQIVSAEAWGRADDVIKIHWQEKKSNTILGSQEGNTMKTNDTYMKFSWLTVPEKSLDKEHRCIVRHENNKNGVDQEIIFPPIKTDVITMDPKDNCSKDANDTLLLQLTNTSAYYMYLLLLLKSVVYFAIITCCLLRRTAFCCNGEKS

SEQ ID NO: 15589 - protein, 735 aa, synthetic construct
MALPVTALLLPLALLLHAARPDVQMIQTPDSLAVSLGQRATISCRASESVDNYGISFMHWYQQKPGQSPKLLIYRASNLESGIPARFSGSGSRTDFTLTINPVETDDVATYYCQQNNKDPPTFGGGTKLEIKLEIQNPDPAVYQLRDSKSSDKSVCLFTDFDSQTNVSQSKDSDVYITDKCVLDMRSMDFKSNSAVAWSNKSDFACANAFNNSIIPEDTFFPSPESSDSTDHVKPKETENTKQPSKSCHKPKAIVHTEKVNMMSLTVLGLRMLFAKTVAVNFLLTAKLFFLRAKRSGSGVKQTLNFDLLKLAGDVESNPGPTSMDWIWRILFLVGAATGAHSFEGGGGSQVQLQQSGAELVKPGASVKISCKASGYAFSSYWMNWVKQRPGKGLEWIGQIYPGDGDTTYNGKFKGKATLTADKSSSTVYMQLNSLTSEDSAVYFCVRYYYGSSGYFDYWGQGTTLTVSSTREDLKNVFPPEVAVFEPSEAEISHTQKATLVCLATGFYPDHVELSWWVNGKEVHSGVCTDPQPLKEQPALNDSRYCLSSRLRVSATFWQNPRNHFRCQVQFYGLSENDEWTQDRAKPVTQIVSAEAWGRADDVIKIHWQEKKSNTILGSQEGNTMKTNDTYMKFSWLTVPEKSLDKEHRCIVRHENNKNGVDQEIIFPPIKTDVITMDPKDNCSKDANDTLLLQLTNTSAYYMYLLLLLKSVVYFAIITCCLLRRTAFCCNGEKS

SEQ ID NO: 15590 - protein, 726 aa, synthetic construct
MALPVTALLLPLALLLHAARPDVQMIQTPSSLSASLGDRVTISCRASQDIGNYLNWYQQKPDGTVKLLIYYTSRLHSGVPSRFSGSGSGTEYSLTISNLEQEDIATYFCQQGSALPPTFGGGTKLEINLEIQNPDPAVYQLRDSKSSDKSVCLFTDFDSQTNVSQSKDSDVYITDKCVLDMRSMDFKSNSAVAWSNKSDFACANAFNNSIIPEDTFFPSPESSDSTDHVKPKETENTKQPSKSCHKPKAIVHTEKVNMMSLTVLGLRMLFAKTVAVNFLLTAKLFFLRAKRSGSGVKQTLNFDLLKLAGDVESNPGPTSMDWIWRILFLVGAATGAHSFEALQLQQSGAELVRPGASVTLSCKASGYTFTDYEMHWVKQTPVHGLEWIGAIDPETGGTAYNQKFEGKAILTADKSSSTAYMELRSLTSEDSPVYYCARRRYYGSSSFDYWGQGTTLTVSSTREDLKNVFPPEVAVFEPSEAEISHTQKATLVCLATGFYPDHVELSWWVNGKEVHSGVCTDPQPLKEQPALNDSRYCLSSRLRVSATFWQNPRNHFRCQVQFYGLSENDEWTQDRAKPVTQIVSAEAWGRADDVIKIHWQEKKSNTILGSQEGNTMKTNDTYMKFSWLTVPEKSLDKEHRCIVRHENNKNGVDQEIIFPPIKTDVITMDPKDNCSKDANDTLLLQLTNTSAYYMYLLLLLKSVVYFAIITCCLLRRTAFCCNGEKS

SEQ ID NO: 15591 - protein, 730 aa, synthetic construct
MALPVTALLLPLALLLHAARPDIVLTQSPASLAVSLGQRATISCRASKSVSTSGYSYLHWYQQKPGQPPKLLIYLASNLESGVPARFSGSGSGTDFTLNIHPVEEEDAATYYCQHSRELPFTFGSGTKLEIKLEIQNPDPAVYQLRDSKSSDKSVCLFTDFDSQTNVSQSKDSDVYITDKCVLDMRSMDFKSNSAVAWSNKSDFACANAFNNSIIPEDTFFPSPESSDSTDHVKPKETENTKQPSKSCHKPKAIVHTEKVNMMSLTVLGLRMLFAKTVAVNFLLTAKLFFLRAKRSGSGVKQTLNFDLLKLAGDVESNPGPTSMDWIWRILFLVGAATGAHSFEQVQLVESGGGLVQPGGSLKLSCAASGFDFSRYWMSWVRQAPGKGLEWIGEINPTSSTINFTPSLKDKVFISRDNAKNTLYLQMSKVRSEDTALYYCARGNYYRYGDAMDYWGQGTSVTVSTREDLKNVFPPEVAVFEPSEAEISHTQKATLVCLATGFYPDHVELSWWVNGKEVHSGVCTDPQPLKEQPALNDSRYCLSSRLRVSATFWQNPRNHFRCQVQFYGLSENDEWTQDRAKPVTQIVSAEAWGRADDVIKIHWQEKKSNTILGSQEGNTMKTNDTYMKFSWLTVPEKSLDKEHRCIVRHENNKNGVDQEIIFPPIKTDVITMDPKDNCSKDANDTLLLQLTNTSAYYMYLLLLLKSVVYFAIITCCLLRRTAFCCNGEKS

SEQ ID NO: 15592 - protein, 728 aa, synthetic construct
MALPVTALLLPLALLLHAARPDIQMTQSPSSLSASVGDRVTITCSASQDISNYLNWYQQKPGKAPKLLIYYTSNLHSGVPSRFSGSGSGTDFTLTISSLQPEDFATYYCQQYRKLPWTFGQGTKLEIKRLEIQNPDPAVYQLRDSKSSDKSVCLFTDFDSQTNVSQSKDSDVYITDKCVLDMRSMDFKSNSAVAWSNKSDFACANAFNNSIIPEDTFFPSPESSDSTDHVKPKETENTKQPSKSCHKPKAIVHTEKVNMMSLTVLGLRMLFAKTVAVNFLLTAKLFFLRAKRSGSGVKQTLNFDLLKLAGDVESNPGPTSMDWIWRILFLVGAATGAHSFEQVQLVQSGAEVKKPGSSVKVSCKASGGTFSNYWMHWVRQAPGQGLEWMGATYRGHSDTYYNQKFKGRVTITADKSTSTAYMELSSLRSEDTAVYYCARGAIYDGYDVLDNWGQGTLVTVSSTREDLKNVFPPEVAVFEPSEAEISHTQKATLVCLATGFYPDHVELSWWVNGKEVHSGVCTDPQPLKEQPALNDSRYCLSSRLRVSATFWQNPRNHFRCQVQFYGLSENDEWTQDRAKPVTQIVSAEAWGRADDVIKIHWQEKKSNTILGSQEGNTMKTNDTYMKFSWLTVPEKSLDKEHRCIVRHENNKNGVDQEIIFPPIKTDVITMDPKDNCSKDANDTLLLQLTNTSAYYMYLLLLLKSVVYFAIITCCLLRRTAFCCNGEKS

SEQ ID NO: 15593 - protein, 728 aa, synthetic construct
MALPVTALLLPLALLLHAARPDIVLTQSPATLSLSPGDRATISCRASESVTILGSHLIYWYQQKPGQPPRLLIQLASNVQTGVPARFSGSGSRTDFTLTISSVEPEDFAVYYCLQSRTIPRTFGQGTKLEIKRLEIQNPDPAVYQLRDSKSSDKSVCLFTDFDSQTNVSQSKDSDVYITDKCVLDMRSMDFKSNSAVAWSNKSDFACANAFNNSIIPEDTFFPSPESSDSTDHVKPKETENTKQPSKSCHKPKAIVHTEKVNMMSLTVLGLRMLFAKTVAVNFLLTAKLFFLRAKRSGSGVKQTLNFDLLKLAGDVESNPGPTSMDWIWRILFLVGAATGAHSFEQVQLVQSGPEVKKPGESVKISCKASGYTFRHYSMNWVKQAPGQGLKWMGRINTESGVPIYADDFKGRFSFTVDTSASTAYLEISSLTSEDTAVYFCSNDYLYSLDFWGQGTTLTVSSTREDLKNVFPPEVAVFEPSEAEISHTQKATLVCLATGFYPDHVELSWWVNGKEVHSGVCTDPQPLKEQPALNDSRYCLSSRLRVSATFWQNPRNHFRCQVQFYGLSENDEWTQDRAKPVTQIVSAEAWGRADDVIKIHWQEKKSNTILGSQEGNTMKTNDTYMKFSWLTVPEKSLDKEHRCIVRHENNKNGVDQEIIFPPIKTDVITMDPKDNCSKDANDTLLLQLTNTSAYYMYLLLLLKSVVYFAIITCCLLRRTAFCCNGEKS

SEQ ID NO: 15594 - protein, 729 aa, synthetic construct
MALPVTALLLPLALLLHAARPQSVLTQPPSVSGAPGQRVTISCTGSSSNIGAGFDVHWYQQLPGTAPKLLIYGNSNRPSGVPDRFSGSKSGTSASLAITGLQAEDEADYYCQSYDSSLSGYVFGTGTKVTVLGLEIQNPDPAVYQLRDSKSSDKSVCLFTDFDSQTNVSQSKDSDVYITDKCVLDMRSMDFKSNSAVAWSNKSDFACANAFNNSIIPEDTFFPSPESSDSTDHVKPKETENTKQPSKSCHKPKAIVHTEKVNMMSLTVLGLRMLFAKTVAVNFLLTAKLFFLRAKRSGSGVKQTLNFDLLKLAGDVESNPGPTSMDWIWRILFLVGAATGAHSFEQVQLVQSGAEVKKPGASVKVSCKASGYTFTDYYMHWVRQAPGQRLEWMGWINPNSGGTNYAQKFQDRITVTRDTSSNTGYMELTRLRSDDTAVYYCARSPYSGVLDKWGQGTLVTVSSTREDLKNVFPPEVAVFEPSEAEISHTQKATLVCLATGFYPDHVELSWWVNGKEVHSGVCTDPQPLKEQPALNDSRYCLSSRLRVSATFWQNPRNHFRCQVQFYGLSENDEWTQDRAKPVTQIVSAEAWGRADDVIKIHWQEKKSNTILGSQEGNTMKTNDTYMKFSWLTVPEKSLDKEHRCIVRHENNKNGVDQEIIFPPIKTDVITMDPKDNCSKDANDTLLLQLTNTSAYYMYLLLLLKSVVYFAIITCCLLRRTAFCCNGEKS

SEQ ID NO: 15595 - protein, 726 aa, synthetic construct
MALPVTALLLPLALLLHAARPQAVLTQPPSASGTPGQRVTISCSGSSSNIGSYTVSWYQQLPGTAPKFLIYSNNQRPSGVPDRFSGSKSGTSASLAISGLQSEDEADYYCAAWDDSLNGYVFGTGTKVTVLGLEIQNPDPAVYQLRDSKSSDKSVCLFTDFDSQTNVSQSKDSDVYITDKCVLDMRSMDFKSNSAVAWSNKSDFACANAFNNSIIPEDTFFPSPESSDSTDHVKPKETENTKQPSKSCHKPKAIVHTEKVNMMSLTVLGLRMLFAKTVAVNFLLTAKLFFLRAKRSGSGVKQTLNFDLLKLAGDVESNPGPTSMDWIWRILFLVGAATGAHSFEVQLVQSGAEVKKPGESLKISCKGSGYDFTTYWIGWVRQMPGKGLEWMGIIYPGDSDTRYSPSVRGRVTISADKSINTAYLQWSSLEASDTAMYYCARMWTFSQDGWGQGTLVTVSSTREDLKNVFPPEVAVFEPSEAEISHTQKATLVCLATGFYPDHVELSWWVNGKEVHSGVCTDPQPLKEQPALNDSRYCLSSRLRVSATFWQNPRNHFRCQVQFYGLSENDEWTQDRAKPVTQIVSAEAWGRADDVIKIHWQEKKSNTILGSQEGNTMKTNDTYMKFSWLTVPEKSLDKEHRCIVRHENNKNGVDQEIIFPPIKTDVITMDPKDNCSKDANDTLLLQLTNTSAYYMYLLLLLKSVVYFAIITCCLLRRTAFCCNGEKS

SEQ ID NO: 15596 - protein, 729 aa, synthetic construct
MALPVTALLLPLALLLHAARPDIVMTQSPDSLAVSLGERATINCKSSQSILYSSNQKNYLAWYQQKPGQSPKLLIYWASTRESGVPDRFSGSGSGTDFTLTISSLQAEDVAVYYCHQYISSYTFGQGTKLEIKLEIQNPDPAVYQLRDSKSSDKSVCLFTDFDSQTNVSQSKDSDVYITDKCVLDMRSMDFKSNSAVAWSNKSDFACANAFNNSIIPEDTFFPSPESSDSTDHVKPKETENTKQPSKSCHKPKAIVHTEKVNMMSLTVLGLRMLFAKTVAVNFLLTAKLFFLRAKRSGSGVKQTLNFDLLKLAGDVESNPGPTSMDWIWRILFLVGAATGAHSFEQVQLVQSGAEVKKPGASVKVSCKASGYTFASQWMHWMRQAPGQGLEWIGWINPGNVNTKYNEKFKGRATLTVDTSTNTAYMELSSLRSEDTAVYYCARSTWYRPLDYWGQGTLVTVSSTREDLKNVFPPEVAVFEPSEAEISHTQKATLVCLATGFYPDHVELSWWVNGKEVHSGVCTDPQPLKEQPALNDSRYCLSSRLRVSATFWQNPRNHFRCQVQFYGLSENDEWTQDRAKPVTQIVSAEAWGRADDVIKIHWQEKKSNTILGSQEGNTMKTNDTYMKFSWLTVPEKSLDKEHRCIVRHENNKNGVDQEIIFPPIKTDVITMDPKDNCSKDANDTLLLQLTNTSAYYMYLLLLLKSVVYFAIITCCLLRRTAFCCNGEKS

SEQ ID NO: 15597 - protein, 729 aa, synthetic construct
MALPVTALLLPLALLLHAARPDHIVLTQSPSSLSASLGDRVTISCRASQDISTYLNWYQQKPDGTVKLLIFYTSRLHAGVPSRFSGSGSGTHHSLTISNLEQEDIATYFCQQGNSLPFTFGSGTKLEIKRLEIQNPDPAVYQLRDSKSSDKSVCLFTDFDSQTNVSQSKDSDVYITDKCVLDMRSMDFKSNSAVAWSNKSDFACANAFNNSIIPEDTFFPSPESSDSTDHVKPKETENTKQPSKSCHKPKAIVHTEKVNMMSLTVLGLRMLFAKTVAVNFLLTAKLFFLRAKRSGSGVKQTLNFDLLKLAGDVESNPGPTSMDWIWRILFLVGAATGAHSFEQVQLKESGPELEKPGASVKISCKASGYSFTAYSMNWVKQNNGMSLEWIGSIDPYYGDTKYAQKFKGKATLTVDKASSTAYLQLKSLTSEDSAVYYCARRMITTGDWYFDVWGAGTTVTVSSTREDLKNVFPPEVAVFEPSEAEISHTQKATLVCLATGFYPDHVELSWWVNGKEVHSGVCTDPQPLKEQPALNDSRYCLSSRLRVSATFWQNPRNHFRCQVQFYGLSENDEWTQDRAKPVTQIVSAEAWGRADDVIKIHWQEKKSNTILGSQEGNTMKTNDTYMKFSWLTVPEKSLDKEHRCIVRHENNKNGVDQEIIFPPIKTDVITMDPKDNCSKDANDTLLLQLTNTSAYYMYLLLLLKSVVYFAIITCCLLRRTAFCCNGEKS

SEQ ID NO: 15598 - protein, 729 aa, synthetic construct; identical to SEQ ID NO: 15597

SEQ ID NO: 15599 - protein, 729 aa, synthetic construct
MALPVTALLLPLALLLHAARPDEIVLTQSPATLSLSPGERATLSCRASQSVSSYLAWYQQKPGQAPRLLIYDASNRATGIPARFSGSGSGTDFTLTISSLEPEDFAVYYCQQRSNWPITFGQGTRLEIKLEIQNPDPAVYQLRDSKSSDKSVCLFTDFDSQTNVSQSKDSDVYITDKCVLDMRSMDFKSNSAVAWSNKSDFACANAFNNSIIPEDTFFPSPESSDSTDHVKPKETENTKQPSKSCHKPKAIVHTEKVNMMSLTVLGLRMLFAKTVAVNFLLTAKLFFLRAKRSGSGVKQTLNFDLLKLAGDVESNPGPTSMDWIWRILFLVGAATGAHSFEEVQLVESGGGLVQPGRSLRLSCAASGFTFNDYAMHWVRQAPGKGLEWVSTISWNSGSIGYADSVKGRFTISRDNAKKSLYLQMNSLRAEDTALYYCAKDIQYGNYYYGMDVWGQGTTVTVSSTREDLKNVFPPEVAVFEPSEAEISHTQKATLVCLATGFYPDHVELSWWVNGKEVHSGVCTDPQPLKEQPALNDSRYCLSSRLRVSATFWQNPRNHFRCQVQFYGLSENDEWTQDRAKPVTQIVSAEAWGRADDVIKIHWQEKKSNTILGSQEGNTMKTNDTYMKFSWLTVPEKSLDKEHRCIVRHENNKNGVDQEIIFPPIKTDVITMDPKDNCSKDANDTLLLQLTNTSAYYMYLLLLLKSVVYFAIITCCLLRRTAFCCNGEKS

SEQ ID NO: 15600 - protein, 731 aa, synthetic construct
MALPVTALLLPLALLLHAARPDIVMTQTPLSLPVTPGEPASISCRSSKSLLHSNGITYLYWYLQKPGQSPQLLIYQMSNLVSGVPDRFSGSGSGTDFTLKISRVEAEDVGVYYCAQNLELPYTFGGGTKVEIKRLEIQNPDPAVYQLRDSKSSDKSVCLFTDFDSQTNVSQSKDSDVYITDKCVLDMRSMDFKSNSAVAWSNKSDFACANAFNNSIIPEDTFFPSPESSDSTDHVKPKETENTKQPSKSCHKPKAIVHTEKVNMMSLTVLGLRMLFAKTVAVNFLLTAKLFFLRAKRSGSGVKQTLNFDLLKLAGDVESNPGPTSMDWIWRILFLVGAATGAHSFEQVQLVQSGAEVKKPGSSVKVSCKASGYAFSYSWINWVRQAPGQGLEWMGRIFPGDGDTDYNGKFKGRVTITADKSTSTAYMELSSLRSEDTAVYYCARNVFDGYWLVYWGQGTLVTVSSTREDLKNVFPPEVAVFEPSEAEISHTQKATLVCLATGFYPDHVELSWWVNGKEVHSGVCTDPQPLKEQPALNDSRYCLSSRLRVSATFWQNPRNHFRCQVQFYGLSENDEWTQDRAKPVTQIVSAEAWGRADDVIKIHWQEKKSNTILGSQEGNTMKTNDTYMKFSWLTVPEKSLDKEHRCIVRHENNKNGVDQEIIFPPIKTDVITMDPKDNCSKDANDTLLLQLTNTSAYYMYLLLLLKSVVYFAIITCCLLRRTAFCCNGEKS

SEQ ID NO: 15601 - protein, 732 aa, synthetic construct
MALPVTALLLPLALLLHAARPDIQMTQSPSSLSASVGDRVTITCRSSQSIVHSVGNTFLEWYQQKPGKAPKLLIYKVSNRFSGVPSRFSGSGSGTDFTLTISSLQPEDFATYYCFQGSQFPYTFGQGTKVEIKRLEIQNPDPAVYQLRDSKSSDKSVCLFTDFDSQTNVSQSKDSDVYITDKCVLDMRSMDFKSNSAVAWSNKSDFACANAFNNSIIPEDTFFPSPESSDSTDHVKPKETENTKQPSKSCHKPKAIVHTEKVNMMSLTVLGLRMLFAKTVAVNFLLTAKLFFLRAKRSGSGVKQTLNFDLLKLAGDVESNPGPTSMDWIWRILFLVGAATGAHSFEEVQLVESGGGLVQPGGSLRLSCAASGYEFSRSWMNWVRQAPGKGLEWVGRIYPGDGDTNYSGKFKGRFTISADTSKNTAYLQMNSLRAEDTAVYYCARDGSSWDWYFDVWGQGTLVTVSSTREDLKNVFPPEVAVFEPSEAEISHTQKATLVCLATGFYPDHVELSWWVNGKEVHSGVCTDPQPLKEQPALNDSRYCLSSRLRVSATFWQNPRNHFRCQVQFYGLSENDEWTQDRAKPVTQIVSAEAWGRADDVIKIHWQEKKSNTILGSQEGNTMKTNDTYMKFSWLTVPEKSLDKEHRCIVRHENNKNGVDQEIIFPPIKTDVITMDPKDNCSKDANDTLLLQLTNTSAYYMYLLLLLKSVVYFAIITCCLLRRTAFCCNGEKS

SEQ ID NO: 15602 - protein, 730 aa, synthetic construct
MALPVTALLLPLALLLHAARPDIQMTQSPSSLSASVGDRVTITCRASQTIWSYLNWYQQRPGKAPNLLIYAASSLQSGVPSRFSGRGSGTDFTLTISSLQAEDFATYYCQQSYSIPQIFGQGTKLEIKLEIQNPDPAVYQLRDSKSSDKSVCLFTDFDSQTNVSQSKDSDVYITDKCVLDMRSMDFKSNSAVAWSNKSDFACANAFNNSIIPEDTFFPSPESSDSTDHVKPKETENTKQPSKSCHKPKAIVHTEKVNMMSLTVLGLRMLFAKTVAVNFLLTAKLFFLRAKRSGSGVKQTLNFDLLKLAGDVESNPGPTSMDWIWRILFLVGAATGAHSFEQVQLQQSGPGLVKPSQTLSLTCAISGDSVSSNSAAWNWIRQSPSRGLEWLGRTYYRSKWYNDYAVSVKSRITINPDTSKNQFSLQLNSVTPEDTAVYYCAREVTGDLEDAFDIWGQGTMVTVSSTREDLKNVFPPEVAVFEPSEAEISHTQKATLVCLATGFYPDHVELSWWVNGKEVHSGVCTDPQPLKEQPALNDSRYCLSSRLRVSATFWQNPRNHFRCQVQFYGLSENDEWTQDRAKPVTQIVSAEAWGRADDVIKIHWQEKKSNTILGSQEGNTMKTNDTYMKFSWLTVPEKSLDKEHRCIVRHENNKNGVDQEIIFPPIKTDVITMDPKDNCSKDANDTLLLQLTNTSAYYMYLLLLLKSVVYFAIITCCLLRRTAFCCNGEKS

SEQ ID NO: 15603 - protein, 723 aa, synthetic construct
MALPVTALLLPLALLLHAARPDIQMTQSPATIENTSLSASVGDRVTITCRASQGISSWLTWYQQKPEKAPKSLIYAASSLQSGVPSRFSGSGSGTDFTLTISSLQPEDFATYYCQQYDSYPITFGQGTRLEIKLEIQNPDPAVYQLRDSKSSDKSVCLFTDFDSQTNVSQSKDSDVYITDKCVLDMRSMDFKSNSAVAWSNKSDFACANAFNNSIIPEDTFFPSPESSDSTDHVKPKETENTKQPSKSCHKPKAIVHTEKVNMMSLTVLGLRMLFAKTVAVNFLLTAKLFFLRAKRSGSGVKQTLNFDLLKLAGDVESNPGPTSMDWIWRILFLVGAATGAHSFEQVQLQQWGAGLLKPSETLSLTCAVYGGSFSAYYWSWIRQPPGKGLEWIGDINHGGGTNYNPSLKSRVTISVDTSKNQFSLKLNSVTAADTAVYYCASLTAYWGQGSLVTVSSTREDLKNVFPPEVAVFEPSEAEISHTQKATLVCLATGFYPDHVELSWWVNGKEVHSGVCTDPQPLKEQPALNDSRYCLSSRLRVSATFWQNPRNHFRCQVQFYGLSENDEWTQDRAKPVTQIVSAEAWGRADDVIKIHWQEKKSNTILGSQEGNTMKTNDTYMKFSWLTVPEKSLDKEHRCIVRHENNKNGVDQEIIFPPIKTDVITMDPKDNCSKDANDTLLLQLTNTSAYYMYLLLLLKSVVYFAIITCCLLRRTAFCCNGEKS

SEQ ID NO: 15604 - protein, 728 aa, synthetic construct
MALPVTALLLPLALLLHAARPDEIVLTQSPDSLAVSLGERATINCKASQSVDFDGDSYLNWYQQKPGQPPKVLIYAASTLQSGVPSRFSGSGSGTDFTLTINSLEAEDAATYYCQQSNEDPWTFGGGTKVEIKLEIQNPDPAVYQLRDSKSSDKSVCLFTDFDSQTNVSQSKDSDVYITDKCVLDMRSMDFKSNSAVAWSNKSDFACANAFNNSIIPEDTFFPSPESSDSTDHVKPKETENTKQPSKSCHKPKAIVHTEKVNMMSLTVLGLRMLFAKTVAVNFLLTAKLFFLRAKRSGSGVKQTLNFDLLKLAGDVESNPGPTSMDWIWRILFLVGAATGAHSFEQVQLVQSGAEVKKPGASVKVSCKVSGYTFTDYYITWVRQAPGQALEWMGWIYPGSGNTKYSQKFQGRFVFSVDTSASTAYLQLSSLKAEDTAVYYCANYGNYWFAYWGQGTLVTVSSTREDLKNVFPPEVAVFEPSEAEISHTQKATLVCLATGFYPDHVELSWWVNGKEVHSGVCTDPQPLKEQPALNDSRYCLSSRLRVSATFWQNPRNHFRCQVQFYGLSENDEWTQDRAKPVTQIVSAEAWGRADDVIKIHWQEKKSNTILGSQEGNTMKTNDTYMKFSWLTVPEKSLDKEHRCIVRHENNKNGVDQEIIFPPIKTDVITMDPKDNCSKDANDTLLLQLTNTSAYYMYLLLLLKSVVYFAIITCCLLRRTAFCCNGEKS

SEQ ID NO: 15605 - protein, 725 aa, synthetic construct
MALPVTALLLPLALLLHAARPDIQMTQSPSSLSASVGDRVTITCRASQGISSWLAWYQQKPEKAPKSLIYAASSLQSGVPSRFSGSGSGTDFTLTISSLQPEDFATYYCQQYNSYPPTFGGGTKVEIKLEIQNPDPAVYQLRDSKSSDKSVCLFTDFDSQTNVSQSKDSDVYITDKCVLDMRSMDFKSNSAVAWSNKSDFACANAFNNSIIPEDTFFPSPESSDSTDHVKPKETENTKQPSKSCHKPKAIVHTEKVNMMSLTVLGLRMLFAKTVAVNFLLTAKLFFLRAKRSGSGVKQTLNFDLLKLAGDVESNPGPTSMDWIWRILFLVGAATGAHSFEEVQLVQSGGGLVHPGGSLRLSCAGSGFAFSSSTMHWIRQAPGKGLEWISLIGSGGGIYYGDSVKGRFTISRDNAKNSLYLQMNSLRAEDMAVYYCVRGYFDWVDYFDYWGQGTLVTVSSTREDLKNVFPPEVAVFEPSEAEISHTQKATLVCLATGFYPDHVELSWWVNGKEVHSGVCTDPQPLKEQPALNDSRYCLSSRLRVSATFWQNPRNHFRCQVQFYGLSENDEWTQDRAKPVTQIVSAEAWGRADDVIKIHWQEKKSNTILGSQEGNTMKTNDTYMKFSWLTVPEKSLDKEHRCIVRHENNKNGVDQEIIFPPIKTDVITMDPKDNCSKDANDTLLLQLTNTSAYYMYLLLLLKSVVYFAIITCCLLRRTAFCCNGEKS

SEQ ID NO: 15606 - protein, 735 aa, synthetic construct
MALPVTALLLPLALLLHAARPDDIVMTQSPDSLTVSLGERTTINCKSSQSVLDSSKNKNSLAWYQQKPGQPPKLLLSWASTRESGIPDRFSGSGSGTDFTLTIDSLQPEDSATYYCQQSAHFPITFGQGTRLEIKLEIQNPDPAVYQLRDSKSSDKSVCLFTDFDSQTNVSQSKDSDVYITDKCVLDMRSMDFKSNSAVAWSNKSDFACANAFNNSIIPEDTFFPSPESSDSTDHVKPKETENTKQPSKSCHKPKAIVHTEKVNMMSLTVLGLRMLFAKTVAVNFLLTAKLFFLRAKRSGSGVKQTLNFDLLKLAGDVESNPGPTSMDWIWRILFLVGAATGAHSFEQVQLVQSGAEVKKPGASVKVSCKASGYTFTNYGMNWVKQAPGQGLKWMGWINTYTGEPTYADDFKGRVTMTSDTSTSTAYLELHNLRSDDTAVYYCARWSWSDGYYVYFDYWGQGTTVTVSSTREDLKNVFPPEVAVFEPSEAEISHTQKATLVCLATGFYPDHVELSWWVNGKEVHSGVCTDPQPLKEQPALNDSRYCLSSRLRVSATFWQNPRNHFRCQVQFYGLSENDEWTQDRAKPVTQIVSAEAWGRADDVIKIHWQEKKSNTILGSQEGNTMKTNDTYMKFSWLTVPEKSLDKEHRCIVRHENNKNGVDQEIIFPPIKTDVITMDPKDNCSKDANDTLLLQLTNTSAYYMYLLLLLKSVVYFAIITCCLLRRTAFCCNGEKS

SEQ ID NO: 15607 - protein, 731 aa, synthetic construct
MALPVTALLLPLALLLHAARPDEIVLTQSPGSLAVSPGERVTMSCKSSQSVFFSSSQKNYLAWYQQIPGQSPRLLIYWASTRESGVPDRFTGSGSGTDFTLTISSVQPEDLAIYYCHQYLSSRTFGQGTKLEIKRLEIQNPDPAVYQLRDSKSSDKSVCLFTDFDSQTNVSQSKDSDVYITDKCVLDMRSMDFKSNSAVAWSNKSDFACANAFNNSIIPEDTFFPSPESSDSTDHVKPKETENTKQPSKSCHKPKAIVHTEKVNMMSLTVLGLRMLFAKTVAVNFLLTAKLFFLRAKRSGSGVKQTLNFDLLKLAGDVESNPGPTSMDWIWRILFLVGAATGAHSFEQVQLQQPGAEVVKPGASVKMSCKASGYTFTSYYIHWIKQTPGQGLEWVGVIYPGNDDISYNQKFQGKATLTADKSSTTAYMQLSSLTSEDSAVYYCAREVRLRYFDVWGQGTTVTVSSTREDLKNVFPPEVAVFEPSEAEISHTQKATLVCLATGFYPDHVELSWWVNGKEVHSGVCTDPQPLKEQPALNDSRYCLSSRLRVSATFWQNPRNHFRCQVQFYGLSENDEWTQDRAKPVTQIVSAEAWGRADDVIKIHWQEKKSNTILGSQEGNTMKTNDTYMKFSWLTVPEKSLDKEHRCIVRHENNKNGVDQEIIFPPIKTDVITMDPKDNCSKDANDTLLLQLTNTSAYYMYLLLLLKSVVYFAIITCCLLRRTAFCCNGEKS

SEQ ID NO: 15608 - protein, 735 aa, synthetic construct
MALPVTALLLPLALLLHAARPDVLLTQSPLSLPVTLGQPASISCRSSQTIVHSNGNTYLEWFQQRPGQSPRLLIYQVSNRFSGVPDRFSGSGSGTDFTLKISRVEAEDVGVYYCFQGSHVPRTFGGGTKVEIKRALEIQNPDPAVYQLRDSKSSDKSVCLFTDFDSQTNVSQSKDSDVYITDKCVLDMRSMDFKSNSAVAWSNKSDFACANAFNNSIIPEDTFFPSPESSDSTDHVKPKETENTKQPSKSCHKPKAIVHTEKVNMMSLTVLGLRMLFAKTVAVNFLLTAKLFFLRAKRSGSGVKQTLNFDLLKLAGDVESNPGPTSMDWIWRILFLVGAATGAHSFEQIQLVQSGSELKKPGASVKVSCKASGYTFTNYGMNWVRQAPGQGLKWMGWINTNTGEPKYAEEFKGRFALSLDTSVSTAYLQINSLKAEDTAVYFCARGYGNYARGAWLAYWGQGTLVTVSSTREDLKNVFPPEVAVFEPSEAEISHTQKATLVCLATGFYPDHVELSWWVNGKEVHSGVCTDPQPLKEQPALNDSRYCLSSRLRVSATFWQNPRNHFRCQVQFYGLSENDEWTQDRAKPVTQIVSAEAWGRADDVIKIHWQEKKSNTILGSQEGNTMKTNDTYMKFSWLTVPEKSLDKEHRCIVRHENNKNGVDQEIIFPPIKTDVITMDPKDNCSKDANDTLLLQLTNTSAYYMYLLLLLKSVVYFAIITCCLLRRTAFCCNGEKS

SEQ ID NO: 15609 - protein, 720 aa, synthetic construct
MALPVTALLLPLALLLHAARPDEIVLTQSPATLSLSPGERATLSCSASSSINYIYWLQQKPGQAPRILIYLTSNLASGVPARFSGSGSGTDFTLTISSLEPEDFAVYYCLQWSSNPLTFGGGTKVEIKLEIQNPDPAVYQLRDSKSSDKSVCLFTDFDSQTNVSQSKDSDVYITDKCVLDMRSMDFKSNSAVAWSNKSDFACANAFNNSIIPEDTFFPSPESSDSTDHVKPKETENTKQPSKSCHKPKAIVHTEKVNMMSLTVLGLRMLFAKTVAVNFLLTAKLFFLRAKRSGSGVKQTLNFDLLKLAGDVESNPGPTSMDWIWRILFLVGAATGAHSFEEVQLVESGGGLVKPGGSLRLSCAASGFTFSSYDMSWVRQAPGKGLEWVSTISSGGSYTYYLDSIKGRFTISRDNAKNSLYLQMNSLRAEDTAVYYCARQGLDYWGRGTLVTVSSTREDLKNVFPPEVAVFEPSEAEISHTQKATLVCLATGFYPDHVELSWWVNGKEVHSGVCTDPQPLKEQPALNDSRYCLSSRLRVSATFWQNPRNHFRCQVQFYGLSENDEWTQDRAKPVTQIVSAEAWGRADDVIKIHWQEKKSNTILGSQEGNTMKTNDTYMKFSWLTVPEKSLDKEHRCIVRHENNKNGVDQEIIFPPIKTDVITMDPKDNCSKDANDTLLLQLTNTSAYYMYLLLLLKSVVYFAIITCCLLRRTAFCCNGEKS

SEQ ID NO: 15610 - protein, 729 aa, synthetic construct
MALPVTALLLPLALLLHAARPDIVMTQSPDSLAVSLGERATINCRASKSVSTSGYSFMHWYQQKPGQPPKLLIYLASNLESGVPDRFSGSGSGTDFTLTISSLQAEDVAVYYCQHSREVPWTFGQGTKVEIKRLEIQNPDPAVYQLRDSKSSDKSVCLFTDFDSQTNVSQSKDSDVYITDKCVLDMRSMDFKSNSAVAWSNKSDFACANAFNNSIIPEDTFFPSPESSDSTDHVKPKETENTKQPSKSCHKPKAIVHTEKVNMMSLTVLGLRMLFAKTVAVNFLLTAKLFFLRAKRSGSGVKQTLNFDLLKLAGDVESNPGPTSMDWIWRILFLVGAATGAHSFEQVQLVQSGAEVKKPGASVKVSCKASGYTFTNYGMNWVRQAPGQGLEWMGWINTYTGEPTYADAFKGRFAFSLDTSTSTAYLQINSLRSDDTAVYYCARDYGDYGMDYWGQGTTVTVSSTREDLKNVFPPEVAVFEPSEAEISHTQKATLVCLATGFYPDHVELSWWVNGKEVHSGVCTDPQPLKEQPALNDSRYCLSSRLRVSATFWQNPRNHFRCQVQFYGLSENDEWTQDRAKPVTQIVSAEAWGRADDVIKIHWQEKKSNTILGSQEGNTMKTNDTYMKFSWLTVPEKSLDKEHRCIVRHENNKNGVDQEIIFPPIKTDVITMDPKDNCSKDANDTLLLQLTNTSAYYMYLLLLLKSVVYFAIITCCLLRRTAFCCNGEKS

SEQ ID NO: 15611 - protein, 725 aa, synthetic construct
MALPVTALLLPLALLLHAARPDIVMTQTPLTLSVTIGQPASISCKSSQSLLDSDGKTYLNWLLQRPGQSPERLIYLVSKLDSGVPDRFTGSGSGTDFTLKISRVEAEDLGVYCCWQGTHFPYTFGGGTKVEIKGLEIQNPDPAVYQLRDSKSSDKSVCLFTDFDSQTNVSQSKDSDVYITDKCVLDMRSMDFKSNSAVAWSNKSDFACANAFNNSIIPEDTFFPSPESSDSTDHVKPKETENTKQPSKSCHKPKAIVHTEKVNMMSLTVLGLRMLFAKTVAVNFLLTAKLFFLRAKRSGSGVKQTLNFDLLKLAGDVESNPGPTSMDWIWRILFLVGAATGAHSFEQVQLQQPGAELVRPGASVKLSCKASGYTFTSYWMNWVKQRPGQGLEWIGMIDPSDSETHYNHIFKDKATLTVDKSSSTAYLQLSSLTSEDSAVYYCARNLYLWGQGTSVTVSSTREDLKNVFPPEVAVFEPSEAEISHTQKATLVCLATGFYPDHVELSWWVNGKEVHSGVCTDPQPLKEQPALNDSRYCLSSRLRVSATFWQNPRNHFRCQVQFYGLSENDEWTQDRAKPVTQIVSAEAWGRADDVIKIHWQEKKSNTILGSQEGNTMKTNDTYMKFSWLTVPEKSLDKEHRCIVRHENNKNGVDQEIIFPPIKTDVITMDPKDNCSKDANDTLLLQLTNTSAYYMYLLLLLKSVVYFAIITCCLLRRTAFCCNGEKS

SEQ ID NO: 15612 - protein, 733 aa, synthetic construct
MALPVTALLLPLALLLHAARPDIVMTQSPDSLAVSLGERATINCESSQSLLNSGNQKNYLTWYQQKPGQPPKPLIYWASTRESGVPDRFSGSGSGTDFTLTISSLQAEDVAVYYCQNDYSYPYTFGQGTKLEIKRLEIQNPDPAVYQLRDSKSSDKSVCLFTDFDSQTNVSQSKDSDVYITDKCVLDMRSMDFKSNSAVAWSNKSDFACANAFNNSIIPEDTFFPSPESSDSTDHVKPKETENTKQPSKSCHKPKAIVHTEKVNMMSLTVLGLRMLFAKTVAVNFLLTAKLFFLRAKRSGSGVKQTLNFDLLKLAGDVESNPGPTSMDWIWRILFLVGAATGAHSFEEVQLVQSGAEVKKPGESLKISCKGSGYSFTDYYMKWARQMPGKGLEWMGDIIPSNGATFYNQKFKGQVTISADKSISTTYLQWSSLKASDTAMYYCARSHLLRASWFAYWGQGTMVTVSSTREDLKNVFPPEVAVFEPSEAEISHTQKATLVCLATGFYPDHVELSWWVNGKEVHSGVCTDPQPLKEQPALNDSRYCLSSRLRVSATFWQNPRNHFRCQVQFYGLSENDEWTQDRAKPVTQIVSAEAWGRADDVIKIHWQEKKSNTILGSQEGNTMKTNDTYMKFSWLTVPEKSLDKEHRCIVRHENNKNGVDQEIIFPPIKTDVITMDPKDNCSKDANDTLLLQLTNTSAYYMYLLLLLKSVVYFAIITCCLLRRTAFCCNGEKS

SEQ ID NO: 15613 - protein, 728 aa, synthetic construct
MALPVTALLLPLALLLHAARPDIQMTQSTSSLSASLGDRVTISCSASQGINNYLNWYQQKPDGTVELLIYYTSTLQSGVPSRFSGSGSGTDYSLTISNLEPEDIGTYYCQQYSKLPRTFGGGTKLEIKLEIQNPDPAVYQLRDSKSSDKSVCLFTDFDSQTNVSQSKDSDVYITDKCVLDMRSMDFKSNSAVAWSNKSDFACANAFNNSIIPEDTFFPSPESSDSTDHVKPKETENTKQPSKSCHKPKAIVHTEKVNMMSLTVLGLRMLFAKTVAVNFLLTAKLFFLRAKRSGSGVKQTLNFDLLKLAGDVESNPGPTSMDWIWRILFLVGAATGAHSFEQVQLQQSGSELMMPGASVKISCKATGYTFSNYWIEWVKQRPGHGLEWIGEILPGTGRTIYNEKFKGKATFTADISSNTVQMQLSSLTSEDSAVYYCARRDYYGNFYYAMDYWGQGTSVTVSSTREDLKNVFPPEVAVFEPSEAEISHTQKATLVCLATGFYPDHVELSWWVNGKEVHSGVCTDPQPLKEQPALNDSRYCLSSRLRVSATFWQNPRNHFRCQVQFYGLSENDEWTQDRAKPVTQIVSAEAWGRADDVIKIHWQEKKSNTILGSQEGNTMKTNDTYMKFSWLTVPEKSLDKEHRCIVRHENNKNGVDQEIIFPPIKTDVITMDPKDNCSKDANDTLLLQLTNTSAYYMYLLLLLKSVVYFAIITCCLLRRTAFCCNGEKS

SEQ ID NO: 15614 - protein, 723 aa, synthetic construct
MALPVTALLLPLALLLHAARPDIQMTQSPASLSVSVGETVTITCRASENIYSNLAWYQQKQGKSPQLLVYAATNLADGVPSRFSGSGSGTQYSLKINSLQSEDFGSYYCQHFWGTWTFGGGTTLEIKLEIQNPDPAVYQLRDSKSSDKSVCLFTDFDSQTNVSQSKDSDVYITDKCVLDMRSMDFKSNSAVAWSNKSDFACANAFNNSIIPEDTFFPSPESSDSTDHVKPKETENTKQPSKSCHKPKAIVHTEKVNMMSLTVLGLRMLFAKTVAVNFLLTAKLFFLRAKRSGSGVKQTLNFDLLKLAGDVESNPGPTSMDWIWRILFLVGAATGAHSFEEVQLQQSGPELVKPGASVKMSCKASGYTFTDYYMKWMKQSHGKSLEWIGDINPNNGGTTYNQKFKGKATLTVDKSSSTAYMQLNSLTSEDSAVYYCARDYGYGYFDYWGQGTTLTVSSTREDLKNVFPPEVAVFEPSEAEISHTQKATLVCLATGFYPDHVELSWWVNGKEVHSGVCTDPQPLKEQPALNDSRYCLSSRLRVSATFWQNPRNHFRCQVQFYGLSENDEWTQDRAKPVTQIVSAEAWGRADDVIKIHWQEKKSNTILGSQEGNTMKTNDTYMKFSWLTVPEKSLDKEHRCIVRHENNKNGVDQEIIFPPIKTDVITMDPKDNCSKDANDTLLLQLTNTSAYYMYLLLLLKSVVYFAIITCCLLRRTAFCCNGEKS

SEQ ID NO: 15615 - protein, 726 aa, synthetic construct
MALPVTALLLPLALLLHAARPEIVLTQSPGTLSLSPGERATLSCRASQSVGGYLAWYQQKPGQAPRLLIYDASNRATGIPARFSGSGSGTDFTLTISSLEPEDFAVYYCQQRNNWPPMYTFGQGTKLEIKRLEIQNPDPAVYQLRDSKSSDKSVCLFTDFDSQTNVSQSKDSDVYITDKCVLDMRSMDFKSNSAVAWSNKSDFACANAFNNSIIPEDTFFPSPESSDSTDHVKPKETENTKQPSKSCHKPKAIVHTEKVNMMSLTVLGLRMLFAKTVAVNFLLTAKLFFLRAKRSGSGVKQTLNFDLLKLAGDVESNPGPTSMDWIWRILFLVGAATGAHSFEQVQLVQSGAEVKKPGSSVKVSCKASGGTFSSYAISWVRQAPGQGLEWMGGIIPILGTANYAQKFQGRVTITADESTSTAYMELSSLRSEDTAVYYCARWGGGAFDIWGQGTMVTVSSTREDLKNVFPPEVAVFEPSEAEISHTQKATLVCLATGFYPDHVELSWWVNGKEVHSGVCTDPQPLKEQPALNDSRYCLSSRLRVSATFWQNPRNHFRCQVQFYGLSENDEWTQDRAKPVTQIVSAEAWGRADDVIKIHWQEKKSNTILGSQEGNTMKTNDTYMKFSWLTVPEKSLDKEHRCIVRHENNKNGVDQEIIFPPIKTDVITMDPKDNCSKDANDTLLLQLTNTSAYYMYLLLLLKSVVYFAIITCCLLRRTAFCCNGEKS

SEQ ID NO: 15616 - protein, 721 aa, synthetic construct
MALPVTALLLPLALLLHAARPQIVLTQSPALMSASPGEKVTMTCSASSSVRYMYWYQQKPRSSPKPWIHLTSNLASGVPARFSGSGSGTSYSLTISSMEAEDAATYYCQQWSSHPFTFGSGTKLEIKLEIQNPDPAVYQLRDSKSSDKSVCLFTDFDSQTNVSQSKDSDVYITDKCVLDMRSMDFKSNSAVAWSNKSDFACANAFNNSIIPEDTFFPSPESSDSTDHVKPKETENTKQPSKSCHKPKAIVHTEKVNMMSLTVLGLRMLFAKTVAVNFLLTAKLFFLRAKRSGSGVKQTLNFDLLKLAGDVESNPGPTSMDWIWRILFLVGAATGAHSFEDVQLQESGPGLVKPSQSLSLTCTVTGFSITSDYSWNWIRQFPGNKLEWMGYISYSGHTSYNPSLESRISITRDTSKNQFFLQLNSVTTEDTATYYCTRGNWDVVYWGQGTLVTVSATREDLKNVFPPEVAVFEPSEAEISHTQKATLVCLATGFYPDHVELSWWVNGKEVHSGVCTDPQPLKEQPALNDSRYCLSSRLRVSATFWQNPRNHFRCQVQFYGLSENDEWTQDRAKPVTQIVSAEAWGRADDVIKIHWQEKKSNTILGSQEGNTMKTNDTYMKFSWLTVPEKSLDKEHRCIVRHENNKNGVDQEIIFPPIKTDVITMDPKDNCSKDANDTLLLQLTNTSAYYMYLLLLLKSVVYFAIITCCLLRRTAFCCNGEKS

SEQ ID NO: 15617 - protein, 731 aa, synthetic construct
MALPVTALLLPLALLLHAARPDVVMTQSPLSLPVTLGQPASISCRSSQSIVHSDGNTYLEWYQQRPGQSPRRLIYKVSNRFSGVPDRFSGSGSGTDFTLKISRVEAEDVGVYYCFQGSHAPWTFGGGTKVEIKLEIQNPDPAVYQLRDSKSSDKSVCLFTDFDSQTNVSQSKDSDVYITDKCVLDMRSMDFKSNSAVAWSNKSDFACANAFNNSIIPEDTFFPSPESSDSTDHVKPKETENTKQPSKSCHKPKAIVHTEKVNMMSLTVLGLRMLFAKTVAVNFLLTAKLFFLRAKRSGSGVKQTLNFDLLKLAGDVESNPGPTSMDWIWRILFLVGAATGAHSFEEVQLVESGGGLVQPGGSLRLSCAASGFTFSSYGMHWVRQAPGKGLEWVAYITTRSSTIYYADSVKGRFTISRDNAKNSLYLQMNSLRAEDTAVYYCTREPLTGYYAMDYWGQGTSVTVSSTREDLKNVFPPEVAVFEPSEAEISHTQKATLVCLATGFYPDHVELSWWVNGKEVHSGVCTDPQPLKEQPALNDSRYCLSSRLRVSATFWQNPRNHFRCQVQFYGLSENDEWTQDRAKPVTQIVSAEAWGRADDVIKIHWQEKKSNTILGSQEGNTMKTNDTYMKFSWLTVPEKSLDKEHRCIVRHENNKNGVDQEIIFPPIKTDVITMDPKDNCSKDANDTLLLQLTNTSAYYMYLLLLLKSVVYFAIITCCLLRRTAFCCNGEKS

SEQ ID NO: 15618 - protein, 723 aa, synthetic construct
MALPVTALLLPLALLLHAARPDIQMTQSPSSLSASVGDRVTITCRASQSISLWLNWYQQKPGKAPKLLIYAASTLQSGVPSRFSGSGSGTDFTLTISSLQPEDFATYYCQQYYTSPYTFGQGTKVEIKRLEIQNPDPAVYQLRDSKSSDKSVCLFTDFDSQTNVSQSKDSDVYITDKCVLDMRSMDFKSNSAVAWSNKSDFACANAFNNSIIPEDTFFPSPESSDSTDHVKPKETENTKQPSKSCHKPKAIVHTEKVNMMSLTVLGLRMLFAKTVAVNFLLTAKLFFLRAKRSGSGVKQTLNFDLLKLAGDVESNPGPTSMDWIWRILFLVGAATGAHSFEQVQLLESGGGLVQPGGSLRLSCAASGFTFSSYAMSWVRQAPGKGLEWVSVIRSSGSSTYYADSVKGRFTISRDNSKNTLYLQMNSLRAEDTAVYYCARGGGYFDYWGQGTLVTVSSTREDLKNVFPPEVAVFEPSEAEISHTQKATLVCLATGFYPDHVELSWWVNGKEVHSGVCTDPQPLKEQPALNDSRYCLSSRLRVSATFWQNPRNHFRCQVQFYGLSENDEWTQDRAKPVTQIVSAEAWGRADDVIKIHWQEKKSNTILGSQEGNTMKTNDTYMKFSWLTVPEKSLDKEHRCIVRHENNKNGVDQEIIFPPIKTDVITMDPKDNCSKDANDTLLLQLTNTSAYYMYLLLLLKSVVYFAIITCCLLRRTAFCCNGEKS

SEQ ID NO: 15619 - protein, 726 aa, synthetic construct
MALPVTALLLPLALLLHAARPDIQMTQSPSSLSASVGDRVTITCRASQSISSYLNWYQQKPGKAPKLLIYAVSTLQSGVPSRFSGSGSGTDFTLTISSLQPEDFATYYCQQSGTFPPTTFGQGTKVEIKRLEIQNPDPAVYQLRDSKSSDKSVCLFTDFDSQTNVSQSKDSDVYITDKCVLDMRSMDFKSNSAVAWSNKSDFACANAFNNSIIPEDTFFPSPESSDSTDHVKPKETENTKQPSKSCHKPKAIVHTEKVNMMSLTVLGLRMLFAKTVAVNFLLTAKLFFLRAKRSGSGVKQTLNFDLLKLAGDVESNPGPTSMDWIWRILFLVGAATGAHSFEQVQLLESGGGLVQPGGSLRLSCAASGFTFSSHGMHWVRQAPGKGLEWVSVISGSGSNTGYADSVKGRFTISRDNSKNTLYLQMNSLRAEDTAVYYCARQWGSYAFDSWGQGTLVTVSSTREDLKNVFPPEVAVFEPSEAEISHTQKATLVCLATGFYPDHVELSWWVNGKEVHSGVCTDPQPLKEQPALNDSRYCLSSRLRVSATFWQNPRNHFRCQVQFYGLSENDEWTQDRAKPVTQIVSAEAWGRADDVIKIHWQEKKSNTILGSQEGNTMKTNDTYMKFSWLTVPEKSLDKEHRCIVRHENNKNGVDQEIIFPPIKTDVITMDPKDNCSKDANDTLLLQLTNTSAYYMYLLLLLKSVVYFAIITCCLLRRTAFCCNGEKS

SEQ ID NO: 15620 - protein, 736 aa, synthetic construct
MALPVTALLLPLALLLHAARPDIVMSQSPSSLAVSVGEKVTMSCKSSQSLLHSSNQKNYLAWYQQKPGQSPKVLIYWASTRESGVPDRFTGSGSGTDFTLTITSVKSEDLAVYYCQQYYSYPWTFGGGTRLEIKRLEIQNPDPAVYQLRDSKSSDKSVCLFTDFDSQTNVSQSKDSDVYITDKCVLDMRSMDFKSNSAVAWSNKSDFACANAFNNSIIPEDTFFPSPESSDSTDHVKPKETENTKQPSKSCHKPKAIVHTEKVNMMSLTVLGLRMLFAKTVAVNFLLTAKLFFLRAKRSGSGVKQTLNFDLLKLAGDVESNPGPTSMDWIWRILFLVGAATGAHSFEEVQLQQSVAELVKPGASVKMSCKVSGYTLTDHTIHWMKQRPEQGLEWIGYIYPRDGITGYNEKFKGKATLTADTSSSTAYMQLNSLTSEDSAVYFCARWGYSYRNYAYYYDYWGQGTTLTVSSTREDLKNVFPPEVAVFEPSEAEISHTQKATLVCLATGFYPDHVELSWWVNGKEVHSGVCTDPQPLKEQPALNDSRYCLSSRLRVSATFWQNPRNHFRCQVQFYGLSENDEWTQDRAKPVTQIVSAEAWGRADDVIKIHWQEKKSNTILGSQEGNTMKTNDTYMKFSWLTVPEKSLDKEHRCIVRHENNKNGVDQEIIFPPIKTDVITMDPKDNCSKDANDTLLLQLTNTSAYYMYLLLLLKSVVYFAIITCCLLRRTAFCCNGEKS

SEQ ID NO: 15621 - protein, 733 aa, synthetic construct
MALPVTALLLPLALLLHAARPEIVLTQSPGTLSLSPGERATLSCRASQSVSSSYLAWYQQKPGQAPRLLIYGTSSRATGIPDRFSGSGSGTDFTLTISRLEPEDFAVYYCQQYGSSPFTFGGGTKVEIKRLEIQNPDPAVYQLRDSKSSDKSVCLFTDFDSQTNVSQSKDSDVYITDKCVLDMRSMDFKSNSAVAWSNKSDFACANAFNNSIIPEDTFFPSPESSDSTDHVKPKETENTKQPSKSCHKPKAIVHTEKVNMMSLTVLGLRMLFAKTVAVNFLLTAKLFFLRAKRSGSGVKQTLNFDLLKLAGDVESNPGPTSMDWIWRILFLVGAATGAHSFEQVQLQESGPGLAKPSETLSLTCTVSGDSITSYYWSWIRQPPGKGLEWIGYIYYSGSTNYNPSLKSRVTISVDTSKNQFSLKLSSVTAADTAVYYCARDQRRIAAAGTHFYGMDVWGQGTTVTVSSTREDLKNVFPPEVAVFEPSEAEISHTQKATLVCLATGFYPDHVELSWWVNGKEVHSGVCTDPQPLKEQPALNDSRYCLSSRLRVSATFWQNPRNHFRCQVQFYGLSENDEWTQDRAKPVTQIVSAEAWGRADDVIKIHWQEKKSNTILGSQEGNTMKTNDTYMKFSWLTVPEKSLDKEHRCIVRHENNKNGVDQEIIFPPIKTDVITMDPKDNCSKDANDTLLLQLTNTSAYYMYLLLLLKSVVYFAIITCCLLRRTAFCCNGEKS

SEQ ID NO: 15622 - protein, 725 aa, synthetic construct
MALPVTALLLPLALLLHAARPDILLTQSPVILSVSPGERVSFSCRASQSIGTNIHWYQQRTNGSPRLLIKYASESISGIPSRFSGSGSGTDFTLSINSVESEDIADYYCQQNNNWPTTFGAGTKLELKLEIQNPDPAVYQLRDSKSSDKSVCLFTDFDSQTNVSQSKDSDVYITDKCVLDMRSMDFKSNSAVAWSNKSDFACANAFNNSIIPEDTFFPSPESSDSTDHVKPKETENTKQPSKSCHKPKAIVHTEKVNMMSLTVLGLRMLFAKTVAVNFLLTAKLFFLRAKRSGSGVKQTLNFDLLKLAGDVESNPGPTSMDWIWRILFLVGAATGAHSFEQVQLKQSGPGLVQPSQSLSITCTVSGFSLTNYGVHWVRQSPGKGLEWLGVIWSGGNTDYNTPFTSRLSINKDNSKSQVFFKMNSLQSNDTAIYYCARALTYYDYEFAYWGQGTLVTVSATREDLKNVFPPEVAVFEPSEAEISHTQKATLVCLATGFYPDHVELSWWVNGKEVHSGVCTDPQPLKEQPALNDSRYCLSSRLRVSATFWQNPRNHFRCQVQFYGLSENDEWTQDRAKPVTQIVSAEAWGRADDVIKIHWQEKKSNTILGSQEGNTMKTNDTYMKFSWLTVPEKSLDKEHRCIVRHENNKNGVDQEIIFPPIKTDVITMDPKDNCSKDANDTLLLQLTNTSAYYMYLLLLLKSVVYFAIITCCLLRRTAFCCNGEKS

SEQ ID NO: 15623 - protein, 718 aa, synthetic construct
MALPVTALLLPLALLLHAARPMTQSPKFLLVSAGDRVTLTCKASQSVNNDVYWYQQEPGQSPKLLIYWASTRESGVPDRFTGSGSGTDFTLTISSVQAEDLAVYYCKQSYNLYTFGGGTKLEIKRLEIQNPDPAVYQLRDSKSSDKSVCLFTDFDSQTNVSQSKDSDVYITDKCVLDMRSMDFKSNSAVAWSNKSDFACANAFNNSIIPEDTFFPSPESSDSTDHVKPKETENTKQPSKSCHKPKAIVHTEKVNMMSLTVLGLRMLFAKTVAVNFLLTAKLFFLRAKRSGSGVKQTLNFDLLKLAGDVESNPGPTSMDWIWRILFLVGAATGAHSFEESGRGLVQPGGSRKLSCAASGFTFSTSGMHWVRQAPEKGLEWVAYISSGSTTIYHADTVKGRFTISRDNPKNTLFLQMTSLRSEDTAMYYCCARSGQFGNYFDYWGQGTTLTVSSTREDLKNVFPPEVAVFEPSEAEISHTQKATLVCLATGFYPDHVELSWWVNGKEVHSGVCTDPQPLKEQPALNDSRYCLSSRLRVSATFWQNPRNHFRCQVQFYGLSENDEWTQDRAKPVTQIVSAEAWGRADDVIKIHWQEKKSNTILGSQEGNTMKTNDTYMKFSWLTVPEKSLDKEHRCIVRHENNKNGVDQEIIFPPIKTDVITMDPKDNCSKDANDTLLLQLTNTSAYYMYLLLLLKSVVYFAIITCCLLRRTAFCCNGEKS

SEQ ID NO: 15624 - protein, 723 aa, synthetic construct
MALPVTALLLPLALLLHAARPQSPSSLAVSAGEKVTMSCKSSQSLLNSRTRKNYLAWYQQKPGQSPKLLIYWASTRESGVPDRFTGSGSGTDFTLTISSVQAEDLAVYYCKQSNLYTFGGGTKLEIKLEIQNPDPAVYQLRDSKSSDKSVCLFTDFDSQTNVSQSKDSDVYITDKCVLDMRSMDFKSNSAVAWSNKSDFACANAFNNSIIPEDTFFPSPESSDSTDHVKPKETENTKQPSKSCHKPKAIVHTEKVNMMSLTVLGLRMLFAKTVAVNFLLTAKLFFLRAKRSGSGVKQTLNFDLLKLAGDVESNPGPTSMDWIWRILFLVGAATGAHSFEQVQLEESGPELVKPGASVKLSCKASGYTFTEYIIHWVKQRSGQGLEWIGWFYPGSGSIKYNEKFKDKATLTADKSSSTVYMELSGLTSEDSAVYFCARHDGYSYFDYWGQGTTLTVSSTREDLKNVFPPEVAVFEPSEAEISHTQKATLVCLATGFYPDHVELSWWVNGKEVHSGVCTDPQPLKEQPALNDSRYCLSSRLRVSATFWQNPRNHFRCQVQFYGLSENDEWTQDRAKPVTQIVSAEAWGRADDVIKIHWQEKKSNTILGSQEGNTMKTNDTYMKFSWLTVPEKSLDKEHRCIVRHENNKNGVDQEIIFPPIKTDVITMDPKDNCSKDANDTLLLQLTNTSAYYMYLLLLLKSVVYFAIITCCLLRRTAFCCNGEKS

SEQ ID NO: 15625 - protein, 726 aa, synthetic construct
MALPVTALLLPLALLLHAARPDIQMTQSPSSLSASLGERVSLTCRATQELSGYLSWLQQKPDGTIKRLIYAASTLDSGVPKRFSGNRSGSDYSLTISSLESEDFADYYCLQYAIYPYTFGGGTKLEIKLEIQNPDPAVYQLRDSKSSDKSVCLFTDFDSQTNVSQSKDSDVYITDKCVLDMRSMDFKSNSAVAWSNKSDFACANAFNNSIIPEDTFFPSPESSDSTDHVKPKETENTKQPSKSCHKPKAIVHTEKVNMMSLTVLGLRMLFAKTVAVNFLLTAKLFFLRAKRSGSGVKQTLNFDLLKLAGDVESNPGPTSMDWIWRILFLVGAATGAHSFEEVQLQQSGPELVKPGASVKMSCKASGYTFTSYFIHWVKQKPGQGLEWIGFINPYNDGSKYNEKFKGKATLTSDKSSSTAYMELSSLTSEDSAVYYCTRDDGYYGYAMDYWGQGTSVTVSSTREDLKNVFPPEVAVFEPSEAEISHTQKATLVCLATGFYPDHVELSWWVNGKEVHSGVCTDPQPLKEQPALNDSRYCLSSRLRVSATFWQNPRNHFRCQVQFYGLSENDEWTQDRAKPVTQIVSAEAWGRADDVIKIHWQEKKSNTILGSQEGNTMKTNDTYMKFSWLTVPEKSLDKEHRCIVRHENNKNGVDQEIIFPPIKTDVITMDPKDNCSKDANDTLLLQLTNTSAYYMYLLLLLKSVVYFAIITCCLLRRTAFCCNGEKS

SEQ ID NO: 15626 - protein, 731 aa, synthetic construct
MALPVTALLLPLALLLHAARPDTIVLTQSPASLAVSLGQRATISCRASESVDSYGNSFMHWYQQKPGQPPKLLIYLASNLESGVPARFSGSGSRTDFTLTIDPVEADDAATYYCQQNNYDPWTFGGGTKLEIKLEIQNPDPAVYQLRDSKSSDKSVCLFTDFDSQTNVSQSKDSDVYITDKCVLDMRSMDFKSNSAVAWSNKSDFACANAFNNSIIPEDTFFPSPESSDSTDHVKPKETENTKQPSKSCHKPKAIVHTEKVNMMSLTVLGLRMLFAKTVAVNFLLTAKLFFLRAKRSGSGVKQTLNFDLLKLAGDVESNPGPTSMDWIWRILFLVGAATGAHSFEEVQLQQSGPELVKPGASVKMSCKASGYTFTSYVMHWVKQKPGQGLEWIGYINPYNDGTKYNEKFKGKATLTSDTSSSTAYMELNSLTSEDSAVYFCARPIYFDNDYFDYWGQGTTLKVSSTREDLKNVFPPEVAVFEPSEAEISHTQKATLVCLATGFYPDHVELSWWVNGKEVHSGVCTDPQPLKEQPALNDSRYCLSSRLRVSATFWQNPRNHFRCQVQFYGLSENDEWTQDRAKPVTQIVSAEAWGRADDVIKIHWQEKKSNTILGSQEGNTMKTNDTYMKFSWLTVPEKSLDKEHRCIVRHENNKNGVDQEIIFPPIKTDVITMDPKDNCSKDANDTLLLQLTNTSAYYMYLLLLLKSVVYFAIITCCLLRRTAFCCNGEKS

SEQ ID NO: 15627 - protein, 726 aa, synthetic construct
MALPVTALLLPLALLLHAARPDIQMTQSPSSLSASVGDRVTITCKASQDVGIAVAWYQQKPGKVPKLLIYWASTRHTGVPDRFSGSGSGTDFTLTISSLQPEDVATYYCQQYSSYPYTFGQGTKVEIKRLEIQNPDPAVYQLRDSKSSDKSVCLFTDFDSQTNVSQSKDSDVYITDKCVLDMRSMDFKSNSAVAWSNKSDFACANAFNNSIIPEDTFFPSPESSDSTDHVKPKETENTKQPSKSCHKPKAIVHTEKVNMMSLTVLGLRMLFAKTVAVNFLLTAKLFFLRAKRSGSGVKQTLNFDLLKLAGDVESNPGPTSMDWIWRILFLVGAATGAHSFEEVQLVESGGGLVQPGGSLRLSCAASGFDFSRYWMSWVRQAPGKGLEWIGEINPDSSTINYAPSLKDKFIISRDNAKNSLYLQMNSLRAEDTAVYYCARPDGNYWYFDVWGQGTLVTVSSTREDLKNVFPPEVAVFEPSEAEISHTQKATLVCLATGFYPDHVELSWWVNGKEVHSGVCTDPQPLKEQPALNDSRYCLSSRLRVSATFWQNPRNHFRCQVQFYGLSENDEWTQDRAKPVTQIVSAEAWGRADDVIKIHWQEKKSNTILGSQEGNTMKTNDTYMKFSWLTVPEKSLDKEHRCIVRHENNKNGVDQEIIFPPIKTDVITMDPKDNCSKDANDTLLLQLTNTSAYYMYLLLLLKSVVYFAIITCCLLRRTAFCCNGEKS

SEQ ID NO: 15628 - protein, 726 aa, synthetic construct
MALPVTALLLPLALLLHAARPDIVMTQSQKSMSTSVGDRVSITCKASQDVITGVAWYQQKPGQSPKLLIYSASYRYTGVPDRFTGSGSGTDFTFTISNVQAEDLAVYYCQQHYSTPLTFGAGTKLELKLEIQNPDPAVYQLRDSKSSDKSVCLFTDFDSQTNVSQSKDSDVYITDKCVLDMRSMDFKSNSAVAWSNKSDFACANAFNNSIIPEDTFFPSPESSDSTDHVKPKETENTKQPSKSCHKPKAIVHTEKVNMMSLTVLGLRMLFAKTVAVNFLLTAKLFFLRAKRSGSGVKQTLNFDLLKLAGDVESNPGPTSMDWIWRILFLVGAATGAHSFEQVQLQQPGAELVRPGASVKLSCKASGYSFTTYWMNWVKQRPGQGLEWIGMIHPSDSETRLNQKFKDKATLTVDKSSSTAYMQLSSPTSEDSAVYYCARSTMIATRAMDYWGQGTSVTVSSTREDLKNVFPPEVAVFEPSEAEISHTQKATLVCLATGFYPDHVELSWWVNGKEVHSGVCTDPQPLKEQPALNDSRYCLSSRLRVSATFWQNPRNHFRCQVQFYGLSENDEWTQDRAKPVTQIVSAEAWGRADDVIKIHWQEKKSNTILGSQEGNTMKTNDTYMKFSWLTVPEKSLDKEHRCIVRHENNKNGVDQEIIFPPIKTDVITMDPKDNCSKDANDTLLLQLTNTSAYYMYLLLLLKSVVYFAIITCCLLRRTAFCCNGEKS

SEQ ID NO: 15629 - protein, 732 aa, synthetic construct
MALPVTALLLPLALLLHAARPQSVLTQPPSVSGAPGQRVTISCTGSGSNIGAPYDVSWYQQLPGTAPKLLIYHNNKRPSGVPDRFSGSKSGTSASLAITGLQAEDEADYYCATVEAGLSGSVFGGGTKLTVLGALEIQNPDPAVYQLRDSKSSDKSVCLFTDFDSQTNVSQSKDSDVYITDKCVLDMRSMDFKSNSAVAWSNKSDFACANAFNNSIIPEDTFFPSPESSDSTDHVKPKETENTKQPSKSCHKPKAIVHTEKVNMMSLTVLGLRMLFAKTVAVNFLLTAKLFFLRAKRSGSGVKQTLNFDLLKLAGDVESNPGPTSMDWIWRILFLVGAATGAHSFEQVQLVQSGAEVKKPGASVKVSCKVSGYTLTELSIHWVRQAPGKGLEWMGGFDPEENEIVYAQRFQGRVTMTEDTSTDTAYMELSSLRSEDTAVYYCAIVGSFSPLTLGLWGQGTMVTVSSTREDLKNVFPPEVAVFEPSEAEISHTQKATLVCLATGFYPDHVELSWWVNGKEVHSGVCTDPQPLKEQPALNDSRYCLSSRLRVSATFWQNPRNHFRCQVQFYGLSENDEWTQDRAKPVTQIVSAEAWGRADDVIKIHWQEKKSNTILGSQEGNTMKTNDTYMKFSWLTVPEKSLDKEHRCIVRHENNKNGVDQEIIFPPIKTDVITMDPKDNCSKDANDTLLLQLTNTSAYYMYLLLLLKSVVYFAIITCCLLRRTAFCCNGEKS

SEQ ID NO: 15630 - protein, 732 aa, synthetic construct
MALPVTALLLPLALLLHAARPQSVLTQPPSVSGAPGQRVTISCTGSGSNIGAPYDVSWYQQLPGTAPKLLIYHNNKRPSGVPDRFSGSKSGTSASLAITGLQAEDEADYYCQSYDSSSISTIFGGGTKLTVLGALEIQNPDPAVYQLRDSKSSDKSVCLFTDFDSQTNVSQSKDSDVYITDKCVLDMRSMDFKSNSAVAWSNKSDFACANAFNNSIIPEDTFFPSPESSDSTDHVKPKETENTKQPSKSCHKPKAIVHTEKVNMMSLTVLGLRMLFAKTVAVNFLLTAKLFFLRAKRSGSGVKQTLNFDLLKLAGDVESNPGPTSMDWIWRILFLVGAATGAHSFEQVQLVQSGAEVKKPGASVKVSCKVSGYTLTELSIHWVRQAPGKGLEWMGGFDPEENEIVYAQRFQGRVTMTEDTSTDTAYMELSSLRSEDTAVYYCAIVGSFSGIAYRPWGQGTMVTVSSTREDLKNVFPPEVAVFEPSEAEISHTQKATLVCLATGFYPDHVELSWWVNGKEVHSGVCTDPQPLKEQPALNDSRYCLSSRLRVSATFWQNPRNHFRCQVQFYGLSENDEWTQDRAKPVTQIVSAEAWGRADDVIKIHWQEKKSNTILGSQEGNTMKTNDTYMKFSWLTVPEKSLDKEHRCIVRHENNKNGVDQEIIFPPIKTDVITMDPKDNCSKDANDTLLLQLTNTSAYYMYLLLLLKSVVYFAIITCCLLRRTAFCCNGEKS

SEQ ID NO: 15631 - protein, 720 aa, synthetic construct
MALPVTALLLPLALLLHAARPDIQMTQSPSSLSASVGDRVTITCRASQGIRNNLAWYQQKPGKAPKRLIYAASNLQSGVPSRFTGSGSGTEFTLIVSSLQPEDFATYYCLQHHSYPLTSGGGTKVELEIQNPDPAVYQLRDSKSSDKSVCLFTDFDSQTNVSQSKDSDVYITDKCVLDMRSMDFKSNSAVAWSNKSDFACANAFNNSIIPEDTFFPSPESSDSTDHVKPKETENTKQPSKSCHKPKAIVHTEKVNMMSLTVLGLRMLFAKTVAVNFLLTAKLFFLRAKRSGSGVKQTLNFDLLKLAGDVESNPGPTSMDWIWRILFLVGAATGAHSFEEVQVLESGGGLVQPGGSLRLSCAASGFTFSSYAMSWVRQAPGKGLEWVSAISGSGGSTNYADSVKGRFTISRDNSKNTLYLQMNSLRAEDTAVYYCAGSSGWSEYWGQGTLVTVSSTREDLKNVFPPEVAVFEPSEAEISHTQKATLVCLATGFYPDHVELSWWVNGKEVHSGVCTDPQPLKEQPALNDSRYCLSSRLRVSATFWQNPRNHFRCQVQFYGLSENDEWTQDRAKPVTQIVSAEAWGRADDVIKIHWQEKKSNTILGSQEGNTMKTNDTYMKFSWLTVPEKSLDKEHRCIVRHENNKNGVDQEIIFPPIKTDVITMDPKDNCSKDANDTLLLQLTNTSAYYMYLLLLLKSVVYFAIITCCLLRRTAFCCNGEKS

SEQ ID NO: 15632 - protein, 726 aa, synthetic construct
MALPVTALLLPLALLLHAARPDEIQLVQSGAEVKKPGESLRISCKGSGFNIEDYYIHWVRQMPGKGLEWMGRIDPENDETKYGPIFQGHVTISADTSINTVYLQWSSLKASDTAMYYCAFRGGVYWGQGTTVTVSSLEIQNPDPAVYQLRDSKSSDKSVCLFTDFDSQTNVSQSKDSDVYITDKCVLDMRSMDFKSNSAVAWSNKSDFACANAFNNSIIPEDTFFPSPESSDSTDHVKPKETENTKQPSKSCHKPKAIVHTEKVNMMSLTVLGLRMLFAKTVAVNFLLTAKLFFLRAKRSGSGVKQTLNFDLLKLAGDVESNPGPTSMDWIWRILFLVGAATGAHSFEDVVMTQSPDSLAVSLGERATINCKSSQSLLDSDGKTYLNWLQQKPGQPPKRLISLVSKLDSGVPDRFSGSGSGTDFTLTISSLQAEDVAVYYCWQGTHFPGTFGGGTKVEIKTREDLKNVFPPEVAVFEPSEAEISHTQKATLVCLATGFYPDHVELSWWVNGKEVHSGVCTDPQPLKEQPALNDSRYCLSSRLRVSATFWQNPRNHFRCQVQFYGLSENDEWTQDRAKPVTQIVSAEAWGRADDVIKIHWQEKKSNTILGSQEGNTMKTNDTYMKFSWLTVPEKSLDKEHRCIVRHENNKNGVDQEIIFPPIKTDVITMDPKDNCSKDANDTLLLQLTNTSAYYMYLLLLLKSVVYFAIITCCLLRRTAFCCNGEKS

SEQ ID NO: 15633 - protein, 733 aa, synthetic construct
MALPVTALLLPLALLLHAARPDELVMTQSPSSLTVTAGEKVTMSCKSSQSLLNSGNQKNYLTWYQQKPGQPPKLLIYWASTRESGVPDRFTGSGSGTDFTLTISSVQAEDLAVYYCQNDYSYPLTFGAGTKLEIKLEIQNPDPAVYQLRDSKSSDKSVCLFTDFDSQTNVSQSKDSDVYITDKCVLDMRSMDFKSNSAVAWSNKSDFACANAFNNSIIPEDTFFPSPESSDSTDHVKPKETENTKQPSKSCHKPKAIVHTEKVNMMSLTVLGLRMLFAKTVAVNFLLTAKLFFLRAKRSGSGVKQTLNFDLLKLAGDVESNPGPTSMDWIWRILFLVGAATGAHSFEEVQLLEQSGAELVRPGTSVKISCKASGYAFTNYWLGWVKQRPGHGLEWIGDIFPGSGNIHYNEKFKGKATLTADKSSSTAYMQLSSLTFEDSAVYFCARLRNWDEPMDYWGQGTTVTVSSTREDLKNVFPPEVAVFEPSEAEISHTQKATLVCLATGFYPDHVELSWWVNGKEVHSGVCTDPQPLKEQPALNDSRYCLSSRLRVSATFWQNPRNHFRCQVQFYGLSENDEWTQDRAKPVTQIVSAEAWGRADDVIKIHWQEKKSNTILGSQEGNTMKTNDTYMKFSWLTVPEKSLDKEHRCIVRHENNKNGVDQEIIFPPIKTDVITMDPKDNCSKDANDTLLLQLTNTSAYYMYLLLLLKSVVYFAIITCCLLRRTAFCCNGEKS

SEQ ID NO: 15634 - protein, 734 aa, synthetic construct
MALPVTALLLPLALLLHAARPDELQMTQSPSSLSASVGDRVTITCRASQSISSYLNWYQQKPGQPPKLLIYWASTRESGVPDRFSGSESGTNYTLTISSLQPEDFATYFCQQSDSLPITFGQGTRLDIQLEIQNPDPAVYQLRDSKSSDKSVCLFTDFDSQTNVSQSKDSDVYITDKCVLDMRSMDFKSNSAVAWSNKSDFACANAFNNSIIPEDTFFPSPESSDSTDHVKPKETENTKQPSKSCHKPKAIVHTEKVNMMSLTVLGLRMLFAKTVAVNFLLTAKLFFLRAKRSGSGVKQTLNFDLLKLAGDVESNPGPTSMDWIWRILFLVGAATGAHSFEEVQLLESGGGVVQPGRSLRLSCAASGFTFSSYGMHWVRQAPGKGLEWVAVISYDGSNKYYADSVKGRFTISRDNSKNTLYLQMNSLRAEDTAVYYCAKDMGWGSGWRPYYYYGMDVWGQGTTVTVSSTREDLKNVFPPEVAVFEPSEAEISHTQKATLVCLATGFYPDHVELSWWVNGKEVHSGVCTDPQPLKEQPALNDSRYCLSSRLRVSATFWQNPRNHFRCQVQFYGLSENDEWTQDRAKPVTQIVSAEAWGRADDVIKIHWQEKKSNTILGSQEGNTMKTNDTYMKFSWLTVPEKSLDKEHRCIVRHENNKNGVDQEIIFPPIKTDVITMDPKDNCSKDANDTLLLQLTNTSAYYMYLLLLLKSVVYFAIITCCLLRRTAFCCNGEKS

SEQ ID NO: 15635 - protein, 731 aa, synthetic construct
MALPVTALLLPLALLLHAARPDDIQMTQSPSSLSASVGDRVTITCRASQSISSYLNWYQQKPGKAPKLLIYAASSLQSGVPSRFSGSGSGTDFTLTISSLQPEDLATYYCQQSYSTPFTFGPGTKVDIKLEIQNPDPAVYQLRDSKSSDKSVCLFTDFDSQTNVSQSKDSDVYITDKCVLDMRSMDFKSNSAVAWSNKSDFACANAFNNSIIPEDTFFPSPESSDSTDHVKPKETENTKQPSKSCHKPKAIVHTEKVNMMSLTVLGLRMLFAKTVAVNFLLTAKLFFLRAKRSGSGVKQTLNFDLLKLAGDVESNPGPTSMDWIWRILFLVGAATGAHSFEVHEVQLVQSGAEVKKPGSSVKVSCKASGGTFSSYAISWVRQAPGQGLEWMGGIIPIFGTANYAQKFQGRVTITADKSTSTAYMELSSLRSEDTAVYYCATFALFGFREQAFDIWGQGTTVTVSSTREDLKNVFPPEVAVFEPSEAEISHTQKATLVCLATGFYPDHVELSWWVNGKEVHSGVCTDPQPLKEQPALNDSRYCLSSRLRVSATFWQNPRNHFRCQVQFYGLSENDEWTQDRAKPVTQIVSAEAWGRADDVIKIHWQEKKSNTILGSQEGNTMKTNDTYMKFSWLTVPEKSLDKEHRCIVRHENNKNGVDQEIIFPPIKTDVITMDPKDNCSKDANDTLLLQLTNTSAYYMYLLLLLKSVVYFAIITCCLLRRTAFCCNGEKS

SEQ ID NO: 15636 - protein, 729 aa, synthetic construct
MALPVTALLLPLALLLHAARPDIVLTQSPLSLAVSLGQPAIISCKASQSVSFAGTSLMHWYHQKPGQQPRLLIYRASNLEAGVPDRFSGSGSKTDFTLTISPVEAEDAATYYCQQSREYPYTFGGGTKLEIKRLEIQNPDPAVYQLRDSKSSDKSVCLFTDFDSQTNVSQSKDSDVYITDKCVLDMRSMDFKSNSAVAWSNKSDFACANAFNNSIIPEDTFFPSPESSDSTDHVKPKETENTKQPSKSCHKPKAIVHTEKVNMMSLTVLGLRMLFAKTVAVNFLLTAKLFFLRAKRSGSGVKQTLNFDLLKLAGDVESNPGPTSMDWIWRILFLVGAATGAHSFEQVQLVQSGAEVVKPGASVKISCKASGYTFTGYFMNWVKQSPGQSLEWIGRIHPYDGDTFYNQKFQGKATLTVDKSSNTAHMELLSLTSEDFAVYYCTRYDGSRAMDYWGQGTTVTVSSTREDLKNVFPPEVAVFEPSEAEISHTQKATLVCLATGFYPDHVELSWWVNGKEVHSGVCTDPQPLKEQPALNDSRYCLSSRLRVSATFWQNPRNHFRCQVQFYGLSENDEWTQDRAKPVTQIVSAEAWGRADDVIKIHWQEKKSNTILGSQEGNTMKTNDTYMKFSWLTVPEKSLDKEHRCIVRHENNKNGVDQEIIFPPIKTDVITMDPKDNCSKDANDTLLLQLTNTSAYYMYLLLLLKSVVYFAIITCCLLRRTAFCCNGEKS

SEQ ID NO: 15637 - protein, 726 aa, synthetic construct
MALPVTALLLPLALLLHAARPDDVVMTQTPLSLPVTPGEPASISCRSSQSLVHRNGNTYLHWYLQKPGQSPKLLIHKVSNRFSGVPDRFSGSGSGTDFTLKISRVEAEDLGVYFCSQSTHVPPLTFGAGTKLELKLEIQNPDPAVYQLRDSKSSDKSVCLFTDFDSQTNVSQSKDSDVYITDKCVLDMRSMDFKSNSAVAWSNKSDFACANAFNNSIIPEDTFFPSPESSDSTDHVKPKETENTKQPSKSCHKPKAIVHTEKVNMMSLTVLGLRMLFAKTVAVNFLLTAKLFFLRAKRSGSGVKQTLNFDLLKLAGDVESNPGPTSMDWIWRILFLVGAATGAHSFEEVQLVQSGAEVEKPGASVKISCKASGSSFTGYNMNWVRQNIGKSLEWIGAIDPYYGGTSYNQKFKGRATLTVDKSTSTAYMHLKSLRSEDTAVYYCVSGMEYWGQGTSVTVSSTREDLKNVFPPEVAVFEPSEAEISHTQKATLVCLATGFYPDHVELSWWVNGKEVHSGVCTDPQPLKEQPALNDSRYCLSSRLRVSATFWQNPRNHFRCQVQFYGLSENDEWTQDRAKPVTQIVSAEAWGRADDVIKIHWQEKKSNTILGSQEGNTMKTNDTYMKFSWLTVPEKSLDKEHRCIVRHENNKNGVDQEIIFPPIKTDVITMDPKDNCSKDANDTLLLQLTNTSAYYMYLLLLLKSVVYFAIITCCLLRRTAFCCNGEKS

SEQ ID NO: 15638 - protein, 724 aa, synthetic construct
MALPVTALLLPLALLLHAARPDEIVMTQTPATLSVSAGERVTITCKASQSVSNDVTWYQQKPGQAPRLLIYSASNRYSGVPARFSGSGYGTEFTFTISSVQSEDFAVYFCQQDYSSFGQGTKLEIKRLEIQNPDPAVYQLRDSKSSDKSVCLFTDFDSQTNVSQSKDSDVYITDKCVLDMRSMDFKSNSAVAWSNKSDFACANAFNNSIIPEDTFFPSPESSDSTDHVKPKETENTKQPSKSCHKPKAIVHTEKVNMMSLTVLGLRMLFAKTVAVNFLLTAKLFFLRAKRSGSGVKQTLNFDLLKLAGDVESNPGPTSMDWIWRILFLVGAATGAHSFEQVQLVESGPGVVQPGRSLRISCAVSGFSVTNYGVHWVRQPPGKGLEWLGVIWAGGITNYNSAFMSRLTISKDNSKNTVYLQMNSLRAEDTAMYYCASRGGHYGYALDYWGQGTLVTVSSTREDLKNVFPPEVAVFEPSEAEISHTQKATLVCLATGFYPDHVELSWWVNGKEVHSGVCTDPQPLKEQPALNDSRYCLSSRLRVSATFWQNPRNHFRCQVQFYGLSENDEWTQDRAKPVTQIVSAEAWGRADDVIKIHWQEKKSNTILGSQEGNTMKTNDTYMKFSWLTVPEKSLDKEHRCIVRHENNKNGVDQEIIFPPIKTDVITMDPKDNCSKDANDTLLLQLTNTSAYYMYLLLLLKSVVYFAIITCCLLRRTAFCCNGEKS

SEQ ID NO: 15639 - protein, 726 aa, synthetic construct
MALPVTALLLPLALLLHAARPDIQMTQTASSLPASLGDRVTISCSASQDISNYLNWYQQKPDGTVKLLIFYSSNLHSGVPSRFSGGGSGTDYSLTISNLEPEDIATYFCHQYSKLPWTFGGGTKLEIKRLEIQNPDPAVYQLRDSKSSDKSVCLFTDFDSQTNVSQSKDSDVYITDKCVLDMRSMDFKSNSAVAWSNKSDFACANAFNNSIIPEDTFFPSPESSDSTDHVKPKETENTKQPSKSCHKPKAIVHTEKVNMMSLTVLGLRMLFAKTVAVNFLLTAKLFFLRAKRSGSGVKQTLNFDLLKLAGDVESNPGPTSMDWIWRILFLVGAATGAHSFEEVTLVESGGDFVKPGGSLKVSCAASGFAFSHYAMSWVRQTPAKRLEWVAYISSGGSGTYYSDSVKGRFTISRDNAKNTLYLQMRSLRSEDSAMYFCTRVKLGTYYFDSWGQGTTLTVSSTREDLKNVFPPEVAVFEPSEAEISHTQKATLVCLATGFYPDHVELSWWVNGKEVHSGVCTDPQPLKEQPALNDSRYCLSSRLRVSATFWQNPRNHFRCQVQFYGLSENDEWTQDRAKPVTQIVSAEAWGRADDVIKIHWQEKKSNTILGSQEGNTMKTNDTYMKFSWLTVPEKSLDKEHRCIVRHENNKNGVDQEIIFPPIKTDVITMDPKDNCSKDANDTLLLQLTNTSAYYMYLLLLLKSVVYFAIITCCLLRRTAFCCNGEKS

SEQ ID NO: 15640 - protein, 728 aa, synthetic construct
MALPVTALLLPLALLLHAARPQFVLTQSPSASAALGASAKLTCTLSSAHKTYTIDWYQQQKGKAPRYLIQVKSDGTYTKATGVPDRFSGSSSGADRYLIIPSVQADDEADYYCGTDYTGGYVFGGGTQLTVTLEIQNPDPAVYQLRDSKSSDKSVCLFTDFDSQTNVSQSKDSDVYITDKCVLDMRSMDFKSNSAVAWSNKSDFACANAFNNSIIPEDTFFPSPESSDSTDHVKPKETENTKQPSKSCHKPKAIVHTEKVNMMSLTVLGLRMLFAKTVAVNFLLTAKLFFLRAKRSGSGVKQTLNFDLLKLAGDVESNPGPTSMDWIWRILFLVGAATGAHSFEEQLKESGGGLFKPTDTLTLTCTVSGFSLSYYGVNWVRQAPGNGLEWIGTIGGSGDTYYASWAKSRSTIIRNTNENTVTLKMTSLTAADTATYFCVRYANIGYEYFNVWGPGTLVTVSSTREDLKNVFPPEVAVFEPSEAEISHTQKATLVCLATGFYPDHVELSWWVNGKEVHSGVCTDPQPLKEQPALNDSRYCLSSRLRVSATFWQNPRNHFRCQVQFYGLSENDEWTQDRAKPVTQIVSAEAWGRADDVIKIHWQEKKSNTILGSQEGNTMKTNDTYMKFSWLTVPEKSLDKEHRCIVRHENNKNGVDQEIIFPPIKTDVITMDPKDNCSKDANDTLLLQLTNTSAYYMYLLLLLKSVVYFAIITCCLLRRTAFCCNGEKS

SEQ ID NO: 15641 - protein, 733 aa, synthetic construct
MALPVTALLLPLALLLHAARPQFVLTQSPSVSAALGASAKLTCTLSSAHKTYTIDWYQQQQGEAPRYLMQVKSDGSYTKGTGVPDRFSGSSSGADRYLIIPSVQADDEAGYVCGADDNGGYVFGGGTQLTVTLEIQNPDPAVYQLRDSKSSDKSVCLFTDFDSQTNVSQSKDSDVYITDKCVLDMRSMDFKSNSAVAWSNKSDFACANAFNNSIIPEDTFFPSPESSDSTDHVKPKETENTKQPSKSCHKPKAIVHTEKVNMMSLTVLGLRMLFAKTVAVNFLLTAKLFFLRAKRSGSGVKQTLNFDLLKLAGDVESNPGPTSMDWIWRILFLVGAATGAHSFEQSVKESEGGLFKPTDTLTLTCTVSGFSLSRHALTWVRQAPGNGLEWIGAIDNAGTTYYASWAKSRSTITRNTDLHTVTLKMTSLTASDTATYFCARVFYDINSGYYLDGMDLWGPGTLVTVSSTREDLKNVFPPEVAVFEPSEAEISHTQKATLVCLATGFYPDHVELSWWVNGKEVHSGVCTDPQPLKEQPALNDSRYCLSSRLRVSATFWQNPRNHFRCQVQFYGLSENDEWTQDRAKPVTQIVSAEAWGRADDVIKIHWQEKKSNTILGSQEGNTMKTNDTYMKFSWLTVPEKSLDKEHRCIVRHENNKNGVDQEIIFPPIKTDVITMDPKDNCSKDANDTLLLQLTNTSAYYMYLLLLLKSVVYFAIITCCLLRRTAFCCNGEKS

SEQ ID NO: 15642 - protein, 727 aa, synthetic construct
MALPVTALLLPLALLLHAARPDIQMTQSPSSLSASVGDRVTITCRASQGISSWLAWYQQKPEKAPKSLIYAASSLQSGVPSRFSGSGSGTDFTLTISSLQPEDFATYYCQQYNSYPPTFGGGTKVEIKLEIQNPDPAVYQLRDSKSSDKSVCLFTDFDSQTNVSQSKDSDVYITDKCVLDMRSMDFKSNSAVAWSNKSDFACANAFNNSIIPEDTFFPSPESSDSTDHVKPKETENTKQPSKSCHKPKAIVHTEKVNMMSLTVLGLRMLFAKTVAVNFLLTAKLFFLRAKRSGSGVKQTLNFDLLKLAGDVESNPGPTSMDWIWRILFLVGAATGAHSFEEVQLVESGGGLVQPGESLRLSCVASGFTFSRYKMNWVRQAPGKGLEWVSYISRSGRDIYYADSVKGRFTISRDNAKNSLYLQMNSLRDEDTAVYYCAGTVTTYYYFGMDVWGHGTTVTVSSTREDLKNVFPPEVAVFEPSEAEISHTQKATLVCLATGFYPDHVELSWWVNGKEVHSGVCTDPQPLKEQPALNDSRYCLSSRLRVSATFWQNPRNHFRCQVQFYGLSENDEWTQDRAKPVTQIVSAEAWGRADDVIKIHWQEKKSNTILGSQEGNTMKTNDTYMKFSWLTVPEKSLDKEHRCIVRHENNKNGVDQEIIFPPIKTDVITMDPKDNCSKDANDTLLLQLTNTSAYYMYLLLLLKSVVYFAIITCCLLRRTAFCCNGEKS

SEQ ID NO: 15643 - protein, 728 aa, synthetic construct
MALPVTALLLPLALLLHAARPDIQMTQSPSSLSASVGDRVTITCRASQGISSWLAWYQQKPEKAPKSLIYAASSLQSGVPSRFSGSGSGTDFTLTISSLQPEDFATYYCQQYNSYPPTFGGGTKVEIKLEIQNPDPAVYQLRDSKSSDKSVCLFTDFDSQTNVSQSKDSDVYITDKCVLDMRSMDFKSNSAVAWSNKSDFACANAFNNSIIPEDTFFPSPESSDSTDHVKPKETENTKQPSKSCHKPKAIVHTEKVNMMSLTVLGLRMLFAKTVAVNFLLTAKLFFLRAKRSGSGVKQTLNFDLLKLAGDVESNPGPTSMDWIWRILFLVGAATGAHSFEEVQLVESGGGSVQPGESLRLSCVASGFTFSRYKMNWVRQAPGKGLEWVSYISRSGRDIYYADSVKGRFTISRDNAKNSLYLQMNSLRDEDTAVYYCAGTVTTYYYDFGMDVWGQGTTVTVSSTREDLKNVFPPEVAVFEPSEAEISHTQKATLVCLATGFYPDHVELSWWVNGKEVHSGVCTDPQPLKEQPALNDSRYCLSSRLRVSATFWQNPRNHFRCQVQFYGLSENDEWTQDRAKPVTQIVSAEAWGRADDVIKIHWQEKKSNTILGSQEGNTMKTNDTYMKFSWLTVPEKSLDKEHRCIVRHENNKNGVDQEIIFPPIKTDVITMDPKDNCSKDANDTLLLQLTNTSAYYMYLLLLLKSVVYFAIITCCLLRRTAFCCNGEKS

SEQ ID NO: 15644 - protein, 726 aa, synthetic construct
MALPVTALLLPLALLLHAARPQSVLTQPPSASGTPGQRVTISCSGSRSNVGGNYVFWYQQVPGATPKLLIYRSNQRPSGVPDRFAGSKSGSSASLAISGLRSEDEADYYCATWDDSLSGFVFGTGTKVTVLGLEIQNPDPAVYQLRDSKSSDKSVCLFTDFDSQTNVSQSKDSDVYITDKCVLDMRSMDFKSNSAVAWSNKSDFACANAFNNSIIPEDTFFPSPESSDSTDHVKPKETENTKQPSKSCHKPKAIVHTEKVNMMSLTVLGLRMLFAKTVAVNFLLTAKLFFLRAKRSGSGVKQTLNFDLLKLAGDVESNPGPTSMDWIWRILFLVGAATGAHSFEVQLVESGGGLVKPGGSLRLSCAASGFTFSDYYMSWIRQAPGKGLEWVSYISSSGSTIYYADSVKGRFTISRDNAKNSLYLQMNSLRAEDTAVYYCARGYGKAYDQWGQGTLVTVSSTREDLKNVFPPEVAVFEPSEAEISHTQKATLVCLATGFYPDHVELSWWVNGKEVHSGVCTDPQPLKEQPALNDSRYCLSSRLRVSATFWQNPRNHFRCQVQFYGLSENDEWTQDRAKPVTQIVSAEAWGRADDVIKIHWQEKKSNTILGSQEGNTMKTNDTYMKFSWLTVPEKSLDKEHRCIVRHENNKNGVDQEIIFPPIKTDVITMDPKDNCSKDANDTLLLQLTNTSAYYMYLLLLLKSVVYFAIITCCLLRRTAFCCNGEKS

SEQ ID NO: 15645 - protein, 725 aa, synthetic construct
MALPVTALLLPLALLLHAARPQSVVTQPPSMSAAPGQQVTISCSGGNSNIERNYVSWYLQLPGTAPKLVIFDNDRRPSGIPDRFSGSKSGTSATLGITGLQTGDEADYYCGTWDSSLRGWVFGGGTKLTVLGLEIQNPDPAVYQLRDSKSSDKSVCLFTDFDSQTNVSQSKDSDVYITDKCVLDMRSMDFKSNSAVAWSNKSDFACANAFNNSIIPEDTFFPSPESSDSTDHVKPKETENTKQPSKSCHKPKAIVHTEKVNMMSLTVLGLRMLFAKTVAVNFLLTAKLFFLRAKRSGSGVKQTLNFDLLKLAGDVESNPGPTSMDWIWRILFLVGAATGAHSFEVQLVESGGGLIQPGGSLRLSCAASGFTFSNYAMNWVRQAPGKGLEWVSTINGRGSSTIYADSVKGRFTISRDNSKNTLYLQMNSLRAEDTATYYCARYISRGLGDSWGQGTLVTVTREDLKNVFPPEVAVFEPSEAEISHTQKATLVCLATGFYPDHVELSWWVNGKEVHSGVCTDPQPLKEQPALNDSRYCLSSRLRVSATFWQNPRNHFRCQVQFYGLSENDEWTQDRAKPVTQIVSAEAWGRADDVIKIHWQEKKSNTILGSQEGNTMKTNDTYMKFSWLTVPEKSLDKEHRCIVRHENNKNGVDQEIIFPPIKTDVITMDPKDNCSKDANDTLLLQLTNTSAYYMYLLLLLKSVVYFAIITCCLLRRTAFCCNGEKS

SEQ ID NO: 15646 - protein, 726 aa, synthetic construct
MALPVTALLLPLALLLHAARPDVVMTQTPLSLPVSLGDQASISCRSSQSLVHSNGNTYLHWYLQKPGQSPKLLIYKVSNRFSGVPDRFSGSGSGTDFTLKISRVEAEDLGVYFCSQNTPVPPKFGSGTKLEIKLEIQNPDPAVYQLRDSKSSDKSVCLFTDFDSQTNVSQSKDSDVYITDKCVLDMRSMDFKSNSAVAWSNKSDFACANAFNNSIIPEDTFFPSPESSDSTDHVKPKETENTKQPSKSCHKPKAIVHTEKVNMMSLTVLGLRMLFAKTVAVNFLLTAKLFFLRAKRSGSGVKQTLNFDLLKLAGDVESNPGPTSMDWIWRILFLVGAATGAHSFEQVQLQQSGAELVRPGASVKLSCKASGYTFNDYEMHWVKQTPVHGLKWIGALEPKTGDTAYSQKFKGKATLTADKSSSTAYMELRSLTSEDSAVYYCTSCYYYTYSGQGTLVTVSATREDLKNVFPPEVAVFEPSEAEISHTQKATLVCLATGFYPDHVELSWWVNGKEVHSGVCTDPQPLKEQPALNDSRYCLSSRLRVSATFWQNPRNHFRCQVQFYGLSENDEWTQDRAKPVTQIVSAEAWGRADDVIKIHWQEKKSNTILGSQEGNTMKTNDTYMKFSWLTVPEKSLDKEHRCIVRHENNKNGVDQEIIFPPIKTDVITMDPKDNCSKDANDTLLLQLTNTSAYYMYLLLLLKSVVYFAIITCCLLRRTAFCCNGEKS

SEQ ID NO: 15647 - protein, 725 aa, synthetic construct
MALPVTALLLPLALLLHAARPDIQLTQSPSSLSASVGDRVTITCRASQGIRNDLGWYQQKPGKAPKRLIYAASSLQNGVPSRFSGSGSGTEFTLTISSLQPEDFATYYCLQHNTYPAFGQGTKVEIKRLEIQNPDPAVYQLRDSKSSDKSVCLFTDFDSQTNVSQSKDSDVYITDKCVLDMRSMDFKSNSAVAWSNKSDFACANAFNNSIIPEDTFFPSPESSDSTDHVKPKETENTKQPSKSCHKPKAIVHTEKVNMMSLTVLGLRMLFAKTVAVNFLLTAKLFFLRAKRSGSGVKQTLNFDLLKLAGDVESNPGPTSMDWIWRILFLVGAATGAHSFEQVQLQESGPGLVKPSQTLSLTCTVSGGSISSFNYYWSWIRHHPGKGLEWIGYIYYSGSTYSNPSLKSRVTISVDTSKNQFSLTLSSVTAADTAVYYCARGYNWNYFDYWGQGTLVTVSSTREDLKNVFPPEVAVFEPSEAEISHTQKATLVCLATGFYPDHVELSWWVNGKEVHSGVCTDPQPLKEQPALNDSRYCLSSRLRVSATFWQNPRNHFRCQVQFYGLSENDEWTQDRAKPVTQIVSAEAWGRADDVIKIHWQEKKSNTILGSQEGNTMKTNDTYMKFSWLTVPEKSLDKEHRCIVRHENNKNGVDQEIIFPPIKTDVITMDPKDNCSKDANDTLLLQLTNTSAYYMYLLLLLKSVVYFAIITCCLLRRTAFCCNGEKS

SEQ ID NO: 15648 - protein, 727 aa, synthetic construct
MALPVTALLLPLALLLHAARPDDIVLTQSPASLAVSLGQSVTISCRASESVEYYGTSLMQWYQQKPGQPPKLLIYATSNVESGVPARFSGSGSGTDFSLNIHPVEEDDIAMYFCQQSRKLPSTFGGGTKLEIKLEIQNPDPAVYQLRDSKSSDKSVCLFTDFDSQTNVSQSKDSDVYITDKCVLDMRSMDFKSNSAVAWSNKSDFACANAFNNSIIPEDTFFPSPESSDSTDHVKPKETENTKQPSKSCHKPKAIVHTEKVNMMSLTVLGLRMLFAKTVAVNFLLTAKLFFLRAKRSGSGVKQTLNFDLLKLAGDVESNPGPTSMDWIWRILFLVGAATGAHSFEDVRLQESGPGQVKPSQTVSLTCSVTGYSITNGNHWWNWIRQVSGSKLEWIGYISSSGSTDSNPSLKSRISITRDTSKNQLFLQLNSVTTEDIATYYCARGYYFDYWGQGTTLTVSSTREDLKNVFPPEVAVFEPSEAEISHTQKATLVCLATGFYPDHVELSWWVNGKEVHSGVCTDPQPLKEQPALNDSRYCLSSRLRVSATFWQNPRNHFRCQVQFYGLSENDEWTQDRAKPVTQIVSAEAWGRADDVIKIHWQEKKSNTILGSQEGNTMKTNDTYMKFSWLTVPEKSLDKEHRCIVRHENNKNGVDQEIIFPPIKTDVITMDPKDNCSKDANDTLLLQLTNTSAYYMYLLLLLKSVVYFAIITCCLLRRTAFCCNGEKS

SEQ ID NO: 15649 - protein, 726 aa, synthetic construct
MALPVTALLLPLALLLHAARPDIQMTQSPSSLSASVGDRVTITCRASQDVNTAVAWYQQKPGKAPKLLIYSASFLESGVPSRFSGSRSGTDFTLTISSLQPEDFATYYCQQHYTTPPTFGQTKVEIKRLEIQNPDPAVYQLRDSKSSDKSVCLFTDFDSQTNVSQSKDSDVYITDKCVLDMRSMDFKSNSAVAWSNKSDFACANAFNNSIIPEDTFFPSPESSDSTDHVKPKETENTKQPSKSCHKPKAIVHTEKVNMMSLTVLGLRMLFAKTVAVNFLLTAKLFFLRAKRSGSGVKQTLNFDLLKLAGDVESNPGPTSMDWIWRILFLVGAATGAHSFEEVQLVESGGGLVQPGGSLRLSCAASGFNIKDTYIHWVRQAPGKGLEWVARIYPTNGYTRYADSVKGRFTISADTSKNTAYLQMNSLRAEDTAVYYCSRWGGDGFYAMDVWGQGTLVTVSSTREDLKNVFPPEVAVFEPSEAEISHTQKATLVCLATGFYPDHVELSWWVNGKEVHSGVCTDPQPLKEQPALNDSRYCLSSRLRVSATFWQNPRNHFRCQVQFYGLSENDEWTQDRAKPVTQIVSAEAWGRADDVIKIHWQEKKSNTILGSQEGNTMKTNDTYMKFSWLTVPEKSLDKEHRCIVRHENNKNGVDQEIIFPPIKTDVITMDPKDNCSKDANDTLLLQLTNTSAYYMYLLLLLKSVVYFAIITCCLLRRTAFCCNGEKS

SEQ ID NO: 15650 - protein, 725 aa, synthetic construct
MALPVTALLLPLALLLHAARPDQSVLTQPPSVSVAPGKTARIPCEGNYIGSSNVHWYQQKPGQAPVLVIHFDSDRPSGIPDRFSGSNSGNMATLTISRVEAGDEADYYCQVWENHGWVFGGGTKLTVLSLEIQNPDPAVYQLRDSKSSDKSVCLFTDFDSQTNVSQSKDSDVYITDKCVLDMRSMDFKSNSAVAWSNKSDFACANAFNNSIIPEDTFFPSPESSDSTDHVKPKETENTKQPSKSCHKPKAIVHTEKVNMMSLTVLGLRMLFAKTVAVNFLLTAKLFFLRAKRSGSGVKQTLNFDLLKLAGDVESNPGPTSMDWIWRILFLVGAATGAHSFEEVQLVETGGGLVQPGESLRLSCAASGFTFSDYEMNWVRQAPGKGLEWVSYISSSGSTIYYADSVKGRFTIYRDNAKNSLYLQMNSLRAEDTALYYCARAWGVGPPDYWGQGTLVTVSSTREDLKNVFPPEVAVFEPSEAEISHTQKATLVCLATGFYPDHVELSWWVNGKEVHSGVCTDPQPLKEQPALNDSRYCLSSRLRVSATFWQNPRNHFRCQVQFYGLSENDEWTQDRAKPVTQIVSAEAWGRADDVIKIHWQEKKSNTILGSQEGNTMKTNDTYMKFSWLTVPEKSLDKEHRCIVRHENNKNGVDQEIIFPPIKTDVITMDPKDNCSKDANDTLLLQLTNTSAYYMYLLLLLKSVVYFAIITCCLLRRTAFCCNGEKS

SEQ ID NO: 15651 - protein, 733 aa, synthetic construct
MALPVTALLLPLALLLHAARPDIQMTQSPSSLSASVGDTVTITCQANGYLNWYQQRRGKAPKLLIYDGSKLERGVPSRFSGRRWGQEYNLTINNLQPEDIATYFCQVYEFVVPGTRLDLKRTVAAPLEIQNPDPAVYQLRDSKSSDKSVCLFTDFDSQTNVSQSKDSDVYITDKCVLDMRSMDFKSNSAVAWSNKSDFACANAFNNSIIPEDTFFPSPESSDSTDHVKPKETENTKQPSKSCHKPKAIVHTEKVNMMSLTVLGLRMLFAKTVAVNFLLTAKLFFLRAKRSGSGVKQTLNFDLLKLAGDVESNPGPTSMDWIWRILFLVGAATGAHSFEQVQLLQSGAAVTKPGASVRVSCEASGYNIRDYFIHWWRQAPGQGLQWVGWINPKTGQPNNPRQFQGRVSLTRHASWDFDTFSFYMDLKALRSDDTAVYFCARQRSDYWDFDVWGSGTQVTVSSASTKGPTREDLKNVFPPEVAVFEPSEAEISHTQKATLVCLATGFYPDHVELSWWVNGKEVHSGVCTDPQPLKEQPALNDSRYCLSSRLRVSATFWQNPRNHFRCQVQFYGLSENDEWTQDRAKPVTQIVSAEAWGRADDVIKIHWQEKKSNTILGSQEGNTMKTNDTYMKFSWLTVPEKSLDKEHRCIVRHENNKNGVDQEIIFPPIKTDVITMDPKDNCSKDANDTLLLQLTNTSAYYMYLLLLLKSVVYFAIITCCLLRRTAFCCNGEKS

SEQ ID NO: 15652 - protein, 739 aa, synthetic construct
MALPVTALLLPLALLLHAARPQSALTQPPSASGSPGQSITISCTGTSNNFVSWYQQHAGKAPKLVIYDVNKRPSGVPDRFSGSKSGNTASLTVSGLQTDDEAVYYCGSLVGNWDVIFGGGTKLTVLLEIQNPDPAVYQLRDSKSSDKSVCLFTDFDSQTNVSQSKDSDVYITDKCVLDMRSMDFKSNSAVAWSNKSDFACANAFNNSIIPEDTFFPSPESSDSTDHVKPKETENTKQPSKSCHKPKAIVHTEKVNMMSLTVLGLRMLFAKTVAVNFLLTAKLFFLRAKRSGSGVKQTLNFDLLKLAGDVESNPGPTSMDWIWRILFLVGAATGAHSFEQPQLQESGPTLVEASETLSLTCAVSGDSTAACNSFWGWVRQPPGKGLEWVGSLSHCASYWNRGWTYHNPSLKSRLTLALDTPKNLVFLKLNSVTAADTATYYCARFGGEVLRYTDWPKPAWVDLWGRGTLVTVSSTREDLKNVFPPEVAVFEPSEAEISHTQKATLVCLATGFYPDHVELSWWVNGKEVHSGVCTDPQPLKEQPALNDSRYCLSSRLRVSATFWQNPRNHFRCQVQFYGLSENDEWTQDRAKPVTQIVSAEAWGRADDVIKIHWQEKKSNTILGSQEGNTMKTNDTYMKFSWLTVPEKSLDKEHRCIVRHENNKNGVDQEIIFPPIKTDVITMDPKDNCSKDANDTLLLQLTNTSAYYMYLLLLLKSVVYFAIITCCLLRRTAFCCNGEKS

SEQ ID NO: 15653 - protein, 724 aa, synthetic construct
MALPVTALLLPLALLLHAARPEIVLTQSPGTLSLSPGETAIISCRTSQYGSLAWYQQRPGQAPRLVIYSGSTRAAGIPDRFSGSRWGPDYNLTISNLESGDFGVYYCQQYEFFGQGTKVQVDIKRLEIQNPDPAVYQLRDSKSSDKSVCLFTDFDSQTNVSQSKDSDVYITDKCVLDMRSMDFKSNSAVAWSNKSDFACANAFNNSIIPEDTFFPSPESSDSTDHVKPKETENTKQPSKSCHKPKAIVHTEKVNMMSLTVLGLRMLFAKTVAVNFLLTAKLFFLRAKRSGSGVKQTLNFDLLKLAGDVESNPGPTSMDWIWRILFLVGAATGAHSFEQVQLVQSGGQMKKPGESMRISCRASGYEFIDCTLNWIRLAPGKRPEWMGWLKPRGGAVNYARPLQGRVTMTRDVYSDTAFLELRSLTVDDTAVYFCTRGKNCDYNWDFEHWGRGTPVIVSSTREDLKNVFPPEVAVFEPSEAEISHTQKATLVCLATGFYPDHVELSWWVNGKEVHSGVCTDPQPLKEQPALNDSRYCLSSRLRVSATFWQNPRNHFRCQVQFYGLSENDEWTQDRAKPVTQIVSAEAWGRADDVIKIHWQEKKSNTILGSQEGNTMKTNDTYMKFSWLTVPEKSLDKEHRCIVRHENNKNGVDQEIIFPPIKTDVITMDPKDNCSKDANDTLLLQLTNTSAYYMYLLLLLKSVVYFAIITCCLLRRTAFCCNGEKS

SEQ ID NO: 15654 - protein, 734 aa, synthetic construct
MALPVTALLLPLALLLHAARPELVLTQSPGTLSLSAGERATLSCRASQSVSSGSLAWYQQKPGQAPRLLIYGASTRATGIPDRFSGSGSGTDFTLTIGRLEPEDLAVYYCQQYGTSPYTFGQGTKLEILEIQNPDPAVYQLRDSKSSDKSVCLFTDFDSQTNVSQSKDSDVYITDKCVLDMRSMDFKSNSAVAWSNKSDFACANAFNNSIIPEDTFFPSPESSDSTDHVKPKETENTKQPSKSCHKPKAIVHTEKVNMMSLTVLGLRMLFAKTVAVNFLLTAKLFFLRAKRSGSGVKQTLNFDLLKLAGDVESNPGPTSMDWIWRILFLVGAATGAHSFELEQSGAEVKKPGSSVQVSCKASGGTFSMYGFNWVRQAPGHGLEWMGGIIPIFGTSNYAQKFRGRVTFTADQATSTAYMELTNLRSDDTAVYYCARDFGPDWEDGDSYDGSGRGFFDFWGQGTLVTVSSTREDLKNVFPPEVAVFEPSEAEISHTQKATLVCLATGFYPDHVELSWWVNGKEVHSGVCTDPQPLKEQPALNDSRYCLSSRLRVSATFWQNPRNHFRCQVQFYGLSENDEWTQDRAKPVTQIVSAEAWGRADDVIKIHWQEKKSNTILGSQEGNTMKTNDTYMKFSWLTVPEKSLDKEHRCIVRHENNKNGVDQEIIFPPIKTDVITMDPKDNCSKDANDTLLLQLTNTSAYYMYLLLLLKSVVYFAIITCCLLRRTAFCCNGEKS

SEQ ID NO: 15655 - protein, 714 aa, synthetic construct
MALPVTALLLPLALLLHAARPDIQMTQSPSSLSASVGDRVTITCQASQDINNYLNWYQQKPGKAPKLLIYDASNLQTGVPSRFSGSGSGTDFTFTIEDIATYYCQQYTFGPGTKVDIKLEIQNPDPAVYQLRDSKSSDKSVCLFTDFDSQTNVSQSKDSDVYITDKCVLDMRSMDFKSNSAVAWSNKSDFACANAFNNSIIPEDTFFPSPESSDSTDHVKPKETENTKQPSKSCHKPKAIVHTEKVNMMSLTVLGLRMLFAKTVAVNFLLTAKLFFLRAKRSGSGVKQTLNFDLLKLAGDVESNPGPTSMDWIWRILFLVGAATGAHSFEEVQLLESGGGLVQPGGSLRLSCAASGFTFSWYSMTWVRQAPGKGLEWVSSIVPWGDFTQYADSVKGRFTISRDNSKNTLYLQMNSLRAEDTAVYYCAKGPGWGSFDLWGRGTLVTVSSTREDLKNVFPPEVAVFEPSEAEISHTQKATLVCLATGFYPDHVELSWWVNGKEVHSGVCTDPQPLKEQPALNDSRYCLSSRLRVSATFWQNPRNHFRCQVQFYGLSENDEWTQDRAKPVTQIVSAEAWGRADDVIKIHWQEKKSNTILGSQEGNTMKTNDTYMKFSWLTVPEKSLDKEHRCIVRHENNKNGVDQEIIFPPIKTDVITMDPKDNCSKDANDTLLLQLTNTSAYYMYLLLLLKSVVYFAIITCCLLRRTAFCCNGEKS

SEQ ID NO: 15656 - protein, 724 aa, synthetic construct
MALPVTALLLPLALLLHAARPDIQMTQSPSSLSASVGDRVTITCTASLSVSSTYLHWYQQKPGSSPKLWIYSTSNLASGVPSRFSGSGSGTSYTLTISSLQPEDFATYYCHQYHRSPLTFGGGTKVEIKRLEIQNPDPAVYQLRDSKSSDKSVCLFTDFDSQTNVSQSKDSDVYITDKCVLDMRSMDFKSNSAVAWSNKSDFACANAFNNSIIPEDTFFPSPESSDSTDHVKPKETENTKQPSKSCHKPKAIVHTEKVNMMSLTVLGLRMLFAKTVAVNFLLTAKLFFLRAKRSGSGVKQTLNFDLLKLAGDVESNPGPTSMDWIWRILFLVGAATGAHSFEEVQLVESGGGLVQPGGSLRLSCAASGFSLTKYGVHWVRQAPGKGLEWVGVKWAGGSTDYNSALMSRFTISKDNAKNSLYLQMNSLRAEDTAVYYCARDHRDAMDYWGQGTLVTVSSTREDLKNVFPPEVAVFEPSEAEISHTQKATLVCLATGFYPDHVELSWWVNGKEVHSGVCTDPQPLKEQPALNDSRYCLSSRLRVSATFWQNPRNHFRCQVQFYGLSENDEWTQDRAKPVTQIVSAEAWGRADDVIKIHWQEKKSNTILGSQEGNTMKTNDTYMKFSWLTVPEKSLDKEHRCIVRHENNKNGVDQEIIFPPIKTDVITMDPKDNCSKDANDTLLLQLTNTSAYYMYLLLLLKSVVYFAIITCCLLRRTAFCCNGEKS

SEQ ID NO: 15657 - protein, 728 aa, synthetic construct
MALPVTALLLPLALLLHAARPDIQMTQSPSSLSASVGDRVTITCKASQDVGTAVAWYQQKPGKAPKLLIYSASYRSTGVPSRFSGSGSGTDFTLTISSLQPEDFATYYCQHHYSAPWTFGGGTKVEIKLEIQNPDPAVYQLRDSKSSDKSVCLFTDFDSQTNVSQSKDSDVYITDKCVLDMRSMDFKSNSAVAWSNKSDFACANAFNNSIIPEDTFFPSPESSDSTDHVKPKETENTKQPSKSCHKPKAIVHTEKVNMMSLTVLGLRMLFAKTVAVNFLLTAKLFFLRAKRSGSGVKQTLNFDLLKLAGDVESNPGPTSMDWIWRILFLVGAATGAHSFEEVQLVESGGGLVQPGGSLRLSCAASGFTFSRNGMSWVRQAPGKGLEWVATVSSGGSYIYYADSVKGRFTISRDNAKNSLYLQMNSLRAEDTAVYYCARQGTTALATRFFDVWGQGTLVTVSSTREDLKNVFPPEVAVFEPSEAEISHTQKATLVCLATGFYPDHVELSWWVNGKEVHSGVCTDPQPLKEQPALNDSRYCLSSRLRVSATFWQNPRNHFRCQVQFYGLSENDEWTQDRAKPVTQIVSAEAWGRADDVIKIHWQEKKSNTILGSQEGNTMKTNDTYMKFSWLTVPEKSLDKEHRCIVRHENNKNGVDQEIIFPPIKTDVITMDPKDNCSKDANDTLLLQLTNTSAYYMYLLLLLKSVVYFAIITCCLLRRTAFCCNGEKS

SEQ ID NO: 15658 - protein, 724 aa, synthetic construct
MALPVTALLLPLALLLHAARPDIQMTQSPPSLSASVGGKVTITCKASQDIDRYMAWYQDKPGKGPKLLIHDTSTLQPGIPSRFSGSGSGRDYSFSISNLEPEDIATYYCLQYDNLWTFGGGTKLEIKRLEIQNPDPAVYQLRDSKSSDKSVCLFTDFDSQTNVSQSKDSDVYITDKCVLDMRSMDFKSNSAVAWSNKSDFACANAFNNSIIPEDTFFPSPESSDSTDHVKPKETENTKQPSKSCHKPKAIVHTEKVNMMSLTVLGLRMLFAKTVAVNFLLTAKLFFLRAKRSGSGVKQTLNFDLLKLAGDVESNPGPTSMDWIWRILFLVGAATGAHSFEQVQLVQSGAELVKPGASVKMSCKASGYIFTNYNIHWVKKSPGQGLEWIGAIYPGNGDAPYSQKFQDRATLTADTSSSTTYMELSSLTSEDSAVYYCVRANWDVAFAYWGQGTLVSVSSTREDLKNVFPPEVAVFEPSEAEISHTQKATLVCLATGFYPDHVELSWWVNGKEVHSGVCTDPQPLKEQPALNDSRYCLSSRLRVSATFWQNPRNHFRCQVQFYGLSENDEWTQDRAKPVTQIVSAEAWGRADDVIKIHWQEKKSNTILGSQEGNTMKTNDTYMKFSWLTVPEKSLDKEHRCIVRHENNKNGVDQEIIFPPIKTDVITMDPKDNCSKDANDTLLLQLTNTSAYYMYLLLLLKSVVYFAIITCCLLRRTAFCCNGEKS

SEQ ID NO: 15659 - protein, 725 aa, synthetic construct
MALPVTALLLPLALLLHAARPDIQMTQSPASLSASVGETVTITCRVSGNIHNYLAWYQQKQGKSPQLLVYNAKTLADGVPSRFSGSGSGTQYSLKINSLQPEDFGSYYCQHFWSNPYTFGGGTKLEIKLEIQNPDPAVYQLRDSKSSDKSVCLFTDFDSQTNVSQSKDSDVYITDKCVLDMRSMDFKSNSAVAWSNKSDFACANAFNNSIIPEDTFFPSPESSDSTDHVKPKETENTKQPSKSCHKPKAIVHTEKVNMMSLTVLGLRMLFAKTVAVNFLLTAKLFFLRAKRSGSGVKQTLNFDLLKLAGDVESNPGPTSMDWIWRILFLVGAATGAHSFEQVQLQQSGASVKVSCKASELVRPGTGYAFTNYLIEWVKQRPGQGLEWIGVINPGSGGTNYNEKFKGKATLTADKSSSTAYMQLSSLTSDDSAVYFCARYRSYDWYFDVWGAGTTVTVSSTREDLKNVFPPEVAVFEPSEAEISHTQKATLVCLATGFYPDHVELSWWVNGKEVHSGVCTDPQPLKEQPALNDSRYCLSSRLRVSATFWQNPRNHFRCQVQFYGLSENDEWTQDRAKPVTQIVSAEAWGRADDVIKIHWQEKKSNTILGSQEGNTMKTNDTYMKFSWLTVPEKSLDKEHRCIVRHENNKNGVDQEIIFPPIKTDVITMDPKDNCSKDANDTLLLQLTNTSAYYMYLLLLLKSVVYFAIITCCLLRRTAFCCNGEKS

SEQ ID NO: 15660 - protein, 724 aa, synthetic construct
MALPVTALLLPLALLLHAARPDIQMTQSFSSLSASVGDRVTITCRASQDISNYLNWYQQKPGKAPKLLIYYTSRLHSGVPSRFSGSGSGTDYTLTISSLQPEDFATYFCQQGNTLPWTFGGGTKLEIKRLEIQNPDPAVYQLRDSKSSDKSVCLFTDFDSQTNVSQSKDSDVYITDKCVLDMRSMDFKSNSAVAWSNKSDFACANAFNNSIIPEDTFFPSPESSDSTDHVKPKETENTKQPSKSCHKPKAIVHTEKVNMMSLTVLGLRMLFAKTVAVNFLLTAKLFFLRAKRSGSGVKQTLNFDLLKLAGDVESNPGPTSMDWIWRILFLVGAATGAHSFEEVQLVQSGGGLVQSGGSLRLSCRASGYTFTRYWMLWVRQRPGKGLEWVAEINPRNDRTNYNEKFKTRFTISVDRSKNTLYLQMDSLRAEDTAVYFCALGGGYAMDYWGQGTLVTVSSTREDLKNVFPPEVAVFEPSEAEISHTQKATLVCLATGFYPDHVELSWWVNGKEVHSGVCTDPQPLKEQPALNDSRYCLSSRLRVSATFWQNPRNHFRCQVQFYGLSENDEWTQDRAKPVTQIVSAEAWGRADDVIKIHWQEKKSNTILGSQEGNTMKTNDTYMKFSWLTVPEKSLDKEHRCIVRHENNKNGVDQEIIFPPIKTDVITMDPKDNCSKDANDTLLLQLTNTSAYYMYLLLLLKSVVYFAIITCCLLRRTAFCCNGEKS

SEQ ID NO: 15661 - protein, 725 aa, synthetic construct
MALPVTALLLPLALLLHAARPDIQMTQSPASLSASVGETVTIICRASVNIYSYLAWYQQKQGKSPQLLVYNAKILAEGVPSRFSGSGSGTQFSLKINSLQPEDFGSYYCQHHYGTFTFGSGTKLEIKRLEIQNPDPAVYQLRDSKSSDKSVCLFTDFDSQTNVSQSKDSDVYITDKCVLDMRSMDFKSNSAVAWSNKSDFACANAFNNSIIPEDTFFPSPESSDSTDHVKPKETENTKQPSKSCHKPKAIVHTEKVNMMSLTVLGLRMLFAKTVAVNFLLTAKLFFLRAKRSGSGVKQTLNFDLLKLAGDVESNPGPTSMDWIWRILFLVGAATGAHSFEQVQLKESGPGLVAPSQSLSITCTISGFSLTSYGVHWVRQPPGKGLEWLVVIWSDGSTTYNSALKSRLSISKDNSKSQVFLKMNSLQTDDTAIYYCASHYGSTLAFASWGHGTLVTVSAATREDLKNVFPPEVAVFEPSEAEISHTQKATLVCLATGFYPDHVELSWWVNGKEVHSGVCTDPQPLKEQPALNDSRYCLSSRLRVSATFWQNPRNHFRCQVQFYGLSENDEWTQDRAKPVTQIVSAEAWGRADDVIKIHWQEKKSNTILGSQEGNTMKTNDTYMKFSWLTVPEKSLDKEHRCIVRHENNKNGVDQEIIFPPIKTDVITMDPKDNCSKDANDTLLLQLTNTSAYYMYLLLLLKSVVYFAIITCCLLRRTAFCCNGEKS

SEQ ID NO: 15662 - protein, 733 aa, synthetic construct
MALPVTALLLPLALLLHAARPDIVMTQSHKFMSTSVGDRVSVTCKASQNVGNNVAWYQQKPGQSPKVLIYSASYRYSGVPDRFTGSGSGTDFTLTISNVQSEDLAEYFCQQYNTYPFTFGSGTKLEIKLEIQNPDPAVYQLRDSKSSDKSVCLFTDFDSQTNVSQSKDSDVYITDKCVLDMRSMDFKSNSAVAWSNKSDFACANAFNNSIIPEDTFFPSPESSDSTDHVKPKETENTKQPSKSCHKPKAIVHTEKVNMMSLTVLGLRMLFAKTVAVNFLLTAKLFFLRAKRSGSGVKQTLNFDLLKLAGDVESNPGPTSMDWIWRILFLVGAATGAHSFEEVQLEESGGGLVQPGGSMKLSCVASGFTFSNYWMNWVRQSPEKGLEWVAEIRFKSHNYATHFAESVKGRFTISRDDSKSSVYLQMNNLRAEDTGIYYCTRRIGNSDYDWWYFDVWGAGTSVTVSSASTREDLKNVFPPEVAVFEPSEAEISHTQKATLVCLATGFYPDHVELSWWVNGKEVHSGVCTDPQPLKEQPALNDSRYCLSSRLRVSATFWQNPRNHFRCQVQFYGLSENDEWTQDRAKPVTQIVSAEAWGRADDVIKIHWQEKKSNTILGSQEGNTMKTNDTYMKFSWLTVPEKSLDKEHRCIVRHENNKNGVDQEIIFPPIKTDVITMDPKDNCSKDANDTLLLQLTNTSAYYMYLLLLLKSVVYFAIITCCLLRRTAFCCNGEKS

SEQ ID NO: 15663 - protein, 726 aa, synthetic construct
MALPVTALLLPLALLLHAARPDQIVLTQSPAIMSASPGEKVTISCSASSSVSYMYWYQQKPGSSPKPWIYRTSNLASGVPARFSGSGSGTSYSLTISNMEAEDAAAYYCQQYHSYPTTFGGGTKLEVKLEIQNPDPAVYQLRDSKSSDKSVCLFTDFDSQTNVSQSKDSDVYITDKCVLDMRSMDFKSNSAVAWSNKSDFACANAFNNSIIPEDTFFPSPESSDSTDHVKPKETENTKQPSKSCHKPKAIVHTEKVNMMSLTVLGLRMLFAKTVAVNFLLTAKLFFLRAKRSGSGVKQTLNFDLLKLAGDVESNPGPTSMDWIWRILFLVGAATGAHSFEEVQLVESGGGLVQPKGSLKLSCAASGFSFNTYAMNWVRQAPGKGLEWIAHIRSKSNNFATYYADSVKDRFSISRDASENILFLQMNNLKTEDTAMYYCVRQGGDFPMDYWGQGTSVTVSSTREDLKNVFPPEVAVFEPSEAEISHTQKATLVCLATGFYPDHVELSWWVNGKEVHSGVCTDPQPLKEQPALNDSRYCLSSRLRVSATFWQNPRNHFRCQVQFYGLSENDEWTQDRAKPVTQIVSAEAWGRADDVIKIHWQEKKSNTILGSQEGNTMKTNDTYMKFSWLTVPEKSLDKEHRCIVRHENNKNGVDQEIIFPPIKTDVITMDPKDNCSKDANDTLLLQLTNTSAYYMYLLLLLKSVVYFAIITCCLLRRTAFCCNGEKS

SEQ ID NO: 15664 - protein, 725 aa, synthetic construct
MALPVTALLLPLALLLHAARPDDIQMTQSSSSFSVSLGDRVTITCMASEDIYIRLAWYQQKPGNAPRLLISAATSLETGVPSRFSGSGSGKDYTLSITSLQTEDVGTYYCQQYWSSPWTFGGGTKLEINLEIQNPDPAVYQLRDSKSSDKSVCLFTDFDSQTNVSQSKDSDVYITDKCVLDMRSMDFKSNSAVAWSNKSDFACANAFNNSIIPEDTFFPSPESSDSTDHVKPKETENTKQPSKSCHKPKAIVHTEKVNMMSLTVLGLRMLFAKTVAVNFLLTAKLFFLRAKRSGSGVKQTLNFDLLKLAGDVESNPGPTSMDWIWRILFLVGAATGAHSFEDVQLQESGPGLVKPSQSLSLTCTVTGYSITSDYTWNWIRQFPGNKLEWMGYITYSGSTSYNPSLKSRNSITRDTSKNQFFLQLNSVTTEDTATYYCARLGRRYTMDYWGQGTSVTVSSTREDLKNVFPPEVAVFEPSEAEISHTQKATLVCLATGFYPDHVELSWWVNGKEVHSGVCTDPQPLKEQPALNDSRYCLSSRLRVSATFWQNPRNHFRCQVQFYGLSENDEWTQDRAKPVTQIVSAEAWGRADDVIKIHWQEKKSNTILGSQEGNTMKTNDTYMKFSWLTVPEKSLDKEHRCIVRHENNKNGVDQEIIFPPIKTDVITMDPKDNCSKDANDTLLLQLTNTSAYYMYLLLLLKSVVYFAIITCCLLRRTAFCCNGEKS

SEQ ID NO: 15665 - protein, 728 aa, synthetic construct
MALPVTALLLPLALLLHAARPDDIQMTQSPSSLSASVGDRVTITCRASQSISSYLNWYQQKPGKAPKLLIYDASNLETGVPSRFSGSGSGTDFTFTISSLQPEDIATYYCQQYDNLPLTFGGGTKVDIKRLEIQNPDPAVYQLRDSKSSDKSVCLFTDFDSQTNVSQSKDSDVYITDKCVLDMRSMDFKSNSAVAWSNKSDFACANAFNNSIIPEDTFFPSPESSDSTDHVKPKETENTKQPSKSCHKPKAIVHTEKVNMMSLTVLGLRMLFAKTVAVNFLLTAKLFFLRAKRSGSGVKQTLNFDLLKLAGDVESNPGPTSMDWIWRILFLVGAATGAHSFEQVQLVESGGGVVQPGRSLRLSCAASGFTFSSYAMHWVRQAPGKGLEWVAVISYDGSNKYYADSVKGRFTISRDNSKNTLYLQMNSLRAEDTAVYYCARAHNSSSWSFDYWGQGTLVTVSSTREDLKNVFPPEVAVFEPSEAEISHTQKATLVCLATGFYPDHVELSWWVNGKEVHSGVCTDPQPLKEQPALNDSRYCLSSRLRVSATFWQNPRNHFRCQVQFYGLSENDEWTQDRAKPVTQIVSAEAWGRADDVIKIHWQEKKSNTILGSQEGNTMKTNDTYMKFSWLTVPEKSLDKEHRCIVRHENNKNGVDQEIIFPPIKTDVITMDPKDNCSKDANDTLLLQLTNTSAYYMYLLLLLKSVVYFAIITCCLLRRTAFCCNGEKS

SEQ ID NO: 15666 - protein, 737 aa, synthetic construct
MALPVTALLLPLALLLHAARPDDVVMTQSPLSLPVSLGDQASISCRSSQRLVHSNGNTYLHWYLQKPGQSPKLLIYRVSNRFPGVPDRFSGSGSGTDFTLKISRVEAEDLGIYFCSQSTHVPYTFGGGTKLEIKRLEIQNPDPAVYQLRDSKSSDKSVCLFTDFDSQTNVSQSKDSDVYITDKCVLDMRSMDFKSNSAVAWSNKSDFACANAFNNSIIPEDTFFPSPESSDSTDHVKPKETENTKQPSKSCHKPKAIVHTEKVNMMSLTVLGLRMLFAKTVAVNFLLTAKLFFLRAKRSGSGVKQTLNFDLLKLAGDVESNPGPTSMDWIWRILFLVGAATGAHSFEEVRLQQSGPDLIKPGASVKMSCKASGYTFTGYVMHWVKQRPGQGLEWIGFINPYNDDIQSNERFRGKATLTSDKSSTTAYMELSSLTSEDSAVYYCARGAGYNFDGAYRFFDFWGQGTTLTVSSTREDLKNVFPPEVAVFEPSEAEISHTQKATLVCLATGFYPDHVELSWWVNGKEVHSGVCTDPQPLKEQPALNDSRYCLSSRLRVSATFWQNPRNHFRCQVQFYGLSENDEWTQDRAKPVTQIVSAEAWGRADDVIKIHWQEKKSNTILGSQEGNTMKTNDTYMKFSWLTVPEKSLDKEHRCIVRHENNKNGVDQEIIFPPIKTDVITMDPKDNCSKDANDTLLLQLTNTSAYYMYLLLLLKSVVYFAIITCCLLRRTAFCCNGEKS

SEQ ID NO: 15667 - protein, 728 aa, synthetic construct
MALPVTALLLPLALLLHAARPDSYELTQPPSVSVSPGQTATISCSGDQLGGKYGHWYQKKPGQSPVLVLYQDRKRPAGIPERFSGSSSGNTITLTISGTQAVDEADYYCQAWDTNLGGVFGGGTKVTVLGQLEIQNPDPAVYQLRDSKSSDKSVCLFTDFDSQTNVSQSKDSDVYITDKCVLDMRSMDFKSNSAVAWSNKSDFACANAFNNSIIPEDTFFPSPESSDSTDHVKPKETENTKQPSKSCHKPKAIVHTEKVNMMSLTVLGLRMLFAKTVAVNFLLTAKLFFLRAKRSGSGVKQTLNFDLLKLAGDVESNPGPTSMDWIWRILFLVGAATGAHSFEQVQLVESGAEVKKPGASVKVSCKASGYTFTGYYMHWVRQAPGQGLEWMGRINPNSGGTNYAQKFQGRVTMTRDTSISTAYMELSRLRSDDTAVYYCASPRGRGSAFDIWGQGTLVTVSSTREDLKNVFPPEVAVFEPSEAEISHTQKATLVCLATGFYPDHVELSWWVNGKEVHSGVCTDPQPLKEQPALNDSRYCLSSRLRVSATFWQNPRNHFRCQVQFYGLSENDEWTQDRAKPVTQIVSAEAWGRADDVIKIHWQEKKSNTILGSQEGNTMKTNDTYMKFSWLTVPEKSLDKEHRCIVRHENNKNGVDQEIIFPPIKTDVITMDPKDNCSKDANDTLLLQLTNTSAYYMYLLLLLKSVVYFAIITCCLLRRTAFCCNGEKS

SEQ ID NO: 15668 - protein, 731 aa, synthetic construct
MALPVTALLLPLALLLHAARPDNFMLTQPHSVSESPGKTVTISCTRSSGSIASKYVQWYQQRPGSSPTTVIYEDNQRPSGVPDRFSGSIDTSSNSASLTISGLRTEDEADYYCHSYDSNNHSVFGGGTKVTVLGQLEIQNPDPAVYQLRDSKSSDKSVCLFTDFDSQTNVSQSKDSDVYITDKCVLDMRSMDFKSNSAVAWSNKSDFACANAFNNSIIPEDTFFPSPESSDSTDHVKPKETENTKQPSKSCHKPKAIVHTEKVNMMSLTVLGLRMLFAKTVAVNFLLTAKLFFLRAKRSGSGVKQTLNFDLLKLAGDVESNPGPTSMDWIWRILFLVGAATGAHSFEEVQLVESGGGVVQPGGSLRLSCAASGFTFSSYAMSWVRQAPGKGLEWVSAISGSGGSTYYADSVKGRFSISRDNSKNTLYLQMNSLRAEDTAVYYCARTRSSGAFDIWGQGTLVTVSSTREDLKNVFPPEVAVFEPSEAEISHTQKATLVCLATGFYPDHVELSWWVNGKEVHSGVCTDPQPLKEQPALNDSRYCLSSRLRVSATFWQNPRNHFRCQVQFYGLSENDEWTQDRAKPVTQIVSAEAWGRADDVIKIHWQEKKSNTILGSQEGNTMKTNDTYMKFSWLTVPEKSLDKEHRCIVRHENNKNGVDQEIIFPPIKTDVITMDPKDNCSKDANDTLLLQLTNTSAYYMYLLLLLKSVVYFAIITCCLLRRTAFCCNGEKS

SEQ ID NO: 15669 - protein, 726 aa, synthetic construct
MALPVTALLLPLALLLHAARPDIQMNQSPSSLSASLGDTITITCHASQNINVWLSWYQQKPGNIPKLLIYKASNLHTGVPSRFSGSGSGTGFTITISSLQPEDIATYYCQQGQSYPWTFGGGTKLEIKRLEIQNPDPAVYQLRDSKSSDKSVCLFTDFDSQTNVSQSKDSDVYITDKCVLDMRSMDFKSNSAVAWSNKSDFACANAFNNSIIPEDTFFPSPESSDSTDHVKPKETENTKQPSKSCHKPKAIVHTEKVNMMSLTVLGLRMLFAKTVAVNFLLTAKLFFLRAKRSGSGVKQTLNFDLLKLAGDVESNPGPTSMDWIWRILFLVGAATGAHSFEEVQLQQSGPELVKPGASVKISCKASGYSFTGYFMNWVKQSHGKSLEYIGRFNPYNGETLYNQKFKGKATLTVDKSSSTVHMELLSVTSEDSAVYYCGRSGNDDAMDYWGQGTSVTVSSATREDLKNVFPPEVAVFEPSEAEISHTQKATLVCLATGFYPDHVELSWWVNGKEVHSGVCTDPQPLKEQPALNDSRYCLSSRLRVSATFWQNPRNHFRCQVQFYGLSENDEWTQDRAKPVTQIVSAEAWGRADDVIKIHWQEKKSNTILGSQEGNTMKTNDTYMKFSWLTVPEKSLDKEHRCIVRHENNKNGVDQEIIFPPIKTDVITMDPKDNCSKDANDTLLLQLTNTSAYYMYLLLLLKSVVYFAIITCCLLRRTAFCCNGEKS

SEQ ID NO: 15670 - protein, 727 aa, synthetic construct
MALPVTALLLPLALLLHAARPEIVLTQSPATLSLSPGERATLSCRASQSVRSYLAWYQQKPGQAPRLLIYDASNRATGIPARFSGSGSGTDFTLTISSLEPEDFAVYYCQQRSNWPPTFGQGTKVEIKLEIQNPDPAVYQLRDSKSSDKSVCLFTDFDSQTNVSQSKDSDVYITDKCVLDMRSMDFKSNSAVAWSNKSDFACANAFNNSIIPEDTFFPSPESSDSTDHVKPKETENTKQPSKSCHKPKAIVHTEKVNMMSLTVLGLRMLFAKTVAVNFLLTAKLFFLRAKRSGSGVKQTLNFDLLKLAGDVESNPGPTSMDWIWRILFLVGAATGAHSFEQLQVQESGPGLVKPSETLSLTCTVSGGSISNSYFSWGWIRQPPGKGLEWIGSFYYGEKTYYNPSLKSRATISIDTSKSQFSLKLSSVTAADTAVYYCPRGPTMIRGVIDSWGQGTLVTVSSTREDLKNVFPPEVAVFEPSEAEISHTQKATLVCLATGFYPDHVELSWWVNGKEVHSGVCTDPQPLKEQPALNDSRYCLSSRLRVSATFWQNPRNHFRCQVQFYGLSENDEWTQDRAKPVTQIVSAEAWGRADDVIKIHWQEKKSNTILGSQEGNTMKTNDTYMKFSWLTVPEKSLDKEHRCIVRHENNKNGVDQEIIFPPIKTDVITMDPKDNCSKDANDTLLLQLTNTSAYYMYLLLLLKSVVYFAIITCCLLRRTAFCCNGEKS

SEQ ID NO: 15671 - protein, 736 aa, synthetic construct
MALPVTALLLPLALLLHAARPDIVMTQTPLSLPVTPGEPASISCRSSRSLLDSDDGNTYLDWYLQKPGQSPQLLIYTLSYRASGVPDRFSGSGSGTDFTLKISRVEAEDVGVYYCMQRVEFPITFGQGTRLEIKRLEIQNPDPAVYQLRDSKSSDKSVCLFTDFDSQTNVSQSKDSDVYITDKCVLDMRSMDFKSNSAVAWSNKSDFACANAFNNSIIPEDTFFPSPESSDSTDHVKPKETENTKQPSKSCHKPKAIVHTEKVNMMSLTVLGLRMLFAKTVAVNFLLTAKLFFLRAKRSGSGVKQTLNFDLLKLAGDVESNPGPTSMDWIWRILFLVGAATGAHSFEQVQLVESGGGVVQPGRSLRLSCAASGFIFSRYGMHWVRQAPGKGLKWVAVIWYDGSNKLYADSVKGRFTISRDNSKNTLYLQMNSLRAEDTAVYYCARDYYDNSRHHWGFDYWGQGTLVTVSSTREDLKNVFPPEVAVFEPSEAEISHTQKATLVCLATGFYPDHVELSWWVNGKEVHSGVCTDPQPLKEQPALNDSRYCLSSRLRVSATFWQNPRNHFRCQVQFYGLSENDEWTQDRAKPVTQIVSAEAWGRADDVIKIHWQEKKSNTILGSQEGNTMKTNDTYMKFSWLTVPEKSLDKEHRCIVRHENNKNGVDQEIIFPPIKTDVITMDPKDNCSKDANDTLLLQLTNTSAYYMYLLLLLKSVVYFAIITCCLLRRTAFCCNGEKS

SEQ ID NO: 15672 - protein, 726 aa, synthetic construct
MALPVTALLLPLALLLHAARPEIQMTQSPSSMSASLGDTITITCQATQDIFKNLNWYQQKPGKPPSLLIYYATELAEGVPSRFSGSGSGSDYSLTISNLESEDFAAYYCLQFFEFPFTFGSGTKLEMKLEIQNPDPAVYQLRDSKSSDKSVCLFTDFDSQTNVSQSKDSDVYITDKCVLDMRSMDFKSNSAVAWSNKSDFACANAFNNSIIPEDTFFPSPESSDSTDHVKPKETENTKQPSKSCHKPKAIVHTEKVNMMSLTVLGLRMLFAKTVAVNFLLTAKLFFLRAKRSGSGVKQTLNFDLLKLAGDVESNPGPTSMDWIWRILFLVGAATGAHSFEQVQLQQSGAELVRPGTSVKVSCKASGYVFTNYWIEWIKQRPGQGLEWIGVMNPGSGETTYNEKFKGKATLTADKSSSTAYMQLSSLTSVDSAVYFCARDHDRDYYAMDYWGQGTSVTVSSTREDLKNVFPPEVAVFEPSEAEISHTQKATLVCLATGFYPDHVELSWWVNGKEVHSGVCTDPQPLKEQPALNDSRYCLSSRLRVSATFWQNPRNHFRCQVQFYGLSENDEWTQDRAKPVTQIVSAEAWGRADDVIKIHWQEKKSNTILGSQEGNTMKTNDTYMKFSWLTVPEKSLDKEHRCIVRHENNKNGVDQEIIFPPIKTDVITMDPKDNCSKDANDTLLLQLTNTSAYYMYLLLLLKSVVYFAIITCCLLRRTAFCCNGEKS

SEQ ID NO: 15673 - protein, 723 aa, synthetic construct
MALPVTALLLPLALLLHAARPDILLTQSPAILSVSPGERVSFSCRASQNIGTSIHWYQQRTNGSPRLLIKYASESVSGIPSRFSGSGSGTDFTLSINSVESEDIADYYCQHTNSWPTTFGGGTKLEIKRLEIQNPDPAVYQLRDSKSSDKSVCLFTDFDSQTNVSQSKDSDVYITDKCVLDMRSMDFKSNSAVAWSNKSDFACANAFNNSIIPEDTFFPSPESSDSTDHVKPKETENTKQPSKSCHKPKAIVHTEKVNMMSLTVLGLRMLFAKTVAVNFLLTAKLFFLRAKRSGSGVKQTLNFDLLKLAGDVESNPGPTSMDWIWRILFLVGAATGAHSFEQVQLQQSDAELVKPGASVKISCKASGYTFTDHAIHWVKQKPEQGLEWIGYFSPGNGDIKYNEKFKGKATLTADKSSSTAYMQLNSLTSEDSAVYFCKRSYGNYDYWGQGTTLTVSSTREDLKNVFPPEVAVFEPSEAEISHTQKATLVCLATGFYPDHVELSWWVNGKEVHSGVCTDPQPLKEQPALNDSRYCLSSRLRVSATFWQNPRNHFRCQVQFYGLSENDEWTQDRAKPVTQIVSAEAWGRADDVIKIHWQEKKSNTILGSQEGNTMKTNDTYMKFSWLTVPEKSLDKEHRCIVRHENNKNGVDQEIIFPPIKTDVITMDPKDNCSKDANDTLLLQLTNTSAYYMYLLLLLKSVVYFAIITCCLLRRTAFCCNGEKS

SEQ ID NO: 15674 - protein, 728 aa, synthetic construct
MALPVTALLLPLALLLHAARPDIVMTQSPDSLAVSLGERATINCKSSQSLLNSGDQKNYLTWYQQKPGQPPKLLIYWASTRESGVPDRFSGSGSGTDFTLTISSLQAEDVAVYYCQNDYSYPLTFGQGTKVEIKLEIQNPDPAVYQLRDSKSSDKSVCLFTDFDSQTNVSQSKDSDVYITDKCVLDMRSMDFKSNSAVAWSNKSDFACANAFNNSIIPEDTFFPSPESSDSTDHVKPKETENTKQPSKSCHKPKAIVHTEKVNMMSLTVLGLRMLFAKTVAVNFLLTAKLFFLRAKRSGSGVKQTLNFDLLKLAGDVESNPGPTSMDWIWRILFLVGAATGAHSFEQVQLVQSGAEVKKTGSSVKVSCKASGYTFTDHAIHVWRQAPGQALEWMGHFSPGNTDIKYNDKFKGRVTLTVDRSMSTAYMELSSLRSEDTAMYYCKTSTFFFDYWGQGTMVTVSSTREDLKNVFPPEVAVFEPSEAEISHTQKATLVCLATGFYPDHVELSWWVNGKEVHSGVCTDPQPLKEQPALNDSRYCLSSRLRVSATFWQNPRNHFRCQVQFYGLSENDEWTQDRAKPVTQIVSAEAWGRADDVIKIHWQEKKSNTILGSQEGNTMKTNDTYMKFSWLTVPEKSLDKEHRCIVRHENNKNGVDQEIIFPPIKTDVITMDPKDNCSKDANDTLLLQLTNTSAYYMYLLLLLKSVVYFAIITCCLLRRTAFCCNGEKS

SEQ ID NO: 15675 - protein, 727 aa, synthetic construct
MALPVTALLLPLALLLHAARPDIQMTQSPSSLSASVGDRVTITCKASQDVSIAVAWYQQKPGKAPKVLIYSASYRYTGVPDRFSGSGSGTDFTFTISSLQPEDIAVYYCQQHYITPLTFGGGTKVEIKLEIQNPDPAVYQLRDSKSSDKSVCLFTDFDSQTNVSQSKDSDVYITDKCVLDMRSMDFKSNSAVAWSNKSDFACANAFNNSIIPEDTFFPSPESSDSTDHVKPKETENTKQPSKSCHKPKAIVHTEKVNMMSLTVLGLRMLFAKTVAVNFLLTAKLFFLRAKRSGSGVKQTLNFDLLKLAGDVESNPGPTSMDWIWRILFLVGAATGAHSFEQIQLVQSGHEVKKPGASVKVSCKASGYTFTNYGMNWVRQAPGQGLEWMGWINTKTGEPTYAEEFKGRFVFSLETSASTAYLQISSLKAEDTAMYFCGRGGYGSSYWYFDVWGQGTTVTVSSTREDLKNVFPPEVAVFEPSEAEISHTQKATLVCLATGFYPDHVELSWWVNGKEVHSGVCTDPQPLKEQPALNDSRYCLSSRLRVSATFWQNPRNHFRCQVQFYGLSENDEWTQDRAKPVTQIVSAEAWGRADDVIKIHWQEKKSNTILGSQEGNTMKTNDTYMKFSWLTVPEKSLDKEHRCIVRHENNKNGVDQEIIFPPIKTDVITMDPKDNCSKDANDTLLLQLTNTSAYYMYLLLLLKSVVYFAIITCCLLRRTAFCCNGEKS

SEQ ID NO: 15676 - protein, 729 aa, synthetic construct
MALPVTALLLPLALLLHAARPDIVMTQSPDSLAVSLGERATINCRASKSVSTSGYSYMHWYQQKPGQPPKLLIYLASNLESGVPDRFSGSGSGTDFTLTISSLQAEDVAVYYCQHSRELPYTFGQGTKLEIKLEIQNPDPAVYQLRDSKSSDKSVCLFTDFDSQTNVSQSKDSDVYITDKCVLDMRSMDFKSNSAVAWSNKSDFACANAFNNSIIPEDTFFPSPESSDSTDHVKPKETENTKQPSKSCHKPKAIVHTEKVNMMSLTVLGLRMLFAKTVAVNFLLTAKLFFLRAKRSGSGVKQTLNFDLLKLAGDVESNPGPTSMDWIWRILFLVGAATGAHSFEQVQLQESGPGLVKPSETLSLTCTVSGGSISSYGVHWIRQPPGKGLEWIGVIWTSGVTDYNSALMGRVTISVDTSKNQFSLKLSSVTAADTAVYYCARDGDYDRYTMDYWGQGTLVTVSSTREDLKNVFPPEVAVFEPSEAEISHTQKATLVCLATGFYPDHVELSWWVNGKEVHSGVCTDPQPLKEQPALNDSRYCLSSRLRVSATFWQNPRNHFRCQVQFYGLSENDEWTQDRAKPVTQIVSAEAWGRADDVIKIHWQEKKSNTILGSQEGNTMKTNDTYMKFSWLTVPEKSLDKEHRCIVRHENNKNGVDQEIIFPPIKTDVITMDPKDNCSKDANDTLLLQLTNTSAYYMYLLLLLKSVVYFAIITCCLLRRTAFCCNGEKS

SEQ ID NO: 15677 - protein, 729 aa, synthetic construct
MALPVTALLLPLALLLHAARPDIQMTQSPSSLSASVGDRVTITCRASQSIGTSLHWYQQKPGKAPKLLIKFASRLQSGVPSRFSGSGSGTDFTLTISSLQPEDFATYYCQQSPGFPPTFGQGTKLEIKRLEIQNPDPAVYQLRDSKSSDKSVCLFTDFDSQTNVSQSKDSDVYITDKCVLDMRSMDFKSNSAVAWSNKSDFACANAFNNSIIPEDTFFPSPESSDSTDHVKPKETENTKQPSKSCHKPKAIVHTEKVNMMSLTVLGLRMLFAKTVAVNFLLTAKLFFLRAKRSGSGVKQTLNFDLLKLAGDVESNPGPTSMDWIWRILFLVGAATGAHSFEQVQLVESGGGLVKPGGSLRLSCAASGFSITTSGYYWTWIRQFPGKGLEWMGYIGYNSKTYYNPALKSRITISRDNAKNSLYLQMNSLRAEDTAVYYCARSLYGGYKDAFDSWGQGTLVTVSSTREDLKNVFPPEVAVFEPSEAEISHTQKATLVCLATGFYPDHVELSWWVNGKEVHSGVCTDPQPLKEQPALNDSRYCLSSRLRVSATFWQNPRNHFRCQVQFYGLSENDEWTQDRAKPVTQIVSAEAWGRADDVIKIHWQEKKSNTILGSQEGNTMKTNDTYMKFSWLTVPEKSLDKEHRCIVRHENNKNGVDQEIIFPPIKTDVITMDPKDNCSKDANDTLLLQLTNTSAYYMYLLLLLKSVVYFAIITCCLLRRTAFCCNGEKS

SEQ ID NO: 15678 - protein, 734 aa, synthetic construct
MALPVTALLLPLALLLHAARPDEIVLTQSPLSLPVTPGEPASISCRSSQSLLHSIGYNYLDWYLQKPGQSPQLLIYLGSNRASGVPDRFSGSGSGTDFTLKISRVEAEDVGVYYCMQALQTPLTFGGGTKVEIKRLEIQNPDPAVYQLRDSKSSDKSVCLFTDFDSQTNVSQSKDSDVYITDKCVLDMRSMDFKSNSAVAWSNKSDFACANAFNNSIIPEDTFFPSPESSDSTDHVKPKETENTKQPSKSCHKPKAIVHTEKVNMMSLTVLGLRMLFAKTVAVNFLLTAKLFFLRAKRSGSGVKQTLNFDLLKLAGDVESNPGPTSMDWIWRILFLVGAATGAHSFEEVQLVESGGGVVQPGRSLRLSCAASGFTFRSYGMHWVRQAPGKGLEWVAVISYDGSNKYYTDSVNGRFTISRDNSKNTLYLQMNSLRAEDTAVYYCARGGGYYETSGPDYWGQGTLVTVSSTREDLKNVFPPEVAVFEPSEAEISHTQKATLVCLATGFYPDHVELSWWVNGKEVHSGVCTDPQPLKEQPALNDSRYCLSSRLRVSATFWQNPRNHFRCQVQFYGLSENDEWTQDRAKPVTQIVSAEAWGRADDVIKIHWQEKKSNTILGSQEGNTMKTNDTYMKFSWLTVPEKSLDKEHRCIVRHENNKNGVDQEIIFPPIKTDVITMDPKDNCSKDANDTLLLQLTNTSAYYMYLLLLLKSVVYFAIITCCLLRRTAFCCNGEKS

SEQ ID NO: 15679 - protein, 732 aa, synthetic construct
MALPVTALLLPLALLLHAARPDDVVMTQSPLSLPVTPGEPASISCRSSQSLLHSIGYNYLHWFLQKPGQSPQLLIYLGSNRASGVPDRFSGSGSGTDFTLKISRVEAEDVGVYYCMQALQTPPTFGQGTRLEIKRLEIQNPDPAVYQLRDSKSSDKSVCLFTDFDSQTNVSQSKDSDVYITDKCVLDMRSMDFKSNSAVAWSNKSDFACANAFNNSIIPEDTFFPSPESSDSTDHVKPKETENTKQPSKSCHKPKAIVHTEKVNMMSLTVLGLRMLFAKTVAVNFLLTAKLFFLRAKRSGSGVKQTLNFDLLKLAGDVESNPGPTSMDWIWRILFLVGAATGAHSFEQLQLQESGPGLVKPSGTLSLTCAVSGGSISSSNWWSWVRQPPGKGLEWIGEIYHSGSTNYNPSLKSRVTISVDKSKNQFSLKLSSVTAADTAVYYCVGSPYGDYVLDYWGQGTLVTVSSTREDLKNVFPPEVAVFEPSEAEISHTQKATLVCLATGFYPDHVELSWWVNGKEVHSGVCTDPQPLKEQPALNDSRYCLSSRLRVSATFWQNPRNHFRCQVQFYGLSENDEWTQDRAKPVTQIVSAEAWGRADDVIKIHWQEKKSNTILGSQEGNTMKTNDTYMKFSWLTVPEKSLDKEHRCIVRHENNKNGVDQEIIFPPIKTDVITMDPKDNCSKDANDTLLLQLTNTSAYYMYLLLLLKSVVYFAIITCCLLRRTAFCCNGEKS

SEQ ID NO: 15680 - protein, 730 aa, synthetic construct
MALPVTALLLPLALLLHAARPDEIVLTQSPGTLSLSLGERATLSCRASQSISSSFLAWYQQKPGQAPKLLIYAASTRATGIPDRFSGSGSGTDFTLTISRLEPEDFAVYYCQQYGRSLSFGGGTKVEVKLEIQNPDPAVYQLRDSKSSDKSVCLFTDFDSQTNVSQSKDSDVYITDKCVLDMRSMDFKSNSAVAWSNKSDFACANAFNNSIIPEDTFFPSPESSDSTDHVKPKETENTKQPSKSCHKPKAIVHTEKVNMMSLTVLGLRMLFAKTVAVNFLLTAKLFFLRAKRSGSGVKQTLNFDLLKLAGDVESNPGPTSMDWIWRILFLVGAATGAHSFEQVQLQQSGPGLVKPSQTLSLTCAISGDSVSGNSATWNWIRQSPSRGLEWLGRTYYRSKWNHDYAESVKSRITINPDTSKNQFSLQLNSVTPEDTAVYYCARGDSSSWYAFDYWGQGTLVTVSSTREDLKNVFPPEVAVFEPSEAEISHTQKATLVCLATGFYPDHVELSWWVNGKEVHSGVCTDPQPLKEQPALNDSRYCLSSRLRVSATFWQNPRNHFRCQVQFYGLSENDEWTQDRAKPVTQIVSAEAWGRADDVIKIHWQEKKSNTILGSQEGNTMKTNDTYMKFSWLTVPEKSLDKEHRCIVRHENNKNGVDQEIIFPPIKTDVITMDPKDNCSKDANDTLLLQLTNTSAYYMYLLLLLKSVVYFAIITCCLLRRTAFCCNGEKS

SEQ ID NO: 15681 - protein, 729 aa, synthetic construct
MALPVTALLLPLALLLHAARPDQSVVTQPPSVSVAPGKTARITCGRNNIGSKSVHWYQQKPGQAPVLVVYDDSDRPSGIPERFSGSNSGNTATLTISRVEAGDEADYYCQVWDSSSDHVVFGGGTKLTVLGLEIQNPDPAVYQLRDSKSSDKSVCLFTDFDSQTNVSQSKDSDVYITDKCVLDMRSMDFKSNSAVAWSNKSDFACANAFNNSIIPEDTFFPSPESSDSTDHVKPKETENTKQPSKSCHKPKAIVHTEKVNMMSLTVLGLRMLFAKTVAVNFLLTAKLFFLRAKRSGSGVKQTLNFDLLKLAGDVESNPGPTSMDWIWRILFLVGAATGAHSFEVQLVQSGGGVMRPGGSLRLSCAASGFTFDDYGMSWVRQAPGKGLEWVSGINWNGGSTGYADSVRGRFTISRDNAKNSLYLQMNSLRAEDTALYYCARERGYGYHDPHDYWGQGTLVTVSSTREDLKNVFPPEVAVFEPSEAEISHTQKATLVCLATGFYPDHVELSWWVNGKEVHSGVCTDPQPLKEQPALNDSRYCLSSRLRVSATFWQNPRNHFRCQVQFYGLSENDEWTQDRAKPVTQIVSAEAWGRADDVIKIHWQEKKSNTILGSQEGNTMKTNDTYMKFSWLTVPEKSLDKEHRCIVRHENNKNGVDQEIIFPPIKTDVITMDPKDNCSKDANDTLLLQLTNTSAYYMYLLLLLKSVVYFAIITCCLLRRTAFCCNGEKS

SEQ ID NO: 15682 - protein, 742 aa, synthetic construct
MALPVTALLLPLALLLHAARPEQKLISEEDLEFQAVVTQPPSASGTPGQRVTISCSGSSSNIGSNTVNWYQQVPGTAPKLLIYSNNQRPSGVPDRFSGSKSGTSASLAISGLQSEDEADYYCAAWDDSLNGWVFGGGTKLTVLLEIQNPDPAVYQLRDSKSSDKSVCLFTDFDSQTNVSQSKDSDVYITDKCVLDMRSMDFKSNSAVAWSNKSDFACANAFNNSIIPEDTFFPSPESSDSTDHVKPKETENTKQPSKSCHKPKAIVHTEKVNMMSLTVLGLRMLFAKTVAVNFLLTAKLFFLRAKRSGSGVKQTLNFDLLKLAGDVESNPGPTSMDWIWRILFLVGAATGAHSFEQMQLVQSGAEVKEPGESLRISCKGSGYSFTNFWISWVRQMPGKGLEWMGRVDPGYSYSTYSPSFQGHVTISADKSTSTAYLQWNSLKASDTAMYYCARVQYSGYYDWFDPWGQGTLVTVSSTREDLKNVFPPEVAVFEPSEAEISHTQKATLVCLATGFYPDHVELSWWVNGKEVHSGVCTDPQPLKEQPALNDSRYCLSSRLRVSATFWQNPRNHFRCQVQFYGLSENDEWTQDRAKPVTQIVSAEAWGRADDVIKIHWQEKKSNTILGSQEGNTMKTNDTYMKFSWLTVPEKSLDKEHRCIVRHENNKNGVDQEIIFPPIKTDVITMDPKDNCSKDANDTLLLQLTNTSAYYMYLLLLLKSVVYFAIITCCLLRRTAFCCNGEKS

SEQ ID NO: 15683 - protein, 736 aa, synthetic construct
MALPVTALLLPLALLLHAARPEQKLISEEDLEFDIQMTQSPSTLSASVGDRVTITCRASQNINKWLAWYQQRPGKAPQLLIYKASSLESGVPSRFSGSGSGTEYTLTISSLQPDDFATYYCQQYNSYATFGQGTKVEIKRLEIQNPDPAVYQLRDSKSSDKSVCLFTDFDSQTNVSQSKDSDVYITDKCVLDMRSMDFKSNSAVAWSNKSDFACANAFNNSIIPEDTFFPSPESSDSTDHVKPKETENTKQPSKSCHKPKAIVHTEKVNMMSLTVLGLRMLFAKTVAVNFLLTAKLFFLRAKRSGSGVKQTLNFDLLKLAGDVESNPGPTSMDWIWRILFLVGAATGAHSFEQVQLVQSGAEVKKPGESLKISCKGSGYNFSNKWIGWVRQLPGRGLEWIAIIYPGYSDITYSPSFQGRVTISADTSINTAYLHWHSLKASDTAMYYCVRHTALAGFDYWGLGTLVTVSSTREDLKNVFPPEVAVFEPSEAEISHTQKATLVCLATGFYPDHVELSWWVNGKEVHSGVCTDPQPLKEQPALNDSRYCLSSRLRVSATFWQNPRNHFRCQVQFYGLSENDEWTQDRAKPVTQIVSAEAWGRADDVIKIHWQEKKSNTILGSQEGNTMKTNDTYMKFSWLTVPEKSLDKEHRCIVRHENNKNGVDQEIIFPPIKTDVITMDPKDNCSKDANDTLLLQLTNTSAYYMYLLLLLKSVVYFAIITCCLLRRTAFCCNGEKS

SEQ ID NO: 15684 - protein, 728 aa, synthetic construct
MALPVTALLLPLALLLHAARPDIVLTQSPASLAVSLGQRATISCRASESVDNYGNTFMHWYQQKPGQPPKLLIYRASNLESGIPARFSGSGSRTDFTLTINPVEADDVATYYCQQSNEDPPTFGAGTKLELKLEIQNPDPAVYQLRDSKSSDKSVCLFTDFDSQTNVSQSKDSDVYITDKCVLDMRSMDFKSNSAVAWSNKSDFACANAFNNSIIPEDTFFPSPESSDSTDHVKPKETENTKQPSKSCHKPKAIVHTEKVNMMSLTVLGLRMLFAKTVAVNFLLTAKLFFLRAKRSGSGVKQTLNFDLLKLAGDVESNPGPTSMDWIWRILFLVGAATGAHSFEQIQLVQSGPELKKPGETVKISCKASGYIFTNYGMNWVKQAPGKSFKWMGWINTYTGESTYSADFKGRFAFSLETSASTAYLHINDLKNEDTATYFCARSGGYDPMDYWGQGTSVTVSSTREDLKNVFPPEVAVFEPSEAEISHTQKATLVCLATGFYPDHVELSWWVNGKEVHSGVCTDPQPLKEQPALNDSRYCLSSRLRVSATFWQNPRNHFRCQVQFYGLSENDEWTQDRAKPVTQIVSAEAWGRADDVIKIHWQEKKSNTILGSQEGNTMKTNDTYMKFSWLTVPEKSLDKEHRCIVRHENNKNGVDQEIIFPPIKTDVITMDPKDNCSKDANDTLLLQLTNTSAYYMYLLLLLKSVVYFAIITCCLLRRTAFCCNGEKS

SEQ ID NO: 15685 - protein, 727 aa, synthetic construct
MALPVTALLLPLALLLHAARPDEIVLTQSPGTLSLSPGERATLSCRASQSVSNTYLAWYHQRPGQAPRLLIYGASSRATGIPDRFSGSGSGTDFALTISSLEPEDFAVYYCQQYSNSWTFGQGTKVEIKRLEIQNPDPAVYQLRDSKSSDKSVCLFTDFDSQTNVSQSKDSDVYITDKCVLDMRSMDFKSNSAVAWSNKSDFACANAFNNSIIPEDTFFPSPESSDSTDHVKPKETENTKQPSKSCHKPKAIVHTEKVNMMSLTVLGLRMLFAKTVAVNFLLTAKLFFLRAKRSGSGVKQTLNFDLLKLAGDVESNPGPTSMDWIWRILFLVGAATGAHSFEQVQLVESGGGVVQPGRSLRLSCAASGFTFSSYDMHWVRQAPGKGLEWVAVISYDGTNEYYADSVKGRFTISRDTSKNTLYLQMNSLRAEDTAVYYCARERYFDWSFDYWGQGTLVSVSSTREDLKNVFPPEVAVFEPSEAEISHTQKATLVCLATGFYPDHVELSWWVNGKEVHSGVCTDPQPLKEQPALNDSRYCLSSRLRVSATFWQNPRNHFRCQVQFYGLSENDEWTQDRAKPVTQIVSAEAWGRADDVIKIHWQEKKSNTILGSQEGNTMKTNDTYMKFSWLTVPEKSLDKEHRCIVRHENNKNGVDQEIIFPPIKTDVITMDPKDNCSKDANDTLLLQLTNTSAYYMYLLLLLKSVVYFAIITCCLLRRTAFCCNGEKS

SEQ ID NO: 15686 - protein, 726 aa, synthetic construct
MALPVTALLLPLALLLHAARPDELTQDPAVSVALGQTVRITCQGDSLRSNYANWYQQKPGQAPVLVIYGQNNRPSGIPDRFSGSSSGNTASLTITGAQAADEADYYCDSRVSTGNHVVFGGGTKLTVLGQLEIQNPDPAVYQLRDSKSSDKSVCLFTDFDSQTNVSQSKDSDVYITDKCVLDMRSMDFKSNSAVAWSNKSDFACANAFNNSIIPEDTFFPSPESSDSTDHVKPKETENTKQPSKSCHKPKAIVHTEKVNMMSLTVLGLRMLFAKTVAVNFLLTAKLFFLRAKRSGSGVKQTLNFDLLKLAGDVESNPGPTSMDWIWRILFLVGAATGAHSFEEVQLVQSGAEVKKPGASVKVSCKASGYTFTSYAMHWVRQAPGQRLEWMGWINAGNGNTKYSQKFQGRVTITRDTSASTAYMELSSLRSEDTAVYYCARDISYGSFDYWGQGTLVTVSSTREDLKNVFPPEVAVFEPSEAEISHTQKATLVCLATGFYPDHVELSWWVNGKEVHSGVCTDPQPLKEQPALNDSRYCLSSRLRVSATFWQNPRNHFRCQVQFYGLSENDEWTQDRAKPVTQIVSAEAWGRADDVIKIHWQEKKSNTILGSQEGNTMKTNDTYMKFSWLTVPEKSLDKEHRCIVRHENNKNGVDQEIIFPPIKTDVITMDPKDNCSKDANDTLLLQLTNTSAYYMYLLLLLKSVVYFAIITCCLLRRTAFCCNGEKS

SEQ ID NO: 15687 - protein, 728 aa, synthetic construct
MALPVTALLLPLALLLHAARPDDIVLTQTPATLSVTPGDSVSLSCRASQSISNNLHWYQQKSHESPRLLIKNASQSISGIPSKFSGSGSGTDFTLRINSVETEDFGMYFCQQSNSWPYTFGSGTKLEIKLEIQNPDPAVYQLRDSKSSDKSVCLFTDFDSQTNVSQSKDSDVYITDKCVLDMRSMDFKSNSAVAWSNKSDFACANAFNNSIIPEDTFFPSPESSDSTDHVKPKETENTKQPSKSCHKPKAIVHTEKVNMMSLTVLGLRMLFAKTVAVNFLLTAKLFFLRAKRSGSGVKQTLNFDLLKLAGDVESNPGPTSMDWIWRILFLVGAATGAHSFEQVKLQQSGPELVKPGASVKISCKASGYSFTGYYMHWVKQSHGNILDWIGYIYPYNGVSSYNQKFKGKATLTVDKSSSTAYMELRSLTSEDSAVYYCARERGLYQLRAMDYWGQGTSVTVSSTREDLKNVFPPEVAVFEPSEAEISHTQKATLVCLATGFYPDHVELSWWVNGKEVHSGVCTDPQPLKEQPALNDSRYCLSSRLRVSATFWQNPRNHFRCQVQFYGLSENDEWTQDRAKPVTQIVSAEAWGRADDVIKIHWQEKKSNTILGSQEGNTMKTNDTYMKFSWLTVPEKSLDKEHRCIVRHENNKNGVDQEIIFPPIKTDVITMDPKDNCSKDANDTLLLQLTNTSAYYMYLLLLLKSVVYFAIITCCLLRRTAFCCNGEKS

SEQ ID NO: 15688 - protein, 719 aa, synthetic construct
MALPVTALLLPLALLLHAARPDDIVMTQTPAIMSASPGQKVTITCSASSSVNYMHWYQQKLGSSPKLWIYDTSKLAPGVPARFSGSGSGTSYSLTISSMEAEDAASYFCHQWSSYPYTFGSGTKLEIKLEIQNPDPAVYQLRDSKSSDKSVCLFTDFDSQTNVSQSKDSDVYITDKCVLDMRSMDFKSNSAVAWSNKSDFACANAFNNSIIPEDTFFPSPESSDSTDHVKPKETENTKQPSKSCHKPKAIVHTEKVNMMSLTVLGLRMLFAKTVAVNFLLTAKLFFLRAKRSGSGVKQTLNFDLLKLAGDVESNPGPTSMDWIWRILFLVGAATGAHSFEEVQLQESGPDLVKPSQSLSLTCTVTGYSITSGYGWHWIRQFPGNKLEWMGYIHYSGSTTYNPSLKSRISISRDTSKNQFFLQLNSVTTEDTATYYCARSLRYWGQGTTLTVSSTREDLKNVFPPEVAVFEPSEAEISHTQKATLVCLATGFYPDHVELSWWVNGKEVHSGVCTDPQPLKEQPALNDSRYCLSSRLRVSATFWQNPRNHFRCQVQFYGLSENDEWTQDRAKPVTQIVSAEAWGRADDVIKIHWQEKKSNTILGSQEGNTMKTNDTYMKFSWLTVPEKSLDKEHRCIVRHENNKNGVDQEIIFPPIKTDVITMDPKDNCSKDANDTLLLQLTNTSAYYMYLLLLLKSVVYFAIITCCLLRRTAFCCNGEKS

SEQ ID NO: 15689 - protein, 722 aa, synthetic construct
MALPVTALLLPLALLLHAARPDDIQMTQSPSSLSASVGDRVTITCSATSSISYMHWYQQKPGKAPKGWIYDTSKLAHGVPSRFSGSGSGTDFTLTISSLQPEDFATYYCHQRRSYPFTFGQGTKVEIKLEIQNPDPAVYQLRDSKSSDKSVCLFTDFDSQTNVSQSKDSDVYITDKCVLDMRSMDFKSNSAVAWSNKSDFACANAFNNSIIPEDTFFPSPESSDSTDHVKPKETENTKQPSKSCHKPKAIVHTEKVNMMSLTVLGLRMLFAKTVAVNFLLTAKLFFLRAKRSGSGVKQTLNFDLLKLAGDVESNPGPTSMDWIWRILFLVGAATGAHSFEEVQLVQSGAEVKKPGASVKVSCKASGYTFTNFWIHWVRQAPGQGLEWIGEIDPSDSYTNYNQKFKGRVTITRDTSTSTAYLELSSLRSEDTAVYYCAREITTVDYWGQGTLVTVSSTREDLKNVFPPEVAVFEPSEAEISHTQKATLVCLATGFYPDHVELSWWVNGKEVHSGVCTDPQPLKEQPALNDSRYCLSSRLRVSATFWQNPRNHFRCQVQFYGLSENDEWTQDRAKPVTQIVSAEAWGRADDVIKIHWQEKKSNTILGSQEGNTMKTNDTYMKFSWLTVPEKSLDKEHRCIVRHENNKNGVDQEIIFPPIKTDVITMDPKDNCSKDANDTLLLQLTNTSAYYMYLLLLLKSVVYFAIITCCLLRRTAFCCNGEKS

SEQ ID NO: 15690 - protein, 729 aa, synthetic construct
MALPVTALLLPLALLLHAARPDDIQMTQSPSSLSASVGDRVTITCKASQGFNKYVAWYQQKPGKAPKLLIYYTSTLQPGVPSRFSGSGSGRDYTLTISSLQPEDFATYYCLQYGNLLYAFGQGTKVEIKRLEIQNPDPAVYQLRDSKSSDKSVCLFTDFDSQTNVSQSKDSDVYITDKCVLDMRSMDFKSNSAVAWSNKSDFACANAFNNSIIPEDTFFPSPESSDSTDHVKPKETENTKQPSKSCHKPKAIVHTEKVNMMSLTVLGLRMLFAKTVAVNFLLTAKLFFLRAKRSGSGVKQTLNFDLLKLAGDVESNPGPTSMDWIWRILFLVGAATGAHSFEEVQLVQSGAEVKKPGASVKVSCKASGYTFTSYWIGWVRQAPGQGLEWIGDIYPGGGYTNYNEKFKGRVTITRDTSTSTAYLELSSLRSEDTAVYYCARLDGSSYRGAMDSWGQGTLVTVSSTREDLKNVFPPEVAVFEPSEAEISHTQKATLVCLATGFYPDHVELSWWVNGKEVHSGVCTDPQPLKEQPALNDSRYCLSSRLRVSATFWQNPRNHFRCQVQFYGLSENDEWTQDRAKPVTQIVSAEAWGRADDVIKIHWQEKKSNTILGSQEGNTMKTNDTYMKFSWLTVPEKSLDKEHRCIVRHENNKNGVDQEIIFPPIKTDVITMDPKDNCSKDANDTLLLQLTNTSAYYMYLLLLLKSVVYFAIITCCLLRRTAFCCNGEKS

SEQ ID NO: 15691 - protein, 725 aa, synthetic construct
MALPVTALLLPLALLLHAARPDDIQMTQSPSSLSASVGDRVTITCRASQDIRYYLNWYQQKPGKAPKLLIYVASSLQSGVPSRFSGSGSGTEFTLTVSSLQPEDFATYYCLQVYSTPRTFGQGTKVEIKLEIQNPDPAVYQLRDSKSSDKSVCLFTDFDSQTNVSQSKDSDVYITDKCVLDMRSMDFKSNSAVAWSNKSDFACANAFNNSIIPEDTFFPSPESSDSTDHVKPKETENTKQPSKSCHKPKAIVHTEKVNMMSLTVLGLRMLFAKTVAVNFLLTAKLFFLRAKRSGSGVKQTLNFDLLKLAGDVESNPGPTSMDWIWRILFLVGAATGAHSFEEVQLVESGGGLAKPGGSLRLSCAASGFRFTFNNYYMDWVRQAPGQGLEWVSRISSSGDPTWYADSVKGRFTISRENAKNTLFLQMNSLRAEDTAVYYCASLTTGSDSWGQGVLVTVSSTREDLKNVFPPEVAVFEPSEAEISHTQKATLVCLATGFYPDHVELSWWVNGKEVHSGVCTDPQPLKEQPALNDSRYCLSSRLRVSATFWQNPRNHFRCQVQFYGLSENDEWTQDRAKPVTQIVSAEAWGRADDVIKIHWQEKKSNTILGSQEGNTMKTNDTYMKFSWLTVPEKSLDKEHRCIVRHENNKNGVDQEIIFPPIKTDVITMDPKDNCSKDANDTLLLQLTNTSAYYMYLLLLLKSVVYFAIITCCLLRRTAFCCNGEKS

SEQ ID NO: 15692 - protein, 725 aa, synthetic construct
MALPVTALLLPLALLLHAARPEIVMTQSPATLSVSPGERATLSCRASQSVSRNLAWYQQKPGQAPRLLIYGASTRATGIPARFSGSGSGTEFTLTIGSLQSEDFAVYYCQQYKTWPRTFGQGTNVEIKLEIQNPDPAVYQLRDSKSSDKSVCLFTDFDSQTNVSQSKDSDVYITDKCVLDMRSMDFKSNSAVAWSNKSDFACANAFNNSIIPEDTFFPSPESSDSTDHVKPKETENTKQPSKSCHKPKAIVHTEKVNMMSLTVLGLRMLFAKTVAVNFLLTAKLFFLRAKRSGSGVKQTLNFDLLKLAGDVESNPGPTSMDWIWRILFLVGAATGAHSFEQVQLQQWGAGLLKPSETLSLTCAVFGGSFSGYYWSWIRQPPGKGLEWIGEINHRGNTNDNPSLKSRVTISVDTSKNQFALKLSSVTAADTAVYYCARERGYTYGNFDHWGQGTLVTVSSTREDLKNVFPPEVAVFEPSEAEISHTQKATLVCLATGFYPDHVELSWWVNGKEVHSGVCTDPQPLKEQPALNDSRYCLSSRLRVSATFWQNPRNHFRCQVQFYGLSENDEWTQDRAKPVTQIVSAEAWGRADDVIKIHWQEKKSNTILGSQEGNTMKTNDTYMKFSWLTVPEKSLDKEHRCIVRHENNKNGVDQEIIFPPIKTDVITMDPKDNCSKDANDTLLLQLTNTSAYYMYLLLLLKSVVYFAIITCCLLRRTAFCCNGEKS

SEQ ID NO: 15693 - protein, 726 aa, synthetic construct
MALPVTALLLPLALLLHAARPEIVMTPSSATLSVSPGERATLSCRASQSVSRNLAWYQQKPGQAPRLLIYGASTRATGIPARFSGSGSGTEFTLTISSLQSEDFAVYYCHQYSNWMCSFGQGTKLEIKLEIQNPDPAVYQLRDSKSSDKSVCLFTDFDSQTNVSQSKDSDVYITDKCVLDMRSMDFKSNSAVAWSNKSDFACANAFNNSIIPEDTFFPSPESSDSTDHVKPKETENTKQPSKSCHKPKAIVHTEKVNMMSLTVLGLRMLFAKTVAVNFLLTAKLFFLRAKRSGSGVKQTLNFDLLKLAGDVESNPGPTSMDWIWRILFLVGAATGAHSFEEVQLLESGGGLVQPGGSLRLSCAASGFTFSRYAMNWVRQAPGKGLEWVSGISGSGGRTYYADSVKGRFTISRDNSKNTLYLQMNSLRAEDTAVYYCAKDRDFWSGPFDYWGQGTLVTVSSTREDLKNVFPPEVAVFEPSEAEISHTQKATLVCLATGFYPDHVELSWWVNGKEVHSGVCTDPQPLKEQPALNDSRYCLSSRLRVSATFWQNPRNHFRCQVQFYGLSENDEWTQDRAKPVTQIVSAEAWGRADDVIKIHWQEKKSNTILGSQEGNTMKTNDTYMKFSWLTVPEKSLDKEHRCIVRHENNKNGVDQEIIFPPIKTDVITMDPKDNCSKDANDTLLLQLTNTSAYYMYLLLLLKSVVYFAIITCCLLRRTAFCCNGEKS

SEQ ID NO: 15694 - protein, 731 aa, synthetic construct
MALPVTALLLPLALLLHAARPDIQMTQSPSSLSASVGDRVTITCKASKNIRSYLAWYQQKPGKAPKLLIYSGSTLHSGVPSRFSGSGSGTDFTLTISSLQPEDFATYYCQQHHEYPLTFGQGTKVEIKRLEIQNPDPAVYQLRDSKSSDKSVCLFTDFDSQTNVSQSKDSDVYITDKCVLDMRSMDFKSNSAVAWSNKSDFACANAFNNSIIPEDTFFPSPESSDSTDHVKPKETENTKQPSKSCHKPKAIVHTEKVNMMSLTVLGLRMLFAKTVAVNFLLTAKLFFLRAKRSGSGVKQTLNFDLLKLAGDVESNPGPTSMDWIWRILFLVGAATGAHSFEQVQLQESGPGLVKPSETLSLTCTVSGYTITSGYDWSWIRQPPGKGLEWIGYINYGGSTNYKPSLGSRVTISVDTSKNQFSLKLSSVTAADTAVYYCARYNEYKSYIYDWYFDFWGQGTLVTVSSTREDLKNVFPPEVAVFEPSEAEISHTQKATLVCLATGFYPDHVELSWWVNGKEVHSGVCTDPQPLKEQPALNDSRYCLSSRLRVSATFWQNPRNHFRCQVQFYGLSENDEWTQDRAKPVTQIVSAEAWGRADDVIKIHWQEKKSNTILGSQEGNTMKTNDTYMKFSWLTVPEKSLDKEHRCIVRHENNKNGVDQEIIFPPIKTDVITMDPKDNCSKDANDTLLLQLTNTSAYYMYLLLLLKSVVYFAIITCCLLRRTAFCCNGEKS

SEQ ID NO: 15695 - protein, 733 aa, synthetic construct
MALPVTALLLPLALLLHAARPQSVVTQPPSVSAAPGQKVTISCSGSSSNIGNNYVSWYQQLPGTAPKLLIYDNNKRPSGIPDRFSGSKSGTSATLGITGLQTGDEADYYCGTWDGSLYTMLFGGGTKLTVLLEIQNPDPAVYQLRDSKSSDKSVCLFTDFDSQTNVSQSKDSDVYITDKCVLDMRSMDFKSNSAVAWSNKSDFACANAFNNSIIPEDTFFPSPESSDSTDHVKPKETENTKQPSKSCHKPKAIVHTEKVNMMSLTVLGLRMLFAKTVAVNFLLTAKLFFLRAKRSGSGVKQTLNFDLLKLAGDVESNPGPTSMDWIWRILFLVGAATGAHSFEEVQLVESGGGLVKPGGSLRLSCAASGFTFSNAWMSWVRQAPGKGLEWVGFIRSKAYGGTTEYAASVKGRFTISRDDSKSIAYLQMNNLKTEDTAVYYCARDGLYSSSWYDSDYWGQGTLVTVSSTREDLKNVFPPEVAVFEPSEAEISHTQKATLVCLATGFYPDHVELSWWVNGKEVHSGVCTDPQPLKEQPALNDSRYCLSSRLRVSATFWQNPRNHFRCQVQFYGLSENDEWTQDRAKPVTQIVSAEAWGRADDVIKIHWQEKKSNTILGSQEGNTMKTNDTYMKFSWLTVPEKSLDKEHRCIVRHENNKNGVDQEIIFPPIKTDVITMDPKDNCSKDANDTLLLQLTNTSAYYMYLLLLLKSVVYFAIITCCLLRRTAFCCNGEKS

SEQ ID NO: 15696 - protein, 738 aa, synthetic construct
MALPVTALLLPLALLLHAARPQSVLTQPPSVSGAPGQRVTISCTGSSSNIGAGYDVHWYQQLPGTAPKLLIFGNSNRPSGVPDRFSGFKSGTSASLAITGLQAEDEADYFCQSYDSSLSGSGVFGTGTKVTVLGLEIQNPDPAVYQLRDSKSSDKSVCLFTDFDSQTNVSQSKDSDVYITDKCVLDMRSMDFKSNSAVAWSNKSDFACANAFNNSIIPEDTFFPSPESSDSTDHVKPKETENTKQPSKSCHKPKAIVHTEKVNMMSLTVLGLRMLFAKTVAVNFLLTAKLFFLRAKRSGSGVKQTLNFDLLKLAGDVESNPGPTSMDWIWRILFLVGAATGAHSFEQMQLVQSGGGLVQPGRSLRLSCAASGFTFDDYAMHWVRQAPGKGLEWVSGISWNSGSIGYADSVKGRFTISRDNAKNSLYLQMNSLRAEDTALYYCAKDIHSGSYYGLLYYAMDVWGQGTTVTVSSTREDLKNVFPPEVAVFEPSEAEISHTQKATLVCLATGFYPDHVELSWWVNGKEVHSGVCTDPQPLKEQPALNDSRYCLSSRLRVSATFWQNPRNHFRCQVQFYGLSENDEWTQDRAKPVTQIVSAEAWGRADDVIKIHWQEKKSNTILGSQEGNTMKTNDTYMKFSWLTVPEKSLDKEHRCIVRHENNKNGVDQEIIFPPIKTDVITMDPKDNCSKDANDTLLLQLTNTSAYYMYLLLLLKSVVYFAIITCCLLRRTAFCCNGEKS

SEQ ID NO: 15697 - protein, 738 aa, synthetic construct
MALPVTALLLPLALLLHAARPLPVLTQPPSASGTPGQRVTISCSGRSSNIGSNSVNWYRQLPGAAPKLLIYSNNQRPPGVPVRFSGSKSGTSASLAISGLQSEDEATYYCATWDDNLNVHYVFGTGTKVTVLGSRLEIQNPDPAVYQLRDSKSSDKSVCLFTDFDSQTNVSQSKDSDVYITDKCVLDMRSMDFKSNSAVAWSNKSDFACANAFNNSIIPEDTFFPSPESSDSTDHVKPKETENTKQPSKSCHKPKAIVHTEKVNMMSLTVLGLRMLFAKTVAVNFLLTAKLFFLRAKRSGSGVKQTLNFDLLKLAGDVESNPGPTSMDWIWRILFLVGAATGAHSFELEMAQVQLVQSGAEVKKPGSSVKVSCKASGGTFSSYAISWVRQAPGQGLEWMGRIIPILGIANYAQKFQGRVTITADKSTSTAYMELSSLRSEDTAVYYCARGGYYSHDMWSEDWGQGTLVTVSSTREDLKNVFPPEVAVFEPSEAEISHTQKATLVCLATGFYPDHVELSWWVNGKEVHSGVCTDPQPLKEQPALNDSRYCLSSRLRVSATFWQNPRNHFRCQVQFYGLSENDEWTQDRAKPVTQIVSAEAWGRADDVIKIHWQEKKSNTILGSQEGNTMKTNDTYMKFSWLTVPEKSLDKEHRCIVRHENNKNGVDQEIIFPPIKTDVITMDPKDNCSKDANDTLLLQLTNTSAYYMYLLLLLKSVVYFAIITCCLLRRTAFCCNGEKS

SEQ ID NO: 15698 - protein, 732 aa, synthetic construct
MALPVTALLLPLALLLHAARPDFVMTQSPDSLAVSLGERVTMSCKSSQSLLNSGNQKNYLTWYQQKPGQPPKLLIYWASTRESGVPDRFSGSGSGTDFTLTISSLQAEDVAVYYCQNDYSYPYTFGQGTKLEIKLEIQNPDPAVYQLRDSKSSDKSVCLFTDFDSQTNVSQSKDSDVYITDKCVLDMRSMDFKSNSAVAWSNKSDFACANAFNNSIIPEDTFFPSPESSDSTDHVKPKETENTKQPSKSCHKPKAIVHTEKVNMMSLTVLGLRMLFAKTVAVNFLLTAKLFFLRAKRSGSGVKQTLNFDLLKLAGDVESNPGPTSMDWIWRILFLVGAATGAHSFEEVQLVQSGAELKKPGASVKVSCKASGYTFTDYYMKWVRQAPGQGLEWIGDIIPSNGATFYNQKFKGRVTITVDKSTSTAYMELSSLRSEDTAVYYCARSHLLRASWFAYWGQGTLVTVSSTREDLKNVFPPEVAVFEPSEAEISHTQKATLVCLATGFYPDHVELSWWVNGKEVHSGVCTDPQPLKEQPALNDSRYCLSSRLRVSATFWQNPRNHFRCQVQFYGLSENDEWTQDRAKPVTQIVSAEAWGRADDVIKIHWQEKKSNTILGSQEGNTMKTNDTYMKFSWLTVPEKSLDKEHRCIVRHENNKNGVDQEIIFPPIKTDVITMDPKDNCSKDANDTLLLQLTNTSAYYMYLLLLLKSVVYFAIITCCLLRRTAFCCNGEKS

SEQ ID NO: 15699 - protein, 732 aa, synthetic construct
MALPVTALLLPLALLLHAARPDFVMTQSPDSLAVSLGERVTMSCKSSQSLLNSGNQKNYLTWYQQKPGQPPKLLIYWASTRESGVPDRFSGSGSGTDFTLTISSLQAEDVAVYYCQNDYSYPYTFGQGTKLEIKLEIQNPDPAVYQLRDSKSSDKSVCLFTDFDSQTNVSQSKDSDVYITDKCVLDMRSMDFKSNSAVAWSNKSDFACANAFNNSIIPEDTFFPSPESSDSTDHVKPKETENTKQPSKSCHKPKAIVHTEKVNMMSLTVLGLRMLFAKTVAVNFLLTAKLFFLRAKRSGSGVKQTLNFDLLKLAGDVESNPGPTSMDWIWRILFLVGAATGAHSFEQVQLVQSGAELKKPGASVKVSCKASGYTFTDYYMKWVRQAPGQGLEWIGDIIPSNGATFYNQKFKGRVTITVDKSTSTAYMELSSLRSEDTAVYYCARSHLLRASWFAYWGQGTLVTVSSTREDLKNVFPPEVAVFEPSEAEISHTQKATLVCLATGFYPDHVELSWWVNGKEVHSGVCTDPQPLKEQPALNDSRYCLSSRLRVSATFWQNPRNHFRCQVQFYGLSENDEWTQDRAKPVTQIVSAEAWGRADDVIKIHWQEKKSNTILGSQEGNTMKTNDTYMKFSWLTVPEKSLDKEHRCIVRHENNKNGVDQEIIFPPIKTDVITMDPKDNCSKDANDTLLLQLTNTSAYYMYLLLLLKSVVYFAIITCCLLRRTAFCCNGEKS

SEQ ID NO: 15700 - protein, 722 aa, synthetic construct
MALPVTALLLPLALLLHAARPDVQITQSPSYLAASPGETITINCRASKSISKDLAWYQEKPGKTNKLLIYSGSTLQSGIPSRFSGSGSGTDFTLTISSLEPEDFAMYYCQQHNKYPYTFGGGTKLEIKRLEIQNPDPAVYQLRDSKSSDKSVCLFTDFDSQTNVSQSKDSDVYITDKCVLDMRSMDFKSNSAVAWSNKSDFACANAFNNSIIPEDTFFPSPESSDSTDHVKPKETENTKQPSKSCHKPKAIVHTEKVNMMSLTVLGLRMLFAKTVAVNFLLTAKLFFLRAKRSGSGVKQTLNFDLLKLAGDVESNPGPTSMDWIWRILFLVGAATGAHSFEQVQLQQPGAELVRPGASVKLSCKASGYTFTSYWMNWVKQRPDQGLEWIGRIDPYDSETHYNQKFKDKAILTVDKSSSTAYMQLSSLTSEDSAVYYCARGNWDDYWGQGTTLTVSSTREDLKNVFPPEVAVFEPSEAEISHTQKATLVCLATGFYPDHVELSWWVNGKEVHSGVCTDPQPLKEQPALNDSRYCLSSRLRVSATFWQNPRNHFRCQVQFYGLSENDEWTQDRAKPVTQIVSAEAWGRADDVIKIHWQEKKSNTILGSQEGNTMKTNDTYMKFSWLTVPEKSLDKEHRCIVRHENNKNGVDQEIIFPPIKTDVITMDPKDNCSKDANDTLLLQLTNTSAYYMYLLLLLKSVVYFAIITCCLLRRTAFCCNGEKS

SEQ ID NO: 15701 - protein, 724 aa, synthetic construct
MALPVTALLLPLALLLHAARPEIVLTQSPTSMTASPGEQVTITCRASSSINYMHWYQQKPGASPRPWIYETSKLASGVPDRFSGSASGTSYSLTINNMEAEDAATYYCQQWNYPSWTFGGGTKLELKLEIQNPDPAVYQLRDSKSSDKSVCLFTDFDSQTNVSQSKDSDVYITDKCVLDMRSMDFKSNSAVAWSNKSDFACANAFNNSIIPEDTFFPSPESSDSTDHVKPKETENTKQPSKSCHKPKAIVHTEKVNMMSLTVLGLRMLFAKTVAVNFLLTAKLFFLRAKRSGSGVKQTLNFDLLKLAGDVESNPGPTSMDWIWRILFLVGAATGAHSFEEVQLVESGGGLVQPGRSLKLSCAASGFTFSDYNMAWVRQAPKKGLEWVATILYDGGRTYYRGSVKGRFTISRDNAKSTLYLRMDSLRSEDTATYYCATHSRGTDYFDYWGQGVMVTVSSTREDLKNVFPPEVAVFEPSEAEISHTQKATLVCLATGFYPDHVELSWWVNGKEVHSGVCTDPQPLKEQPALNDSRYCLSSRLRVSATFWQNPRNHFRCQVQFYGLSENDEWTQDRAKPVTQIVSAEAWGRADDVIKIHWQEKKSNTILGSQEGNTMKTNDTYMKFSWLTVPEKSLDKEHRCIVRHENNKNGVDQEIIFPPIKTDVITMDPKDNCSKDANDTLLLQLTNTSAYYMYLLLLLKSVVYFAIITCCLLRRTAFCCNGEKS

SEQ ID NO: 15702 - protein, 733 aa, synthetic construct
MALPVTALLLPLALLLHAARPDIVMTQSPSSLAVSEGETVTINCKSSQSFLSSGDGKNYVAWYQYKPGQSPKLLIYWASTRQSGVPDRFIGSGSGTDFTLTISTVQAEDLAIYYCQQYYDTPLTFGSGTKLEIKLEIQNPDPAVYQLRDSKSSDKSVCLFTDFDSQTNVSQSKDSDVYITDKCVLDMRSMDFKSNSAVAWSNKSDFACANAFNNSIIPEDTFFPSPESSDSTDHVKPKETENTKQPSKSCHKPKAIVHTEKVNMMSLTVLGLRMLFAKTVAVNFLLTAKLFFLRAKRSGSGVKQTLNFDLLKLAGDVESNPGPTSMDWIWRILFLVGAATGAHSFEEVKLQESGPSLVQSSQTLSLTCTVSGFSLTSYHIHWVRQTPGKGLEWMGVMWSDGDTSYNSALKSRLSISRDTSQSQVFLKMNSLQTEDTATYYCARGYYSSYLYLWFAYWGQGTLVTVSSTREDLKNVFPPEVAVFEPSEAEISHTQKATLVCLATGFYPDHVELSWWVNGKEVHSGVCTDPQPLKEQPALNDSRYCLSSRLRVSATFWQNPRNHFRCQVQFYGLSENDEWTQDRAKPVTQIVSAEAWGRADDVIKIHWQEKKSNTILGSQEGNTMKTNDTYMKFSWLTVPEKSLDKEHRCIVRHENNKNGVDQEIIFPPIKTDVITMDPKDNCSKDANDTLLLQLTNTSAYYMYLLLLLKSVVYFAIITCCLLRRTAFCCNGEKS

SEQ ID NO: 15703 - protein, 737 aa, synthetic construct
MALPVTALLLPLALLLHAARPDVLMTQTPVSLPVSLGGQVSISCRSSQSLVHSDGDTYLHWYLQKPGQSPQLLIYRVSNRFSGVPDRFSGSGSGTDFTLKISRVEPEDLGLYYCLQTTHFPPWTFGGGTKLEMKLEIQNPDPAVYQLRDSKSSDKSVCLFTDFDSQTNVSQSKDSDVYITDKCVLDMRSMDFKSNSAVAWSNKSDFACANAFNNSIIPEDTFFPSPESSDSTDHVKPKETENTKQPSKSCHKPKAIVHTEKVNMMSLTVLGLRMLFAKTVAVNFLLTAKLFFLRAKRSGSGVKQTLNFDLLKLAGDVESNPGPTSMDWIWRILFLVGAATGAHSFEQVQLQQSGPELRRPGSSVRLSCKASGYRIKDFLIHWIKNRPEHGLEWIGWIDPEDGETKYAQKFQTKATLTADTSSNTAYMQLSSLTSEDTATYFCARWGDVYYGLMRGHVMDAWGQGTSVTVSSTREDLKNVFPPEVAVFEPSEAEISHTQKATLVCLATGFYPDHVELSWWVNGKEVHSGVCTDPQPLKEQPALNDSRYCLSSRLRVSATFWQNPRNHFRCQVQFYGLSENDEWTQDRAKPVTQIVSAEAWGRADDVIKIHWQEKKSNTILGSQEGNTMKTNDTYMKFSWLTVPEKSLDKEHRCIVRHENNKNGVDQEIIFPPIKTDVITMDPKDNCSKDANDTLLLQLTNTSAYYMYLLLLLKSVVYFAIITCCLLRRTAFCCNGEKS

SEQ ID NO: 15704 - protein, 732 aa, synthetic construct
MALPVTALLLPLALLLHAARPDIVMTQSPATLSLSPGERATLSCRSSKSLQNVNGNTYLYWFQQKPGQSPQLLIYRMSNLNSGVPDRFSGSGSGTEFTLTISSLEPEDFAVYYCMQHLEYPITFGAGTKLEIKLEIQNPDPAVYQLRDSKSSDKSVCLFTDFDSQTNVSQSKDSDVYITDKCVLDMRSMDFKSNSAVAWSNKSDFACANAFNNSIIPEDTFFPSPESSDSTDHVKPKETENTKQPSKSCHKPKAIVHTEKVNMMSLTVLGLRMLFAKTVAVNFLLTAKLFFLRAKRSGSGVKQTLNFDLLKLAGDVESNPGPTSMDWIWRILFLVGAATGAHSFEEVQLVESGGGLVKPGGSLKLSCAASGYTFTSYVMHWVRQAPGKGLEWIGYINPYNDGTKYNEKFQGRVTISSDKSISTAYMELSSLRSEDTAMYYCARGTYYYGTRVFDYWGQGTLVTVSSTREDLKNVFPPEVAVFEPSEAEISHTQKATLVCLATGFYPDHVELSWWVNGKEVHSGVCTDPQPLKEQPALNDSRYCLSSRLRVSATFWQNPRNHFRCQVQFYGLSENDEWTQDRAKPVTQIVSAEAWGRADDVIKIHWQEKKSNTILGSQEGNTMKTNDTYMKFSWLTVPEKSLDKEHRCIVRHENNKNGVDQEIIFPPIKTDVITMDPKDNCSKDANDTLLLQLTNTSAYYMYLLLLLKSVVYFAIITCCLLRRTAFCCNGEKS

SEQ ID NO: 15705 - protein, 728 aa, synthetic construct
MALPVTALLLPLALLLHAARPDIQMTQSPSSLSASVGDRVTITCKASDHINNWLAWYQQKPGQAPKLLIYGATTLETGVPSRFSGSGSGTDYTLTISSLQPEDFATYYCQQSWNTPWTFGQGTKLEIKRLEIQNPDPAVYQLRDSKSSDKSVCLFTDFDSQTNVSQSKDSDVYITDKCVLDMRSMDFKSNSAVAWSNKSDFACANAFNNSIIPEDTFFPSPESSDSTDHVKPKETENTKQPSKSCHKPKAIVHTEKVNMMSLTVLGLRMLFAKTVAVNFLLTAKLFFLRAKRSGSGVKQTLNFDLLKLAGDVESNPGPTSMDWIWRILFLVGAATGAHSFEQVQLQQPGAELVKPGASVKMSCKASGYAFSSYWINWMKQKPGQGLEWIGQIYPGDGDTNYNGKFKGRATLTADTSSSTAYMQLSSLTSEDSAVYFCARSITTVVGCAMDYWGQGTSVTVSSTREDLKNVFPPEVAVFEPSEAEISHTQKATLVCLATGFYPDHVELSWWVNGKEVHSGVCTDPQPLKEQPALNDSRYCLSSRLRVSATFWQNPRNHFRCQVQFYGLSENDEWTQDRAKPVTQIVSAEAWGRADDVIKIHWQEKKSNTILGSQEGNTMKTNDTYMKFSWLTVPEKSLDKEHRCIVRHENNKNGVDQEIIFPPIKTDVITMDPKDNCSKDANDTLLLQLTNTSAYYMYLLLLLKSVVYFAIITCCLLRRTAFCCNGEKS

SEQ ID NO: 15706 - protein, 730 aa, synthetic construct
MALPVTALLLPLALLLHAARPQIVLSQSPAILSASPGEKVTMTCRASSSVSYMHWYQQKPGSSPKPWIYATSNLASGVPARFSGSGSGTSYSFTISRVEAEDAATYYCQQWTFNPPTFGGGTRLEIKRTVAALEIQNPDPAVYQLRDSKSSDKSVCLFTDFDSQTNVSQSKDSDVYITDKCVLDMRSMDFKSNSAVAWSNKSDFACANAFNNSIIPEDTFFPSPESSDSTDHVKPKETENTKQPSKSCHKPKAIVHTEKVNMMSLTVLGLRMLFAKTVAVNFLLTAKLFFLRAKRSGSGVKQTLNFDLLKLAGDVESNPGPTSMDWIWRILFLVGAATGAHSFEQAYLQQSGAELVRPGASVKMSCKASGYTFTSYNMHWVKQTPRQGLEWIGGIYPGNGDTSYNQKFKGKATLTVGKSSSTAYMQLSSLTSEDSAVYFCARYDYNYAMDYWGQGTSVTVSSASTREDLKNVFPPEVAVFEPSEAEISHTQKATLVCLATGFYPDHVELSWWVNGKEVHSGVCTDPQPLKEQPALNDSRYCLSSRLRVSATFWQNPRNHFRCQVQFYGLSENDEWTQDRAKPVTQIVSAEAWGRADDVIKIHWQEKKSNTILGSQEGNTMKTNDTYMKFSWLTVPEKSLDKEHRCIVRHENNKNGVDQEIIFPPIKTDVITMDPKDNCSKDANDTLLLQLTNTSAYYMYLLLLLKSVVYFAIITCCLLRRTAFCCNGEKS

SEQ ID NO: 15707 - protein, 728 aa, synthetic construct
MALPVTALLLPLALLLHAARPEIVLTQSPATLSLSPGERATLSCRASQSVSSYLAWYQQKPGQAPRLLIYDASNRATGIPARFSGSGSGTDFTLTISSLEPEDFAVYYCQQRSNWPITFGQGTRLEIKLEIQNPDPAVYQLRDSKSSDKSVCLFTDFDSQTNVSQSKDSDVYITDKCVLDMRSMDFKSNSAVAWSNKSDFACANAFNNSIIPEDTFFPSPESSDSTDHVKPKETENTKQPSKSCHKPKAIVHTEKVNMMSLTVLGLRMLFAKTVAVNFLLTAKLFFLRAKRSGSGVKQTLNFDLLKLAGDVESNPGPTSMDWIWRILFLVGAATGAHSFEEVQLVESGGGLVQPDRSLRLSCAASGFTFHDYAMHWVRQAPGKGLEWVSTISWNSGTIGYADSVKGRFTISRDNAKNSLYLQMNSLRAEDTALYYCAKDIQYGNYYYGMDVWGQGTTVTVSSTREDLKNVFPPEVAVFEPSEAEISHTQKATLVCLATGFYPDHVELSWWVNGKEVHSGVCTDPQPLKEQPALNDSRYCLSSRLRVSATFWQNPRNHFRCQVQFYGLSENDEWTQDRAKPVTQIVSAEAWGRADDVIKIHWQEKKSNTILGSQEGNTMKTNDTYMKFSWLTVPEKSLDKEHRCIVRHENNKNGVDQEIIFPPIKTDVITMDPKDNCSKDANDTLLLQLTNTSAYYMYLLLLLKSVVYFAIITCCLLRRTAFCCNGEKS

SEQ ID NO: 15708 - protein, 723 aa, synthetic construct
MALPVTALLLPLALLLHAARPDIQMTQSPSSLSASVGDRVTINCKASQDINSYLSWFQQKPGKAPKTLIYRANRLVDGVPSRFSGSGSGQDYTLTISSLQPEDFATYYCLQYDEFPLTFGGGTKVEIKLEIQNPDPAVYQLRDSKSSDKSVCLFTDFDSQTNVSQSKDSDVYITDKCVLDMRSMDFKSNSAVAWSNKSDFACANAFNNSIIPEDTFFPSPESSDSTDHVKPKETENTKQPSKSCHKPKAIVHTEKVNMMSLTVLGLRMLFAKTVAVNFLLTAKLFFLRAKRSGSGVKQTLNFDLLKLAGDVESNPGPTSMDWIWRILFLVGAATGAHSFEQVQLVQSGAEVKKPGASVKVSCKASGYTFTNYDINWVRQAPGQGLEWIGWIYPGDGSTKYNEKFKAKATLTADTSTSTAYMELRSLRSDDTAVYYCASGYEDAMDYWGQGTTVTVSSTREDLKNVFPPEVAVFEPSEAEISHTQKATLVCLATGFYPDHVELSWWVNGKEVHSGVCTDPQPLKEQPALNDSRYCLSSRLRVSATFWQNPRNHFRCQVQFYGLSENDEWTQDRAKPVTQIVSAEAWGRADDVIKIHWQEKKSNTILGSQEGNTMKTNDTYMKFSWLTVPEKSLDKEHRCIVRHENNKNGVDQEIIFPPIKTDVITMDPKDNCSKDANDTLLLQLTNTSAYYMYLLLLLKSVVYFAIITCCLLRRTAFCCNGEKS

SEQ ID NO: 15709 - protein, 725 aa, synthetic construct
MALPVTALLLPLALLLHAARPDIVMTQTPLSLSVTPGQPASISCKSSQSLLDGDGKTYLNWLLQKPGQSPQRLIYLVSKLDSGVPDRFSGSGSGTDFTLKISRVEAEDVGVYYCWQGTHFPRTFGQGTKLEIKLEIQNPDPAVYQLRDSKSSDKSVCLFTDFDSQTNVSQSKDSDVYITDKCVLDMRSMDFKSNSAVAWSNKSDFACANAFNNSIIPEDTFFPSPESSDSTDHVKPKETENTKQPSKSCHKPKAIVHTEKVNMMSLTVLGLRMLFAKTVAVNFLLTAKLFFLRAKRSGSGVKQTLNFDLLKLAGDVESNPGPTSMDWIWRILFLVGAATGAHSFEQVQLVQSGAEVKKPGASVKVSCKASGYTFKDTYIHWVRQAPGQGLEWMGRIDPANGNTKYDPKFQGRVTMTRDTSISTAYMELSRLRSDDTAVYYCARRGGVDWGQGTLVTVSSTREDLKNVFPPEVAVFEPSEAEISHTQKATLVCLATGFYPDHVELSWWVNGKEVHSGVCTDPQPLKEQPALNDSRYCLSSRLRVSATFWQNPRNHFRCQVQFYGLSENDEWTQDRAKPVTQIVSAEAWGRADDVIKIHWQEKKSNTILGSQEGNTMKTNDTYMKFSWLTVPEKSLDKEHRCIVRHENNKNGVDQEIIFPPIKTDVITMDPKDNCSKDANDTLLLQLTNTSAYYMYLLLLLKSVVYFAIITCCLLRRTAFCCNGEKS

SEQ ID NO: 15710 - protein, 726 aa, synthetic construct
MALPVTALLLPLALLLHAARPDIQMTQSPSSLSASVGDRVTITCKASQDVSTAVAWFQQKPGKAPKLLIYSPSYRYTGVPSRFSGSGSGTDFTLTISSLQPEDFTYYCQQLYSTPYTFGQGTKVEIKLEIQNPDPAVYQLRDSKSSDKSVCLFTDFDSQTNVSQSKDSDVYITDKCVLDMRSMDFKSNSAVAWSNKSDFACANAFNNSIIPEDTFFPSPESSDSTDHVKPKETENTKQPSKSCHKPKAIVHTEKVNMMSLTVLGLRMLFAKTVAVNFLLTAKLFFLRAKRSGSGVKQTLNFDLLKLAGDVESNPGPTSMDWIWRILFLVGAATGAHSFEEVQLVQSGAEVKKPGASVKVSCKASGYTFTDYYLDVVVRQAPGQGLEWIGRVNPYNGGTIYNQKFKGRVTLTRDTSTSTAYLELSSLRSEDTAVYYCARDHYRYDPLLDYWGQGTLVTVSSTREDLKNVFPPEVAVFEPSEAEISHTQKATLVCLATGFYPDHVELSWWVNGKEVHSGVCTDPQPLKEQPALNDSRYCLSSRLRVSATFWQNPRNHFRCQVQFYGLSENDEWTQDRAKPVTQIVSAEAWGRADDVIKIHWQEKKSNTILGSQEGNTMKTNDTYMKFSWLTVPEKSLDKEHRCIVRHENNKNGVDQEIIFPPIKTDVITMDPKDNCSKDANDTLLLQLTNTSAYYMYLLLLLKSVVYFAIITCCLLRRTAFCCNGEKS

SEQ ID NO: 15711 - protein, 732 aa, synthetic construct
MALPVTALLLPLALLLHAARPDIQMTQSPSSLSASVGDRVTITCRASQSVSTSSYNYMHWYQQKPGKPPKLLIKYASNLESGVPSRFSGSGSGTDFTLTISSLQPEDFATYYCQHSWEIPLTFGQGTKVEIKLEIQNPDPAVYQLRDSKSSDKSVCLFTDFDSQTNVSQSKDSDVYITDKCVLDMRSMDFKSNSAVAWSNKSDFACANAFNNSIIPEDTFFPSPESSDSTDHVKPKETENTKQPSKSCHKPKAIVHTEKVNMMSLTVLGLRMLFAKTVAVNFLLTAKLFFLRAKRSGSGVKQTLNFDLLKLAGDVESNPGPTSMDWIWRILFLVGAATGAHSFEEVQLVQSGAEVKKPGASVKVSCKASGYSFTDYYMHWVRQAPGQGLEWIGRINPYNGAAFYSQNFKDRVTLTVDTSTSTAYLELSSLRSEDTAVYYCAIERGADLEGYAMDYWGQGTLVTVSSTREDLKNVFPPEVAVFEPSEAEISHTQKATLVCLATGFYPDHVELSWWVNGKEVHSGVCTDPQPLKEQPALNDSRYCLSSRLRVSATFWQNPRNHFRCQVQFYGLSENDEWTQDRAKPVTQIVSAEAWGRADDVIKIHWQEKKSNTILGSQEGNTMKTNDTYMKFSWLTVPEKSLDKEHRCIVRHENNKNGVDQEIIFPPIKTDVITMDPKDNCSKDANDTLLLQLTNTSAYYMYLLLLLKSVVYFAIITCCLLRRTAFCCNGEKS

SEQ ID NO: 15712 - protein, 730 aa, synthetic construct
MALPVTALLLPLALLLHAARPEIVLTQSPATLSASPGERVTLTCRASSNVISSYVHWYQQKPGSSPRLFLYSTSNLASGVPSRFSGSGSGTDFTFTISSLEAEDAATYYCQQYSGYPLTFGQGTRLEIKLEIQNPDPAVYQLRDSKSSDKSVCLFTDFDSQTNVSQSKDSDVYITDKCVLDMRSMDFKSNSAVAWSNKSDFACANAFNNSIIPEDTFFPSPESSDSTDHVKPKETENTKQPSKSCHKPKAIVHTEKVNMMSLTVLGLRMLFAKTVAVNFLLTAKLFFLRAKRSGSGVKQTLNFDLLKLAGDVESNPGPTSMDWIWRILFLVGAATGAHSFEQVQLQESGPGLVKPSETLSLTCAVSGYSITSAYYWNWIRQPPGKGLEWIGYISYDGRNNYNPSLKNRITINPDTSKNQFSLQLNSVTPEDTAVYYCAREGDYDVGNYYAMDYWGQGTLVTVSSTREDLKNVFPPEVAVFEPSEAEISHTQKATLVCLATGFYPDHVELSWWVNGKEVHSGVCTDPQPLKEQPALNDSRYCLSSRLRVSATFWQNPRNHFRCQVQFYGLSENDEWTQDRAKPVTQIVSAEAWGRADDVIKIHWQEKKSNTILGSQEGNTMKTNDTYMKFSWLTVPEKSLDKEHRCIVRHENNKNGVDQEIIFPPIKTDVITMDPKDNCSKDANDTLLLQLTNTSAYYMYLLLLLKSVVYFAIITCCLLRRTAFCCNGEKS

SEQ ID NO: 15713 - protein, 730 aa, synthetic construct
MALPVTALLLPLALLLHAARPEIVLTQSPATLSLSPGERATLSCRASSNVISSYVHWYQQKPGQAPRLLIYSTSNLASGIPARFSGSGSGTDFTLTISSLEPEDFAVYYCQQYSGYPLTFGQGTRLEIKLEIQNPDPAVYQLRDSKSSDKSVCLFTDFDSQTNVSQSKDSDVYITDKCVLDMRSMDFKSNSAVAWSNKSDFACANAFNNSIIPEDTFFPSPESSDSTDHVKPKETENTKQPSKSCHKPKAIVHTEKVNMMSLTVLGLRMLFAKTVAVNFLLTAKLFFLRAKRSGSGVKQTLNFDLLKLAGDVESNPGPTSMDWIWRILFLVGAATGAHSFEEVQLVESGGGLVQPGRSLRLSCAASGYSITSAYYWNWVRQAPGKGLEWVSYISYDGRNNYNPSLKNRFTISRDNAKKSLYLQMNSLRAEDTALYYCAKEGDYDVGNYYAMDYWGQGTTVTVSSTREDLKNVFPPEVAVFEPSEAEISHTQKATLVCLATGFYPDHVELSWWVNGKEVHSGVCTDPQPLKEQPALNDSRYCLSSRLRVSATFWQNPRNHFRCQVQFYGLSENDEWTQDRAKPVTQIVSAEAWGRADDVIKIHWQEKKSNTILGSQEGNTMKTNDTYMKFSWLTVPEKSLDKEHRCIVRHENNKNGVDQEIIFPPIKTDVITMDPKDNCSKDANDTLLLQLTNTSAYYMYLLLLLKSVVYFAIITCCLLRRTAFCCNGEKS

SEQ ID NO: 15714 - protein, 729 aa, synthetic construct
MALPVTALLLPLALLLHAARPDVVMTQTPLSLPVSLGDQASISCRSSQSLVHSNGNTYLRWYLQKPGQSPKVLIYKVSNRVSGVPDRFSGSGSGTDFTLKINRVEAEDLGVYFCSQSTHVPWTFGGGTKLEIKLEIQNPDPAVYQLRDSKSSDKSVCLFTDFDSQTNVSQSKDSDVYITDKCVLDMRSMDFKSNSAVAWSNKSDFACANAFNNSIIPEDTFFPSPESSDSTDHVKPKETENTKQPSKSCHKPKAIVHTEKVNMMSLTVLGLRMLFAKTVAVNFLLTAKLFFLRAKRSGSGVKQTLNFDLLKLAGDVESNPGPTSMDWIWRILFLVGAATGAHSFEGVKLDETGGGLVQPGGAMKLSCVTSGFTFGHYWMNWVRQSPEKGLEWVAQFRNKPYNYETYYSDSVKGRFTISRDDSKSSVYLQMNNLRVEDTGIYYCTGASYGMEYLGQGTSVTVSTTREDLKNVFPPEVAVFEPSEAEISHTQKATLVCLATGFYPDHVELSWWVNGKEVHSGVCTDPQPLKEQPALNDSRYCLSSRLRVSATFWQNPRNHFRCQVQFYGLSENDEWTQDRAKPVTQIVSAEAWGRADDVIKIHWQEKKSNTILGSQEGNTMKTNDTYMKFSWLTVPEKSLDKEHRCIVRHENNKNGVDQEIIFPPIKTDVITMDPKDNCSKDANDTLLLQLTNTSAYYMYLLLLLKSVVYFAIITCCLLRRTAFCCNGEKS

SEQ ID NO: 15715 - protein, 735 aa, synthetic construct
MALPVTALLLPLALLLHAARPQVQLVESGGNLVQPGGSLRLSCAASGFTFGSFSMSWVRQAPGGGLEWVAGLSARSSLTHYADSVKGRFTISRDNAKNSVYLQMNSLRVEDTAVYYCARRSYDSSGYWGHFYSYMDVWGQGTLVTVSLEIQNPDPAVYQLRDSKSSDKSVCLFTDFDSQTNVSQSKDSDVYITDKCVLDMRSMDFKSNSAVAWSNKSDFACANAFNNSIIPEDTFFPSPESSDSTDHVKPKETENTKQPSKSCHKPKAIVHTEKVNMMSLTVLGLRMLFAKTVAVNFLLTAKLFFLRAKRSGSGVKQTLNFDLLKLAGDVESNPGPTSMDWIWRILFLVGAATGAHSFESVLTQPSSVSAAPGQKVTISCSGSTSNIGNNYVSWYQQHPGKAPKLMIYDVSKRPSGVPDRFSGSKSGNSASLDISGLQSEDEADYYCAAWDDSLSEFLFGTGTKLTVLGTREDLKNVFPPEVAVFEPSEAEISHTQKATLVCLATGFYPDHVELSWWVNGKEVHSGVCTDPQPLKEQPALNDSRYCLSSRLRVSATFWQNPRNHFRCQVQFYGLSENDEWTQDRAKPVTQIVSAEAWGRADDVIKIHWQEKKSNTILGSQEGNTMKTNDTYMKFSWLTVPEKSLDKEHRCIVRHENNKNGVDQEIIFPPIKTDVITMDPKDNCSKDANDTLLLQLTNTSAYYMYLLLLLKSVVYFAIITCCLLRRTAFCCNGEKS

SEQ ID NO: 15716 - protein, 730 aa, synthetic construct
MALPVTALLLPLALLLHAARPDVVMTQSPSSLSASVGDRVTITCQSSLDISHYLNWYQQKPGKAPKLLIYDASNLETGVPSRFSGSGSGTHFTFTISSLQPEDFATYYCQQYDNLPLTFGGGTKLEIKRLEIQNPDPAVYQLRDSKSSDKSVCLFTDFDSQTNVSQSKDSDVYITDKCVLDMRSMDFKSNSAVAWSNKSDFACANAFNNSIIPEDTFFPSPESSDSTDHVKPKETENTKQPSKSCHKPKAIVHTEKVNMMSLTVLGLRMLFAKTVAVNFLLTAKLFFLRAKRSGSGVKQTLNFDLLKLAGDVESNPGPTSMDWIWRILFLVGAATGAHSFEQVQLVQSGGGVVQPGGSLRVSCAASGVTLSDYGMHWVRQAPGKGLEWVAFIRNDGSDKYYADSVKGRFTISRDNSEKTVSLQMSSLRAEDTAVYYCAKNGESGPLDYWYLDLWGRGTLVTVSSTREDLKNVFPPEVAVFEPSEAEISHTQKATLVCLATGFYPDHVELSWWVNGKEVHSGVCTDPQPLKEQPALNDSRYCLSSRLRVSATFWQNPRNHFRCQVQFYGLSENDEWTQDRAKPVTQIVSAEAWGRADDVIKIHWQEKKSNTILGSQEGNTMKTNDTYMKFSWLTVPEKSLDKEHRCIVRHENNKNGVDQEIIFPPIKTDVITMDPKDNCSKDANDTLLLQLTNTSAYYMYLLLLLKSVVYFAIITCCLLRRTAFCCNGEKS

SEQ ID NO: 15717 - protein, 734 aa, synthetic construct
MALPVTALLLPLALLLHAARPSYELTQPPSVSGTPGQRVAISCSGSSSNIGTRMVTWYQHVPGTAPKLLIFNNNQRPSGVPDRFSASKSGTSASLAIIGLQSDDEADYYCATWDDNVKSYVFGTGTKVTVLGSRLEIQNPDPAVYQLRDSKSSDKSVCLFTDFDSQTNVSQSKDSDVYITDKCVLDMRSMDFKSNSAVAWSNKSDFACANAFNNSIIPEDTFFPSPESSDSTDHVKPKETENTKQPSKSCHKPKAIVHTEKVNMMSLTVLGLRMLFAKTVAVNFLLTAKLFFLRAKRSGSGVKQTLNFDLLKLAGDVESNPGPTSMDWIWRILFLVGAATGAHSFELEMAQVQLQQWGAGLLKPSETLSLTCAVYGGSFSGYYWSWIRQPPGKGLEWIGEINHSGSTNYNPSLKSRVTISVDTSKNQFSLKLSSVTAADTAVYYCARAPQSWYVGDVWGQGTLVTVSSTREDLKNVFPPEVAVFEPSEAEISHTQKATLVCLATGFYPDHVELSWWVNGKEVHSGVCTDPQPLKEQPALNDSRYCLSSRLRVSATFWQNPRNHFRCQVQFYGLSENDEWTQDRAKPVTQIVSAEAWGRADDVIKIHWQEKKSNTILGSQEGNTMKTNDTYMKFSWLTVPEKSLDKEHRCIVRHENNKNGVDQEIIFPPIKTDVITMDPKDNCSKDANDTLLLQLTNTSAYYMYLLLLLKSVVYFAIITCCLLRRTAFCCNGEKS

SEQ ID NO: 15718 - protein, 731 aa, synthetic construct
MALPVTALLLPLALLLHAARPQSVLTQPPSLSVAPGKTASITCGGNNIGMKSVHWYQQRPGQAPVLVIYYDSDRPSGIPGRFSGSNSGNTATLTISRVEAGDEADYYCQVWDTTGDHPGYVFGTGTKVTVLLEIQNPDPAVYQLRDSKSSDKSVCLFTDFDSQTNVSQSKDSDVYITDKCVLDMRSMDFKSNSAVAWSNKSDFACANAFNNSIIPEDTFFPSPESSDSTDHVKPKETENTKQPSKSCHKPKAIVHTEKVNMMSLTVLGLRMLFAKTVAVNFLLTAKLFFLRAKRSGSGVKQTLNFDLLKLAGDVESNPGPTSMDWIWRILFLVGAATGAHSFEQVQLVQSGAEVKKPGSSVKVSCKASGGTFSSYAISWVRQAPGQGLEWMGGIIPIFGTANYAQKFQGRVTITADESTSTAYMELSSLRSEDTAVYYCARGVYGYSGSAPYDEWGQGTLVTVSSTREDLKNVFPPEVAVFEPSEAEISHTQKATLVCLATGFYPDHVELSWWVNGKEVHSGVCTDPQPLKEQPALNDSRYCLSSRLRVSATFWQNPRNHFRCQVQFYGLSENDEWTQDRAKPVTQIVSAEAWGRADDVIKIHWQEKKSNTILGSQEGNTMKTNDTYMKFSWLTVPEKSLDKEHRCIVRHENNKNGVDQEIIFPPIKTDVITMDPKDNCSKDANDTLLLQLTNTSAYYMYLLLLLKSVVYFAIITCCLLRRTAFCCNGEKS

SEQ ID NO: 15719 - protein, 729 aa, synthetic construct
MALPVTALLLPLALLLHAARPEVQLVESGGGLVQPGRSLRLSCAASGFTFDDYAMHWVRQAPGKGLEWVSGISWNSGSIGYADSVKGRFTISRDNAKNSLYLQMNSLRAEDTALYYCAKDKGGGYYDFWSGSDYWGQGTLVTVSSLEIQNPDPAVYQLRDSKSSDKSVCLFTDFDSQTNVSQSKDSDVYITDKCVLDMRSMDFKSNSAVAWSNKSDFACANAFNNSIIPEDTFFPSPESSDSTDHVKPKETENTKQPSKSCHKPKAIVHTEKVNMMSLTVLGLRMLFAKTVAVNFLLTAKLFFLRAKRSGSGVKQTLNFDLLKLAGDVESNPGPTSMDWIWRILFLVGAATGAHSFESSELTQDPAVSVALGQTVRITCQGDSLRSYYASWYQQKPGQAPVLVIYGKNNRPSGIPDRFSGSSSGNTASLTITGAQAEDEADYYCNSRDSSGWVFGGGTKLTVLTREDLKNVFPPEVAVFEPSEAEISHTQKATLVCLATGFYPDHVELSWWVNGKEVHSGVCTDPQPLKEQPALNDSRYCLSSRLRVSATFWQNPRNHFRCQVQFYGLSENDEWTQDRAKPVTQIVSAEAWGRADDVIKIHWQEKKSNTILGSQEGNTMKTNDTYMKFSWLTVPEKSLDKEHRCIVRHENNKNGVDQEIIFPPIKTDVITMDPKDNCSKDANDTLLLQLTNTSAYYMYLLLLLKSVVYFAIITCCLLRRTAFCCNGEKS

SEQ ID NO: 15720 - protein, 738 aa, synthetic construct
MALPVTALLLPLALLLHAARPEVQLQQSGPGLVKPSQTLSLTCAISGDSVLSNSDTWNWIRQSPSRGLEWLGRTYHRSTWYDDYASSVRGRVSINVDTSKNQYSLQLNAVTPEDTGVYYCARDRLQDGNSWSDAFDVWGQGTMVTVSSLEIQNPDPAVYQLRDSKSSDKSVCLFTDFDSQTNVSQSKDSDVYITDKCVLDMRSMDFKSNSAVAWSNKSDFACANAFNNSIIPEDTFFPSPESSDSTDHVKPKETENTKQPSKSCHKPKAIVHTEKVNMMSLTVLGLRMLFAKTVAVNFLLTAKLFFLRAKRSGSGVKQTLNFDLLKLAGDVESNPGPTSMDWIWRILFLVGAATGAHSFEQSALTQPASVSGSPGQSITISCTGTSSDVGGYNYVSWYQQHPGKAPKLMIYDVSNRPSGVSNRFSGSKSGNTASLTISGLQAEDEADYYCSSYTSSSTLVYVFGTGTKVTVLTREDLKNVFPPEVAVFEPSEAEISHTQKATLVCLATGFYPDHVELSWWVNGKEVHSGVCTDPQPLKEQPALNDSRYCLSSRLRVSATFWQNPRNHFRCQVQFYGLSENDEWTQDRAKPVTQIVSAEAWGRADDVIKIHWQEKKSNTILGSQEGNTMKTNDTYMKFSWLTVPEKSLDKEHRCIVRHENNKNGVDQEIIFPPIKTDVITMDPKDNCSKDANDTLLLQLTNTSAYYMYLLLLLKSVVYFAIITCCLLRRTAFCCNGEKS

SEQ ID NO: 15721 - protein, 716 aa, synthetic construct
MALPVTALLLPLALLLHAARPQVQLVQSGAEVKKPGASVKVSCKASGYTFTSYDINWVRQATGQGLEWMGWMNPNSGNTGYAQKFQGRVTMTRNTSISTAYMELSSLRSEDTAVYYCARGDSTKVEIKLEIQNPDPAVYQLRDSKSSDKSVCLFTDFDSQTNVSQSKDSDVYITDKCVLDMRSMDFKSNSAVAWSNKSDFACANAFNNSIIPEDTFFPSPESSDSTDHVKPKETENTKQPSKSCHKPKAIVHTEKVNMMSLTVLGLRMLFAKTVAVNFLLTAKLFFLRAKRSGSGVKQTLNFDLLKLAGDVESNPGPTSMDWIWRILFLVGAATGAHSFEQSVLTQPRSVSGSPGQSVTISCTGTSSDVGGYNYVSWYQQHPGEAPKLIIYDADKRPSGISNRFSSGKSGNTASLTISGLQVEDEADYYCCSYAGGSTWVFGGGTKVTVLTREDLKNVFPPEVAVFEPSEAEISHTQKATLVCLATGFYPDHVELSWWVNGKEVHSGVCTDPQPLKEQPALNDSRYCLSSRLRVSATFWQNPRNHFRCQVQFYGLSENDEWTQDRAKPVTQIVSAEAWGRADDVIKIHWQEKKSNTILGSQEGNTMKTNDTYMKFSWLTVPEKSLDKEHRCIVRHENNKNGVDQEIIFPPIKTDVITMDPKDNCSKDANDTLLLQLTNTSAYYMYLLLLLKSVVYFAIITCCLLRRTAFCCNGEKS

SEQ ID NO: 15722 - protein, 738 aa, synthetic construct
MALPVTALLLPLALLLHAARPEVQLQQSGPGLVKPSQTLSLTCAISGDSVSSNSAAWNWIRQSPSRGLEWLGRTYYRSKWYSDYAVSVKSRITINPDTSKNQFSLQLNSVTPEDTAVYYCARDPYDFWSGYPDAFDIWGQGTMVTVSSLEIQNPDPAVYQLRDSKSSDKSVCLFTDFDSQTNVSQSKDSDVYITDKCVLDMRSMDFKSNSAVAWSNKSDFACANAFNNSIIPEDTFFPSPESSDSTDHVKPKETENTKQPSKSCHKPKAIVHTEKVNMMSLTVLGLRMLFAKTVAVNFLLTAKLFFLRAKRSGSGVKQTLNFDLLKLAGDVESNPGPTSMDWIWRILFLVGAATGAHSFEQSALTQPASVSGSPGQSITISCTGTSSDVGGYNYVSWYQQHPGKAPKVIISEVNNRPSGVSHRFSGSKSGNTASLTISGLQAEDEADYFCSSYTSGRTLYVFGTGSKVTVLGTREDLKNVFPPEVAVFEPSEAEISHTQKATLVCLATGFYPDHVELSWWVNGKEVHSGVCTDPQPLKEQPALNDSRYCLSSRLRVSATFWQNPRNHFRCQVQFYGLSENDEWTQDRAKPVTQIVSAEAWGRADDVIKIHWQEKKSNTILGSQEGNTMKTNDTYMKFSWLTVPEKSLDKEHRCIVRHENNKNGVDQEIIFPPIKTDVITMDPKDNCSKDANDTLLLQLTNTSAYYMYLLLLLKSVVYFAIITCCLLRRTAFCCNGEKS

SEQ ID NO: 15723 - protein, 737 aa, synthetic construct
MALPVTALLLPLALLLHAARPQSALTQPASASGSPGQSVTISCTGTSSDVGGYNYVSWYQQHPGKAPKLMIYDVSNRPSGVSNRFSGSKSGNTASLTISGLQAEDEADYYCSSYTSSSTLYVFGTGTQLTVLLEIQNPDPAVYQLRDSKSSDKSVCLFTDFDSQTNVSQSKDSDVYITDKCVLDMRSMDFKSNSAVAWSNKSDFACANAFNNSIIPEDTFFPSPESSDSTDHVKPKETENTKQPSKSCHKPKAIVHTEKVNMMSLTVLGLRMLFAKTVAVNFLLTAKLFFLRAKRSGSGVKQTLNFDLLKLAGDVESNPGPTSMDWIWRILFLVGAATGAHSFEEVQLQQSGPGLVKPSQTLSLTCAISGDSMLSNSDTWNWIRQSPSRGLEWLGRTYHRSTWYDDYASSVRGRVSINVDTSKNQYSLQLNAVTPEDTGVYYCARVRLQDGNSWSDAFDVWGQGTMVTVSSTREDLKNVFPPEVAVFEPSEAEISHTQKATLVCLATGFYPDHVELSWWVNGKEVHSGVCTDPQPLKEQPALNDSRYCLSSRLRVSATFWQNPRNHFRCQVQFYGLSENDEWTQDRAKPVTQIVSAEAWGRADDVIKIHWQEKKSNTILGSQEGNTMKTNDTYMKFSWLTVPEKSLDKEHRCIVRHENNKNGVDQEIIFPPIKTDVITMDPKDNCSKDANDTLLLQLTNTSAYYMYLLLLLKSVVYFAIITCCLLRRTAFCCNGEKS

SEQ ID NO: 15724 - protein, 737 aa, synthetic construct
MALPVTALLLPLALLLHAARPDVMLTQTPLSLPVSLGDQASISCRSSQSILHSTGDTYLEWYLQKPGQSPKLLINKVSNRLSGVPDRFSGSGSGTDFTLKISRVEAEDLGVYYCFQGSHVPWTFGGGTKLEIKRADAAPTVSIFPLEIQNPDPAVYQLRDSKSSDKSVCLFTDFDSQTNVSQSKDSDVYITDKCVLDMRSMDFKSNSAVAWSNKSDFACANAFNNSIIPEDTFFPSPESSDSTDHVKPKETENTKQPSKSCHKPKAIVHTEKVNMMSLTVLGLRMLFAKTVAVNFLLTAKLFFLRAKRSGSGVKQTLNFDLLKLAGDVESNPGPTSMDWIWRILFLVGAATGAHSFEQVKLQQSGPSLVKPGASVKMSCKASGYTFTDFYMKWVKQSHGKSLEWIGDINPNIGDTFYNQKFKGKATLTVDKSSSTAYMQLNSLTSEDSAVYFCSVGYFDVWGAGTTVTVSSTREDLKNVFPPEVAVFEPSEAEISHTQKATLVCLATGFYPDHVELSWWVNGKEVHSGVCTDPQPLKEQPALNDSRYCLSSRLRVSATFWQNPRNHFRCQVQFYGLSENDEWTQDRAKPVTQIVSAEAWGRADDVIKIHWQEKKSNTILGSQEGNTMKTNDTYMKFSWLTVPEKSLDKEHRCIVRHENNKNGVDQEIIFPPIKTDVITMDPKDNCSKDANDTLLLQLTNTSAYYMYLLLLLKSVVYFAIITCCLLRRTAFCCNGEKS

SEQ ID NO: 15725 - protein, 733 aa, synthetic construct
MALPVTALLLPLALLLHAARPEIVLTQSPATLSLSPGERATLSCRASQSVSIYLAWYQQKPGQAPRLLIYDASNRATGIPARFSGSGSGTDFTLTISSLEPEDFAVYYCQQRSNWPPFTFGPGTKVDIKLEIQNPDPAVYQLRDSKSSDKSVCLFTDFDSQTNVSQSKDSDVYITDKCVLDMRSMDFKSNSAVAWSNKSDFACANAFNNSIIPEDTFFPSPESSDSTDHVKPKETENTKQPSKSCHKPKAIVHTEKVNMMSLTVLGLRMLFAKTVAVNFLLTAKLFFLRAKRSGSGVKQTLNFDLLKLAGDVESNPGPTSMDWIWRILFLVGAATGAHSFEQVQLVESGGGVVQPGRSLRLSCAASGFTFSSYGMHWVRQAPGKGLEWVAVIWDDGSNKYYVDSVKGRFTISRDNSKNTLYLQMNSLRAEDTAVYYCARDDYYGSGSFNSYYGTDVWGQGTTVTVSSTREDLKNVFPPEVAVFEPSEAEISHTQKATLVCLATGFYPDHVELSWWVNGKEVHSGVCTDPQPLKEQPALNDSRYCLSSRLRVSATFWQNPRNHFRCQVQFYGLSENDEWTQDRAKPVTQIVSAEAWGRADDVIKIHWQEKKSNTILGSQEGNTMKTNDTYMKFSWLTVPEKSLDKEHRCIVRHENNKNGVDQEIIFPPIKTDVITMDPKDNCSKDANDTLLLQLTNTSAYYMYLLLLLKSVVYFAIITCCLLRRTAFCCNGEKS

SEQ ID NO: 15726 - protein, 718 aa, synthetic construct
MALPVTALLLPLALLLHAARPDIQMTQSPSSLSASVGDRVTITCRASQGISSWLAWYQQKPEKAPKSLIYAASSLQSGVPSRFSGSGSGTDFTLTISSLQPEDFATYYCQQYNSYPYTFGQGTKLEIKLEIQNPDPAVYQLRDSKSSDKSVCLFTDFDSQTNVSQSKDSDVYITDKCVLDMRSMDFKSNSAVAWSNKSDFACANAFNNSIIPEDTFFPSPESSDSTDHVKPKETENTKQPSKSCHKPKAIVHTEKVNMMSLTVLGLRMLFAKTVAVNFLLTAKLFFLRAKRSGSGVKQTLNFDLLKLAGDVESNPGPTSMDWIWRILFLVGAATGAHSFEEVQLVQSGGGLVHPGGSLRLSCAGSGFTFSTYLMYWVRQAPGKTLEWVSAIGSGGDTYYADSVKGRFTISRDNAKNSLYLQMNSLRAEDMAVYYCARGLGYWGQGTLVTVSSTREDLKNVFPPEVAVFEPSEAEISHTQKATLVCLATGFYPDHVELSWWVNGKEVHSGVCTDPQPLKEQPALNDSRYCLSSRLRVSATFWQNPRNHFRCQVQFYGLSENDEWTQDRAKPVTQIVSAEAWGRADDVIKIHWQEKKSNTILGSQEGNTMKTNDTYMKFSWLTVPEKSLDKEHRCIVRHENNKNGVDQEIIFPPIKTDVITMDPKDNCSKDANDTLLLQLTNTSAYYMYLLLLLKSVVYFAIITCCLLRRTAFCCNGEKS

SEQ ID NO: 15727 - protein, 737 aa, synthetic construct
MALPVTALLLPLALLLHAARPLPVLTQPPSVSVAPGKTARITCGGNNIGSKSVHWYQQKPGQAPVLVVYDDSDRPSGIPERFSGSNSGNTATLTISRVEAGDEADYYCQVWDSSSDYVVFGGGTKLTVLLEIQNPDPAVYQLRDSKSSDKSVCLFTDFDSQTNVSQSKDSDVYITDKCVLDMRSMDFKSNSAVAWSNKSDFACANAFNNSIIPEDTFFPSPESSDSTDHVKPKETENTKQPSKSCHKPKAIVHTEKVNMMSLTVLGLRMLFAKTVAVNFLLTAKLFFLRAKRSGSGVKQTLNFDLLKLAGDVESNPGPTSMDWIWRILFLVGAATGAHSFEEVQLVQSGAEVKKPGESLKISCKGSGYSFTSYWIGWVRQMPGKGLEWMGIIYPGDSDTRYSPSFQGQVTISADKSISTAYLQWSSLKASDTAMYYCARQVWGWQGGMYPRSNWWYNLDSWGQGTLVTVSSTREDLKNVFPPEVAVFEPSEAEISHTQKATLVCLATGFYPDHVELSWWVNGKEVHSGVCTDPQPLKEQPALNDSRYCLSSRLRVSATFWQNPRNHFRCQVQFYGLSENDEWTQDRAKPVTQIVSAEAWGRADDVIKIHWQEKKSNTILGSQEGNTMKTNDTYMKFSWLTVPEKSLDKEHRCIVRHENNKNGVDQEIIFPPIKTDVITMDPKDNCSKDANDTLLLQLTNTSAYYMYLLLLLKSVVYFAIITCCLLRRTAFCCNGEKS

SEQ ID NO: 15728 - protein, 730 aa, synthetic construct
MALPVTALLLPLALLLHAARPELVMTQSPASLAVSLGQRATISCRASESVDSYGKSFMHWYQLKPGQPPKLLIYRASNLESGVPARFSGSGSRTDFTLTIDPVEADDAATYYCQQNNEDPWTFGGGTKLEIKLEIQNPDPAVYQLRDSKSSDKSVCLFTDFDSQTNVSQSKDSDVYITDKCVLDMRSMDFKSNSAVAWSNKSDFACANAFNNSIIPEDTFFPSPESSDSTDHVKPKETENTKQPSKSCHKPKAIVHTEKVNMMSLTVLGLRMLFAKTVAVNFLLTAKLFFLRAKRSGSGVKQTLNFDLLKLAGDVESNPGPTSMDWIWRILFLVGAATGAHSFEEVQLEQSGPELVKPGASVKMSCKASGYTFTNYYMKWVKQSHGKSLEWIGDLNPNNGDTFYNQKFKGKATLTVDKSSNTAYMQLNSLTSEDSAVYYCARTGRYEENAMDYWGQGTSVTVSSTREDLKNVFPPEVAVFEPSEAEISHTQKATLVCLATGFYPDHVELSWWVNGKEVHSGVCTDPQPLKEQPALNDSRYCLSSRLRVSATFWQNPRNHFRCQVQFYGLSENDEWTQDRAKPVTQIVSAEAWGRADDVIKIHWQEKKSNTILGSQEGNTMKTNDTYMKFSWLTVPEKSLDKEHRCIVRHENNKNGVDQEIIFPPIKTDVITMDPKDNCSKDANDTLLLQLTNTSAYYMYLLLLLKSVVYFAIITCCLLRRTAFCCNGEKS

SEQ ID NO: 15729 - protein, 724 aa, synthetic construct
MALPVTALLLPLALLLHAARPDVVMTQSPSSLSASVGDRVTITCMASEDIYIRLAWYQQKPGNAPKLLIYAATSLETGVPSRFSGSGSGTDFTLTISSLQPEDFATYYCQQYWSSPWTFGGGTKVEIKLEIQNPDPAVYQLRDSKSSDKSVCLFTDFDSQTNVSQSKDSDVYITDKCVLDMRSMDFKSNSAVAWSNKSDFACANAFNNSIIPEDTFFPSPESSDSTDHVKPKETENTKQPSKSCHKPKAIVHTEKVNMMSLTVLGLRMLFAKTVAVNFLLTAKLFFLRAKRSGSGVKQTLNFDLLKLAGDVESNPGPTSMDWIWRILFLVGAATGAHSFEQVQLQESGPGLVKPSQTLSLTCTVSGYSITSDYTWNWIRQPPGNGLEWIGYITYSGSTSYNPSLKSRVLISVDTSKNQVSLKLSSVTAADTAVYYCARLGRRYTMDYWGQGTTVTVSSTREDLKNVFPPEVAVFEPSEAEISHTQKATLVCLATGFYPDHVELSWWVNGKEVHSGVCTDPQPLKEQPALNDSRYCLSSRLRVSATFWQNPRNHFRCQVQFYGLSENDEWTQDRAKPVTQIVSAEAWGRADDVIKIHWQEKKSNTILGSQEGNTMKTNDTYMKFSWLTVPEKSLDKEHRCIVRHENNKNGVDQEIIFPPIKTDVITMDPKDNCSKDANDTLLLQLTNTSAYYMYLLLLLKSVVYFAIITCCLLRRTAFCCNGEKS

SEQ ID NO: 15730 - protein, 728 aa, synthetic construct; identical to SEQ ID NO: 15593

SEQ ID NO: 15731 - protein, 728 aa, synthetic construct
MALPVTALLLPLALLLHAARPDIVLTQSPATLSLSPGDRATLSCRASESVTILGSHLIYWYQQKPGQAPRLLIQLASNVQTGIPARFSGSGSRTDFTLTISSLEPEDFAVYYCLQSRTIPRTFGQGTKLEIKRLEIQNPDPAVYQLRDSKSSDKSVCLFTDFDSQTNVSQSKDSDVYITDKCVLDMRSMDFKSNSAVAWSNKSDFACANAFNNSIIPEDTFFPSPESSDSTDHVKPKETENTKQPSKSCHKPKAIVHTEKVNMMSLTVLGLRMLFAKTVAVNFLLTAKLFFLRAKRSGSGVKQTLNFDLLKLAGDVESNPGPTSMDWIWRILFLVGAATGAHSFEQVQLVQSGSELKKPGESVKISCKASGYTFTHYSMNWVRQAPGQGLEWMGRINTETGEPLYADDFKGRFVFSLDTSASTAYLQISSLKAEDTAVYYCSNDYLYSLDYWGQGTLVTVSSTREDLKNVFPPEVAVFEPSEAEISHTQKATLVCLATGFYPDHVELSWWVNGKEVHSGVCTDPQPLKEQPALNDSRYCLSSRLRVSATFWQNPRNHFRCQVQFYGLSENDEWTQDRAKPVTQIVSAEAWGRADDVIKIHWQEKKSNTILGSQEGNTMKTNDTYMKFSWLTVPEKSLDKEHRCIVRHENNKNGVDQEIIFPPIKTDVITMDPKDNCSKDANDTLLLQLTNTSAYYMYLLLLLKSVVYFAIITCCLLRRTAFCCNGEKS

SEQ ID NO: 15732 - protein, 729 aa, synthetic construct
MALPVTALLLPLALLLHAARPDIQLTQSPSFLSASVGDRVTITCRASQGISTDLNWYQQKPGKAPKLLIYAASNLESGVPSRFSGSGSGTEFTLTISSLQPEDFATYYCQQSYNWPYTFGGGTKVEIKRLEIQNPDPAVYQLRDSKSSDKSVCLFTDFDSQTNVSQSKDSDVYITDKCVLDMRSMDFKSNSAVAWSNKSDFACANAFNNSIIPEDTFFPSPESSDSTDHVKPKETENTKQPSKSCHKPKAIVHTEKVNMMSLTVLGLRMLFAKTVAVNFLLTAKLFFLRAKRSGSGVKQTLNFDLLKLAGDVESNPGPTSMDWIWRILFLVGAATGAHSFEEVQLVESGGGLVKPGGSLRLSCAASGFTFSNFEMNWVRQAPGKGLEWVSGISSNGRYINYADSVKGRFTISRDNAKNSLYLQMNSLRAEDTAVYYCARVVDFDQDYNGFDYWGQGTLVTVSSTREDLKNVFPPEVAVFEPSEAEISHTQKATLVCLATGFYPDHVELSWWVNGKEVHSGVCTDPQPLKEQPALNDSRYCLSSRLRVSATFWQNPRNHFRCQVQFYGLSENDEWTQDRAKPVTQIVSAEAWGRADDVIKIHWQEKKSNTILGSQEGNTMKTNDTYMKFSWLTVPEKSLDKEHRCIVRHENNKNGVDQEIIFPPIKTDVITMDPKDNCSKDANDTLLLQLTNTSAYYMYLLLLLKSVVYFAIITCCLLRRTAFCCNGEKS

SEQ ID NO: 15733 - protein, 727 aa, synthetic construct
MALPVTALLLPLALLLHAARPDIQLTQSPSFLSASVGDRVTITCSLSLGISTWRDWFPPRLGRGLEPLTYAASTLQSGVPSRFSGSGSGTEFTLTISSLQPEDFATYYCQQLNSYPLTFGGGTKVEIKRLEIQNPDPAVYQLRDSKSSDKSVCLFTDFDSQTNVSQSKDSDVYITDKCVLDMRSMDFKSNSAVAWSNKSDFACANAFNNSIIPEDTFFPSPESSDSTDHVKPKETENTKQPSKSCHKPKAIVHTEKVNMMSLTVLGLRMLFAKTVAVNFLLTAKLFFLRAKRSGSGVKQTLNFDLLKLAGDVESNPGPTSMDWIWRILFLVGAATGAHSFEEVQLVESGGGLVKPGGSLRLSCAASGFTFSTYGMSWVRQAPGKGLEWVAYINNGSGYIYYADSVKGRFTISRDNAKNSLYLQMNSLRAEDTAVYYCARGQWWSGGDFDYWGQGTLVTVSSTREDLKNVFPPEVAVFEPSEAEISHTQKATLVCLATGFYPDHVELSWWVNGKEVHSGVCTDPQPLKEQPALNDSRYCLSSRLRVSATFWQNPRNHFRCQVQFYGLSENDEWTQDRAKPVTQIVSAEAWGRADDVIKIHWQEKKSNTILGSQEGNTMKTNDTYMKFSWLTVPEKSLDKEHRCIVRHENNKNGVDQEIIFPPIKTDVITMDPKDNCSKDANDTLLLQLTNTSAYYMYLLLLLKSVVYFAIITCCLLRRTAFCCNGEKS

SEQ ID NO: 15734 - protein, 728 aa, synthetic construct
MALPVTALLLPLALLLHAARPEIVLTQSPATLSLSPGERATLSCSASSSVSYMYWYQQKPGQAPRLLIYRTSNLASGIPARFSGSGSGTDFTLTISSLEPEDFAVYYCQQYHSYPTTFGQGTKVEIKRTVLEIQNPDPAVYQLRDSKSSDKSVCLFTDFDSQTNVSQSKDSDVYITDKCVLDMRSMDFKSNSAVAWSNKSDFACANAFNNSIIPEDTFFPSPESSDSTDHVKPKETENTKQPSKSCHKPKAIVHTEKVNMMSLTVLGLRMLFAKTVAVNFLLTAKLFFLRAKRSGSGVKQTLNFDLLKLAGDVESNPGPTSMDWIWRILFLVGAATGAHSFEEVQLVESGGGLVQPGGSLRLSCAASGFSFNTYAMNWVRQAPGKGLEWVSHIRSKSNNFATYYADSVKDRFTISRDNAKNSLYLQMNSLRAEDTAVYYCARQGGDFPMDYWGQGTLVTVSSTREDLKNVFPPEVAVFEPSEAEISHTQKATLVCLATGFYPDHVELSWWVNGKEVHSGVCTDPQPLKEQPALNDSRYCLSSRLRVSATFWQNPRNHFRCQVQFYGLSENDEWTQDRAKPVTQIVSAEAWGRADDVIKIHWQEKKSNTILGSQEGNTMKTNDTYMKFSWLTVPEKSLDKEHRCIVRHENNKNGVDQEIIFPPIKTDVITMDPKDNCSKDANDTLLLQLTNTSAYYMYLLLLLKSVVYFAIITCCLLRRTAFCCNGEKS

SEQ ID NO: 15735 - protein, 724 aa, synthetic construct
MALPVTALLLPLALLLHAARPDVVMTQSPSSLSASVGDRVTITCKASEDIYIRLAWYQQKPGKAPKLLIYAATSLETGVPSRFSGSGSGTDFTLTISSLQPEDFATYYCQQYWTTPWTFGGGTKVEIKLEIQNPDPAVYQLRDSKSSDKSVCLFTDFDSQTNVSQSKDSDVYITDKCVLDMRSMDFKSNSAVAWSNKSDFACANAFNNSIIPEDTFFPSPESSDSTDHVKPKETENTKQPSKSCHKPKAIVHTEKVNMMSLTVLGLRMLFAKTVAVNFLLTAKLFFLRAKRSGSGVKQTLNFDLLKLAGDVESNPGPTSMDWIWRILFLVGAATGAHSFEQVQLQESGPGLVKPSQTLSLTCTVSGYSITIDYTWNWIRQPPGKGLEWIGYITYSGSTDYNPSLKSRVLISVDTSKNQVSLKLSSVTAADTAVYYCARLGRRYALDYWGQGTTVTVSSTREDLKNVFPPEVAVFEPSEAEISHTQKATLVCLATGFYPDHVELSWWVNGKEVHSGVCTDPQPLKEQPALNDSRYCLSSRLRVSATFWQNPRNHFRCQVQFYGLSENDEWTQDRAKPVTQIVSAEAWGRADDVIKIHWQEKKSNTILGSQEGNTMKTNDTYMKFSWLTVPEKSLDKEHRCIVRHENNKNGVDQEIIFPPIKTDVITMDPKDNCSKDANDTLLLQLTNTSAYYMYLLLLLKSVVYFAIITCCLLRRTAFCCNGEKS

SEQ ID NO: 15736 - protein, 728 aa, synthetic construct
MALPVTALLLPLALLLHAARPDIQMTQTTSSLSASLGDRVTISCRASQDISNYLNWYQQKPDGTVKLLIYYTSILHSGVPSRFSGSGSGTDYSLTISNLEQEDFATYFCQQGNTLPWTFGGGTKLEIKALEIQNPDPAVYQLRDSKSSDKSVCLFTDFDSQTNVSQSKDSDVYITDKCVLDMRSMDFKSNSAVAWSNKSDFACANAFNNSIIPEDTFFPSPESSDSTDHVKPKETENTKQPSKSCHKPKAIVHTEKVNMMSLTVLGLRMLFAKTVAVNFLLTAKLFFLRAKRSGSGVKQTLNFDLLKLAGDVESNPGPTSMDWIWRILFLVGAATGAHSFEVQLVESGGGLVKPGGSLKLSCAASGFAFSIYDMSWVRQTPEKRLEWVAYISSGGGTYYPDTVKGRFTISRDNAKNTLYLQMSSLKSEDTAMYYCARHSGYGTHWGVLFAYWGQGTLVTVSATREDLKNVFPPEVAVFEPSEAEISHTQKATLVCLATGFYPDHVELSWWVNGKEVHSGVCTDPQPLKEQPALNDSRYCLSSRLRVSATFWQNPRNHFRCQVQFYGLSENDEWTQDRAKPVTQIVSAEAWGRADDVIKIHWQEKKSNTILGSQEGNTMKTNDTYMKFSWLTVPEKSLDKEHRCIVRHENNKNGVDQEIIFPPIKTDVITMDPKDNCSKDANDTLLLQLTNTSAYYMYLLLLLKSVVYFAIITCCLLRRTAFCCNGEKS

SEQ ID NO: 15737 - protein, 739 aa, synthetic construct
MALPVTALLLPLALLLHAARPDIVMTQSPDSLAVSLGERATINCKSSQSLLYRSNQKNYLAWYQQKPGQPPKLLIYWASTRESGVPDRFSGSGSGTDFTLTISSLQAEDVAVYYCQQYYNYPRTFGQGTKVEIKRTVLEIQNPDPAVYQLRDSKSSDKSVCLFTDFDSQTNVSQSKDSDVYITDKCVLDMRSMDFKSNSAVAWSNKSDFACANAFNNSIIPEDTFFPSPESSDSTDHVKPKETENTKQPSKSCHKPKAIVHTEKVNMMSLTVLGLRMLFAKTVAVNFLLTAKLFFLRAKRSGSGVKQTLNFDLLKLAGDVESNPGPTSMDWIWRILFLVGAATGAHSFEEVQLLESGGGLVQPGGSLRLSCAASGYSITSDYAWNWVRQAPGKGLEWVSYISNSGSTSYNPSLKSRFTISRDNSKNTLYLQMNSLRAEDTAVYYCAKERNYDYDDYYYAMDYWGQGTLVTVSSTREDLKNVFPPEVAVFEPSEAEISHTQKATLVCLATGFYPDHVELSWWVNGKEVHSGVCTDPQPLKEQPALNDSRYCLSSRLRVSATFWQNPRNHFRCQVQFYGLSENDEWTQDRAKPVTQIVSAEAWGRADDVIKIHWQEKKSNTILGSQEGNTMKTNDTYMKFSWLTVPEKSLDKEHRCIVRHENNKNGVDQEIIFPPIKTDVITMDPKDNCSKDANDTLLLQLTNTSAYYMYLLLLLKSVVYFAIITCCLLRRTAFCCNGEKS

SEQ ID NO: 15738 - protein, 732 aa, synthetic construct
MALPVTALLLPLALLLHAARPDVVMTQSPLSLPVTLGQPASISCRSSQSLLHSSGNTYLEWYQQRPGQSPRPLIYKISTRFSGVPDRFSGSGSGTDFTLKISRVEAEDVGVYYCFQGSHVPYTFGGGTKVEIKRLEIQNPDPAVYQLRDSKSSDKSVCLFTDFDSQTNVSQSKDSDVYITDKCVLDMRSMDFKSNSAVAWSNKSDFACANAFNNSIIPEDTFFPSPESSDSTDHVKPKETENTKQPSKSCHKPKAIVHTEKVNMMSLTVLGLRMLFAKTVAVNFLLTAKLFFLRAKRSGSGVKQTLNFDLLKLAGDVESNPGPTSMDWIWRILFLVGAATGAHSFEQVQLVQSGAEVKKPGASVKVSCKASGLTIEDYYMHWVRQAPGQGLEWMGWIDPENGDTEYGPKFQGRVTMTRDTSINTAYMELSRLRSDDTAVYYCAVHNAHYGTWFAYWGQGTLVTVSSTREDLKNVFPPEVAVFEPSEAEISHTQKATLVCLATGFYPDHVELSWWVNGKEVHSGVCTDPQPLKEQPALNDSRYCLSSRLRVSATFWQNPRNHFRCQVQFYGLSENDEWTQDRAKPVTQIVSAEAWGRADDVIKIHWQEKKSNTILGSQEGNTMKTNDTYMKFSWLTVPEKSLDKEHRCIVRHENNKNGVDQEIIFPPIKTDVITMDPKDNCSKDANDTLLLQLTNTSAYYMYLLLLLKSVVYFAIITCCLLRRTAFCCNGEKS

SEQ ID NO: 15739 - protein, 724 aa, synthetic construct
MALPVTALLLPLALLLHAARPDIQMTQSPSSLSASVGDRVTITCRASENIYSNLAWYQQKPGKAPKLLIYAATNLADGVPSRFSGSGSGTDFTLTISSLQPEDFATYYCQHFWGTPTFGQGTKVEIKRTVLEIQNPDPAVYQLRDSKSSDKSVCLFTDFDSQTNVSQSKDSDVYITDKCVLDMRSMDFKSNSAVAWSNKSDFACANAFNNSIIPEDTFFPSPESSDSTDHVKPKETENTKQPSKSCHKPKAIVHTEKVNMMSLTVLGLRMLFAKTVAVNFLLTAKLFFLRAKRSGSGVKQTLNFDLLKLAGDVESNPGPTSMDWIWRILFLVGAATGAHSFEEVQLVESGGGLVQPGGSLRLSCAASGFSLTNYGVHWVRQAPGKGLEWVSVIWSGGSTDYNAAFISRFTISADTSKNTAYLQMNSLRAEDTAVYYCARELIHAMDNWGQGTLVTVSSTREDLKNVFPPEVAVFEPSEAEISHTQKATLVCLATGFYPDHVELSWWVNGKEVHSGVCTDPQPLKEQPALNDSRYCLSSRLRVSATFWQNPRNHFRCQVQFYGLSENDEWTQDRAKPVTQIVSAEAWGRADDVIKIHWQEKKSNTILGSQEGNTMKTNDTYMKFSWLTVPEKSLDKEHRCIVRHENNKNGVDQEIIFPPIKTDVITMDPKDNCSKDANDTLLLQLTNTSAYYMYLLLLLKSVVYFAIITCCLLRRTAFCCNGEKS

SEQ ID NO: 15740 - protein, 731 aa, synthetic construct
MALPVTALLLPLALLLHAARPDFVMTQSPLSLPVTPGEPASISCRSSQSIVHSNGNTYLEWYLQKPGQSPQLLIYKVSNRFSGVPDRFSGSGSGTDFTLKISRVEAEDVGVYYCFQGSHVPLTFGQGTKLEIKRLEIQNPDPAVYQLRDSKSSDKSVCLFTDFDSQTNVSQSKDSDVYITDKCVLDMRSMDFKSNSAVAWSNKSDFACANAFNNSIIPEDTFFPSPESSDSTDHVKPKETENTKQPSKSCHKPKAIVHTEKVNMMSLTVLGLRMLFAKTVAVNFLLTAKLFFLRAKRSGSGVKQTLNFDLLKLAGDVESNPGPTSMDWIWRILFLVGAATGAHSFEEVQLVESGAEVKKPGASVKVSCKASGYTFTSYWIHWVRQAPGQGLEWMGENDPSNGRTNYNEKFKNRVTLTVDTSISTAYMELSRLRSDDTAVYYCARGPNYFYSMDYWGQGTMVTVSSTREDLKNVFPPEVAVFEPSEAEISHTQKATLVCLATGFYPDHVELSWWVNGKEVHSGVCTDPQPLKEQPALNDSRYCLSSRLRVSATFWQNPRNHFRCQVQFYGLSENDEWTQDRAKPVTQIVSAEAWGRADDVIKIHWQEKKSNTILGSQEGNTMKTNDTYMKFSWLTVPEKSLDKEHRCIVRHENNKNGVDQEIIFPPIKTDVITMDPKDNCSKDANDTLLLQLTNTSAYYMYLLLLLKSVVYFAIITCCLLRRTAFCCNGEKS

SEQ ID NO: 15741 - protein, 724 aa, synthetic construct
MALPVTALLLPLALLLHAARPDIQLTQSPSFLSASVGDRVTITCSARSSISFMYWYQQKPGKAPKLLIYDTSNLASGVPSRFSGSGSGTEFTLTISSLEAEDAATYYCQQWSSYPLTFGQGTKLEIKLEIQNPDPAVYQLRDSKSSDKSVCLFTDFDSQTNVSQSKDSDVYITDKCVLDMRSMDFKSNSAVAWSNKSDFACANAFNNSIIPEDTFFPSPESSDSTDHVKPKETENTKQPSKSCHKPKAIVHTEKVNMMSLTVLGLRMLFAKTVAVNFLLTAKLFFLRAKRSGSGVKQTLNFDLLKLAGDVESNPGPTSMDWIWRILFLVGAATGAHSFEQVQLVQSGAEVKKPGASVKVSCKASGYTFTGSWMNWVRQAPGQGLEWIGRIYPGDGETNYNGKFKDRVTITADKSTSTAYMELSSLRSEDTAVYYCARIYGNNVYFDVWGQGTTVTVSSTREDLKNVFPPEVAVFEPSEAEISHTQKATLVCLATGFYPDHVELSWWVNGKEVHSGVCTDPQPLKEQPALNDSRYCLSSRLRVSATFWQNPRNHFRCQVQFYGLSENDEWTQDRAKPVTQIVSAEAWGRADDVIKIHWQEKKSNTILGSQEGNTMKTNDTYMKFSWLTVPEKSLDKEHRCIVRHENNKNGVDQEIIFPPIKTDVITMDPKDNCSKDANDTLLLQLTNTSAYYMYLLLLLKSVVYFAIITCCLLRRTAFCCNGEKS

SEQ ID NO: 15742 - protein, 732 aa, synthetic construct
MALPVTALLLPLALLLHAARPQLVLTQSPSASASLGSSVKLTCTLSSGHKTDTIDWYQQQPGKAPRYLMKLEGSGSYNKGSGVPDRFSGSSSGADWYLTISSLQSEDEADYYCGTDYPGNYLFGGGTQLTVLGLEIQNPDPAVYQLRDSKSSDKSVCLFTDFDSQTNVSQSKDSDVYITDKCVLDMRSMDFKSNSAVAWSNKSDFACANAFNNSIIPEDTFFPSPESSDSTDHVKPKETENTKQPSKSCHKPKAIVHTEKVNMMSLTVLGLRMLFAKTVAVNFLLTAKLFFLRAKRSGSGVKQTLNFDLLKLAGDVESNPGPTSMDWIWRILFLVGAATGAHSFEQEQLVESGGGLVQPGGSLRLSCAASGFTFSDYYMSWIRQAPGKGLEWVATIYPSSGKTYYADSAKGRLTISSDNAKDSLYLQMNSLRAEDTAVYYCTRDSYADDAALFDIWGQGTTVTVSSTREDLKNVFPPEVAVFEPSEAEISHTQKATLVCLATGFYPDHVELSWWVNGKEVHSGVCTDPQPLKEQPALNDSRYCLSSRLRVSATFWQNPRNHFRCQVQFYGLSENDEWTQDRAKPVTQIVSAEAWGRADDVIKIHWQEKKSNTILGSQEGNTMKTNDTYMKFSWLTVPEKSLDKEHRCIVRHENNKNGVDQEIIFPPIKTDVITMDPKDNCSKDANDTLLLQLTNTSAYYMYLLLLLKSVVYFAIITCCLLRRTAFCCNGEKS

SEQ ID NO: 15743 - protein, 724 aa, synthetic construct; identical to SEQ ID NO: 15739

SEQ ID NO: 15744 - protein, 731 aa, synthetic construct; identical to SEQ ID NO: 15740

SEQ ID NO: 15745 - protein, 724 aa, synthetic construct; identical to SEQ ID NO: 15741

SEQ ID NO: 15746 - protein, 732 aa, synthetic construct; identical to SEQ ID NO: 15742

SEQ ID NO: 15747 - protein, 731 aa, synthetic construct
MALPVTALLLPLALLLHAARPDIQLTQSPSSLSASVGDRVSFTCQASQDINNFLNWYQQKPGKAPKLLIYDASNLETGVPSRFSGSGSGTDFTFTISSLQPEDIATYYCQQYGNLPFTFGGGTKVEIKRLEIQNPDPAVYQLRDSKSSDKSVCLFTDFDSQTNVSQSKDSDVYITDKCVLDMRSMDFKSNSAVAWSNKSDFACANAFNNSIIPEDTFFPSPESSDSTDHVKPKETENTKQPSKSCHKPKAIVHTEKVNMMSLTVLGLRMLFAKTVAVNFLLTAKLFFLRAKRSGSGVKQTLNFDLLKLAGDVESNPGPTSMDWIWRILFLVGAATGAHSFEQVQLQESGPGLVKPSQTLSLTCTVSGGSISSGGFYWSWIRQHPGKGLEWIGYIHHSGSTHYNPSLKSRVTISIDTSKNLFSLRLSSVTAADTAVYYCASLVYCGGDCYSGFDYWGQGTLVTVSSTREDLKNVFPPEVAVFEPSEAEISHTQKATLVCLATGFYPDHVELSWWVNGKEVHSGVCTDPQPLKEQPALNDSRYCLSSRLRVSATFWQNPRNHFRCQVQFYGLSENDEWTQDRAKPVTQIVSAEAWGRADDVIKIHWQEKKSNTILGSQEGNTMKTNDTYMKFSWLTVPEKSLDKEHRCIVRHENNKNGVDQEIIFPPIKTDVITMDPKDNCSKDANDTLLLQLTNTSAYYMYLLLLLKSVVYFAIITCCLLRRTAFCCNGEKS

SEQ ID NO: 15748 - protein, 727 aa, synthetic construct
MALPVTALLLPLALLLHAARPDIQMTQSPSSLSASVGDRVTITCKSSQSVLYSSNQKNYLAWFQQKPGKAPKLLIYWASTRESGVPSRFSGSGSGTDFTLTISSLQPEDFATYFCHQYLSSYTFGQGTKVEIKRLEIQNPDPAVYQLRDSKSSDKSVCLFTDFDSQTNVSQSKDSDVYITDKCVLDMRSMDFKSNSAVAWSNKSDFACANAFNNSIIPEDTFFPSPESSDSTDHVKPKETENTKQPSKSCHKPKAIVHTEKVNMMSLTVLGLRMLFAKTVAVNFLLTAKLFFLRAKRSGSGVKQTLNFDLLKLAGDVESNPGPTSMDWIWRILFLVGAATGAHSFEEVQLVESGGGLVQPGGSLRLSCAASGYTFTTYWMHWVRQAPGKGLEWVGYIRPSTGYTEYNQKFKDRFTISADTSKNTAYLQMNSLRAEDTAVYYCARSRWLLDYWGQGTLVTVSTREDLKNVFPPEVAVFEPSEAEISHTQKATLVCLATGFYPDHVELSWWVNGKEVHSGVCTDPQPLKEQPALNDSRYCLSSRLRVSATFWQNPRNHFRCQVQFYGLSENDEWTQDRAKPVTQIVSAEAWGRADDVIKIHWQEKKSNTILGSQEGNTMKTNDTYMKFSWLTVPEKSLDKEHRCIVRHENNKNGVDQEIIFPPIKTDVITMDPKDNCSKDANDTLLLQLTNTSAYYMYLLLLLKSVVYFAIITCCLLRRTAFCCNGEKS

SEQ ID NO: 15749 - protein, 724 aa, synthetic construct
MALPVTALLLPLALLLHAARPDIQMTQSPSSLSASVGDRVTITCRASQDISNYLNWYQQKPGKAPKLLIYYTSRLHSGVPSRFSGSGSGTDFTLTISSLQPEDFATYYCQQGNTLPYTFGQGTKVEIKRLEIQNPDPAVYQLRDSKSSDKSVCLFTDFDSQTNVSQSKDSDVYITDKCVLDMRSMDFKSNSAVAWSNKSDFACANAFNNSIIPEDTFFPSPESSDSTDHVKPKETENTKQPSKSCHKPKAIVHTEKVNMMSLTVLGLRMLFAKTVAVNFLLTAKLFFLRAKRSGSGVKQTLNFDLLKLAGDVESNPGPTSMDWIWRILFLVGAATGAHSFEEVQLVESGGGLVQPGGSLRLSCAASGFTFSDYFMSWVRQAPGKGLEWVATISNGGTYTYYPDSVKGRFTISRDNSKNTLYLQMNSLRAEDTAVYYCARFDGYIFDYWGQGTLVTVSSTREDLKNVFPPEVAVFEPSEAEISHTQKATLVCLATGFYPDHVELSWWVNGKEVHSGVCTDPQPLKEQPALNDSRYCLSSRLRVSATFWQNPRNHFRCQVQFYGLSENDEWTQDRAKPVTQIVSAEAWGRADDVIKIHWQEKKSNTILGSQEGNTMKTNDTYMKFSWLTVPEKSLDKEHRCIVRHENNKNGVDQEIIFPPIKTDVITMDPKDNCSKDANDTLLLQLTNTSAYYMYLLLLLKSVVYFAIITCCLLRRTAFCCNGEKS

SEQ ID NO: 15750 - protein, 856 aa, synthetic construct
MALPVTALLLPLALLLHAARPEVQLVESGGGLVQPGGSLRLSCAASGFSFSDFWMSWVRQAPGKGLEWVATISQAGSEKDYVDSVKGRFTISRDNAKKSLYLQMNSLRAEDTAVYYCASGVYSFDYRGQGTLVTVSSGTGGGGSGGGGSGGGGSEFDIQMTQTTSSLSASLGDRVTISCRASQDISKYLNWYQQKPDGTVKLLIYHTSRLHSGVPSRFSGSGSGTDYSLTISNLEQEDIATYFCQQGNTLPYTFGGGTKLEITLEDLKNVFPPEVAVFEPSEAEISHTQKATLVCLATGFYPDHVELSWWVNGKEVHSGVCTDPQPLKEQPALNDSRYCLSSRLRVSATFWQNPRNHFRCQVQFYGLSENDEWTQDRAKPVTQIVSAEAWGRADDVIKIHWQEKKSNTILGSQEGNTMKTNDTYMKFSWLTVPEKSLDKEHRCIVRHENNKNGVDQEIIFPPIKTDVITMDPKDNCSKDANDTLLLQLTNTSAYYMYLLLLLKSVVYFAIITCCLLRRTAFCCNGEKSRAKRSGSGATNFSLLKQAGDVEENPGPTSMDWIWRILFLVGAATGAHSFEVKLQESGPGLVAPSQSLSVTCTVSGVSLPDYGVSWIRQPPRKGLEWLGVIWGSETTYYNSALKSRLTIIKDNSKSQVFLKMNSLQTDDTAIYYCAKHYYYGGSYAMDYWGQGTSVTVSSTRIQNPDPAVYQLRDSKSSDKSVCLFTDFDSQTNVSQSKDSDVYITDKCVLDMRSMDFKSNSAVAWSNKSDFACANAFNNSIIPEDTFFPSPESSDSTDHVKPKETENTKQPSKSCHKPKAIVHTEKVNMMSLTVLGLRMLFAKTVAVNFLLTAKLFFL

SEQ ID NO: 15751 - protein, 857 aa, synthetic construct
MALPVTALLLPLALLLHAARPEVQLVESGGGLVQPGGSLRLSCAASGFSFSDFWMSWVRQAPGKGLEWVATISQAGSEKDYVDSVKGRFTISRDNAKKSLYLQMNSLRAEDTAVYYCASGVYSFDYRGQGTLVTVSSGTGGGGSGGGGSGGGGSEFEIVMTQSPATLSLSPGERATLSCRASQDISKYLNWYQQKPGQAPRLLIYHTSRLHSGIPARFSGSGSGTDYTLTISSLQPEDFAVYFCQQGNTLPYTFGQGTKLEIKLEDLKNVFPPEVAVFEPSEAEISHTQKATLVCLATGFYPDHVELSWWVNGKEVHSGVCTDPQPLKEQPALNDSRYCLSSRLRVSATFWQNPRNHFRCQVQFYGLSENDEWTQDRAKPVTQIVSAEAWGRADDVIKIHWQEKKSNTILGSQEGNTMKTNDTYMKFSWLTVPEKSLDKEHRCIVRHENNKNGVDQEIIFPPIKTDVITMDPKDNCSKDANDTLLLQLTNTSAYYMYLLLLLKSVVYFAIITCCLLRRTAFCCNGEKSRAKRSGSGATNFSLLKQAGDVEENPGPTSMDWIWRILFLVGAATGAHSFEQVQLQESGPGLVKPSETLSLTCTVSGVSLPDYGVSWIRQPPGKGLEWIGVIWGSETTYYNSSLKSRVTISKDNSKNQVSLKLSSVTAADTAVYYCAKHYYYGGSYAMDYWGQGTLVTVSSTRIQNPDPAVYQLRDSKSSDKSVCLFTDFDSQTNVSQSKDSDVYITDKCVLDMRSMDFKSNSAVAWSNKSDFACANAFNNSIIPEDTFFPSPESSDSTDHVKPKETENTKQPSKSCHKPKAIVHTEKVNMMSLTVLGLRMLFAKTVAVNFLLTAKLFFL

SEQ ID NO: 15752 - protein, 858 aa, synthetic construct
MALPVTALLLPLALLLHAARPEVQLVESGGGLVQPGGSLRLSCAASGFSFSDFWMSWVRQAPGKGLEWVATISQAGSEKDYVDSVKGRFTISRDNAKKSLYLQMNSLRAEDTAVYYCASGVYSFDYRGQGTLVTVSSGTGGGGSGGGGSGGGGSEFDEIVLTQSPATLSLSPGERATLSCSASSSVSYMHWYQQKPGQAPRLLIYDTSKLASGIPARFSGSGSGTDFTLTISSLEPEDVAVYYCFQGSVYPFTFGQGTKLEIKRLEDLKNVFPPEVAVFEPSEAEISHTQKATLVCLATGFYPDHVELSWWVNGKEVHSGVCTDPQPLKEQPALNDSRYCLSSRLRVSATFWQNPRNHFRCQVQFYGLSENDEWTQDRAKPVTQIVSAEAWGRADDVIKIHWQEKKSNTILGSQEGNTMKTNDTYMKFSWLTVPEKSLDKEHRCIVRHENNKNGVDQEIIFPPIKTDVITMDPKDNCSKDANDTLLLQLTNTSAYYMYLLLLLKSVVYFAIITCCLLRRTAFCCNGEKSRAKRSGSGATNFSLLKQAGDVEENPGPTSMDWIWRILFLVGAATGAHSFEQVQLQESGPGLVKPSQTLSLTCTVSGGSISTSGMGVGWIRQHPGKGLEWIGHIWWDDDKRYNPALKSRVTISVDTSKNQFSLKLSSVTAADTAVYYCARMELWSYYFDYWGQGTLVTVSSTRIQNPDPAVYQLRDSKSSDKSVCLFTDFDSQTNVSQSKDSDVYITDKCVLDMRSMDFKSNSAVAWSNKSDFACANAFNNSIIPEDTFFPSPESSDSTDHVKPKETENTKQPSKSCHKPKAIVHTEKVNMMSLTVLGLRMLFAKTVAVNFLLTAKLFFL

SEQ ID NO: 15753 - protein, 856 aa, synthetic construct
MALPVTALLLPLALLLHAARPEVQLVESGGGLVQPGGSLRLSCAASGFSFSDFWMSWVRQAPGKGLEWVATISQAGSEKDYVDSVKGRFTISRDNAKKSLYLQMNSLRAEDTAVYYCASGVYSFDYRGQGTLVTVSSGTGGGGSGGGGSGGGGSEFDYIHVTQSPSSLSVSIGDRVTINCQTSQGVGSDLHWYQHKPGRAPKLLIHHASSVEDGVPSRFSGTGFHTSFNLTINDLQADDIGTYYCQVLQSFGRGSRLDTKLEDLKNVFPPEVAVFEPSEAEISHTQKATLVCLATGFYPDHVELSWWVNGKEVHSGVCTDPQPLKEQPALNDSRYCLSSRLRVSATFWQNPRNHFRCQVQFYGLSENDEWTQDRAKPVTQIVSAEAWGRADDVIKIHWQEKKSNTILGSQEGNTMKTNDTYMKFSWLTVPEKSLDKEHRCIVRHENNKNGVDQEIIFPPIKTDVITMDPKDNCSKDANDTLLLQLTNTSAYYMYLLLLLKSVVYFAIITCCLLRRTAFCCNGEKSRAKRSGSGATNFSLLKQAGDVEENPGPTSMDWIWRILFLVGAATGAHSFERAHLVQSGTAMKKPGASVRVSCQTSGYTFTAHILFWFRQAPGRGLEWVGWIKPQYGAVNFGGGFRDRVTLTRDVYREIAYMDIRGLKPDDTAVYYCARDRSYGDSSWALDAWGQGTTVVVSATRIQNPDPAVYQLRDSKSSDKSVCLFTDFDSQTNVSQSKDSDVYITDKCVLDMRSMDFKSNSAVAWSNKSDFACANAFNNSIIPEDTFFPSPESSDSTDHVKPKETENTKQPSKSCHKPKAIVHTEKVNMMSLTVLGLRMLFAKTVAVNFLLTAKLFFL

SEQ ID NO: 15754 - protein, 866 aa, synthetic construct
MALPVTALLLPLALLLHAARPEVQLVESGGGLVQPGGSLRLSCAASGFSFSDFWMSWVRQAPGKGLEWVATISQAGSEKDYVDSVKGRFTISRDNAKKSLYLQMNSLRAEDTAVYYCASGVYSFDYRGQGTLVTVSSGTGGGGSGGGGSGGGGSEFDVQMIQTPDSLAVSLGQRATISCRASESVDNYGISFMHWYQQKPGQSPKLLIYRASNLESGIPARFSGSGSRTDFTLTINPVETDDVATYYCQQNNKDPPTFGGGTKLEIKLEDLKNVFPPEVAVFEPSEAEISHTQKATLVCLATGFYPDHVELSWWVNGKEVHSGVCTDPQPLKEQPALNDSRYCLSSRLRVSATFWQNPRNHFRCQVQFYGLSENDEWTQDRAKPVTQIVSAEAWGRADDVIKIHWQEKKSNTILGSQEGNTMKTNDTYMKFSWLTVPEKSLDKEHRCIVRHENNKNGVDQEIIFPPIKTDVITMDPKDNCSKDANDTLLLQLTNTSAYYMYLLLLLKSVVYFAIITCCLLRRTAFCCNGEKSRAKRSGSGATNFSLLKQAGDVEENPGPTSMDWIWRILFLVGAATGAHSFEGGGGSQVQLQQSGAELVKPGASVKISCKASGYAFSSYWMNWVKQRPGKGLEWIGQIYPGDGDTTYNGKFKGKATLTADKSSSTVYMQLNSLTSEDSAVYFCVRYYYGSSGYFDYWGQGTTLTVSSTRIQNPDPAVYQLRDSKSSDKSVCLFTDFDSQTNVSQSKDSDVYITDKCVLDMRSMDFKSNSAVAWSNKSDFACANAFNNSIIPEDTFFPSPESSDSTDHVKPKETENTKQPSKSCHKPKAIVHTEKVNMMSLTVLGLRMLFAKTVAVNFLLTAKLFFL

SEQ ID NO: 15755 - protein, 857 aa, synthetic construct
MALPVTALLLPLALLLHAARPEVQLVESGGGLVQPGGSLRLSCAASGFSFSDFWMSWVRQAPGKGLEWVATISQAGSEKDYVDSVKGRFTISRDNAKKSLYLQMNSLRAEDTAVYYCASGVYSFDYRGQGTLVTVSSGTGGGGSGGGGSGGGGSEFDVQMIQTPSSLSASLGDRVTISCRASQDIGNYLNWYQQKPDGTVKLLIYYTSRLHSGVPSRFSGSGSGTEYSLTISNLEQEDIATYFCQQGSALPPTFGGGTKLEINLEDLKNVFPPEVAVFEPSEAEISHTQKATLVCLATGFYPDHVELSWWVNGKEVHSGVCTDPQPLKEQPALNDSRYCLSSRLRVSATFWQNPRNHFRCQVQFYGLSENDEWTQDRAKPVTQIVSAEAWGRADDVIKIHWQEKKSNTILGSQEGNTMKTNDTYMKFSWLTVPEKSLDKEHRCIVRHENNKNGVDQEIIFPPIKTDVITMDPKDNCSKDANDTLLLQLTNTSAYYMYLLLLLKSVVYFAIITCCLLRRTAFCCNGEKSRAKRSGSGATNFSLLKQAGDVEENPGPTSMDWIWRILFLVGAATGAHSFEALQLQQSGAELVRPGASVTLSCKASGYTFTDYEMHWVKQTPVHGLEWIGAIDPETGGTAYNQKFEGKAILTADKSSSTAYMELRSLTSEDSPVYYCARRRYYGSSSFDYWGQGTTLTVSSTRIQNPDPAVYQLRDSKSSDKSVCLFTDFDSQTNVSQSKDSDVYITDKCVLDMRSMDFKSNSAVAWSNKSDFACANAFNNSIIPEDTFFPSPESSDSTDHVKPKETENTKQPSKSCHKPKAIVHTEKVNMMSLTVLGLRMLFAKTVAVNFLLTAKLFFL

SEQ ID NO: 15756 - protein, 861 aa, synthetic construct
MALPVTALLLPLALLLHAARPEVQLVESGGGLVQPGGSLRLSCAASGFSFSDFWMSWVRQAPGKGLEWVATISQAGSEKDYVDSVKGRFTISRDNAKKSLYLQMNSLRAEDTAVYYCASGVYSFDYRGQGTLVTVSSGTGGGGSGGGGSGGGGSEFDIVLTQSPASLAVSLGQRATISCRASKSVSTSGYSYLHWYQQKPGQPPKLLIYLASNLESGVPARFSGSGSGTDFTLNIHPVEEEDAATYYCQHSRELPFTFGSGTKLEIKLEDLKNVFPPEVAVFEPSEAEISHTQKATLVCLATGFYPDHVELSWWVNGKEVHSGVCTDPQPLKEQPALNDSRYCLSSRLRVSATFWQNPRNHFRCQVQFYGLSENDEWTQDRAKPVTQIVSAEAWGRADDVIKIHWQEKKSNTILGSQEGNTMKTNDTYMKFSWLTVPEKSLDKEHRCIVRHENNKNGVDQEIIFPPIKTDVITMDPKDNCSKDANDTLLLQLTNTSAYYMYLLLLLKSVVYFAIITCCLLRRTAFCCNGEKSRAKRSGSGATNFSLLKQAGDVEENPGPTSMDWIWRILFLVGAATGAHSFEQVQLVESGGGLVQPGGSLKLSCAASGFDFSRYWMSWVRQAPGKGLEWIGEINPTSSTINFTPSLKDKVFISRDNAKNTLYLQMSKVRSEDTALYYCARGNYYRYGDAMDYWGQGTSVTVSTRIQNPDPAVYQLRDSKSSDKSVCLFTDFDSQTNVSQSKDSDVYITDKCVLDMRSMDFKSNSAVAWSNKSDFACANAFNNSIIPEDTFFPSPESSDSTDHVKPKETENTKQPSKSCHKPKAIVHTEKVNMMSLTVLGLRMLFAKTVAVNFLLTAKLFFL

SEQ ID NO: 15757 - protein, 859 aa, synthetic construct
MALPVTALLLPLALLLHAARPEVQLVESGGGLVQPGGSLRLSCAASGFSFSDFWMSWVRQAPGKGLEWVATISQAGSEKDYVDSVKGRFTISRDNAKKSLYLQMNSLRAEDTAVYYCASGVYSFDYRGQGTLVTVSSGTGGGGSGGGGSGGGGSEFDIQMTQSPSSLSASVGDRVTITCSASQDISNYLNWYQQKPGKAPKLLIYYTSNLHSGVPSRFSGSGSGTDFTLTISSLQPEDFATYYCQQYRKLPWTFGQGTKLEIKRLEDLKNVFPPEVAVFEPSEAEISHTQKATLVCLATGFYPDHVELSWWVNGKEVHSGVCTDPQPLKEQPALNDSRYCLSSRLRVSATFWQNPRNHFRCQVQFYGLSENDEWTQDRAKPVTQIVSAEAWGRADDVIKIHWQEKKSNTILGSQEGNTMKTNDTYMKFSWLTVPEKSLDKEHRCIVRHENNKNGVDQEIIFPPIKTDVITMDPKDNCSKDANDTLLLQLTNTSAYYMYLLLLLKSVVYFAIITCCLLRRTAFCCNGEKSRAKRSGSGATNFSLLKQAGDVEENPGPTSMDWIWRILFLVGAATGAHSFEQVQLVQSGAEVKKPGSSVKVSCKASGGTFSNYWMHWVRQAPGQGLEWMGATYRGHSDTYYNQKFKGRVTITADKSTSTAYMELSSLRSEDTAVYYCARGAIYDGYDVLDNWGQGTLVTVSSTRIQNPDPAVYQLRDSKSSDKSVCLFTDFDSQTNVSQSKDSDVYITDKCVLDMRSMDFKSNSAVAWSNKSDFACANAFNNSIIPEDTFFPSPESSDSTDHVKPKETENTKQPSKSCHKPKAIVHTEKVNMMSLTVLGLRMLFAKTVAVNFLLTAKLFFL

SEQ ID NO: 15758 - protein, 859 aa, synthetic construct
MALPVTALLLPLALLLHAARPEVQLVESGGGLVQPGGSLRLSCAASGFSFSDFWMSWVRQAPGKGLEWVATISQAGSEKDYVDSVKGRFTISRDNAKKSLYLQMNSLRAEDTAVYYCASGVYSFDYRGQGTLVTVSSGTGGGGSGGGGSGGGGSEFDIVLTQSPATLSLSPGDRATISCRASESVTILGSHLIYWYQQKPGQPPRLLIQLASNVQTGVPARFSGSGSRTDFTLTISSVEPEDFAVYYCLQSRTIPRTFGQGTKLEIKRLEDLKNVFPPEVAVFEPSEAEISHTQKATLVCLATGFYPDHVELSWWVNGKEVHSGVCTDPQPLKEQPALNDSRYCLSSRLRVSATFWQNPRNHFRCQVQFYGLSENDEWTQDRAKPVTQIVSAEAWGRADDVIKIHWQEKKSNTILGSQEGNTMKTNDTYMKFSWLTVPEKSLDKEHRCIVRHENNKNGVDQEIIFPPIKTDVITMDPKDNCSKDANDTLLLQLTNTSAYYMYLLLLLKSVVYFAIITCCLLRRTAFCCNGEKSRAKRSGSGATNFSLLKQAGDVEENPGPTSMDWIWRILFLVGAATGAHSFEQVQLVQSGPEVKKPGESVKISCKASGYTFRHYSMNWVKQAPGQGLKWMGRINTESGVPIYADDFKGRFSFTVDTSASTAYLEISSLTSEDTAVYFCSNDYLYSLDFWGQGTTLTVSSTRIQNPDPAVYQLRDSKSSDKSVCLFTDFDSQTNVSQSKDSDVYITDKCVLDMRSMDFKSNSAVAWSNKSDFACANAFNNSIIPEDTFFPSPESSDSTDHVKPKETENTKQPSKSCHKPKAIVHTEKVNMMSLTVLGLRMLFAKTVAVNFLLTAKLFFL

SEQ ID NO: 15759 - protein, 860 aa, synthetic construct
MALPVTALLLPLALLLHAARPEVQLVESGGGLVQPGGSLRLSCAASGFSFSDFWMSWVRQAPGKGLEWVATISQAGSEKDYVDSVKGRFTISRDNAKKSLYLQMNSLRAEDTAVYYCASGVYSFDYRGQGTLVTVSSGTGGGGSGGGGSGGGGSEFQSVLTQPPSVSGAPGQRVTISCTGSSSNIGAGFDVHWYQQLPGTAPKLLIYGNSNRPSGVPDRFSGSKSGTSASLAITGLQAEDEADYYCQSYDSSLSGYVFGTGTKVTVLGLEDLKNVFPPEVAVFEPSEAEISHTQKATLVCLATGFYPDHVELSWWVNGKEVHSGVCTDPQPLKEQPALNDSRYCLSSRLRVSATFWQNPRNHFRCQVQFYGLSENDEWTQDRAKPVTQIVSAEAWGRADDVIKIHWQEKKSNTILGSQEGNTMKTNDTYMKFSWLTVPEKSLDKEHRCIVRHENNKNGVDQEIIFPPIKTDVITMDPKDNCSKDANDTLLLQLTNTSAYYMYLLLLLKSVVYFAIITCCLLRRTAFCCNGEKSRAKRSGSGATNFSLLKQAGDVEENPGPTSMDWIWRILFLVGAATGAHSFEQVQLVQSGAEVKKPGASVKVSCKASGYTFTDYYMHWVRQAPGQRLEWMGWINPNSGGTNYAQKFQDRITVTRDTSSNTGYMELTRLRSDDTAVYYCARSPYSGVLDKWGQGTLVTVSSTRIQNPDPAVYQLRDSKSSDKSVCLFTDFDSQTNVSQSKDSDVYITDKCVLDMRSMDFKSNSAVAWSNKSDFACANAFNNSIIPEDTFFPSPESSDSTDHVKPKETENTKQPSKSCHKPKAIVHTEKVNMMSLTVLGLRMLFAKTVAVNFLLTAKLFFL

SEQ ID NO: 15760 - protein, 857 aa, synthetic construct
MALPVTALLLPLALLLHAARPEVQLVESGGGLVQPGGSLRLSCAASGFSFSDFWMSWVRQAPGKGLEWVATISQAGSEKDYVDSVKGRFTISRDNAKKSLYLQMNSLRAEDTAVYYCASGVYSFDYRGQGTLVTVSSGTGGGGSGGGGSGGGGSEFQAVLTQPPSASGTPGQRVTISCSGSSSNIGSYTVSWYQQLPGTAPKFLIYSNNQRPSGVPDRFSGSKSGTSASLAISGLQSEDEADYYCAAWDDSLNGYVFGTGTKVTVLGLEDLKNVFPPEVAVFEPSEAEISHTQKATLVCLATGFYPDHVELSWWVNGKEVHSGVCTDPQPLKEQPALNDSRYCLSSRLRVSATFWQNPRNHFRCQVQFYGLSENDEWTQDRAKPVTQIVSAEAWGRADDVIKIHWQEKKSNTILGSQEGNTMKTNDTYMKFSWLTVPEKSLDKEHRCIVRHENNKNGVDQEIIFPPIKTDVITMDPKDNCSKDANDTLLLQLTNTSAYYMYLLLLLKSVVYFAIITCCLLRRTAFCCNGEKSRAKRSGSGATNFSLLKQAGDVEENPGPTSMDWIWRILFLVGAATGAHSFEVQLVQSGAEVKKPGESLKISCKGSGYDFTTYWIGWVRQMPGKGLEWMGIIYPGDSDTRYSPSVRGRVTISADKSINTAYLQWSSLEASDTAMYYCARMWTFSQDGWGQGTLVTVSSTRIQNPDPAVYQLRDSKSSDKSVCLFTDFDSQTNVSQSKDSDVYITDKCVLDMRSMDFKSNSAVAWSNKSDFACANAFNNSIIPEDTFFPSPESSDSTDHVKPKETENTKQPSKSCHKPKAIVHTEKVNMMSLTVLGLRMLFAKTVAVNFLLTAKLFFL

SEQ ID NO: 15761 - protein, 860 aa, synthetic construct
MALPVTALLLPLALLLHAARPEVQLVESGGGLVQPGGSLRLSCAASGFSFSDFWMSWVRQAPGKGLEWVATISQAGSEKDYVDSVKGRFTISRDNAKKSLYLQMNSLRAEDTAVYYCASGVYSFDYRGQGTLVTVSSGTGGGGSGGGGSGGGGSEFDIVMTQSPDSLAVSLGERATINCKSSQSILYSSNQKNYLAWYQQKPGQSPKLLIYWASTRESGVPDRFSGSGSGTDFTLTISSLQAEDVAVYYCHQYISSYTFGQGTKLEIKLEDLKNVFPPEVAVFEPSEAEISHTQKATLVCLATGFYPDHVELSWWVNGKEVHSGVCTDPQPLKEQPALNDSRYCLSSRLRVSATFWQNPRNHFRCQVQFYGLSENDEWTQDRAKPVTQIVSAEAWGRADDVIKIHWQEKKSNTILGSQEGNTMKTNDTYMKFSWLTVPEKSLDKEHRCIVRHENNKNGVDQEIIFPPIKTDVITMDPKDNCSKDANDTLLLQLTNTSAYYMYLLLLLKSVVYFAIITCCLLRRTAFCCNGEKSRAKRSGSGATNFSLLKQAGDVEENPGPTSMDWIWRILFLVGAATGAHSFEQVQLVQSGAEVKKPGASVKVSCKASGYTFASQWMHWMRQAPGQGLEWIGWINPGNVNTKYNEKFKGRATLTVDTSTNTAYMELSSLRSEDTAVYYCARSTWYRPLDYWGQGTLVTVSSTRIQNPDPAVYQLRDSKSSDKSVCLFTDFDSQTNVSQSKDSDVYITDKCVLDMRSMDFKSNSAVAWSNKSDFACANAFNNSIIPEDTFFPSPESSDSTDHVKPKETENTKQPSKSCHKPKAIVHTEKVNMMSLTVLGLRMLFAKTVAVNFLLTAKLFFL

SEQ ID NO: 15762 - protein, 860 aa, synthetic construct
MALPVTALLLPLALLLHAARPEVQLVESGGGLVQPGGSLRLSCAASGFSFSDFWMSWVRQAPGKGLEWVATISQAGSEKDYVDSVKGRFTISRDNAKKSLYLQMNSLRAEDTAVYYCASGVYSFDYRGQGTLVTVSSGTGGGGSGGGGSGGGGSEFDHIVLTQSPSSLSASLGDRVTISCRASQDISTYLNWYQQKPDGTVKLLIFYTSRLHAGVPSRFSGSGSGTHHSLTISNLEQEDIATYFCQQGNSLPFTFGSGTKLEIKRLEDLKNVFPPEVAVFEPSEAEISHTQKATLVCLATGFYPDHVELSWWVNGKEVHSGVCTDPQPLKEQPALNDSRYCLSSRLRVSATFWQNPRNHFRCQVQFYGLSENDEWTQDRAKPVTQIVSAEAWGRADDVIKIHWQEKKSNTILGSQEGNTMKTNDTYMKFSWLTVPEKSLDKEHRCIVRHENNKNGVDQEIIFPPIKTDVITMDPKDNCSKDANDTLLLQLTNTSAYYMYLLLLLKSVVYFAIITCCLLRRTAFCCNGEKSRAKRSGSGATNFSLLKQAGDVEENPGPTSMDWIWRILFLVGAATGAHSFEQVQLKESGPELEKPGASVKISCKASGYSFTAYSMNWVKQNNGMSLEWIGSIDPYYGDTKYAQKFKGKATLTVDKASSTAYLQLKSLTSEDSAVYYCARRMITTGDWYFDVWGAGTTVTVSSTRIQNPDPAVYQLRDSKSSDKSVCLFTDFDSQTNVSQSKDSDVYITDKCVLDMRSMDFKSNSAVAWSNKSDFACANAFNNSIIPEDTFFPSPESSDSTDHVKPKETENTKQPSKSCHKPKAIVHTEKVNMMSLTVLGLRMLFAKTVAVNFLLTAKLFFL

SEQ ID NO: 15763 - protein, 860 aa, synthetic construct; identical to SEQ ID NO: 15762

SEQ ID NO: 15764 - protein, 860 aa, synthetic construct
MALPVTALLLPLALLLHAARPEVQLVESGGGLVQPGGSLRLSCAASGFSFSDFWMSWVRQAPGKGLEWVATISQAGSEKDYVDSVKGRFTISRDNAKKSLYLQMNSLRAEDTAVYYCASGVYSFDYRGQGTLVTVSSGTGGGGSGGGGSGGGGSEFDEIVLTQSPATLSLSPGERATLSCRASQSVSSYLAWYQQKPGQAPRLLIYDASNRATGIPARFSGSGSGTDFTLTISSLEPEDFAVYYCQQRSNWPITFGQGTRLEIKLEDLKNVFPPEVAVFEPSEAEISHTQKATLVCLATGFYPDHVELSWWVNGKEVHSGVCTDPQPLKEQPALNDSRYCLSSRLRVSATFWQNPRNHFRCQVQFYGLSENDEWTQDRAKPVTQIVSAEAWGRADDVIKIHWQEKKSNTILGSQEGNTMKTNDTYMKFSWLTVPEKSLDKEHRCIVRHENNKNGVDQEIIFPPIKTDVITMDPKDNCSKDANDTLLLQLTNTSAYYMYLLLLLKSVVYFAIITCCLLRRTAFCCNGEKSRAKRSGSGATNFSLLKQAGDVEENPGPTSMDWIWRILFLVGAATGAHSFEEVQLVESGGGLVQPGRSLRLSCAASGFTFNDYAMHWVRQAPGKGLEWVSTISWNSGSIGYADSVKGRFTISRDNAKKSLYLQMNSLRAEDTALYYCAKDIQYGNYYYGMDVWGQGTTVTVSSTRIQNPDPAVYQLRDSKSSDKSVCLFTDFDSQTNVSQSKDSDVYITDKCVLDMRSMDFKSNSAVAWSNKSDFACANAFNNSIIPEDTFFPSPESSDSTDHVKPKETENTKQPSKSCHKPKAIVHTEKVNMMSLTVLGLRMLFAKTVAVNFLLTAKLFFL

SEQ ID NO: 15765 - protein, 862 aa, synthetic construct
MALPVTALLLPLALLLHAARPEVQLVESGGGLVQPGGSLRLSCAASGFSFSDFWMSWVRQAPGKGLEWVATISQAGSEKDYVDSVKGRFTISRDNAKKSLYLQMNSLRAEDTAVYYCASGVYSFDYRGQGTLVTVSSGTGGGGSGGGGSGGGGSEFDIVMTQTPLSLPVTPGEPASISCRSSKSLLHSNGITYLYWYLQKPGQSPQLLIYQMSNLVSGVPDRFSGSGSGTDFTLKISRVEAEDVGVYYCAQNLELPYTFGGGTKVEIKRLEDLKNVFPPEVAVFEPSEAEISHTQKATLVCLATGFYPDHVELSWWVNGKEVHSGVCTDPQPLKEQPALNDSRYCLSSRLRVSATFWQNPRNHFRCQVQFYGLSENDEWTQDRAKPVTQIVSAEAWGRADDVIKIHWQEKKSNTILGSQEGNTMKTNDTYMKFSWLTVPEKSLDKEHRCIVRHENNKNGVDQEIIFPPIKTDVITMDPKDNCSKDANDTLLLQLTNTSAYYMYLLLLLKSVVYFAIITCCLLRRTAFCCNGEKSRAKRSGSGATNFSLLKQAGDVEENPGPTSMDWIWRILFLVGAATGAHSFEQVQLVQSGAEVKKPGSSVKVSCKASGYAFSYSWINWVRQAPGQGLEWMGRIFPGDGDTDYNGKFKGRVTITADKSTSTAYMELSSLRSEDTAVYYCARNVFDGYWLVYWGQGTLVTVSSTRIQNPDPAVYQLRDSKSSDKSVCLFTDFDSQTNVSQSKDSDVYITDKCVLDMRSMDFKSNSAVAWSNKSDFACANAFNNSIIPEDTFFPSPESSDSTDHVKPKETENTKQPSKSCHKPKAIVHTEKVNMMSLTVLGLRMLFAKTVAVNFLLTAKLFFL

SEQ ID NO: 15766 - protein, 863 aa, synthetic construct
MALPVTALLLPLALLLHAARPEVQLVESGGGLVQPGGSLRLSCAASGFSFSDFWMSWVRQAPGKGLEWVATISQAGSEKDYVDSVKGRFTISRDNAKKSLYLQMNSLRAEDTAVYYCASGVYSFDYRGQGTLVTVSSGTGGGGSGGGGSGGGGSEFDIQMTQSPSSLSASVGDRVTITCRSSQSIVHSVGNTFLEWYQQKPGKAPKLLIYKVSNRFSGVPSRFSGSGSGTDFTLTISSLQPEDFATYYCFQGSQFPYTFGQGTKVEIKRLEDLKNVFPPEVAVFEPSEAEISHTQKATLVCLATGFYPDHVELSWWVNGKEVHSGVCTDPQPLKEQPALNDSRYCLSSRLRVSATFWQNPRNHFRCQVQFYGLSENDEWTQDRAKPVTQIVSAEAWGRADDVIKIHWQEKKSNTILGSQEGNTMKTNDTYMKFSWLTVPEKSLDKEHRCIVRHENNKNGVDQEIIFPPIKTDVITMDPKDNCSKDANDTLLLQLTNTSAYYMYLLLLLKSVVYFAIITCCLLRRTAFCCNGEKSRAKRSGSGATNFSLLKQAGDVEENPGPTSMDWIWRILFLVGAATGAHSFEEVQLVESGGGLVQPGGSLRLSCAASGYEFSRSWMNWVRQAPGKGLEWVGRIYPGDGDTNYSGKFKGRFTISADTSKNTAYLQMNSLRAEDTAVYYCARDGSSWDWYFDVWGQGTLVTVSSTRIQNPDPAVYQLRDSKSSDKSVCLFTDFDSQTNVSQSKDSDVYITDKCVLDMRSMDFKSNSAVAWSNKSDFACANAFNNSIIPEDTFFPSPESSDSTDHVKPKETENTKQPSKSCHKPKAIVHTEKVNMMSLTVLGLRMLFAKTVAVNFLLTAKLFFL

SEQ ID NO: 15767 - protein, 861 aa, synthetic construct
MALPVTALLLPLALLLHAARPEVQLVESGGGLVQPGGSLRLSCAASGFSFSDFWMSWVRQAPGKGLEWVATISQAGSEKDYVDSVKGRFTISRDNAKKSLYLQMNSLRAEDTAVYYCASGVYSFDYRGQGTLVTVSSGTGGGGSGGGGSGGGGSEFDIQMTQSPSSLSASVGDRVTITCRASQTIWSYLNWYQQRPGKAPNLLIYAASSLQSGVPSRFSGRGSGTDFTLTISSLQAEDFATYYCQQSYSIPQIFGQGTKLEIKLEDLKNVFPPEVAVFEPSEAEISHTQKATLVCLATGFYPDHVELSWWVNGKEVHSGVCTDPQPLKEQPALNDSRYCLSSRLRVSATFWQNPRNHFRCQVQFYGLSENDEWTQDRAKPVTQIVSAEAWGRADDVIKIHWQEKKSNTILGSQEGNTMKTNDTYMKFSWLTVPEKSLDKEHRCIVRHENNKNGVDQEIIFPPIKTDVITMDPKDNCSKDANDTLLLQLTNTSAYYMYLLLLLKSVVYFAIITCCLLRRTAFCCNGEKSRAKRSGSGATNFSLLKQAGDVEENPGPTSMDWIWRILFLVGAATGAHSFEQVQLQQSGPGLVKPSQTLSLTCAISGDSVSSNSAAWNWIRQSPSRGLEWLGRTYYRSKWYNDYAVSVKSRITINPDTSKNQFSLQLNSVTPEDTAVYYCAREVTGDLEDAFDIWGQGTMVTVSSTRIQNPDPAVYQLRDSKSSDKSVCLFTDFDSQTNVSQSKDSDVYITDKCVLDMRSMDFKSNSAVAWSNKSDFACANAFNNSIIPEDTFFPSPESSDSTDHVKPKETENTKQPSKSCHKPKAIVHTEKVNMMSLTVLGLRMLFAKTVAVNFLLTAKLFFL

SEQ ID NO: 15768 - protein, 854 aa, synthetic construct
MALPVTALLLPLALLLHAARPEVQLVESGGGLVQPGGSLRLSCAASGFSFSDFWMSWVRQAPGKGLEWVATISQAGSEKDYVDSVKGRFTISRDNAKKSLYLQMNSLRAEDTAVYYCASGVYSFDYRGQGTLVTVSSGTGGGGSGGGGSGGGGSEFDIQMTQSPATIENTSLSASVGDRVTITCRASQGISSWLTWYQQKPEKAPKSLIYAASSLQSGVPSRFSGSGSGTDFTLTISSLQPEDFATYYCQQYDSYPITFGQGTRLEIKLEDLKNVFPPEVAVFEPSEAEISHTQKATLVCLATGFYPDHVELSWWVNGKEVHSGVCTDPQPLKEQPALNDSRYCLSSRLRVSATFWQNPRNHFRCQVQFYGLSENDEWTQDRAKPVTQIVSAEAWGRADDVIKIHWQEKKSNTILGSQEGNTMKTNDTYMKFSWLTVPEKSLDKEHRCIVRHENNKNGVDQEIIFPPIKTDVITMDPKDNCSKDANDTLLLQLTNTSAYYMYLLLLLKSVVYFAIITCCLLRRTAFCCNGEKSRAKRSGSGATNFSLLKQAGDVEENPGPTSMDWIWRILFLVGAATGAHSFEQVQLQQWGAGLLKPSETLSLTCAVYGGSFSAYYWSWIRQPPGKGLEWIGDINHGGGTNYNPSLKSRVTISVDTSKNQFSLKLNSVTAADTAVYYCASLTAYWGQGSLVTVSSTRIQNPDPAVYQLRDSKSSDKSVCLFTDFDSQTNVSQSKDSDVYITDKCVLDMRSMDFKSNSAVAWSNKSDFACANAFNNSIIPEDTFFPSPESSDSTDHVKPKETENTKQPSKSCHKPKAIVHTEKVNMMSLTVLGLRMLFAKTVAVNFLLTAKLFFL

SEQ ID NO: 15769 - protein, 859 aa, synthetic construct
MALPVTALLLPLALLLHAARPEVQLVESGGGLVQPGGSLRLSCAASGFSFSDFWMSWVRQAPGKGLEWVATISQAGSEKDYVDSVKGRFTISRDNAKKSLYLQMNSLRAEDTAVYYCASGVYSFDYRGQGTLVTVSSGTGGGGSGGGGSGGGGSEFDEIVLTQSPDSLAVSLGERATINCKASQSVDFDGDSYLNWYQQKPGQPPKVLIYAASTLQSGVPSRFSGSGSGTDFTLTINSLEAEDAATYYCQQSNEDPWTFGGGTKVEIKLEDLKNVFPPEVAVFEPSEAEISHTQKATLVCLATGFYPDHVELSWWVNGKEVHSGVCTDPQPLKEQPALNDSRYCLSSRLRVSATFWQNPRNHFRCQVQFYGLSENDEWTQDRAKPVTQIVSAEAWGRADDVIKIHWQEKKSNTILGSQEGNTMKTNDTYMKFSWLTVPEKSLDKEHRCIVRHENNKNGVDQEIIFPPIKTDVITMDPKDNCSKDANDTLLLQLTNTSAYYMYLLLLLKSVVYFAIITCCLLRRTAFCCNGEKSRAKRSGSGATNFSLLKQAGDVEENPGPTSMDWIWRILFLVGAATGAHSFEQVQLVQSGAEVKKPGASVKVSCKVSGYTFTDYYITWVRQAPGQALEWMGWIYPGSGNTKYSQKFQGRFVFSVDTSASTAYLQLSSLKAEDTAVYYCANYGNYWFAYWGQGTLVTVSSTRIQNPDPAVYQLRDSKSSDKSVCLFTDFDSQTNVSQSKDSDVYITDKCVLDMRSMDFKSNSAVAWSNKSDFACANAFNNSIIPEDTFFPSPESSDSTDHVKPKETENTKQPSKSCHKPKAIVHTEKVNMMSLTVLGLRMLFAKTVAVNFLLTAKLFFL

SEQ ID NO: 15770 - protein, 856 aa, synthetic construct
MALPVTALLLPLALLLHAARPEVQLVESGGGLVQPGGSLRLSCAASGFSFSDFWMSWVRQAPGKGLEWVATISQAGSEKDYVDSVKGRFTISRDNAKKSLYLQMNSLRAEDTAVYYCASGVYSFDYRGQGTLVTVSSGTGGGGSGGGGSGGGGSEFDIQMTQSPSSLSASVGDRVTITCRASQGISSWLAWYQQKPEKAPKSLIYAASSLQSGVPSRFSGSGSGTDFTLTISSLQPEDFATYYCQQYNSYPPTFGGGTKVEIKLEDLKNVFPPEVAVFEPSEAEISHTQKATLVCLATGFYPDHVELSWWVNGKEVHSGVCTDPQPLKEQPALNDSRYCLSSRLRVSATFWQNPRNHFRCQVQFYGLSENDEWTQDRAKPVTQIVSAEAWGRADDVIKIHWQEKKSNTILGSQEGNTMKTNDTYMKFSWLTVPEKSLDKEHRCIVRHENNKNGVDQEIIFPPIKTDVITMDPKDNCSKDANDTLLLQLTNTSAYYMYLLLLLKSVVYFAIITCCLLRRTAFCCNGEKSRAKRSGSGATNFSLLKQAGDVEENPGPTSMDWIWRILFLVGAATGAHSFEEVQLVQSGGGLVHPGGSLRLSCAGSGFAFSSSTMHWIRQAPGKGLEWISLIGSGGGIYYGDSVKGRFTISRDNAKNSLYLQMNSLRAEDMAVYYCVRGYFDWVDYFDYWGQGTLVTVSSTRIQNPDPAVYQLRDSKSSDKSVCLFTDFDSQTNVSQSKDSDVYITDKCVLDMRSMDFKSNSAVAWSNKSDFACANAFNNSIIPEDTFFPSPESSDSTDHVKPKETENTKQPSKSCHKPKAIVHTEKVNMMSLTVLGLRMLFAKTVAVNFLLTAKLFFL

SEQ ID NO: 15771 - protein, 866 aa, synthetic construct
MALPVTALLLPLALLLHAARPEVQLVESGGGLVQPGGSLRLSCAASGFSFSDFWMSWVRQAPGKGLEWVATISQAGSEKDYVDSVKGRFTISRDNAKKSLYLQMNSLRAEDTAVYYCASGVYSFDYRGQGTLVTVSSGTGGGGSGGGGSGGGGSEFDDIVMTQSPDSLTVSLGERTTINCKSSQSVLDSSKNKNSLAWYQQKPGQPPKLLLSWASTRESGIPDRFSGSGSGTDFTLTIDSLQPEDSATYYCQQSAHFPITFGQGTRLEIKLEDLKNVFPPEVAVFEPSEAEISHTQKATLVCLATGFYPDHVELSWWVNGKEVHSGVCTDPQPLKEQPALNDSRYCLSSRLRVSATFWQNPRNHFRCQVQFYGLSENDEWTQDRAKPVTQIVSAEAWGRADDVIKIHWQEKKSNTILGSQEGNTMKTNDTYMKFSWLTVPEKSLDKEHRCIVRHENNKNGVDQEIIFPPIKTDVITMDPKDNCSKDANDTLLLQLTNTSAYYMYLLLLLKSVVYFAIITCCLLRRTAFCCNGEKSRAKRSGSGATNFSLLKQAGDVEENPGPTSMDWIWRILFLVGAATGAHSFEQVQLVQSGAEVKKPGASVKVSCKASGYTFTNYGMNWVKQAPGQGLKWMGWINTYTGEPTYADDFKGRVTMTSDTSTSTAYLELHNLRSDDTAVYYCARWSWSDGYYVYFDYWGQGTTVTVSSTRIQNPDPAVYQLRDSKSSDKSVCLFTDFDSQTNVSQSKDSDVYITDKCVLDMRSMDFKSNSAVAWSNKSDFACANAFNNSIIPEDTFFPSPESSDSTDHVKPKETENTKQPSKSCHKPKAIVHTEKVNMMSLTVLGLRMLFAKTVAVNFLLTAKLFFL

SEQ ID NO: 15772 - protein, 862 aa, synthetic construct
MALPVTALLLPLALLLHAARPEVQLVESGGGLVQPGGSLRLSCAASGFSFSDFWMSWVRQAPGKGLEWVATISQAGSEKDYVDSVKGRFTISRDNAKKSLYLQMNSLRAEDTAVYYCASGVYSFDYRGQGTLVTVSSGTGGGGSGGGGSGGGGSEFDEIVLTQSPGSLAVSPGERVTMSCKSSQSVFFSSSQKNYLAWYQQIPGQSPRLLIYWASTRESGVPDRFTGSGSGTDFTLTISSVQPEDLAIYYCHQYLSSRTFGQGTKLEIKRLEDLKNVFPPEVAVFEPSEAEISHTQKATLVCLATGFYPDHVELSWWVNGKEVHSGVCTDPQPLKEQPALNDSRYCLSSRLRVSATFWQNPRNHFRCQVQFYGLSENDEWTQDRAKPVTQIVSAEAWGRADDVIKIHWQEKKSNTILGSQEGNTMKTNDTYMKFSWLTVPEKSLDKEHRCIVRHENNKNGVDQEIIFPPIKTDVITMDPKDNCSKDANDTLLLQLTNTSAYYMYLLLLLKSVVYFAIITCCLLRRTAFCCNGEKSRAKRSGSGATNFSLLKQAGDVEENPGPTSMDWIWRILFLVGAATGAHSFEQVQLQQPGAEVVKPGASVKMSCKASGYTFTSYYIHWIKQTPGQGLEWVGVIYPGNDDISYNQKFQGKATLTADKSSTTAYMQLSSLTSEDSAVYYCAREVRLRYFDVWGQGTTVTVSSTRIQNPDPAVYQLRDSKSSDKSVCLFTDFDSQTNVSQSKDSDVYITDKCVLDMRSMDFKSNSAVAWSNKSDFACANAFNNSIIPEDTFFPSPESSDSTDHVKPKETENTKQPSKSCHKPKAIVHTEKVNMMSLTVLGLRMLFAKTVAVNFLLTAKLFFL

SEQ ID NO: 15773 - protein, 866 aa, synthetic construct
MALPVTALLLPLALLLHAARPEVQLVESGGGLVQPGGSLRLSCAASGFSFSDFWMSWVRQAPGKGLEWVATISQAGSEKDYVDSVKGRFTISRDNAKKSLYLQMNSLRAEDTAVYYCASGVYSFDYRGQGTLVTVSSGTGGGGSGGGGSGGGGSEFDVLLTQSPLSLPVTLGQPASISCRSSQTIVHSNGNTYLEWFQQRPGQSPRLLIYQVSNRFSGVPDRFSGSGSGTDFTLKISRVEAEDVGVYYCFQGSHVPRTFGGGTKVEIKRALEDLKNVFPPEVAVFEPSEAEISHTQKATLVCLATGFYPDHVELSWWVNGKEVHSGVCTDPQPLKEQPALNDSRYCLSSRLRVSATFWQNPRNHFRCQVQFYGLSENDEWTQDRAKPVTQIVSAEAWGRADDVIKIHWQEKKSNTILGSQEGNTMKTNDTYMKFSWLTVPEKSLDKEHRCIVRHENNKNGVDQEIIFPPIKTDVITMDPKDNCSKDANDTLLLQLTNTSAYYMYLLLLLKSVVYFAIITCCLLRRTAFCCNGEKSRAKRSGSGATNFSLLKQAGDVEENPGPTSMDWIWRILFLVGAATGAHSFEQIQLVQSGSELKKPGASVKVSCKASGYTFTNYGMNWVRQAPGQGLKWMGWINTNTGEPKYAEEFKGRFALSLDTSVSTAYLQINSLKAEDTAVYFCARGYGNYARGAWLAYWGQGTLVTVSSTRIQNPDPAVYQLRDSKSSDKSVCLFTDFDSQTNVSQSKDSDVYITDKCVLDMRSMDFKSNSAVAWSNKSDFACANAFNNSIIPEDTFFPSPESSDSTDHVKPKETENTKQPSKSCHKPKAIVHTEKVNMMSLTVLGLRMLFAKTVAVNFLLTAKLFFL

SEQ ID NO: 15774 - protein, 851 aa, synthetic construct
MALPVTALLLPLALLLHAARPEVQLVESGGGLVQPGGSLRLSCAASGFSFSDFWMSWVRQAPGKGLEWVATISQAGSEKDYVDSVKGRFTISRDNAKKSLYLQMNSLRAEDTAVYYCASGVYSFDYRGQGTLVTVSSGTGGGGSGGGGSGGGGSEFDEIVLTQSPATLSLSPGERATLSCSASSSINYIYWLQQKPGQAPRILIYLTSNLASGVPARFSGSGSGTDFTLTISSLEPEDFAVYYCLQWSSNPLTFGGGTKVEIKLEDLKNVFPPEVAVFEPSEAEISHTQKATLVCLATGFYPDHVELSWWVNGKEVHSGVCTDPQPLKEQPALNDSRYCLSSRLRVSATFWQNPRNHFRCQVQFYGLSENDEWTQDRAKPVTQIVSAEAWGRADDVIKIHWQEKKSNTILGSQEGNTMKTNDTYMKFSWLTVPEKSLDKEHRCIVRHENNKNGVDQEIIFPPIKTDVITMDPKDNCSKDANDTLLLQLTNTSAYYMYLLLLLKSVVYFAIITCCLLRRTAFCCNGEKSRAKRSGSGATNFSLLKQAGDVEENPGPTSMDWIWRILFLVGAATGAHSFEEVQLVESGGGLVKPGGSLRLSCAASGFTFSSYDMSWVRQAPGKGLEWVSTISSGGSYTYYLDSIKGRFTISRDNAKNSLYLQMNSLRAEDTAVYYCARQGLDYWGRGTLVTVSSTRIQNPDPAVYQLRDSKSSDKSVCLFTDFDSQTNVSQSKDSDVYITDKCVLDMRSMDFKSNSAVAWSNKSDFACANAFNNSIIPEDTFFPSPESSDSTDHVKPKETENTKQPSKSCHKPKAIVHTEKVNMMSLTVLGLRMLFAKTVAVNFLLTAKLFFL

SEQ ID NO: 15775 - protein, 860 aa, synthetic construct
MALPVTALLLPLALLLHAARPEVQLVESGGGLVQPGGSLRLSCAASGFSFSDFWMSWVRQAPGKGLEWVATISQAGSEKDYVDSVKGRFTISRDNAKKSLYLQMNSLRAEDTAVYYCASGVYSFDYRGQGTLVTVSSGTGGGGSGGGGSGGGGSEFDIVMTQSPDSLAVSLGERATINCRASKSVSTSGYSFMHWYQQKPGQPPKLLIYLASNLESGVPDRFSGSGSGTDFTLTISSLQAEDVAVYYCQHSREVPWTFGQGTKVEIKRLEDLKNVFPPEVAVFEPSEAEISHTQKATLVCLATGFYPDHVELSWWVNGKEVHSGVCTDPQPLKEQPALNDSRYCLSSRLRVSATFWQNPRNHFRCQVQFYGLSENDEWTQDRAKPVTQIVSAEAWGRADDVIKIHWQEKKSNTILGSQEGNTMKTNDTYMKFSWLTVPEKSLDKEHRCIVRHENNKNGVDQEIIFPPIKTDVITMDPKDNCSKDANDTLLLQLTNTSAYYMYLLLLLKSVVYFAIITCCLLRRTAFCCNGEKSRAKRSGSGATNFSLLKQAGDVEENPGPTSMDWIWRILFLVGAATGAHSFEQVQLVQSGAEVKKPGASVKVSCKASGYTFTNYGMNWVRQAPGQGLEWMGWINTYTGEPTYADAFKGRFAFSLDTSTSTAYLQINSLRSDDTAVYYCARDYGDYGMDYWGQGTTVTVSSTRIQNPDPAVYQLRDSKSSDKSVCLFTDFDSQTNVSQSKDSDVYITDKCVLDMRSMDFKSNSAVAWSNKSDFACANAFNNSIIPEDTFFPSPESSDSTDHVKPKETENTKQPSKSCHKPKAIVHTEKVNMMSLTVLGLRMLFAKTVAVNFLLTAKLFFL

SEQ ID NO: 15776 - protein, 856 aa, synthetic construct
MALPVTALLLPLALLLHAARPEVQLVESGGGLVQPGGSLRLSCAASGFSFSDFWMSWVRQAPGKGLEWVATISQAGSEKDYVDSVKGRFTISRDNAKKSLYLQMNSLRAEDTAVYYCASGVYSFDYRGQGTLVTVSSGTGGGGSGGGGSGGGGSEFDIVMTQTPLTLSVTIGQPASISCKSSQSLLDSDGKTYLNWLLQRPGQSPERLIYLVSKLDSGVPDRFTGSGSGTDFTLKISRVEAEDLGVYCCWQGTHFPYTFGGGTKVEIKGLEDLKNVFPPEVAVFEPSEAEISHTQKATLVCLATGFYPDHVELSWWVNGKEVHSGVCTDPQPLKEQPALNDSRYCLSSRLRVSATFWQNPRNHFRCQVQFYGLSENDEWTQDRAKPVTQIVSAEAWGRADDVIKIHWQEKKSNTILGSQEGNTMKTNDTYMKFSWLTVPEKSLDKEHRCIVRHENNKNGVDQEIIFPPIKTDVITMDPKDNCSKDANDTLLLQLTNTSAYYMYLLLLLKSVVYFAIITCCLLRRTAFCCNGEKSRAKRSGSGATNFSLLKQAGDVEENPGPTSMDWIWRILFLVGAATGAHSFEQVQLQQPGAELVRPGASVKLSCKASGYTFTSYWMNWVKQRPGQGLEWIGMIDPSDSETHYNHIFKDKATLTVDKSSSTAYLQLSSLTSEDSAVYYCARNLYLWGQGTSVTVSSTRIQNPDPAVYQLRDSKSSDKSVCLFTDFDSQTNVSQSKDSDVYITDKCVLDMRSMDFKSNSAVAWSNKSDFACANAFNNSIIPEDTFFPSPESSDSTDHVKPKETENTKQPSKSCHKPKAIVHTEKVNMMSLTVLGLRMLFAKTVAVNFLLTAKLFFL

SEQ ID NO: 15777 - protein, 864 aa, synthetic construct
MALPVTALLLPLALLLHAARPEVQLVESGGGLVQPGGSLRLSCAASGFSFSDFWMSWVRQAPGKGLEWVATISQAGSEKDYVDSVKGRFTISRDNAKKSLYLQMNSLRAEDTAVYYCASGVYSFDYRGQGTLVTVSSGTGGGGSGGGGSGGGGSEFDIVMTQSPDSLAVSLGERATINCESSQSLLNSGNQKNYLTWYQQKPGQPPKPLIYWASTRESGVPDRFSGSGSGTDFTLTISSLQAEDVAVYYCQNDYSYPYTFGQGTKLEIKRLEDLKNVFPPEVAVFEPSEAEISHTQKATLVCLATGFYPDHVELSWWVNGKEVHSGVCTDPQPLKEQPALNDSRYCLSSRLRVSATFWQNPRNHFRCQVQFYGLSENDEWTQDRAKPVTQIVSAEAWGRADDVIKIHWQEKKSNTILGSQEGNTMKTNDTYMKFSWLTVPEKSLDKEHRCIVRHENNKNGVDQEIIFPPIKTDVITMDPKDNCSKDANDTLLLQLTNTSAYYMYLLLLLKSVVYFAIITCCLLRRTAFCCNGEKSRAKRSGSGATNFSLLKQAGDVEENPGPTSMDWIWRILFLVGAATGAHSFEEVQLVQSGAEVKKPGESLKISCKGSGYSFTDYYMKWARQMPGKGLEWMGDIIPSNGATFYNQKFKGQVTISADKSISTTYLQWSSLKASDTAMYYCARSHLLRASWFAYWGQGTMVTVSSTRIQNPDPAVYQLRDSKSSDKSVCLFTDFDSQTNVSQSKDSDVYITDKCVLDMRSMDFKSNSAVAWSNKSDFACANAFNNSIIPEDTFFPSPESSDSTDHVKPKETENTKQPSKSCHKPKAIVHTEKVNMMSLTVLGLRMLFAKTVAVNFLLTAKLFFL

SEQ ID NO: 15778 - protein, 859 aa, synthetic construct
MALPVTALLLPLALLLHAARPEVQLVESGGGLVQPGGSLRLSCAASGFSFSDFWMSWVRQAPGKGLEWVATISQAGSEKDYVDSVKGRFTISRDNAKKSLYLQMNSLRAEDTAVYYCASGVYSFDYRGQGTLVTVSSGTGGGGSGGGGSGGGGSEFDIQMTQSTSSLSASLGDRVTISCSASQGINNYLNWYQQKPDGTVELLIYYTSTLQSGVPSRFSGSGSGTDYSLTISNLEPEDIGTYYCQQYSKLPRTFGGGTKLEIKLEDLKNVFPPEVAVFEPSEAEISHTQKATLVCLATGFYPDHVELSWWVNGKEVHSGVCTDPQPLKEQPALNDSRYCLSSRLRVSATFWQNPRNHFRCQVQFYGLSENDEWTQDRAKPVTQIVSAEAWGRADDVIKIHWQEKKSNTILGSQEGNTMKTNDTYMKFSWLTVPEKSLDKEHRCIVRHENNKNGVDQEIIFPPIKTDVITMDPKDNCSKDANDTLLLQLTNTSAYYMYLLLLLKSVVYFAIITCCLLRRTAFCCNGEKSRAKRSGSGATNFSLLKQAGDVEENPGPTSMDWIWRILFLVGAATGAHSFEQVQLQQSGSELMMPGASVKISCKATGYTFSNYWIEWVKQRPGHGLEWIGEILPGTGRTIYNEKFKGKATFTADISSNTVQMQLSSLTSEDSAVYYCARRDYYGNFYYAMDYWGQGTSVTVSSTRIQNPDPAVYQLRDSKSSDKSVCLFTDFDSQTNVSQSKDSDVYITDKCVLDMRSMDFKSNSAVAWSNKSDFACANAFNNSIIPEDTFFPSPESSDSTDHVKPKETENTKQPSKSCHKPKAIVHTEKVNMMSLTVLGLRMLFAKTVAVNFLLTAKLFFL

SEQ ID NO: 15779 - protein, 854 aa, synthetic construct
MALPVTALLLPLALLLHAARPEVQLVESGGGLVQPGGSLRLSCAASGFSFSDFWMSWVRQAPGKGLEWVATISQAGSEKDYVDSVKGRFTISRDNAKKSLYLQMNSLRAEDTAVYYCASGVYSFDYRGQGTLVTVSSGTGGGGSGGGGSGGGGSEFDIQMTQSPASLSVSVGETVTITCRASENIYSNLAWYQQKQGKSPQLLVYAATNLADGVPSRFSGSGSGTQYSLKINSLQSEDFGSYYCQHFWGTWTFGGGTTLEIKLEDLKNVFPPEVAVFEPSEAEISHTQKATLVCLATGFYPDHVELSWWVNGKEVHSGVCTDPQPLKEQPALNDSRYCLSSRLRVSATFWQNPRNHFRCQVQFYGLSENDEWTQDRAKPVTQIVSAEAWGRADDVIKIHWQEKKSNTILGSQEGNTMKTNDTYMKFSWLTVPEKSLDKEHRCIVRHENNKNGVDQEIIFPPIKTDVITMDPKDNCSKDANDTLLLQLTNTSAYYMYLLLLLKSVVYFAIITCCLLRRTAFCCNGEKSRAKRSGSGATNFSLLKQAGDVEENPGPTSMDWIWRILFLVGAATGAHSFEEVQLQQSGPELVKPGASVKMSCKASGYTFTDYYMKWMKQSHGKSLEWIGDINPNNGGTTYNQKFKGKATLTVDKSSSTAYMQLNSLTSEDSAVYYCARDYGYGYFDYWGQGTTLTVSSTRIQNPDPAVYQLRDSKSSDKSVCLFTDFDSQTNVSQSKDSDVYITDKCVLDMRSMDFKSNSAVAWSNKSDFACANAFNNSIIPEDTFFPSPESSDSTDHVKPKETENTKQPSKSCHKPKAIVHTEKVNMMSLTVLGLRMLFAKTVAVNFLLTAKLFFL

SEQ ID NO: 15780 - protein, 857 aa, synthetic construct
MALPVTALLLPLALLLHAARPEVQLVESGGGLVQPGGSLRLSCAASGFSFSDFWMSWVRQAPGKGLEWVATISQAGSEKDYVDSVKGRFTISRDNAKKSLYLQMNSLRAEDTAVYYCASGVYSFDYRGQGTLVTVSSGTGGGGSGGGGSGGGGSEFEIVLTQSPGTLSLSPGERATLSCRASQSVGGYLAWYQQKPGQAPRLLIYDASNRATGIPARFSGSGSGTDFTLTISSLEPEDFAVYYCQQRNNWPPMYTFGQGTKLEIKRLEDLKNVFPPEVAVFEPSEAEISHTQKATLVCLATGFYPDHVELSWWVNGKEVHSGVCTDPQPLKEQPALNDSRYCLSSRLRVSATFWQNPRNHFRCQVQFYGLSENDEWTQDRAKPVTQIVSAEAWGRADDVIKIHWQEKKSNTILGSQEGNTMKTNDTYMKFSWLTVPEKSLDKEHRCIVRHENNKNGVDQEIIFPPIKTDVITMDPKDNCSKDANDTLLLQLTNTSAYYMYLLLLLKSVVYFAIITCCLLRRTAFCCNGEKSRAKRSGSGATNFSLLKQAGDVEENPGPTSMDWIWRILFLVGAATGAHSFEQVQLVQSGAEVKKPGSSVKVSCKASGGTFSSYAISWVRQAPGQGLEWMGGIIPILGTANYAQKFQGRVTITADESTSTAYMELSSLRSEDTAVYYCARWGGGAFDIWGQGTMVTVSSTRIQNPDPAVYQLRDSKSSDKSVCLFTDFDSQTNVSQSKDSDVYITDKCVLDMRSMDFKSNSAVAWSNKSDFACANAFNNSIIPEDTFFPSPESSDSTDHVKPKETENTKQPSKSCHKPKAIVHTEKVNMMSLTVLGLRMLFAKTVAVNFLLTAKLFFL

SEQ ID NO: 15781 - protein, 852 aa, synthetic construct
MALPVTALLLPLALLLHAARPEVQLVESGGGLVQPGGSLRLSCAASGFSFSDFWMSWVRQAPGKGLEWVATISQAGSEKDYVDSVKGRFTISRDNAKKSLYLQMNSLRAEDTAVYYCASGVYSFDYRGQGTLVTVSSGTGGGGSGGGGSGGGGSEFQIVLTQSPALMSASPGEKVTMTCSASSSVRYMYWYQQKPRSSPKPWIHLTSNLASGVPARFSGSGSGTSYSLTISSMEAEDAATYYCQQWSSHPFTFGSGTKLEIKLEDLKNVFPPEVAVFEPSEAEISHTQKATLVCLATGFYPDHVELSWWVNGKEVHSGVCTDPQPLKEQPALNDSRYCLSSRLRVSATFWQNPRNHFRCQVQFYGLSENDEWTQDRAKPVTQIVSAEAWGRADDVIKIHWQEKKSNTILGSQEGNTMKTNDTYMKFSWLTVPEKSLDKEHRCIVRHENNKNGVDQEIIFPPIKTDVITMDPKDNCSKDANDTLLLQLTNTSAYYMYLLLLLKSVVYFAIITCCLLRRTAFCCNGEKSRAKRSGSGATNFSLLKQAGDVEENPGPTSMDWIWRILFLVGAATGAHSFEDVQLQESGPGLVKPSQSLSLTCTVTGFSITSDYSWNWIRQFPGNKLEWMGYISYSGHTSYNPSLESRISITRDTSKNQFFLQLNSVTTEDTATYYCTRGNWDVVYWGQGTLVTVSATRIQNPDPAVYQLRDSKSSDKSVCLFTDFDSQTNVSQSKDSDVYITDKCVLDMRSMDFKSNSAVAWSNKSDFACANAFNNSIIPEDTFFPSPESSDSTDHVKPKETENTKQPSKSCHKPKAIVHTEKVNMMSLTVLGLRMLFAKTVAVNFLLTAKLFFL

SEQ ID NO: 15782 - protein, 862 aa, synthetic construct
MALPVTALLLPLALLLHAARPEVQLVESGGGLVQPGGSLRLSCAASGFSFSDFWMSWVRQAPGKGLEWVATISQAGSEKDYVDSVKGRFTISRDNAKKSLYLQMNSLRAEDTAVYYCASGVYSFDYRGQGTLVTVSSGTGGGGSGGGGSGGGGSEFDVVMTQSPLSLPVTLGQPASISCRSSQSIVHSDGNTYLEWYQQRPGQSPRRLIYKVSNRFSGVPDRFSGSGSGTDFTLKISRVEAEDVGVYYCFQGSHAPWTFGGGTKVEIKLEDLKNVFPPEVAVFEPSEAEISHTQKATLVCLATGFYPDHVELSWWVNGKEVHSGVCTDPQPLKEQPALNDSRYCLSSRLRVSATFWQNPRNHFRCQVQFYGLSENDEWTQDRAKPVTQIVSAEAWGRADDVIKIHWQEKKSNTILGSQEGNTMKTNDTYMKFSWLTVPEKSLDKEHRCIVRHENNKNGVDQEIIFPPIKTDVITMDPKDNCSKDANDTLLLQLTNTSAYYMYLLLLLKSVVYFAIITCCLLRRTAFCCNGEKSRAKRSGSGATNFSLLKQAGDVEENPGPTSMDWIWRILFLVGAATGAHSFEEVQLVESGGGLVQPGGSLRLSCAASGFTFSSYGMHWVRQAPGKGLEWVAYITTRSSTIYYADSVKGRFTISRDNAKNSLYLQMNSLRAEDTAVYYCTREPLTGYYAMDYWGQGTSVTVSSTRIQNPDPAVYQLRDSKSSDKSVCLFTDFDSQTNVSQSKDSDVYITDKCVLDMRSMDFKSNSAVAWSNKSDFACANAFNNSIIPEDTFFPSPESSDSTDHVKPKETENTKQPSKSCHKPKAIVHTEKVNMMSLTVLGLRMLFAKTVAVNFLLTAKLFFL

SEQ ID NO: 15783 - protein, 854 aa, synthetic construct
MALPVTALLLPLALLLHAARPEVQLVESGGGLVQPGGSLRLSCAASGFSFSDFWMSWVRQAPGKGLEWVATISQAGSEKDYVDSVKGRFTISRDNAKKSLYLQMNSLRAEDTAVYYCASGVYSFDYRGQGTLVTVSSGTGGGGSGGGGSGGGGSEFDIQMTQSPSSLSASVGDRVTITCRASQSISLWLNWYQQKPGKAPKLLIYAASTLQSGVPSRFSGSGSGTDFTLTISSLQPEDFATYYCQQYYTSPYTFGQGTKVEIKRLEDLKNVFPPEVAVFEPSEAEISHTQKATLVCLATGFYPDHVELSWWVNGKEVHSGVCTDPQPLKEQPALNDSRYCLSSRLRVSATFWQNPRNHFRCQVQFYGLSENDEWTQDRAKPVTQIVSAEAWGRADDVIKIHWQEKKSNTILGSQEGNTMKTNDTYMKFSWLTVPEKSLDKEHRCIVRHENNKNGVDQEIIFPPIKTDVITMDPKDNCSKDANDTLLLQLTNTSAYYMYLLLLLKSVVYFAIITCCLLRRTAFCCNGEKSRAKRSGSGATNFSLLKQAGDVEENPGPTSMDWIWRILFLVGAATGAHSFEQVQLLESGGGLVQPGGSLRLSCAASGFTFSSYAMSWVRQAPGKGLEWVSVIRSSGSSTYYADSVKGRFTISRDNSKNTLYLQMNSLRAEDTAVYYCARGGGYFDYWGQGTLVTVSSTRIQNPDPAVYQLRDSKSSDKSVCLFTDFDSQTNVSQSKDSDVYITDKCVLDMRSMDFKSNSAVAWSNKSDFACANAFNNSIIPEDTFFPSPESSDSTDHVKPKETENTKQPSKSCHKPKAIVHTEKVNMMSLTVLGLRMLFAKTVAVNFLLTAKLFFL

SEQ ID NO: 15784 - protein, 857 aa, synthetic construct
MALPVTALLLPLALLLHAARPEVQLVESGGGLVQPGGSLRLSCAASGFSFSDFWMSWVRQAPGKGLEWVATISQAGSEKDYVDSVKGRFTISRDNAKKSLYLQMNSLRAEDTAVYYCASGVYSFDYRGQGTLVTVSSGTGGGGSGGGGSGGGGSEFDIQMTQSPSSLSASVGDRVTITCRASQSISSYLNWYQQKPGKAPKLLIYAVSTLQSGVPSRFSGSGSGTDFTLTISSLQPEDFATYYCQQSGTFPPTTFGQGTKVEIKRLEDLKNVFPPEVAVFEPSEAEISHTQKATLVCLATGFYPDHVELSWWVNGKEVHSGVCTDPQPLKEQPALNDSRYCLSSRLRVSATFWQNPRNHFRCQVQFYGLSENDEWTQDRAKPVTQIVSAEAWGRADDVIKIHWQEKKSNTILGSQEGNTMKTNDTYMKFSWLTVPEKSLDKEHRCIVRHENNKNGVDQEIIFPPIKTDVITMDPKDNCSKDANDTLLLQLTNTSAYYMYLLLLLKSVVYFAIITCCLLRRTAFCCNGEKSRAKRSGSGATNFSLLKQAGDVEENPGPTSMDWIWRILFLVGAATGAHSFEQVQLLESGGGLVQPGGSLRLSCAASGFTFSSHGMHWVRQAPGKGLEWVSVISGSGSNTGYADSVKGRFTISRDNSKNTLYLQMNSLRAEDTAVYYCARQWGSYAFDSWGQGTLVTVSSTRIQNPDPAVYQLRDSKSSDKSVCLFTDFDSQTNVSQSKDSDVYITDKCVLDMRSMDFKSNSAVAWSNKSDFACANAFNNSIIPEDTFFPSPESSDSTDHVKPKETENTKQPSKSCHKPKAIVHTEKVNMMSLTVLGLRMLFAKTVAVNFLLTAKLFFL

SEQ ID NO: 15785 - protein, 867 aa, synthetic construct
MALPVTALLLPLALLLHAARPEVQLVESGGGLVQPGGSLRLSCAASGFSFSDFWMSWVRQAPGKGLEWVATISQAGSEKDYVDSVKGRFTISRDNAKKSLYLQMNSLRAEDTAVYYCASGVYSFDYRGQGTLVTVSSGTGGGGSGGGGSGGGGSEFDIVMSQSPSSLAVSVGEKVTMSCKSSQSLLHSSNQKNYLAWYQQKPGQSPKVLIYWASTRESGVPDRFTGSGSGTDFTLTITSVKSEDLAVYYCQQYYSYPWTFGGGTRLEIKRLEDLKNVFPPEVAVFEPSEAEISHTQKATLVCLATGFYPDHVELSWWVNGKEVHSGVCTDPQPLKEQPALNDSRYCLSSRLRVSATFWQNPRNHFRCQVQFYGLSENDEWTQDRAKPVTQIVSAEAWGRADDVIKIHWQEKKSNTILGSQEGNTMKTNDTYMKFSWLTVPEKSLDKEHRCIVRHENNKNGVDQEIIFPPIKTDVITMDPKDNCSKDANDTLLLQLTNTSAYYMYLLLLLKSVVYFAIITCCLLRRTAFCCNGEKSRAKRSGSGATNFSLLKQAGDVEENPGPTSMDWIWRILFLVGAATGAHSFEEVQLQQSVAELVKPGASVKMSCKVSGYTLTDHTIHWMKQRPEQGLEWIGYIYPRDGITGYNEKFKGKATLTADTSSSTAYMQLNSLTSEDSAVYFCARWGYSYRNYAYYYDYWGQGTTLTVSSTRIQNPDPAVYQLRDSKSSDKSVCLFTDFDSQTNVSQSKDSDVYITDKCVLDMRSMDFKSNSAVAWSNKSDFACANAFNNSIIPEDTFFPSPESSDSTDHVKPKETENTKQPSKSCHKPKAIVHTEKVNMMSLTVLGLRMLFAKTVAVNFLLTAKLFFL

SEQ ID NO: 15786 - protein, 864 aa, synthetic construct
MALPVTALLLPLALLLHAARPEVQLVESGGGLVQPGGSLRLSCAASGFSFSDFWMSWVRQAPGKGLEWVATISQAGSEKDYVDSVKGRFTISRDNAKKSLYLQMNSLRAEDTAVYYCASGVYSFDYRGQGTLVTVSSGTGGGGSGGGGSGGGGSEFEIVLTQSPGTLSLSPGERATLSCRASQSVSSSYLAWYQQKPGQAPRLLIYGTSSRATGIPDRFSGSGSGTDFTLTISRLEPEDFAVYYCQQYGSSPFTFGGGTKVEIKRLEDLKNVFPPEVAVFEPSEAEISHTQKATLVCLATGFYPDHVELSWWVNGKEVHSGVCTDPQPLKEQPALNDSRYCLSSRLRVSATFWQNPRNHFRCQVQFYGLSENDEWTQDRAKPVTQIVSAEAWGRADDVIKIHWQEKKSNTILGSQEGNTMKTNDTYMKFSWLTVPEKSLDKEHRCIVRHENNKNGVDQEIIFPPIKTDVITMDPKDNCSKDANDTLLLQLTNTSAYYMYLLLLLKSVVYFAIITCCLLRRTAFCCNGEKSRAKRSGSGATNFSLLKQAGDVEENPGPTSMDWIWRILFLVGAATGAHSFEQVQLQESGPGLAKPSETLSLTCTVSGDSITSYYWSWIRQPPGKGLEWIGYIYYSGSTNYNPSLKSRVTISVDTSKNQFSLKLSSVTAADTAVYYCARDQRRIAAAGTHFYGMDVWGQGTTVTVSSTRIQNPDPAVYQLRDSKSSDKSVCLFTDFDSQTNVSQSKDSDVYITDKCVLDMRSMDFKSNSAVAWSNKSDFACANAFNNSIIPEDTFFPSPESSDSTDHVKPKETENTKQPSKSCHKPKAIVHTEKVNMMSLTVLGLRMLFAKTVAVNFLLTAKLFFL

SEQ ID NO: 15787 - protein, 856 aa, synthetic construct
MALPVTALLLPLALLLHAARPEVQLVESGGGLVQPGGSLRLSCAASGFSFSDFWMSWVRQAPGKGLEWVATISQAGSEKDYVDSVKGRFTISRDNAKKSLYLQMNSLRAEDTAVYYCASGVYSFDYRGQGTLVTVSSGTGGGGSGGGGSGGGGSEFDILLTQSPVILSVSPGERVSFSCRASQSIGTNIHWYQQRTNGSPRLLIKYASESISGIPSRFSGSGSGTDFTLSINSVESEDIADYYCQQNNNWPTTFGAGTKLELKLEDLKNVFPPEVAVFEPSEAEISHTQKATLVCLATGFYPDHVELSWWVNGKEVHSGVCTDPQPLKEQPALNDSRYCLSSRLRVSATFWQNPRNHFRCQVQFYGLSENDEWTQDRAKPVTQIVSAEAWGRADDVIKIHWQEKKSNTILGSQEGNTMKTNDTYMKFSWLTVPEKSLDKEHRCIVRHENNKNGVDQEIIFPPIKTDVITMDPKDNCSKDANDTLLLQLTNTSAYYMYLLLLLKSVVYFAIITCCLLRRTAFCCNGEKSRAKRSGSGATNFSLLKQAGDVEENPGPTSMDWIWRILFLVGAATGAHSFEQVQLKQSGPGLVQPSQSLSITCTVSGFSLTNYGVHWVRQSPGKGLEWLGVIWSGGNTDYNTPFTSRLSINKDNSKSQVFFKMNSLQSNDTAIYYCARALTYYDYEFAYWGQGTLVTVSATRIQNPDPAVYQLRDSKSSDKSVCLFTDFDSQTNVSQSKDSDVYITDKCVLDMRSMDFKSNSAVAWSNKSDFACANAFNNSIIPEDTFFPSPESSDSTDHVKPKETENTKQPSKSCHKPKAIVHTEKVNMMSLTVLGLRMLFAKTVAVNFLLTAKLFFL

SEQ ID NO: 15788 - protein, 849 aa, synthetic construct
MALPVTALLLPLALLLHAARPEVQLVESGGGLVQPGGSLRLSCAASGFSFSDFWMSWVRQAPGKGLEWVATISQAGSEKDYVDSVKGRFTISRDNAKKSLYLQMNSLRAEDTAVYYCASGVYSFDYRGQGTLVTVSSGTGGGGSGGGGSGGGGSEFMTQSPKFLLVSAGDRVTLTCKASQSVNNDVYWYQQEPGQSPKLLIYWASTRESGVPDRFTGSGSGTDFTLTISSVQAEDLAVYYCKQSYNLYTFGGGTKLEIKRLEDLKNVFPPEVAVFEPSEAEISHTQKATLVCLATGFYPDHVELSWWVNGKEVHSGVCTDPQPLKEQPALNDSRYCLSSRLRVSATFWQNPRNHFRCQVQFYGLSENDEWTQDRAKPVTQIVSAEAWGRADDVIKIHWQEKKSNTILGSQEGNTMKTNDTYMKFSWLTVPEKSLDKEHRCIVRHENNKNGVDQEIIFPPIKTDVITMDPKDNCSKDANDTLLLQLTNTSAYYMYLLLLLKSVVYFAIITCCLLRRTAFCCNGEKSRAKRSGSGATNFSLLKQAGDVEENPGPTSMDWIWRILFLVGAATGAHSFEESGRGLVQPGGSRKLSCAASGFTFSTSGMHWVRQAPEKGLEWVAYISSGSTTIYHADTVKGRFTISRDNPKNTLFLQMTSLRSEDTAMYYCCARSGQFGNYFDYWGQGTTLTVSSTRIQNPDPAVYQLRDSKSSDKSVCLFTDFDSQTNVSQSKDSDVYITDKCVLDMRSMDFKSNSAVAWSNKSDFACANAFNNSIIPEDTFFPSPESSDSTDHVKPKETENTKQPSKSCHKPKAIVHTEKVNMMSLTVLGLRMLFAKTVAVNFLLTAKLFFL

SEQ ID NO: 15789 - protein, 854 aa, synthetic construct
MALPVTALLLPLALLLHAARPEVQLVESGGGLVQPGGSLRLSCAASGFSFSDFWMSWVRQAPGKGLEWVATISQAGSEKDYVDSVKGRFTISRDNAKKSLYLQMNSLRAEDTAVYYCASGVYSFDYRGQGTLVTVSSGTGGGGSGGGGSGGGGSEFQSPSSLAVSAGEKVTMSCKSSQSLLNSRTRKNYLAWYQQKPGQSPKLLIYWASTRESGVPDRFTGSGSGTDFTLTISSVQAEDLAVYYCKQSNLYTFGGGTKLEIKLEDLKNVFPPEVAVFEPSEAEISHTQKATLVCLATGFYPDHVELSWWVNGKEVHSGVCTDPQPLKEQPALNDSRYCLSSRLRVSATFWQNPRNHFRCQVQFYGLSENDEWTQDRAKPVTQIVSAEAWGRADDVIKIHWQEKKSNTILGSQEGNTMKTNDTYMKFSWLTVPEKSLDKEHRCIVRHENNKNGVDQEIIFPPIKTDVITMDPKDNCSKDANDTLLLQLTNTSAYYMYLLLLLKSVVYFAIITCCLLRRTAFCCNGEKSRAKRSGSGATNFSLLKQAGDVEENPGPTSMDWIWRILFLVGAATGAHSFEQVQLEESGPELVKPGASVKLSCKASGYTFTEYIIHWVKQRSGQGLEWIGWFYPGSGSIKYNEKFKDKATLTADKSSSTVYMELSGLTSEDSAVYFCARHDGYSYFDYWGQGTTLTVSSTRIQNPDPAVYQLRDSKSSDKSVCLFTDFDSQTNVSQSKDSDVYITDKCVLDMRSMDFKSNSAVAWSNKSDFACANAFNNSIIPEDTFFPSPESSDSTDHVKPKETENTKQPSKSCHKPKAIVHTEKVNMMSLTVLGLRMLFAKTVAVNFLLTAKLFFL

SEQ ID NO: 15790 - protein, 857 aa, synthetic construct
MALPVTALLLPLALLLHAARPEVQLVESGGGLVQPGGSLRLSCAASGFSFSDFWMSWVRQAPGKGLEWVATISQAGSEKDYVDSVKGRFTISRDNAKKSLYLQMNSLRAEDTAVYYCASGVYSFDYRGQGTLVTVSSGTGGGGSGGGGSGGGGSEFDIQMTQSPSSLSASLGERVSLTCRATQELSGYLSWLQQKPDGTIKRLIYAASTLDSGVPKRFSGNRSGSDYSLTISSLESEDFADYYCLQYAIYPYTFGGGTKLEIKLEDLKNVFPPEVAVFEPSEAEISHTQKATLVCLATGFYPDHVELSWWVNGKEVHSGVCTDPQPLKEQPALNDSRYCLSSRLRVSATFWQNPRNHFRCQVQFYGLSENDEWTQDRAKPVTQIVSAEAWGRADDVIKIHWQEKKSNTILGSQEGNTMKTNDTYMKFSWLTVPEKSLDKEHRCIVRHENNKNGVDQEIIFPPIKTDVITMDPKDNCSKDANDTLLLQLTNTSAYYMYLLLLLKSVVYFAIITCCLLRRTAFCCNGEKSRAKRSGSGATNFSLLKQAGDVEENPGPTSMDWIWRILFLVGAATGAHSFEEVQLQQSGPELVKPGASVKMSCKASGYTFTSYFIHWVKQKPGQGLEWIGFINPYNDGSKYNEKFKGKATLTSDKSSSTAYMELSSLTSEDSAVYYCTRDDGYYGYAMDYWGQGTSVTVSSTRIQNPDPAVYQLRDSKSSDKSVCLFTDFDSQTNVSQSKDSDVYITDKCVLDMRSMDFKSNSAVAWSNKSDFACANAFNNSIIPEDTFFPSPESSDSTDHVKPKETENTKQPSKSCHKPKAIVHTEKVNMMSLTVLGLRMLFAKTVAVNFLLTAKLFFL

SEQ ID NO: 15791 - protein, 862 aa, synthetic construct
MALPVTALLLPLALLLHAARPEVQLVESGGGLVQPGGSLRLSCAASGFSFSDFWMSWVRQAPGKGLEWVATISQAGSEKDYVDSVKGRFTISRDNAKKSLYLQMNSLRAEDTAVYYCASGVYSFDYRGQGTLVTVSSGTGGGGSGGGGSGGGGSEFDTIVLTQSPASLAVSLGQRATISCRASESVDSYGNSFMHWYQQKPGQPPKLLIYLASNLESGVPARFSGSGSRTDFTLTIDPVEADDAATYYCQQNNYDPWTFGGGTKLEIKLEDLKNVFPPEVAVFEPSEAEISHTQKATLVCLATGFYPDHVELSWWVNGKEVHSGVCTDPQPLKEQPALNDSRYCLSSRLRVSATFWQNPRNHFRCQVQFYGLSENDEWTQDRAKPVTQIVSAEAWGRADDVIKIHWQEKKSNTILGSQEGNTMKTNDTYMKFSWLTVPEKSLDKEHRCIVRHENNKNGVDQEIIFPPIKTDVITMDPKDNCSKDANDTLLLQLTNTSAYYMYLLLLLKSVVYFAIITCCLLRRTAFCCNGEKSRAKRSGSGATNFSLLKQAGDVEENPGPTSMDWIWRILFLVGAATGAHSFEEVQLQQSGPELVKPGASVKMSCKASGYTFTSYVMHWVKQKPGQGLEWIGYINPYNDGTKYNEKFKGKATLTSDTSSSTAYMELNSLTSEDSAVYFCARPIYFDNDYFDYWGQGTTLKVSSTRIQNPDPAVYQLRDSKSSDKSVCLFTDFDSQTNVSQSKDSDVYITDKCVLDMRSMDFKSNSAVAWSNKSDFACANAFNNSIIPEDTFFPSPESSDSTDHVKPKETENTKQPSKSCHKPKAIVHTEKVNMMSLTVLGLRMLFAKTVAVNFLLTAKLFFL

SEQ ID NO: 15792 - protein, 857 aa, synthetic construct
MALPVTALLLPLALLLHAARPEVQLVESGGGLVQPGGSLRLSCAASGFSFSDFWMSWVRQAPGKGLEWVATISQAGSEKDYVDSVKGRFTISRDNAKKSLYLQMNSLRAEDTAVYYCASGVYSFDYRGQGTLVTVSSGTGGGGSGGGGSGGGGSEFDIQMTQSPSSLSASVGDRVTITCKASQDVGIAVAWYQQKPGKVPKLLIYWASTRHTGVPDRFSGSGSGTDFTLTISSLQPEDVATYYCQQYSSYPYTFGQGTKVEIKRLEDLKNVFPPEVAVFEPSEAEISHTQKATLVCLATGFYPDHVELSWWVNGKEVHSGVCTDPQPLKEQPALNDSRYCLSSRLRVSATFWQNPRNHFRCQVQFYGLSENDEWTQDRAKPVTQIVSAEAWGRADDVIKIHWQEKKSNTILGSQEGNTMKTNDTYMKFSWLTVPEKSLDKEHRCIVRHENNKNGVDQEIIFPPIKTDVITMDPKDNCSKDANDTLLLQLTNTSAYYMYLLLLLKSVVYFAIITCCLLRRTAFCCNGEKSRAKRSGSGATNFSLLKQAGDVEENPGPTSMDWIWRILFLVGAATGAHSFEEVQLVESGGGLVQPGGSLRLSCAASGFDFSRYWMSWVRQAPGKGLEWIGEINPDSSTINYAPSLKDKFIISRDNAKNSLYLQMNSLRAEDTAVYYCARPDGNYWYFDVWGQGTLVTVSSTRIQNPDPAVYQLRDSKSSDKSVCLFTDFDSQTNVSQSKDSDVYITDKCVLDMRSMDFKSNSAVAWSNKSDFACANAFNNSIIPEDTFFPSPESSDSTDHVKPKETENTKQPSKSCHKPKAIVHTEKVNMMSLTVLGLRMLFAKTVAVNFLLTAKLFFL

SEQ ID NO: 15793 - protein, 857 aa, synthetic construct
MALPVTALLLPLALLLHAARPEVQLVESGGGLVQPGGSLRLSCAASGFSFSDFWMSWVRQAPGKGLEWVATISQAGSEKDYVDSVKGRFTISRDNAKKSLYLQMNSLRAEDTAVYYCASGVYSFDYRGQGTLVTVSSGTGGGGSGGGGSGGGGSEFDIVMTQSQKSMSTSVGDRVSITCKASQDVITGVAWYQQKPGQSPKLLIYSASYRYTGVPDRFTGSGSGTDFTFTISNVQAEDLAVYYCQQHYSTPLTFGAGTKLELKLEDLKNVFPPEVAVFEPSEAEISHTQKATLVCLATGFYPDHVELSWWVNGKEVHSGVCTDPQPLKEQPALNDSRYCLSSRLRVSATFWQNPRNHFRCQVQFYGLSENDEWTQDRAKPVTQIVSAEAWGRADDVIKIHWQEKKSNTILGSQEGNTMKTNDTYMKFSWLTVPEKSLDKEHRCIVRHENNKNGVDQEIIFPPIKTDVITMDPKDNCSKDANDTLLLQLTNTSAYYMYLLLLLKSVVYFAIITCCLLRRTAFCCNGEKSRAKRSGSGATNFSLLKQAGDVEENPGPTSMDWIWRILFLVGAATGAHSFEQVQLQQPGAELVRPGASVKLSCKASGYSFTTYWMNWVKQRPGQGLEWIGMIHPSDSETRLNQKFKDKATLTVDKSSSTAYMQLSSPTSEDSAVYYCARSTMIATRAMDYWGQGTSVTVSSTRIQNPDPAVYQLRDSKSSDKSVCLFTDFDSQTNVSQSKDSDVYITDKCVLDMRSMDFKSNSAVAWSNKSDFACANAFNNSIIPEDTFFPSPESSDSTDHVKPKETENTKQPSKSCHKPKAIVHTEKVNMMSLTVLGLRMLFAKTVAVNFLLTAKLFFL

SEQ ID NO: 15794 - protein, 863 aa, synthetic construct
MALPVTALLLPLALLLHAARPEVQLVESGGGLVQPGGSLRLSCAASGFSFSDFWMSWVRQAPGKGLEWVATISQAGSEKDYVDSVKGRFTISRDNAKKSLYLQMNSLRAEDTAVYYCASGVYSFDYRGQGTLVTVSSGTGGGGSGGGGSGGGGSEFQSVLTQPPSVSGAPGQRVTISCTGSGSNIGAPYDVSWYQQLPGTAPKLLIYHNNKRPSGVPDRFSGSKSGTSASLAITGLQAEDEADYYCATVEAGLSGSVFGGGTKLTVLGALEDLKNVFPPEVAVFEPSEAEISHTQKATLVCLATGFYPDHVELSWWVNGKEVHSGVCTDPQPLKEQPALNDSRYCLSSRLRVSATFWQNPRNHFRCQVQFYGLSENDEWTQDRAKPVTQIVSAEAWGRADDVIKIHWQEKKSNTILGSQEGNTMKTNDTYMKFSWLTVPEKSLDKEHRCIVRHENNKNGVDQEIIFPPIKTDVITMDPKDNCSKDANDTLLLQLTNTSAYYMYLLLLLKSVVYFAIITCCLLRRTAFCCNGEKSRAKRSGSGATNFSLLKQAGDVEENPGPTSMDWIWRILFLVGAATGAHSFEQVQLVQSGAEVKKPGASVKVSCKVSGYTLTELSIHWVRQAPGKGLEWMGGFDPEENEIVYAQRFQGRVTMTEDTSTDTAYMELSSLRSEDTAVYYCAIVGSFSPLTLGLWGQGTMVTVSSTRIQNPDPAVYQLRDSKSSDKSVCLFTDFDSQTNVSQSKDSDVYITDKCVLDMRSMDFKSNSAVAWSNKSDFACANAFNNSIIPEDTFFPSPESSDSTDHVKPKETENTKQPSKSCHKPKAIVHTEKVNMMSLTVLGLRMLFAKTVAVNFLLTAKLFFL

SEQ ID NO: 15795 - protein, 863 aa, synthetic construct
MALPVTALLLPLALLLHAARPEVQLVESGGGLVQPGGSLRLSCAASGFSFSDFWMSWVRQAPGKGLEWVATISQAGSEKDYVDSVKGRFTISRDNAKKSLYLQMNSLRAEDTAVYYCASGVYSFDYRGQGTLVTVSSGTGGGGSGGGGSGGGGSEFQSVLTQPPSVSGAPGQRVTISCTGSGSNIGAPYDVSWYQQLPGTAPKLLIYHNNKRPSGVPDRFSGSKSGTSASLAITGLQAEDEADYYCQSYDSSSISTIFGGGTKLTVLGALEDLKNVFPPEVAVFEPSEAEISHTQKATLVCLATGFYPDHVELSWWVNGKEVHSGVCTDPQPLKEQPALNDSRYCLSSRLRVSATFWQNPRNHFRCQVQFYGLSENDEWTQDRAKPVTQIVSAEAWGRADDVIKIHWQEKKSNTILGSQEGNTMKTNDTYMKFSWLTVPEKSLDKEHRCIVRHENNKNGVDQEIIFPPIKTDVITMDPKDNCSKDANDTLLLQLTNTSAYYMYLLLLLKSVVYFAIITCCLLRRTAFCCNGEKSRAKRSGSGATNFSLLKQAGDVEENPGPTSMDWIWRILFLVGAATGAHSFEQVQLVQSGAEVKKPGASVKVSCKVSGYTLTELSIHWVRQAPGKGLEWMGGFDPEENEIVYAQRFQGRVTMTEDTSTDTAYMELSSLRSEDTAVYYCAIVGSFSGIAYRPWGQGTMVTVSSTRIQNPDPAVYQLRDSKSSDKSVCLFTDFDSQTNVSQSKDSDVYITDKCVLDMRSMDFKSNSAVAWSNKSDFACANAFNNSIIPEDTFFPSPESSDSTDHVKPKETENTKQPSKSCHKPKAIVHTEKVNMMSLTVLGLRMLFAKTVAVNFLLTAKLFFL

SEQ ID NO: 15796 - protein, 851 aa, synthetic construct
MALPVTALLLPLALLLHAARPEVQLVESGGGLVQPGGSLRLSCAASGFSFSDFWMSWVRQAPGKGLEWVATISQAGSEKDYVDSVKGRFTISRDNAKKSLYLQMNSLRAEDTAVYYCASGVYSFDYRGQGTLVTVSSGTGGGGSGGGGSGGGGSEFDIQMTQSPSSLSASVGDRVTITCRASQGIRNNLAWYQQKPGKAPKRLIYAASNLQSGVPSRFTGSGSGTEFTLIVSSLQPEDFATYYCLQHHSYPLTSGGGTKVELEDLKNVFPPEVAVFEPSEAEISHTQKATLVCLATGFYPDHVELSWWVNGKEVHSGVCTDPQPLKEQPALNDSRYCLSSRLRVSATFWQNPRNHFRCQVQFYGLSENDEWTQDRAKPVTQIVSAEAWGRADDVIKIHWQEKKSNTILGSQEGNTMKTNDTYMKFSWLTVPEKSLDKEHRCIVRHENNKNGVDQEIIFPPIKTDVITMDPKDNCSKDANDTLLLQLTNTSAYYMYLLLLLKSVVYFAIITCCLLRRTAFCCNGEKSRAKRSGSGATNFSLLKQAGDVEENPGPTSMDWIWRILFLVGAATGAHSFEEVQVLESGGGLVQPGGSLRLSCAASGFTFSSYAMSWVRQAPGKGLEWVSAISGSGGSTNYADSVKGRFTISRDNSKNTLYLQMNSLRAEDTAVYYCAGSSGWSEYWGQGTLVTVSSTRIQNPDPAVYQLRDSKSSDKSVCLFTDFDSQTNVSQSKDSDVYITDKCVLDMRSMDFKSNSAVAWSNKSDFACANAFNNSIIPEDTFFPSPESSDSTDHVKPKETENTKQPSKSCHKPKAIVHTEKVNMMSLTVLGLRMLFAKTVAVNFLLTAKLFFL

SEQ ID NO: 15797 - protein, 857 aa, synthetic construct
MALPVTALLLPLALLLHAARPEVQLVESGGGLVQPGGSLRLSCAASGFSFSDFWMSWVRQAPGKGLEWVATISQAGSEKDYVDSVKGRFTISRDNAKKSLYLQMNSLRAEDTAVYYCASGVYSFDYRGQGTLVTVSSGTGGGGSGGGGSGGGGSEFDEIQLVQSGAEVKKPGESLRISCKGSGFNIEDYYIHWVRQMPGKGLEWMGRIDPENDETKYGPIFQGHVTISADTSINTVYLQWSSLKASDTAMYYCAFRGGVYWGQGTTVTVSSLEDLKNVFPPEVAVFEPSEAEISHTQKATLVCLATGFYPDHVELSWWVNGKEVHSGVCTDPQPLKEQPALNDSRYCLSSRLRVSATFWQNPRNHFRCQVQFYGLSENDEWTQDRAKPVTQIVSAEAWGRADDVIKIHWQEKKSNTILGSQEGNTMKTNDTYMKFSWLTVPEKSLDKEHRCIVRHENNKNGVDQEIIFPPIKTDVITMDPKDNCSKDANDTLLLQLTNTSAYYMYLLLLLKSVVYFAIITCCLLRRTAFCCNGEKSRAKRSGSGATNFSLLKQAGDVEENPGPTSMDWIWRILFLVGAATGAHSFEDVVMTQSPDSLAVSLGERATINCKSSQSLLDSDGKTYLNWLQQKPGQPPKRLISLVSKLDSGVPDRFSGSGSGTDFTLTISSLQAEDVAVYYCWQGTHFPGTFGGGTKVEIKTRIQNPDPAVYQLRDSKSSDKSVCLFTDFDSQTNVSQSKDSDVYITDKCVLDMRSMDFKSNSAVAWSNKSDFACANAFNNSIIPEDTFFPSPESSDSTDHVKPKETENTKQPSKSCHKPKAIVHTEKVNMMSLTVLGLRMLFAKTVAVNFLLTAKLFFL

SEQ ID NO: 15798 - protein, 864 aa, synthetic construct
MALPVTALLLPLALLLHAARPEVQLVESGGGLVQPGGSLRLSCAASGFSFSDFWMSWVRQAPGKGLEWVATISQAGSEKDYVDSVKGRFTISRDNAKKSLYLQMNSLRAEDTAVYYCASGVYSFDYRGQGTLVTVSSGTGGGGSGGGGSGGGGSEFDELVMTQSPSSLTVTAGEKVTMSCKSSQSLLNSGNQKNYLTWYQQKPGQPPKLLIYWASTRESGVPDRFTGSGSGTDFTLTISSVQAEDLAVYYCQNDYSYPLTFGAGTKLEIKLEDLKNVFPPEVAVFEPSEAEISHTQKATLVCLATGFYPDHVELSWWVNGKEVHSGVCTDPQPLKEQPALNDSRYCLSSRLRVSATFWQNPRNHFRCQVQFYGLSENDEWTQDRAKPVTQIVSAEAWGRADDVIKIHWQEKKSNTILGSQEGNTMKTNDTYMKFSWLTVPEKSLDKEHRCIVRHENNKNGVDQEIIFPPIKTDVITMDPKDNCSKDANDTLLLQLTNTSAYYMYLLLLLKSVVYFAIITCCLLRRTAFCCNGEKSRAKRSGSGATNFSLLKQAGDVEENPGPTSMDWIWRILFLVGAATGAHSFEEVQLLEQSGAELVRPGTSVKISCKASGYAFTNYWLGWVKQRPGHGLEWIGDIFPGSGNIHYNEKFKGKATLTADKSSSTAYMQLSSLTFEDSAVYFCARLRNWDEPMDYWGQGTTVTVSSTRIQNPDPAVYQLRDSKSSDKSVCLFTDFDSQTNVSQSKDSDVYITDKCVLDMRSMDFKSNSAVAWSNKSDFACANAFNNSIIPEDTFFPSPESSDSTDHVKPKETENTKQPSKSCHKPKAIVHTEKVNMMSLTVLGLRMLFAKTVAVNFLLTAKLFFL

SEQ ID NO: 15799 - protein, 865 aa, synthetic construct
MALPVTALLLPLALLLHAARPEVQLVESGGGLVQPGGSLRLSCAASGFSFSDFWMSWVRQAPGKGLEWVATISQAGSEKDYVDSVKGRFTISRDNAKKSLYLQMNSLRAEDTAVYYCASGVYSFDYRGQGTLVTVSSGTGGGGSGGGGSGGGGSEFDELQMTQSPSSLSASVGDRVTITCRASQSISSYLNWYQQKPGQPPKLLIYWASTRESGVPDRFSGSESGTNYTLTISSLQPEDFATYFCQQSDSLPITFGQGTRLDIQLEDLKNVFPPEVAVFEPSEAEISHTQKATLVCLATGFYPDHVELSWWVNGKEVHSGVCTDPQPLKEQPALNDSRYCLSSRLRVSATFWQNPRNHFRCQVQFYGLSENDEWTQDRAKPVTQIVSAEAWGRADDVIKIHWQEKKSNTILGSQEGNTMKTNDTYMKFSWLTVPEKSLDKEHRCIVRHENNKNGVDQEIIFPPIKTDVITMDPKDNCSKDANDTLLLQLTNTSAYYMYLLLLLKSVVYFAIITCCLLRRTAFCCNGEKSRAKRSGSGATNFSLLKQAGDVEENPGPTSMDWIWRILFLVGAATGAHSFEEVQLLESGGGVVQPGRSLRLSCAASGFTFSSYGMHWVRQAPGKGLEWVAVISYDGSNKYYADSVKGRFTISRDNSKNTLYLQMNSLRAEDTAVYYCAKDMGWGSGWRPYYYYGMDVWGQGTTVTVSSTRIQNPDPAVYQLRDSKSSDKSVCLFTDFDSQTNVSQSKDSDVYITDKCVLDMRSMDFKSNSAVAWSNKSDFACANAFNNSIIPEDTFFPSPESSDSTDHVKPKETENTKQPSKSCHKPKAIVHTEKVNMMSLTVLGLRMLFAKTVAVNFLLTAKLFFL

SEQ ID NO: 15800 - protein, 862 aa, synthetic construct
MALPVTALLLPLALLLHAARPEVQLVESGGGLVQPGGSLRLSCAASGFSFSDFWMSWVRQAPGKGLEWVATISQAGSEKDYVDSVKGRFTISRDNAKKSLYLQMNSLRAEDTAVYYCASGVYSFDYRGQGTLVTVSSGTGGGGSGGGGSGGGGSEFDDIQMTQSPSSLSASVGDRVTITCRASQSISSYLNWYQQKPGKAPKLLIYAASSLQSGVPSRFSGSGSGTDFTLTISSLQPEDLATYYCQQSYSTPFTFGPGTKVDIKLEDLKNVFPPEVAVFEPSEAEISHTQKATLVCLATGFYPDHVELSWWVNGKEVHSGVCTDPQPLKEQPALNDSRYCLSSRLRVSATFWQNPRNHFRCQVQFYGLSENDEWTQDRAKPVTQIVSAEAWGRADDVIKIHWQEKKSNTILGSQEGNTMKTNDTYMKFSWLTVPEKSLDKEHRCIVRHENNKNGVDQEIIFPPIKTDVITMDPKDNCSKDANDTLLLQLTNTSAYYMYLLLLLKSVVYFAIITCCLLRRTAFCCNGEKSRAKRSGSGATNFSLLKQAGDVEENPGPTSMDWIWRILFLVGAATGAHSFEVHEVQLVQSGAEVKKPGSSVKVSCKASGGTFSSYAISWVRQAPGQGLEWMGGIIPIFGTANYAQKFQGRVTITADKSTSTAYMELSSLRSEDTAVYYCATFALFGFREQAFDIWGQGTTVTVSSTRIQNPDPAVYQLRDSKSSDKSVCLFTDFDSQTNVSQSKDSDVYITDKCVLDMRSMDFKSNSAVAWSNKSDFACANAFNNSIIPEDTFFPSPESSDSTDHVKPKETENTKQPSKSCHKPKAIVHTEKVNMMSLTVLGLRMLFAKTVAVNFLLTAKLFFL

SEQ ID NO: 15801 - protein, 860 aa, synthetic construct
MALPVTALLLPLALLLHAARPEVQLVESGGGLVQPGGSLRLSCAASGFSFSDFWMSWVRQAPGKGLEWVATISQAGSEKDYVDSVKGRFTISRDNAKKSLYLQMNSLRAEDTAVYYCASGVYSFDYRGQGTLVTVSSGTGGGGSGGGGSGGGGSEFDIVLTQSPLSLAVSLGQPAIISCKASQSVSFAGTSLMHWYHQKPGQQPRLLIYRASNLEAGVPDRFSGSGSKTDFTLTISPVEAEDAATYYCQQSREYPYTFGGGTKLEIKRLEDLKNVFPPEVAVFEPSEAEISHTQKATLVCLATGFYPDHVELSWWVNGKEVHSGVCTDPQPLKEQPALNDSRYCLSSRLRVSATFWQNPRNHFRCQVQFYGLSENDEWTQDRAKPVTQIVSAEAWGRADDVIKIHWQEKKSNTILGSQEGNTMKTNDTYMKFSWLTVPEKSLDKEHRCIVRHENNKNGVDQEIIFPPIKTDVITMDPKDNCSKDANDTLLLQLTNTSAYYMYLLLLLKSVVYFAIITCCLLRRTAFCCNGEKSRAKRSGSGATNFSLLKQAGDVEENPGPTSMDWIWRILFLVGAATGAHSFEQVQLVQSGAEVVKPGASVKISCKASGYTFTGYFMNWVKQSPGQSLEWIGRIHPYDGDTFYNQKFQGKATLTVDKSSNTAHMELLSLTSEDFAVYYCTRYDGSRAMDYWGQGTTVTVSSTRIQNPDPAVYQLRDSKSSDKSVCLFTDFDSQTNVSQSKDSDVYITDKCVLDMRSMDFKSNSAVAWSNKSDFACANAFNNSIIPEDTFFPSPESSDSTDHVKPKETENTKQPSKSCHKPKAIVHTEKVNMMSLTVLGLRMLFAKTVAVNFLLTAKLFFL

SEQ ID NO: 15802 - protein, 857 aa, synthetic construct
MALPVTALLLPLALLLHAARPEVQLVESGGGLVQPGGSLRLSCAASGFSFSDFWMSWVRQAPGKGLEWVATISQAGSEKDYVDSVKGRFTISRDNAKKSLYLQMNSLRAEDTAVYYCASGVYSFDYRGQGTLVTVSSGTGGGGSGGGGSGGGGSEFDDVVMTQTPLSLPVTPGEPASISCRSSQSLVHRNGNTYLHWYLQKPGQSPKLLIHKVSNRFSGVPDRFSGSGSGTDFTLKISRVEAEDLGVYFCSQSTHVPPLTFGAGTKLELKLEDLKNVFPPEVAVFEPSEAEISHTQKATLVCLATGFYPDHVELSWWVNGKEVHSGVCTDPQPLKEQPALNDSRYCLSSRLRVSATFWQNPRNHFRCQVQFYGLSENDEWTQDRAKPVTQIVSAEAWGRADDVIKIHWQEKKSNTILGSQEGNTMKTNDTYMKFSWLTVPEKSLDKEHRCIVRHENNKNGVDQEIIFPPIKTDVITMDPKDNCSKDANDTLLLQLTNTSAYYMYLLLLLKSVVYFAIITCCLLRRTAFCCNGEKSRAKRSGSGATNFSLLKQAGDVEENPGPTSMDWIWRILFLVGAATGAHSFEEVQLVQSGAEVEKPGASVKISCKASGSSFTGYNMNWVRQNIGKSLEWIGAIDPYYGGTSYNQKFKGRATLTVDKSTSTAYMHLKSLRSEDTAVYYCVSGMEYWGQGTSVTVSSTRIQNPDPAVYQLRDSKSSDKSVCLFTDFDSQTNVSQSKDSDVYITDKCVLDMRSMDFKSNSAVAWSNKSDFACANAFNNSIIPEDTFFPSPESSDSTDHVKPKETENTKQPSKSCHKPKAIVHTEKVNMMSLTVLGLRMLFAKTVAVNFLLTAKLFFL

SEQ ID NO: 15803 - protein, 855 aa, synthetic construct
MALPVTALLLPLALLLHAARPEVQLVESGGGLVQPGGSLRLSCAASGFSFSDFWMSWVRQAPGKGLEWVATISQAGSEKDYVDSVKGRFTISRDNAKKSLYLQMNSLRAEDTAVYYCASGVYSFDYRGQGTLVTVSSGTGGGGSGGGGSGGGGSEFDEIVMTQTPATLSVSAGERVTITCKASQSVSNDVTWYQQKPGQAPRLLIYSASNRYSGVPARFSGSGYGTEFTFTISSVQSEDFAVYFCQQDYSSFGQGTKLEIKRLEDLKNVFPPEVAVFEPSEAEISHTQKATLVCLATGFYPDHVELSWWVNGKEVHSGVCTDPQPLKEQPALNDSRYCLSSRLRVSATFWQNPRNHFRCQVQFYGLSENDEWTQDRAKPVTQIVSAEAWGRADDVIKIHWQEKKSNTILGSQEGNTMKTNDTYMKFSWLTVPEKSLDKEHRCIVRHENNKNGVDQEIIFPPIKTDVITMDPKDNCSKDANDTLLLQLTNTSAYYMYLLLLLKSVVYFAIITCCLLRRTAFCCNGEKSRAKRSGSGATNFSLLKQAGDVEENPGPTSMDWIWRILFLVGAATGAHSFEQVQLVESGPGVVQPGRSLRISCAVSGFSVTNYGVHWVRQPPGKGLEWLGVIWAGGITNYNSAFMSRLTISKDNSKNTVYLQMNSLRAEDTAMYYCASRGGHYGYALDYWGQGTLVTVSSTRIQNPDPAVYQLRDSKSSDKSVCLFTDFDSQTNVSQSKDSDVYITDKCVLDMRSMDFKSNSAVAWSNKSDFACANAFNNSIIPEDTFFPSPESSDSTDHVKPKETENTKQPSKSCHKPKAIVHTEKVNMMSLTVLGLRMLFAKTVAVNFLLTAKLFFL

SEQ ID NO: 15804 - protein, 857 aa, synthetic construct
MALPVTALLLPLALLLHAARPEVQLVESGGGLVQPGGSLRLSCAASGFSFSDFWMSWVRQAPGKGLEWVATISQAGSEKDYVDSVKGRFTISRDNAKKSLYLQMNSLRAEDTAVYYCASGVYSFDYRGQGTLVTVSSGTGGGGSGGGGSGGGGSEFDIQMTQTASSLPASLGDRVTISCSASQDISNYLNWYQQKPDGTVKLLIFYSSNLHSGVPSRFSGGGSGTDYSLTISNLEPEDIATYFCHQYSKLPWTFGGGTKLEIKRLEDLKNVFPPEVAVFEPSEAEISHTQKATLVCLATGFYPDHVELSWWVNGKEVHSGVCTDPQPLKEQPALNDSRYCLSSRLRVSATFWQNPRNHFRCQVQFYGLSENDEWTQDRAKPVTQIVSAEAWGRADDVIKIHWQEKKSNTILGSQEGNTMKTNDTYMKFSWLTVPEKSLDKEHRCIVRHENNKNGVDQEIIFPPIKTDVITMDPKDNCSKDANDTLLLQLTNTSAYYMYLLLLLKSVVYFAIITCCLLRRTAFCCNGEKSRAKRSGSGATNFSLLKQAGDVEENPGPTSMDWIWRILFLVGAATGAHSFEEVTLVESGGDFVKPGGSLKVSCAASGFAFSHYAMSWVRQTPAKRLEWVAYISSGGSGTYYSDSVKGRFTISRDNAKNTLYLQMRSLRSEDSAMYFCTRVKLGTYYFDSWGQGTTLTVSSTRIQNPDPAVYQLRDSKSSDKSVCLFTDFDSQTNVSQSKDSDVYITDKCVLDMRSMDFKSNSAVAWSNKSDFACANAFNNSIIPEDTFFPSPESSDSTDHVKPKETENTKQPSKSCHKPKAIVHTEKVNMMSLTVLGLRMLFAKTVAVNFLLTAKLFFL

SEQ ID NO: 15805 - protein, 859 aa, synthetic construct
MALPVTALLLPLALLLHAARPEVQLVESGGGLVQPGGSLRLSCAASGFSFSDFWMSWVRQAPGKGLEWVATISQAGSEKDYVDSVKGRFTISRDNAKKSLYLQMNSLRAEDTAVYYCASGVYSFDYRGQGTLVTVSSGTGGGGSGGGGSGGGGSEFQFVLTQSPSASAALGASAKLTCTLSSAHKTYTIDWYQQQKGKAPRYLIQVKSDGTYTKATGVPDRFSGSSSGADRYLIIPSVQADDEADYYCGTDYTGGYVFGGGTQLTVTLEDLKNVFPPEVAVFEPSEAEISHTQKATLVCLATGFYPDHVELSWWVNGKEVHSGVCTDPQPLKEQPALNDSRYCLSSRLRVSATFWQNPRNHFRCQVQFYGLSENDEWTQDRAKPVTQIVSAEAWGRADDVIKIHWQEKKSNTILGSQEGNTMKTNDTYMKFSWLTVPEKSLDKEHRCIVRHENNKNGVDQEIIFPPIKTDVITMDPKDNCSKDANDTLLLQLTNTSAYYMYLLLLLKSVVYFAIITCCLLRRTAFCCNGEKSRAKRSGSGATNFSLLKQAGDVEENPGPTSMDWIWRILFLVGAATGAHSFEEQLKESGGGLFKPTDTLTLTCTVSGFSLSYYGVNWVRQAPGNGLEWIGTIGGSGDTYYASWAKSRSTIIRNTNENTVTLKMTSLTAADTATYFCVRYANIGYEYFNVWGPGTLVTVSSTRIQNPDPAVYQLRDSKSSDKSVCLFTDFDSQTNVSQSKDSDVYITDKCVLDMRSMDFKSNSAVAWSNKSDFACANAFNNSIIPEDTFFPSPESSDSTDHVKPKETENTKQPSKSCHKPKAIVHTEKVNMMSLTVLGLRMLFAKTVAVNFLLTAKLFFL

SEQ ID NO: 15806 - protein, 864 aa, synthetic construct
MALPVTALLLPLALLLHAARPEVQLVESGGGLVQPGGSLRLSCAASGFSFSDFWMSWVRQAPGKGLEWVATISQAGSEKDYVDSVKGRFTISRDNAKKSLYLQMNSLRAEDTAVYYCASGVYSFDYRGQGTLVTVSSGTGGGGSGGGGSGGGGSEFQFVLTQSPSVSAALGASAKLTCTLSSAHKTYTIDWYQQQQGEAPRYLMQVKSDGSYTKGTGVPDRFSGSSSGADRYLIIPSVQADDEAGYVCGADDNGGYVFGGGTQLTVTLEDLKNVFPPEVAVFEPSEAEISHTQKATLVCLATGFYPDHVELSWWVNGKEVHSGVCTDPQPLKEQPALNDSRYCLSSRLRVSATFWQNPRNHFRCQVQFYGLSENDEWTQDRAKPVTQIVSAEAWGRADDVIKIHWQEKKSNTILGSQEGNTMKTNDTYMKFSWLTVPEKSLDKEHRCIVRHENNKNGVDQEIIFPPIKTDVITMDPKDNCSKDANDTLLLQLTNTSAYYMYLLLLLKSVVYFAIITCCLLRRTAFCCNGEKSRAKRSGSGATNFSLLKQAGDVEENPGPTSMDWIWRILFLVGAATGAHSFEQSVKESEGGLFKPTDTLTLTCTVSGFSLSRHALTWVRQAPGNGLEWIGAIDNAGTTYYASWAKSRSTITRNTDLHTVTLKMTSLTASDTATYFCARVFYDINSGYYLDGMDLWGPGTLVTVSSTRIQNPDPAVYQLRDSKSSDKSVCLFTDFDSQTNVSQSKDSDVYITDKCVLDMRSMDFKSNSAVAWSNKSDFACANAFNNSIIPEDTFFPSPESSDSTDHVKPKETENTKQPSKSCHKPKAIVHTEKVNMMSLTVLGLRMLFAKTVAVNFLLTAKLFFL

SEQ ID NO: 15807 - protein, 858 aa, synthetic construct
MALPVTALLLPLALLLHAARPEVQLVESGGGLVQPGGSLRLSCAASGFSFSDFWMSWVRQAPGKGLEWVATISQAGSEKDYVDSVKGRFTISRDNAKKSLYLQMNSLRAEDTAVYYCASGVYSFDYRGQGTLVTVSSGTGGGGSGGGGSGGGGSEFDIQMTQSPSSLSASVGDRVTITCRASQGISSWLAWYQQKPEKAPKSLIYAASSLQSGVPSRFSGSGSGTDFTLTISSLQPEDFATYYCQQYNSYPPTFGGGTKVEIKLEDLKNVFPPEVAVFEPSEAEISHTQKATLVCLATGFYPDHVELSWWVNGKEVHSGVCTDPQPLKEQPALNDSRYCLSSRLRVSATFWQNPRNHFRCQVQFYGLSENDEWTQDRAKPVTQIVSAEAWGRADDVIKIHWQEKKSNTILGSQEGNTMKTNDTYMKFSWLTVPEKSLDKEHRCIVRHENNKNGVDQEIIFPPIKTDVITMDPKDNCSKDANDTLLLQLTNTSAYYMYLLLLLKSVVYFAIITCCLLRRTAFCCNGEKSRAKRSGSGATNFSLLKQAGDVEENPGPTSMDWIWRILFLVGAATGAHSFEEVQLVESGGGLVQPGESLRLSCVASGFTFSRYKMNWVRQAPGKGLEWVSYISRSGRDIYYADSVKGRFTISRDNAKNSLYLQMNSLRDEDTAVYYCAGTVTTYYYFGMDVWGHGTTVTVSSTRIQNPDPAVYQLRDSKSSDKSVCLFTDFDSQTNVSQSKDSDVYITDKCVLDMRSMDFKSNSAVAWSNKSDFACANAFNNSIIPEDTFFPSPESSDSTDHVKPKETENTKQPSKSCHKPKAIVHTEKVNMMSLTVLGLRMLFAKTVAVNFLLTAKLFFL

SEQ ID NO: 15808 - protein, 859 aa, synthetic construct
MALPVTALLLPLALLLHAARPEVQLVESGGGLVQPGGSLRLSCAASGFSFSDFWMSWVRQAPGKGLEWVATISQAGSEKDYVDSVKGRFTISRDNAKKSLYLQMNSLRAEDTAVYYCASGVYSFDYRGQGTLVTVSSGTGGGGSGGGGSGGGGSEFDIQMTQSPSSLSASVGDRVTITCRASQGISSWLAWYQQKPEKAPKSLIYAASSLQSGVPSRFSGSGSGTDFTLTISSLQPEDFATYYCQQYNSYPPTFGGGTKVEIKLEDLKNVFPPEVAVFEPSEAEISHTQKATLVCLATGFYPDHVELSWWVNGKEVHSGVCTDPQPLKEQPALNDSRYCLSSRLRVSATFWQNPRNHFRCQVQFYGLSENDEWTQDRAKPVTQIVSAEAWGRADDVIKIHWQEKKSNTILGSQEGNTMKTNDTYMKFSWLTVPEKSLDKEHRCIVRHENNKNGVDQEIIFPPIKTDVITMDPKDNCSKDANDTLLLQLTNTSAYYMYLLLLLKSVVYFAIITCCLLRRTAFCCNGEKSRAKRSGSGATNFSLLKQAGDVEENPGPTSMDWIWRILFLVGAATGAHSFEEVQLVESGGGSVQPGESLRLSCVASGFTFSRYKMNWVRQAPGKGLEWVSYISRSGRDIYYADSVKGRFTISRDNAKNSLYLQMNSLRDEDTAVYYCAGTVTTYYYDFGMDVWGQGTTVTVSSTRIQNPDPAVYQLRDSKSSDKSVCLFTDFDSQTNVSQSKDSDVYITDKCVLDMRSMDFKSNSAVAWSNKSDFACANAFNNSIIPEDTFFPSPESSDSTDHVKPKETENTKQPSKSCHKPKAIVHTEKVNMMSLTVLGLRMLFAKTVAVNFLLTAKLFFL

SEQ ID NO: 15809 - protein, 857 aa, synthetic construct
MALPVTALLLPLALLLHAARPEVQLVESGGGLVQPGGSLRLSCAASGFSFSDFWMSWVRQAPGKGLEWVATISQAGSEKDYVDSVKGRFTISRDNAKKSLYLQMNSLRAEDTAVYYCASGVYSFDYRGQGTLVTVSSGTGGGGSGGGGSGGGGSEFQSVLTQPPSASGTPGQRVTISCSGSRSNVGGNYVFWYQQVPGATPKLLIYRSNQRPSGVPDRFAGSKSGSSASLAISGLRSEDEADYYCATWDDSLSGFVFGTGTKVTVLGLEDLKNVFPPEVAVFEPSEAEISHTQKATLVCLATGFYPDHVELSWWVNGKEVHSGVCTDPQPLKEQPALNDSRYCLSSRLRVSATFWQNPRNHFRCQVQFYGLSENDEWTQDRAKPVTQIVSAEAWGRADDVIKIHWQEKKSNTILGSQEGNTMKTNDTYMKFSWLTVPEKSLDKEHRCIVRHENNKNGVDQEIIFPPIKTDVITMDPKDNCSKDANDTLLLQLTNTSAYYMYLLLLLKSVVYFAIITCCLLRRTAFCCNGEKSRAKRSGSGATNFSLLKQAGDVEENPGPTSMDWIWRILFLVGAATGAHSFEVQLVESGGGLVKPGGSLRLSCAASGFTFSDYYMSWIRQAPGKGLEWVSYISSSGSTIYYADSVKGRFTISRDNAKNSLYLQMNSLRAEDTAVYYCARGYGKAYDQWGQGTLVTVSSTRIQNPDPAVYQLRDSKSSDKSVCLFTDFDSQTNVSQSKDSDVYITDKCVLDMRSMDFKSNSAVAWSNKSDFACANAFNNSIIPEDTFFPSPESSDSTDHVKPKETENTKQPSKSCHKPKAIVHTEKVNMMSLTVLGLRMLFAKTVAVNFLLTAKLFFL

SEQ ID NO: 15810 - protein, 856 aa, synthetic construct
MALPVTALLLPLALLLHAARPEVQLVESGGGLVQPGGSLRLSCAASGFSFSDFWMSWVRQAPGKGLEWVATISQAGSEKDYVDSVKGRFTISRDNAKKSLYLQMNSLRAEDTAVYYCASGVYSFDYRGQGTLVTVSSGTGGGGSGGGGSGGGGSEFQSVVTQPPSMSAAPGQQVTISCSGGNSNIERNYVSWYLQLPGTAPKLVIFDNDRRPSGIPDRFSGSKSGTSATLGITGLQTGDEADYYCGTWDSSLRGWVFGGGTKLTVLGLEDLKNVFPPEVAVFEPSEAEISHTQKATLVCLATGFYPDHVELSWWVNGKEVHSGVCTDPQPLKEQPALNDSRYCLSSRLRVSATFWQNPRNHFRCQVQFYGLSENDEWTQDRAKPVTQIVSAEAWGRADDVIKIHWQEKKSNTILGSQEGNTMKTNDTYMKFSWLTVPEKSLDKEHRCIVRHENNKNGVDQEIIFPPIKTDVITMDPKDNCSKDANDTLLLQLTNTSAYYMYLLLLLKSVVYFAIITCCLLRRTAFCCNGEKSRAKRSGSGATNFSLLKQAGDVEENPGPTSMDWIWRILFLVGAATGAHSFEVQLVESGGGLIQPGGSLRLSCAASGFTFSNYAMNWVRQAPGKGLEWVSTINGRGSSTIYADSVKGRFTISRDNSKNTLYLQMNSLRAEDTATYYCARYISRGLGDSWGQGTLVTVTRIQNPDPAVYQLRDSKSSDKSVCLFTDFDSQTNVSQSKDSDVYITDKCVLDMRSMDFKSNSAVAWSNKSDFACANAFNNSIIPEDTFFPSPESSDSTDHVKPKETENTKQPSKSCHKPKAIVHTEKVNMMSLTVLGLRMLFAKTVAVNFLLTAKLFFL

SEQ ID NO: 15811 - protein, 857 aa, synthetic construct
MALPVTALLLPLALLLHAARPEVQLVESGGGLVQPGGSLRLSCAASGFSFSDFWMSWVRQAPGKGLEWVATISQAGSEKDYVDSVKGRFTISRDNAKKSLYLQMNSLRAEDTAVYYCASGVYSFDYRGQGTLVTVSSGTGGGGSGGGGSGGGGSEFDVVMTQTPLSLPVSLGDQASISCRSSQSLVHSNGNTYLHWYLQKPGQSPKLLIYKVSNRFSGVPDRFSGSGSGTDFTLKISRVEAEDLGVYFCSQNTPVPPKFGSGTKLEIKLEDLKNVFPPEVAVFEPSEAEISHTQKATLVCLATGFYPDHVELSWWVNGKEVHSGVCTDPQPLKEQPALNDSRYCLSSRLRVSATFWQNPRNHFRCQVQFYGLSENDEWTQDRAKPVTQIVSAEAWGRADDVIKIHWQEKKSNTILGSQEGNTMKTNDTYMKFSWLTVPEKSLDKEHRCIVRHENNKNGVDQEIIFPPIKTDVITMDPKDNCSKDANDTLLLQLTNTSAYYMYLLLLLKSVVYFAIITCCLLRRTAFCCNGEKSRAKRSGSGATNFSLLKQAGDVEENPGPTSMDWIWRILFLVGAATGAHSFEQVQLQQSGAELVRPGASVKLSCKASGYTFNDYEMHWVKQTPVHGLKWIGALEPKTGDTAYSQKFKGKATLTADKSSSTAYMELRSLTSEDSAVYYCTSCYYYTYSGQGTLVTVSATRIQNPDPAVYQLRDSKSSDKSVCLFTDFDSQTNVSQSKDSDVYITDKCVLDMRSMDFKSNSAVAWSNKSDFACANAFNNSIIPEDTFFPSPESSDSTDHVKPKETENTKQPSKSCHKPKAIVHTEKVNMMSLTVLGLRMLFAKTVAVNFLLTAKLFFL

SEQ ID NO: 15812 - protein, 856 aa, synthetic construct
MALPVTALLLPLALLLHAARPEVQLVESGGGLVQPGGSLRLSCAASGFSFSDFWMSWVRQAPGKGLEWVATISQAGSEKDYVDSVKGRFTISRDNAKKSLYLQMNSLRAEDTAVYYCASGVYSFDYRGQGTLVTVSSGTGGGGSGGGGSGGGGSEFDIQLTQSPSSLSASVGDRVTITCRASQGIRNDLGWYQQKPGKAPKRLIYAASSLQNGVPSRFSGSGSGTEFTLTISSLQPEDFATYYCLQHNTYPAFGQGTKVEIKRLEDLKNVFPPEVAVFEPSEAEISHTQKATLVCLATGFYPDHVELSWWVNGKEVHSGVCTDPQPLKEQPALNDSRYCLSSRLRVSATFWQNPRNHFRCQVQFYGLSENDEWTQDRAKPVTQIVSAEAWGRADDVIKIHWQEKKSNTILGSQEGNTMKTNDTYMKFSWLTVPEKSLDKEHRCIVRHENNKNGVDQEIIFPPIKTDVITMDPKDNCSKDANDTLLLQLTNTSAYYMYLLLLLKSVVYFAIITCCLLRRTAFCCNGEKSRAKRSGSGATNFSLLKQAGDVEENPGPTSMDWIWRILFLVGAATGAHSFEQVQLQESGPGLVKPSQTLSLTCTVSGGSISSFNYYWSWIRHHPGKGLEWIGYIYYSGSTYSNPSLKSRVTISVDTSKNQFSLTLSSVTAADTAVYYCARGYNWNYFDYWGQGTLVTVSSTRIQNPDPAVYQLRDSKSSDKSVCLFTDFDSQTNVSQSKDSDVYITDKCVLDMRSMDFKSNSAVAWSNKSDFACANAFNNSIIPEDTFFPSPESSDSTDHVKPKETENTKQPSKSCHKPKAIVHTEKVNMMSLTVLGLRMLFAKTVAVNFLLTAKLFFL

SEQ ID NO: 15813 - protein, 858 aa, synthetic construct
MALPVTALLLPLALLLHAARPEVQLVESGGGLVQPGGSLRLSCAASGFSFSDFWMSWVRQAPGKGLEWVATISQAGSEKDYVDSVKGRFTISRDNAKKSLYLQMNSLRAEDTAVYYCASGVYSFDYRGQGTLVTVSSGTGGGGSGGGGSGGGGSEFDDIVLTQSPASLAVSLGQSVTISCRASESVEYYGTSLMQWYQQKPGQPPKLLIYATSNVESGVPARFSGSGSGTDFSLNIHPVEEDDIAMYFCQQSRKLPSTFGGGTKLEIKLEDLKNVFPPEVAVFEPSEAEISHTQKATLVCLATGFYPDHVELSWWVNGKEVHSGVCTDPQPLKEQPALNDSRYCLSSRLRVSATFWQNPRNHFRCQVQFYGLSENDEWTQDRAKPVTQIVSAEAWGRADDVIKIHWQEKKSNTILGSQEGNTMKTNDTYMKFSWLTVPEKSLDKEHRCIVRHENNKNGVDQEIIFPPIKTDVITMDPKDNCSKDANDTLLLQLTNTSAYYMYLLLLLKSVVYFAIITCCLLRRTAFCCNGEKSRAKRSGSGATNFSLLKQAGDVEENPGPTSMDWIWRILFLVGAATGAHSFEDVRLQESGPGQVKPSQTVSLTCSVTGYSITNGNHWWNWIRQVSGSKLEWIGYISSSGSTDSNPSLKSRISITRDTSKNQLFLQLNSVTTEDIATYYCARGYYFDYWGQGTTLTVSSTRIQNPDPAVYQLRDSKSSDKSVCLFTDFDSQTNVSQSKDSDVYITDKCVLDMRSMDFKSNSAVAWSNKSDFACANAFNNSIIPEDTFFPSPESSDSTDHVKPKETENTKQPSKSCHKPKAIVHTEKVNMMSLTVLGLRMLFAKTVAVNFLLTAKLFFL

SEQ ID NO: 15814 - protein, 857 aa, synthetic construct
MALPVTALLLPLALLLHAARPEVQLVESGGGLVQPGGSLRLSCAASGFSFSDFWMSWVRQAPGKGLEWVATISQAGSEKDYVDSVKGRFTISRDNAKKSLYLQMNSLRAEDTAVYYCASGVYSFDYRGQGTLVTVSSGTGGGGSGGGGSGGGGSEFDIQMTQSPSSLSASVGDRVTITCRASQDVNTAVAWYQQKPGKAPKLLIYSASFLESGVPSRFSGSRSGTDFTLTISSLQPEDFATYYCQQHYTTPPTFGQTKVEIKRLEDLKNVFPPEVAVFEPSEAEISHTQKATLVCLATGFYPDHVELSWWVNGKEVHSGVCTDPQPLKEQPALNDSRYCLSSRLRVSATFWQNPRNHFRCQVQFYGLSENDEWTQDRAKPVTQIVSAEAWGRADDVIKIHWQEKKSNTILGSQEGNTMKTNDTYMKFSWLTVPEKSLDKEHRCIVRHENNKNGVDQEIIFPPIKTDVITMDPKDNCSKDANDTLLLQLTNTSAYYMYLLLLLKSVVYFAIITCCLLRRTAFCCNGEKSRAKRSGSGATNFSLLKQAGDVEENPGPTSMDWIWRILFLVGAATGAHSFEEVQLVESGGGLVQPGGSLRLSCAASGFNIKDTYIHWVRQAPGKGLEWVARIYPTNGYTRYADSVKGRFTISADTSKNTAYLQMNSLRAEDTAVYYCSRWGGDGFYAMDVWGQGTLVTVSSTRIQNPDPAVYQLRDSKSSDKSVCLFTDFDSQTNVSQSKDSDVYITDKCVLDMRSMDFKSNSAVAWSNKSDFACANAFNNSIIPEDTFFPSPESSDSTDHVKPKETENTKQPSKSCHKPKAIVHTEKVNMMSLTVLGLRMLFAKTVAVNFLLTAKLFFL

SEQ ID NO: 15815 - protein, 856 aa, synthetic construct
MALPVTALLLPLALLLHAARPEVQLVESGGGLVQPGGSLRLSCAASGFSFSDFWMSWVRQAPGKGLEWVATISQAGSEKDYVDSVKGRFTISRDNAKKSLYLQMNSLRAEDTAVYYCASGVYSFDYRGQGTLVTVSSGTGGGGSGGGGSGGGGSEFDQSVLTQPPSVSVAPGKTARIPCEGNYIGSSNVHWYQQKPGQAPVLVIHFDSDRPSGIPDRFSGSNSGNMATLTISRVEAGDEADYYCQVWENHGWVFGGGTKLTVLSLEDLKNVFPPEVAVFEPSEAEISHTQKATLVCLATGFYPDHVELSWWVNGKEVHSGVCTDPQPLKEQPALNDSRYCLSSRLRVSATFWQNPRNHFRCQVQFYGLSENDEWTQDRAKPVTQIVSAEAWGRADDVIKIHWQEKKSNTILGSQEGNTMKTNDTYMKFSWLTVPEKSLDKEHRCIVRHENNKNGVDQEIIFPPIKTDVITMDPKDNCSKDANDTLLLQLTNTSAYYMYLLLLLKSVVYFAIITCCLLRRTAFCCNGEKSRAKRSGSGATNFSLLKQAGDVEENPGPTSMDWIWRILFLVGAATGAHSFEEVQLVETGGGLVQPGESLRLSCAASGFTFSDYEMNWVRQAPGKGLEWVSYISSSGSTIYYADSVKGRFTIYRDNAKNSLYLQMNSLRAEDTALYYCARAWGVGPPDYWGQGTLVTVSSTRIQNPDPAVYQLRDSKSSDKSVCLFTDFDSQTNVSQSKDSDVYITDKCVLDMRSMDFKSNSAVAWSNKSDFACANAFNNSIIPEDTFFPSPESSDSTDHVKPKETENTKQPSKSCHKPKAIVHTEKVNMMSLTVLGLRMLFAKTVAVNFLLTAKLFFL

SEQ ID NO: 15816 - protein, 864 aa, synthetic construct
MALPVTALLLPLALLLHAARPEVQLVESGGGLVQPGGSLRLSCAASGFSFSDFWMSWVRQAPGKGLEWVATISQAGSEKDYVDSVKGRFTISRDNAKKSLYLQMNSLRAEDTAVYYCASGVYSFDYRGQGTLVTVSSGTGGGGSGGGGSGGGGSEFDIQMTQSPSSLSASVGDTVTITCQANGYLNWYQQRRGKAPKLLIYDGSKLERGVPSRFSGRRWGQEYNLTINNLQPEDIATYFCQVYEFVVPGTRLDLKRTVAAPLEDLKNVFPPEVAVFEPSEAEISHTQKATLVCLATGFYPDHVELSWWVNGKEVHSGVCTDPQPLKEQPALNDSRYCLSSRLRVSATFWQNPRNHFRCQVQFYGLSENDEWTQDRAKPVTQIVSAEAWGRADDVIKIHWQEKKSNTILGSQEGNTMKTNDTYMKFSWLTVPEKSLDKEHRCIVRHENNKNGVDQEIIFPPIKTDVITMDPKDNCSKDANDTLLLQLTNTSAYYMYLLLLLKSVVYFAIITCCLLRRTAFCCNGEKSRAKRSGSGATNFSLLKQAGDVEENPGPTSMDWIWRILFLVGAATGAHSFEQVQLLQSGAAVTKPGASVRVSCEASGYNIRDYFIHWWRQAPGQGLQWVGWINPKTGQPNNPRQFQGRVSLTRHASWDFDTFSFYMDLKALRSDDTAVYFCARQRSDYWDFDVWGSGTQVTVSSASTKGPTRIQNPDPAVYQLRDSKSSDKSVCLFTDFDSQTNVSQSKDSDVYITDKCVLDMRSMDFKSNSAVAWSNKSDFACANAFNNSIIPEDTFFPSPESSDSTDHVKPKETENTKQPSKSCHKPKAIVHTEKVNMMSLTVLGLRMLFAKTVAVNFLLTAKLFFL

SEQ ID NO: 15817 - protein, 870 aa, synthetic construct
MALPVTALLLPLALLLHAARPEVQLVESGGGLVQPGGSLRLSCAASGFSFSDFWMSWVRQAPGKGLEWVATISQAGSEKDYVDSVKGRFTISRDNAKKSLYLQMNSLRAEDTAVYYCASGVYSFDYRGQGTLVTVSSGTGGGGSGGGGSGGGGSEFQSALTQPPSASGSPGQSITISCTGTSNNFVSWYQQHAGKAPKLVIYDVNKRPSGVPDRFSGSKSGNTASLTVSGLQTDDEAVYYCGSLVGNWDVIFGGGTKLTVLLEDLKNVFPPEVAVFEPSEAEISHTQKATLVCLATGFYPDHVELSWWVNGKEVHSGVCTDPQPLKEQPALNDSRYCLSSRLRVSATFWQNPRNHFRCQVQFYGLSENDEWTQDRAKPVTQIVSAEAWGRADDVIKIHWQEKKSNTILGSQEGNTMKTNDTYMKFSWLTVPEKSLDKEHRCIVRHENNKNGVDQEIIFPPIKTDVITMDPKDNCSKDANDTLLLQLTNTSAYYMYLLLLLKSVVYFAIITCCLLRRTAFCCNGEKSRAKRSGSGATNFSLLKQAGDVEENPGPTSMDWIWRILFLVGAATGAHSFEQPQLQESGPTLVEASETLSLTCAVSGDSTAACNSFWGWVRQPPGKGLEWVGSLSHCASYWNRGWTYHNPSLKSRLTLALDTPKNLVFLKLNSVTAADTATYYCARFGGEVLRYTDWPKPAWVDLWGRGTLVTVSSTRIQNPDPAVYQLRDSKSSDKSVCLFTDFDSQTNVSQSKDSDVYITDKCVLDMRSMDFKSNSAVAWSNKSDFACANAFNNSIIPEDTFFPSPESSDSTDHVKPKETENTKQPSKSCHKPKAIVHTEKVNMMSLTVLGLRMLFAKTVAVNFLLTAKLFFL

SEQ ID NO: 15818 - protein, 855 aa, synthetic construct
MALPVTALLLPLALLLHAARPEVQLVESGGGLVQPGGSLRLSCAASGFSFSDFWMSWVRQAPGKGLEWVATISQAGSEKDYVDSVKGRFTISRDNAKKSLYLQMNSLRAEDTAVYYCASGVYSFDYRGQGTLVTVSSGTGGGGSGGGGSGGGGSEFEIVLTQSPGTLSLSPGETAIISCRTSQYGSLAWYQQRPGQAPRLVIYSGSTRAAGIPDRFSGSRWGPDYNLTISNLESGDFGVYYCQQYEFFGQGTKVQVDIKRLEDLKNVFPPEVAVFEPSEAEISHTQKATLVCLATGFYPDHVELSWWVNGKEVHSGVCTDPQPLKEQPALNDSRYCLSSRLRVSATFWQNPRNHFRCQVQFYGLSENDEWTQDRAKPVTQIVSAEAWGRADDVIKIHWQEKKSNTILGSQEGNTMKTNDTYMKFSWLTVPEKSLDKEHRCIVRHENNKNGVDQEIIFPPIKTDVITMDPKDNCSKDANDTLLLQLTNTSAYYMYLLLLLKSVVYFAIITCCLLRRTAFCCNGEKSRAKRSGSGATNFSLLKQAGDVEENPGPTSMDWIWRILFLVGAATGAHSFEQVQLVQSGGQMKKPGESMRISCRASGYEFIDCTLNWIRLAPGKRPEWMGWLKPRGGAVNYARPLQGRVTMTRDVYSDTAFLELRSLTVDDTAVYFCTRGKNCDYNWDFEHWGRGTPVIVSSTRIQNPDPAVYQLRDSKSSDKSVCLFTDFDSQTNVSQSKDSDVYITDKCVLDMRSMDFKSNSAVAWSNKSDFACANAFNNSIIPEDTFFPSPESSDSTDHVKPKETENTKQPSKSCHKPKAIVHTEKVNMMSLTVLGLRMLFAKTVAVNFLLTAKLFFL

SEQ ID NO: 15819 - protein, 865 aa, synthetic construct
MALPVTALLLPLALLLHAARPEVQLVESGGGLVQPGGSLRLSCAASGFSFSDFWMSWVRQAPGKGLEWVATISQAGSEKDYVDSVKGRFTISRDNAKKSLYLQMNSLRAEDTAVYYCASGVYSFDYRGQGTLVTVSSGTGGGGSGGGGSGGGGSEFELVLTQSPGTLSLSAGERATLSCRASQSVSSGSLAWYQQKPGQAPRLLIYGASTRATGIPDRFSGSGSGTDFTLTIGRLEPEDLAVYYCQQYGTSPYTFGQGTKLEILEDLKNVFPPEVAVFEPSEAEISHTQKATLVCLATGFYPDHVELSWWVNGKEVHSGVCTDPQPLKEQPALNDSRYCLSSRLRVSATFWQNPRNHFRCQVQFYGLSENDEWTQDRAKPVTQIVSAEAWGRADDVIKIHWQEKKSNTILGSQEGNTMKTNDTYMKFSWLTVPEKSLDKEHRCIVRHENNKNGVDQEIIFPPIKTDVITMDPKDNCSKDANDTLLLQLTNTSAYYMYLLLLLKSVVYFAIITCCLLRRTAFCCNGEKSRAKRSGSGATNFSLLKQAGDVEENPGPTSMDWIWRILFLVGAATGAHSFELEQSGAEVKKPGSSVQVSCKASGGTFSMYGFNWVRQAPGHGLEWMGGIIPIFGTSNYAQKFRGRVTFTADQATSTAYMELTNLRSDDTAVYYCARDFGPDWEDGDSYDGSGRGFFDFWGQGTLVTVSSTRIQNPDPAVYQLRDSKSSDKSVCLFTDFDSQTNVSQSKDSDVYITDKCVLDMRSMDFKSNSAVAWSNKSDFACANAFNNSIIPEDTFFPSPESSDSTDHVKPKETENTKQPSKSCHKPKAIVHTEKVNMMSLTVLGLRMLFAKTVAVNFLLTAKLFFL

SEQ ID NO: 15820 - protein, 845 aa, synthetic construct
MALPVTALLLPLALLLHAARPEVQLVESGGGLVQPGGSLRLSCAASGFSFSDFWMSWVRQAPGKGLEWVATISQAGSEKDYVDSVKGRFTISRDNAKKSLYLQMNSLRAEDTAVYYCASGVYSFDYRGQGTLVTVSSGTGGGGSGGGGSGGGGSEFDIQMTQSPSSLSASVGDRVTITCQASQDINNYLNWYQQKPGKAPKLLIYDASNLQTGVPSRFSGSGSGTDFTFTIEDIATYYCQQYTFGPGTKVDIKLEDLKNVFPPEVAVFEPSEAEISHTQKATLVCLATGFYPDHVELSWWVNGKEVHSGVCTDPQPLKEQPALNDSRYCLSSRLRVSATFWQNPRNHFRCQVQFYGLSENDEWTQDRAKPVTQIVSAEAWGRADDVIKIHWQEKKSNTILGSQEGNTMKTNDTYMKFSWLTVPEKSLDKEHRCIVRHENNKNGVDQEIIFPPIKTDVITMDPKDNCSKDANDTLLLQLTNTSAYYMYLLLLLKSVVYFAIITCCLLRRTAFCCNGEKSRAKRSGSGATNFSLLKQAGDVEENPGPTSMDWIWRILFLVGAATGAHSFEEVQLLESGGGLVQPGGSLRLSCAASGFTFSWYSMTWVRQAPGKGLEWVSSIVPWGDFTQYADSVKGRFTISRDNSKNTLYLQMNSLRAEDTAVYYCAKGPGWGSFDLWGRGTLVTVSSTRIQNPDPAVYQLRDSKSSDKSVCLFTDFDSQTNVSQSKDSDVYITDKCVLDMRSMDFKSNSAVAWSNKSDFACANAFNNSIIPEDTFFPSPESSDSTDHVKPKETENTKQPSKSCHKPKAIVHTEKVNMMSLTVLGLRMLFAKTVAVNFLLTAKLFFL

SEQ ID NO: 15821 - protein, 855 aa, synthetic construct
MALPVTALLLPLALLLHAARPEVQLVESGGGLVQPGGSLRLSCAASGFSFSDFWMSWVRQAPGKGLEWVATISQAGSEKDYVDSVKGRFTISRDNAKKSLYLQMNSLRAEDTAVYYCASGVYSFDYRGQGTLVTVSSGTGGGGSGGGGSGGGGSEFDIQMTQSPSSLSASVGDRVTITCTASLSVSSTYLHWYQQKPGSSPKLWIYSTSNLASGVPSRFSGSGSGTSYTLTISSLQPEDFATYYCHQYHRSPLTFGGGTKVEIKRLEDLKNVFPPEVAVFEPSEAEISHTQKATLVCLATGFYPDHVELSWWVNGKEVHSGVCTDPQPLKEQPALNDSRYCLSSRLRVSATFWQNPRNHFRCQVQFYGLSENDEWTQDRAKPVTQIVSAEAWGRADDVIKIHWQEKKSNTILGSQEGNTMKTNDTYMKFSWLTVPEKSLDKEHRCIVRHENNKNGVDQEIIFPPIKTDVITMDPKDNCSKDANDTLLLQLTNTSAYYMYLLLLLKSVVYFAIITCCLLRRTAFCCNGEKSRAKRSGSGATNFSLLKQAGDVEENPGPTSMDWIWRILFLVGAATGAHSFEEVQLVESGGGLVQPGGSLRLSCAASGFSLTKYGVHWVRQAPGKGLEWVGVKWAGGSTDYNSALMSRFTISKDNAKNSLYLQMNSLRAEDTAVYYCARDHRDAMDYWGQGTLVTVSSTRIQNPDPAVYQLRDSKSSDKSVCLFTDFDSQTNVSQSKDSDVYITDKCVLDMRSMDFKSNSAVAWSNKSDFACANAFNNSIIPEDTFFPSPESSDSTDHVKPKETENTKQPSKSCHKPKAIVHTEKVNMMSLTVLGLRMLFAKTVAVNFLLTAKLFFL

SEQ ID NO: 15822 - protein, 859 aa, synthetic construct
MALPVTALLLPLALLLHAARPEVQLVESGGGLVQPGGSLRLSCAASGFSFSDFWMSWVRQAPGKGLEWVATISQAGSEKDYVDSVKGRFTISRDNAKKSLYLQMNSLRAEDTAVYYCASGVYSFDYRGQGTLVTVSSGTGGGGSGGGGSGGGGSEFDIQMTQSPSSLSASVGDRVTITCKASQDVGTAVAWYQQKPGKAPKLLIYSASYRSTGVPSRFSGSGSGTDFTLTISSLQPEDFATYYCQHHYSAPWTFGGGTKVEIKLEDLKNVFPPEVAVFEPSEAEISHTQKATLVCLATGFYPDHVELSWWVNGKEVHSGVCTDPQPLKEQPALNDSRYCLSSRLRVSATFWQNPRNHFRCQVQFYGLSENDEWTQDRAKPVTQIVSAEAWGRADDVIKIHWQEKKSNTILGSQEGNTMKTNDTYMKFSWLTVPEKSLDKEHRCIVRHENNKNGVDQEIIFPPIKTDVITMDPKDNCSKDANDTLLLQLTNTSAYYMYLLLLLKSVVYFAIITCCLLRRTAFCCNGEKSRAKRSGSGATNFSLLKQAGDVEENPGPTSMDWIWRILFLVGAATGAHSFEEVQLVESGGGLVQPGGSLRLSCAASGFTFSRNGMSWVRQAPGKGLEWVATVSSGGSYIYYADSVKGRFTISRDNAKNSLYLQMNSLRAEDTAVYYCARQGTTALATRFFDVWGQGTLVTVSSTRIQNPDPAVYQLRDSKSSDKSVCLFTDFDSQTNVSQSKDSDVYITDKCVLDMRSMDFKSNSAVAWSNKSDFACANAFNNSIIPEDTFFPSPESSDSTDHVKPKETENTKQPSKSCHKPKAIVHTEKVNMMSLTVLGLRMLFAKTVAVNFLLTAKLFFL

SEQ ID NO: 15823 - protein, 855 aa, synthetic construct
MALPVTALLLPLALLLHAARPEVQLVESGGGLVQPGGSLRLSCAASGFSFSDFWMSWVRQAPGKGLEWVATISQAGSEKDYVDSVKGRFTISRDNAKKSLYLQMNSLRAEDTAVYYCASGVYSFDYRGQGTLVTVSSGTGGGGSGGGGSGGGGSEFDIQMTQSPPSLSASVGGKVTITCKASQDIDRYMAWYQDKPGKGPKLLIHDTSTLQPGIPSRFSGSGSGRDYSFSISNLEPEDIATYYCLQYDNLWTFGGGTKLEIKRLEDLKNVFPPEVAVFEPSEAEISHTQKATLVCLATGFYPDHVELSWWVNGKEVHSGVCTDPQPLKEQPALNDSRYCLSSRLRVSATFWQNPRNHFRCQVQFYGLSENDEWTQDRAKPVTQIVSAEAWGRADDVIKIHWQEKKSNTILGSQEGNTMKTNDTYMKFSWLTVPEKSLDKEHRCIVRHENNKNGVDQEIIFPPIKTDVITMDPKDNCSKDANDTLLLQLTNTSAYYMYLLLLLKSVVYFAIITCCLLRRTAFCCNGEKSRAKRSGSGATNFSLLKQAGDVEENPGPTSMDWIWRILFLVGAATGAHSFEQVQLVQSGAELVKPGASVKMSCKASGYIFTNYNIHWVKKSPGQGLEWIGAIYPGNGDAPYSQKFQDRATLTADTSSSTTYMELSSLTSEDSAVYYCVRANWDVAFAYWGQGTLVSVSSTRIQNPDPAVYQLRDSKSSDKSVCLFTDFDSQTNVSQSKDSDVYITDKCVLDMRSMDFKSNSAVAWSNKSDFACANAFNNSIIPEDTFFPSPESSDSTDHVKPKETENTKQPSKSCHKPKAIVHTEKVNMMSLTVLGLRMLFAKTVAVNFLLTAKLFFL

SEQ ID NO: 15824 - protein, 856 aa, synthetic construct
MALPVTALLLPLALLLHAARPEVQLVESGGGLVQPGGSLRLSCAASGFSFSDFWMSWVRQAPGKGLEWVATISQAGSEKDYVDSVKGRFTISRDNAKKSLYLQMNSLRAEDTAVYYCASGVYSFDYRGQGTLVTVSSGTGGGGSGGGGSGGGGSEFDIQMTQSPASLSASVGETVTITCRVSGNIHNYLAWYQQKQGKSPQLLVYNAKTLADGVPSRFSGSGSGTQYSLKINSLQPEDFGSYYCQHFWSNPYTFGGGTKLEIKLEDLKNVFPPEVAVFEPSEAEISHTQKATLVCLATGFYPDHVELSWWVNGKEVHSGVCTDPQPLKEQPALNDSRYCLSSRLRVSATFWQNPRNHFRCQVQFYGLSENDEWTQDRAKPVTQIVSAEAWGRADDVIKIHWQEKKSNTILGSQEGNTMKTNDTYMKFSWLTVPEKSLDKEHRCIVRHENNKNGVDQEIIFPPIKTDVITMDPKDNCSKDANDTLLLQLTNTSAYYMYLLLLLKSVVYFAIITCCLLRRTAFCCNGEKSRAKRSGSGATNFSLLKQAGDVEENPGPTSMDWIWRILFLVGAATGAHSFEQVQLQQSGASVKVSCKASELVRPGTGYAFTNYLIEWVKQRPGQGLEWIGVINPGSGGTNYNEKFKGKATLTADKSSSTAYMQLSSLTSDDSAVYFCARYRSYDWYFDVWGAGTTVTVSSTRIQNPDPAVYQLRDSKSSDKSVCLFTDFDSQTNVSQSKDSDVYITDKCVLDMRSMDFKSNSAVAWSNKSDFACANAFNNSIIPEDTFFPSPESSDSTDHVKPKETENTKQPSKSCHKPKAIVHTEKVNMMSLTVLGLRMLFAKTVAVNFLLTAKLFFL

SEQ ID NO: 15825 - protein, 855 aa, synthetic construct
MALPVTALLLPLALLLHAARPEVQLVESGGGLVQPGGSLRLSCAASGFSFSDFWMSWVRQAPGKGLEWVATISQAGSEKDYVDSVKGRFTISRDNAKKSLYLQMNSLRAEDTAVYYCASGVYSFDYRGQGTLVTVSSGTGGGGSGGGGSGGGGSEFDIQMTQSFSSLSASVGDRVTITCRASQDISNYLNWYQQKPGKAPKLLIYYTSRLHSGVPSRFSGSGSGTDYTLTISSLQPEDFATYFCQQGNTLPWTFGGGTKLEIKRLEDLKNVFPPEVAVFEPSEAEISHTQKATLVCLATGFYPDHVELSWWVNGKEVHSGVCTDPQPLKEQPALNDSRYCLSSRLRVSATFWQNPRNHFRCQVQFYGLSENDEWTQDRAKPVTQIVSAEAWGRADDVIKIHWQEKKSNTILGSQEGNTMKTNDTYMKFSWLTVPEKSLDKEHRCIVRHENNKNGVDQEIIFPPIKTDVITMDPKDNCSKDANDTLLLQLTNTSAYYMYLLLLLKSVVYFAIITCCLLRRTAFCCNGEKSRAKRSGSGATNFSLLKQAGDVEENPGPTSMDWIWRILFLVGAATGAHSFEEVQLVQSGGGLVQSGGSLRLSCRASGYTFTRYWMLWVRQRPGKGLEWVAEINPRNDRTNYNEKFKTRFTISVDRSKNTLYLQMDSLRAEDTAVYFCALGGGYAMDYWGQGTLVTVSSTRIQNPDPAVYQLRDSKSSDKSVCLFTDFDSQTNVSQSKDSDVYITDKCVLDMRSMDFKSNSAVAWSNKSDFACANAFNNSIIPEDTFFPSPESSDSTDHVKPKETENTKQPSKSCHKPKAIVHTEKVNMMSLTVLGLRMLFAKTVAVNFLLTAKLFFL

SEQ ID NO: 15826 - protein, 856 aa, synthetic construct
MALPVTALLLPLALLLHAARPEVQLVESGGGLVQPGGSLRLSCAASGFSFSDFWMSWVRQAPGKGLEWVATISQAGSEKDYVDSVKGRFTISRDNAKKSLYLQMNSLRAEDTAVYYCASGVYSFDYRGQGTLVTVSSGTGGGGSGGGGSGGGGSEFDIQMTQSPASLSASVGETVTIICRASVNIYSYLAWYQQKQGKSPQLLVYNAKILAEGVPSRFSGSGSGTQFSLKINSLQPEDFGSYYCQHHYGTFTFGSGTKLEIKRLEDLKNVFPPEVAVFEPSEAEISHTQKATLVCLATGFYPDHVELSWWVNGKEVHSGVCTDPQPLKEQPALNDSRYCLSSRLRVSATFWQNPRNHFRCQVQFYGLSENDEWTQDRAKPVTQIVSAEAWGRADDVIKIHWQEKKSNTILGSQEGNTMKTNDTYMKFSWLTVPEKSLDKEHRCIVRHENNKNGVDQEIIFPPIKTDVITMDPKDNCSKDANDTLLLQLTNTSAYYMYLLLLLKSVVYFAIITCCLLRRTAFCCNGEKSRAKRSGSGATNFSLLKQAGDVEENPGPTSMDWIWRILFLVGAATGAHSFEQVQLKESGPGLVAPSQSLSITCTISGFSLTSYGVHWVRQPPGKGLEWLVVIWSDGSTTYNSALKSRLSISKDNSKSQVFLKMNSLQTDDTAIYYCASHYGSTLAFASWGHGTLVTVSAATRIQNPDPAVYQLRDSKSSDKSVCLFTDFDSQTNVSQSKDSDVYITDKCVLDMRSMDFKSNSAVAWSNKSDFACANAFNNSIIPEDTFFPSPESSDSTDHVKPKETENTKQPSKSCHKPKAIVHTEKVNMMSLTVLGLRMLFAKTVAVNFLLTAKLFFL

SEQ ID NO: 15827 - protein, 864 aa, synthetic construct
MALPVTALLLPLALLLHAARPEVQLVESGGGLVQPGGSLRLSCAASGFSFSDFWMSWVRQAPGKGLEWVATISQAGSEKDYVDSVKGRFTISRDNAKKSLYLQMNSLRAEDTAVYYCASGVYSFDYRGQGTLVTVSSGTGGGGSGGGGSGGGGSEFDIVMTQSHKFMSTSVGDRVSVTCKASQNVGNNVAWYQQKPGQSPKVLIYSASYRYSGVPDRFTGSGSGTDFTLTISNVQSEDLAEYFCQQYNTYPFTFGSGTKLEIKLEDLKNVFPPEVAVFEPSEAEISHTQKATLVCLATGFYPDHVELSWWVNGKEVHSGVCTDPQPLKEQPALNDSRYCLSSRLRVSATFWQNPRNHFRCQVQFYGLSENDEWTQDRAKPVTQIVSAEAWGRADDVIKIHWQEKKSNTILGSQEGNTMKTNDTYMKFSWLTVPEKSLDKEHRCIVRHENNKNGVDQEIIFPPIKTDVITMDPKDNCSKDANDTLLLQLTNTSAYYMYLLLLLKSVVYFAIITCCLLRRTAFCCNGEKSRAKRSGSGATNFSLLKQAGDVEENPGPTSMDWIWRILFLVGAATGAHSFEEVQLEESGGGLVQPGGSMKLSCVASGFTFSNYWMNWVRQSPEKGLEWVAEIRFKSHNYATHFAESVKGRFTISRDDSKSSVYLQMNNLRAEDTGIYYCTRRIGNSDYDWWYFDVWGAGTSVTVSSASTRIQNPDPAVYQLRDSKSSDKSVCLFTDFDSQTNVSQSKDSDVYITDKCVLDMRSMDFKSNSAVAWSNKSDFACANAFNNSIIPEDTFFPSPESSDSTDHVKPKETENTKQPSKSCHKPKAIVHTEKVNMMSLTVLGLRMLFAKTVAVNFLLTAKLFFL

SEQ ID NO: 15828 - protein, 857 aa, synthetic construct
MALPVTALLLPLALLLHAARPEVQLVESGGGLVQPGGSLRLSCAASGFSFSDFWMSWVRQAPGKGLEWVATISQAGSEKDYVDSVKGRFTISRDNAKKSLYLQMNSLRAEDTAVYYCASGVYSFDYRGQGTLVTVSSGTGGGGSGGGGSGGGGSEFDQIVLTQSPAIMSASPGEKVTISCSASSSVSYMYWYQQKPGSSPKPWIYRTSNLASGVPARFSGSGSGTSYSLTISNMEAEDAAAYYCQQYHSYPTTFGGGTKLEVKLEDLKNVFPPEVAVFEPSEAEISHTQKATLVCLATGFYPDHVELSWWVNGKEVHSGVCTDPQPLKEQPALNDSRYCLSSRLRVSATFWQNPRNHFRCQVQFYGLSENDEWTQDRAKPVTQIVSAEAWGRADDVIKIHWQEKKSNTILGSQEGNTMKTNDTYMKFSWLTVPEKSLDKEHRCIVRHENNKNGVDQEIIFPPIKTDVITMDPKDNCSKDANDTLLLQLTNTSAYYMYLLLLLKSVVYFAIITCCLLRRTAFCCNGEKSRAKRSGSGATNFSLLKQAGDVEENPGPTSMDWIWRILFLVGAATGAHSFEEVQLVESGGGLVQPKGSLKLSCAASGFSFNTYAMNWVRQAPGKGLEWIAHIRSKSNNFATYYADSVKDRFSISRDASENILFLQMNNLKTEDTAMYYCVRQGGDFPMDYWGQGTSVTVSSTRIQNPDPAVYQLRDSKSSDKSVCLFTDFDSQTNVSQSKDSDVYITDKCVLDMRSMDFKSNSAVAWSNKSDFACANAFNNSIIPEDTFFPSPESSDSTDHVKPKETENTKQPSKSCHKPKAIVHTEKVNMMSLTVLGLRMLFAKTVAVNFLLTAKLFFL

SEQ ID NO: 15829 - protein, 856 aa, synthetic construct
MALPVTALLLPLALLLHAARPEVQLVESGGGLVQPGGSLRLSCAASGFSFSDFWMSWVRQAPGKGLEWVATISQAGSEKDYVDSVKGRFTISRDNAKKSLYLQMNSLRAEDTAVYYCASGVYSFDYRGQGTLVTVSSGTGGGGSGGGGSGGGGSEFDDIQMTQSSSSFSVSLGDRVTITCMASEDIYIRLAWYQQKPGNAPRLLISAATSLETGVPSRFSGSGSGKDYTLSITSLQTEDVGTYYCQQYWSSPWTFGGGTKLEINLEDLKNVFPPEVAVFEPSEAEISHTQKATLVCLATGFYPDHVELSWWVNGKEVHSGVCTDPQPLKEQPALNDSRYCLSSRLRVSATFWQNPRNHFRCQVQFYGLSENDEWTQDRAKPVTQIVSAEAWGRADDVIKIHWQEKKSNTILGSQEGNTMKTNDTYMKFSWLTVPEKSLDKEHRCIVRHENNKNGVDQEIIFPPIKTDVITMDPKDNCSKDANDTLLLQLTNTSAYYMYLLLLLKSVVYFAIITCCLLRRTAFCCNGEKSRAKRSGSGATNFSLLKQAGDVEENPGPTSMDWIWRILFLVGAATGAHSFEDVQLQESGPGLVKPSQSLSLTCTVTGYSITSDYTWNWIRQFPGNKLEWMGYITYSGSTSYNPSLKSRNSITRDTSKNQFFLQLNSVTTEDTATYYCARLGRRYTMDYWGQGTSVTVSSTRIQNPDPAVYQLRDSKSSDKSVCLFTDFDSQTNVSQSKDSDVYITDKCVLDMRSMDFKSNSAVAWSNKSDFACANAFNNSIIPEDTFFPSPESSDSTDHVKPKETENTKQPSKSCHKPKAIVHTEKVNMMSLTVLGLRMLFAKTVAVNFLLTAKLFFL

SEQ ID NO: 15830 - protein, 859 aa, synthetic construct
MALPVTALLLPLALLLHAARPEVQLVESGGGLVQPGGSLRLSCAASGFSFSDFWMSWVRQAPGKGLEWVATISQAGSEKDYVDSVKGRFTISRDNAKKSLYLQMNSLRAEDTAVYYCASGVYSFDYRGQGTLVTVSSGTGGGGSGGGGSGGGGSEFDDIQMTQSPSSLSASVGDRVTITCRASQSISSYLNWYQQKPGKAPKLLIYDASNLETGVPSRFSGSGSGTDFTFTISSLQPEDIATYYCQQYDNLPLTFGGGTKVDIKRLEDLKNVFPPEVAVFEPSEAEISHTQKATLVCLATGFYPDHVELSWWVNGKEVHSGVCTDPQPLKEQPALNDSRYCLSSRLRVSATFWQNPRNHFRCQVQFYGLSENDEWTQDRAKPVTQIVSAEAWGRADDVIKIHWQEKKSNTILGSQEGNTMKTNDTYMKFSWLTVPEKSLDKEHRCIVRHENNKNGVDQEIIFPPIKTDVITMDPKDNCSKDANDTLLLQLTNTSAYYMYLLLLLKSVVYFAIITCCLLRRTAFCCNGEKSRAKRSGSGATNFSLLKQAGDVEENPGPTSMDWIWRILFLVGAATGAHSFEQVQLVESGGGVVQPGRSLRLSCAASGFTFSSYAMHWVRQAPGKGLEWVAVISYDGSNKYYADSVKGRFTISRDNSKNTLYLQMNSLRAEDTAVYYCARAHNSSSWSFDYWGQGTLVTVSSTRIQNPDPAVYQLRDSKSSDKSVCLFTDFDSQTNVSQSKDSDVYITDKCVLDMRSMDFKSNSAVAWSNKSDFACANAFNNSIIPEDTFFPSPESSDSTDHVKPKETENTKQPSKSCHKPKAIVHTEKVNMMSLTVLGLRMLFAKTVAVNFLLTAKLFFL

SEQ ID NO: 15831 - protein, 868 aa, synthetic construct
MALPVTALLLPLALLLHAARPEVQLVESGGGLVQPGGSLRLSCAASGFSFSDFWMSWVRQAPGKGLEWVATISQAGSEKDYVDSVKGRFTISRDNAKKSLYLQMNSLRAEDTAVYYCASGVYSFDYRGQGTLVTVSSGTGGGGSGGGGSGGGGSEFDDVVMTQSPLSLPVSLGDQASISCRSSQRLVHSNGNTYLHWYLQKPGQSPKLLIYRVSNRFPGVPDRFSGSGSGTDFTLKISRVEAEDLGIYFCSQSTHVPYTFGGGTKLEIKRLEDLKNVFPPEVAVFEPSEAEISHTQKATLVCLATGFYPDHVELSWWVNGKEVHSGVCTDPQPLKEQPALNDSRYCLSSRLRVSATFWQNPRNHFRCQVQFYGLSENDEWTQDRAKPVTQIVSAEAWGRADDVIKIHWQEKKSNTILGSQEGNTMKTNDTYMKFSWLTVPEKSLDKEHRCIVRHENNKNGVDQEIIFPPIKTDVITMDPKDNCSKDANDTLLLQLTNTSAYYMYLLLLLKSVVYFAIITCCLLRRTAFCCNGEKSRAKRSGSGATNFSLLKQAGDVEENPGPTSMDWIWRILFLVGAATGAHSFEEVRLQQSGPDLIKPGASVKMSCKASGYTFTGYVMHWVKQRPGQGLEWIGFINPYNDDIQSNERFRGKATLTSDKSSTTAYMELSSLTSEDSAVYYCARGAGYNFDGAYRFFDFWGQGTTLTVSSTRIQNPDPAVYQLRDSKSSDKSVCLFTDFDSQTNVSQSKDSDVYITDKCVLDMRSMDFKSNSAVAWSNKSDFACANAFNNSIIPEDTFFPSPESSDSTDHVKPKETENTKQPSKSCHKPKAIVHTEKVNMMSLTVLGLRMLFAKTVAVNFLLTAKLFFL

SEQ ID NO: 15832 - protein, 859 aa, synthetic construct
MALPVTALLLPLALLLHAARPEVQLVESGGGLVQPGGSLRLSCAASGFSFSDFWMSWVRQAPGKGLEWVATISQAGSEKDYVDSVKGRFTISRDNAKKSLYLQMNSLRAEDTAVYYCASGVYSFDYRGQGTLVTVSSGTGGGGSGGGGSGGGGSEFDSYELTQPPSVSVSPGQTATISCSGDQLGGKYGHWYQKKPGQSPVLVLYQDRKRPAGIPERFSGSSSGNTITLTISGTQAVDEADYYCQAWDTNLGGVFGGGTKVTVLGQLEDLKNVFPPEVAVFEPSEAEISHTQKATLVCLATGFYPDHVELSWWVNGKEVHSGVCTDPQPLKEQPALNDSRYCLSSRLRVSATFWQNPRNHFRCQVQFYGLSENDEWTQDRAKPVTQIVSAEAWGRADDVIKIHWQEKKSNTILGSQEGNTMKTNDTYMKFSWLTVPEKSLDKEHRCIVRHENNKNGVDQEIIFPPIKTDVITMDPKDNCSKDANDTLLLQLTNTSAYYMYLLLLLKSVVYFAIITCCLLRRTAFCCNGEKSRAKRSGSGATNFSLLKQAGDVEENPGPTSMDWIWRILFLVGAATGAHSFEQVQLVESGAEVKKPGASVKVSCKASGYTFTGYYMHWVRQAPGQGLEWMGRINPNSGGTNYAQKFQGRVTMTRDTSISTAYMELSRLRSDDTAVYYCASPRGRGSAFDIWGQGTLVTVSSTRIQNPDPAVYQLRDSKSSDKSVCLFTDFDSQTNVSQSKDSDVYITDKCVLDMRSMDFKSNSAVAWSNKSDFACANAFNNSIIPEDTFFPSPESSDSTDHVKPKETENTKQPSKSCHKPKAIVHTEKVNMMSLTVLGLRMLFAKTVAVNFLLTAKLFFL

SEQ ID NO: 15833 - protein, 862 aa, synthetic construct
MALPVTALLLPLALLLHAARPEVQLVESGGGLVQPGGSLRLSCAASGFSFSDFWMSWVRQAPGKGLEWVATISQAGSEKDYVDSVKGRFTISRDNAKKSLYLQMNSLRAEDTAVYYCASGVYSFDYRGQGTLVTVSSGTGGGGSGGGGSGGGGSEFDNFMLTQPHSVSESPGKTVTISCTRSSGSIASKYVQWYQQRPGSSPTTVIYEDNQRPSGVPDRFSGSIDTSSNSASLTISGLRTEDEADYYCHSYDSNNHSVFGGGTKVTVLGQLEDLKNVFPPEVAVFEPSEAEISHTQKATLVCLATGFYPDHVELSWWVNGKEVHSGVCTDPQPLKEQPALNDSRYCLSSRLRVSATFWQNPRNHFRCQVQFYGLSENDEWTQDRAKPVTQIVSAEAWGRADDVIKIHWQEKKSNTILGSQEGNTMKTNDTYMKFSWLTVPEKSLDKEHRCIVRHENNKNGVDQEIIFPPIKTDVITMDPKDNCSKDANDTLLLQLTNTSAYYMYLLLLLKSVVYFAIITCCLLRRTAFCCNGEKSRAKRSGSGATNFSLLKQAGDVEENPGPTSMDWIWRILFLVGAATGAHSFEEVQLVESGGGVVQPGGSLRLSCAASGFTFSSYAMSWVRQAPGKGLEWVSAISGSGGSTYYADSVKGRFSISRDNSKNTLYLQMNSLRAEDTAVYYCARTRSSGAFDIWGQGTLVTVSSTRIQNPDPAVYQLRDSKSSDKSVCLFTDFDSQTNVSQSKDSDVYITDKCVLDMRSMDFKSNSAVAWSNKSDFACANAFNNSIIPEDTFFPSPESSDSTDHVKPKETENTKQPSKSCHKPKAIVHTEKVNMMSLTVLGLRMLFAKTVAVNFLLTAKLFFL

SEQ ID NO: 15834 - protein, 857 aa, synthetic construct
MALPVTALLLPLALLLHAARPEVQLVESGGGLVQPGGSLRLSCAASGFSFSDFWMSWVRQAPGKGLEWVATISQAGSEKDYVDSVKGRFTISRDNAKKSLYLQMNSLRAEDTAVYYCASGVYSFDYRGQGTLVTVSSGTGGGGSGGGGSGGGGSEFDIQMNQSPSSLSASLGDTITITCHASQNINVWLSWYQQKPGNIPKLLIYKASNLHTGVPSRFSGSGSGTGFTITISSLQPEDIATYYCQQGQSYPWTFGGGTKLEIKRLEDLKNVFPPEVAVFEPSEAEISHTQKATLVCLATGFYPDHVELSWWVNGKEVHSGVCTDPQPLKEQPALNDSRYCLSSRLRVSATFWQNPRNHFRCQVQFYGLSENDEWTQDRAKPVTQIVSAEAWGRADDVIKIHWQEKKSNTILGSQEGNTMKTNDTYMKFSWLTVPEKSLDKEHRCIVRHENNKNGVDQEIIFPPIKTDVITMDPKDNCSKDANDTLLLQLTNTSAYYMYLLLLLKSVVYFAIITCCLLRRTAFCCNGEKSRAKRSGSGATNFSLLKQAGDVEENPGPTSMDWIWRILFLVGAATGAHSFEEVQLQQSGPELVKPGASVKISCKASGYSFTGYFMNWVKQSHGKSLEYIGRFNPYNGETLYNQKFKGKATLTVDKSSSTVHMELLSVTSEDSAVYYCGRSGNDDAMDYWGQGTSVTVSSATRIQNPDPAVYQLRDSKSSDKSVCLFTDFDSQTNVSQSKDSDVYITDKCVLDMRSMDFKSNSAVAWSNKSDFACANAFNNSIIPEDTFFPSPESSDSTDHVKPKETENTKQPSKSCHKPKAIVHTEKVNMMSLTVLGLRMLFAKTVAVNFLLTAKLFFL

SEQ ID NO: 15835 - protein, 858 aa, synthetic construct
MALPVTALLLPLALLLHAARPEVQLVESGGGLVQPGGSLRLSCAASGFSFSDFWMSWVRQAPGKGLEWVATISQAGSEKDYVDSVKGRFTISRDNAKKSLYLQMNSLRAEDTAVYYCASGVYSFDYRGQGTLVTVSSGTGGGGSGGGGSGGGGSEFEIVLTQSPATLSLSPGERATLSCRASQSVRSYLAWYQQKPGQAPRLLIYDASNRATGIPARFSGSGSGTDFTLTISSLEPEDFAVYYCQQRSNWPPTFGQGTKVEIKLEDLKNVFPPEVAVFEPSEAEISHTQKATLVCLATGFYPDHVELSWWVNGKEVHSGVCTDPQPLKEQPALNDSRYCLSSRLRVSATFWQNPRNHFRCQVQFYGLSENDEWTQDRAKPVTQIVSAEAWGRADDVIKIHWQEKKSNTILGSQEGNTMKTNDTYMKFSWLTVPEKSLDKEHRCIVRHENNKNGVDQEIIFPPIKTDVITMDPKDNCSKDANDTLLLQLTNTSAYYMYLLLLLKSVVYFAIITCCLLRRTAFCCNGEKSRAKRSGSGATNFSLLKQAGDVEENPGPTSMDWIWRILFLVGAATGAHSFEQLQVQESGPGLVKPSETLSLTCTVSGGSISNSYFSWGWIRQPPGKGLEWIGSFYYGEKTYYNPSLKSRATISIDTSKSQFSLKLSSVTAADTAVYYCPRGPTMIRGVIDSWGQGTLVTVSSTRIQNPDPAVYQLRDSKSSDKSVCLFTDFDSQTNVSQSKDSDVYITDKCVLDMRSMDFKSNSAVAWSNKSDFACANAFNNSIIPEDTFFPSPESSDSTDHVKPKETENTKQPSKSCHKPKAIVHTEKVNMMSLTVLGLRMLFAKTVAVNFLLTAKLFFL

SEQ ID NO: 15836 - protein, 867 aa, synthetic construct
MALPVTALLLPLALLLHAARPEVQLVESGGGLVQPGGSLRLSCAASGFSFSDFWMSWVRQAPGKGLEWVATISQAGSEKDYVDSVKGRFTISRDNAKKSLYLQMNSLRAEDTAVYYCASGVYSFDYRGQGTLVTVSSGTGGGGSGGGGSGGGGSEFDIVMTQTPLSLPVTPGEPASISCRSSRSLLDSDDGNTYLDWYLQKPGQSPQLLIYTLSYRASGVPDRFSGSGSGTDFTLKISRVEAEDVGVYYCMQRVEFPITFGQGTRLEIKRLEDLKNVFPPEVAVFEPSEAEISHTQKATLVCLATGFYPDHVELSWWVNGKEVHSGVCTDPQPLKEQPALNDSRYCLSSRLRVSATFWQNPRNHFRCQVQFYGLSENDEWTQDRAKPVTQIVSAEAWGRADDVIKIHWQEKKSNTILGSQEGNTMKTNDTYMKFSWLTVPEKSLDKEHRCIVRHENNKNGVDQEIIFPPIKTDVITMDPKDNCSKDANDTLLLQLTNTSAYYMYLLLLLKSVVYFAIITCCLLRRTAFCCNGEKSRAKRSGSGATNFSLLKQAGDVEENPGPTSMDWIWRILFLVGAATGAHSFEQVQLVESGGGVVQPGRSLRLSCAASGFIFSRYGMHWVRQAPGKGLKWVAVIWYDGSNKLYADSVKGRFTISRDNSKNTLYLQMNSLRAEDTAVYYCARDYYDNSRHHWGFDYWGQGTLVTVSSTRIQNPDPAVYQLRDSKSSDKSVCLFTDFDSQTNVSQSKDSDVYITDKCVLDMRSMDFKSNSAVAWSNKSDFACANAFNNSIIPEDTFFPSPESSDSTDHVKPKETENTKQPSKSCHKPKAIVHTEKVNMMSLTVLGLRMLFAKTVAVNFLLTAKLFFL

SEQ ID NO: 15837 - protein, 857 aa, synthetic construct
MALPVTALLLPLALLLHAARPEVQLVESGGGLVQPGGSLRLSCAASGFSFSDFWMSWVRQAPGKGLEWVATISQAGSEKDYVDSVKGRFTISRDNAKKSLYLQMNSLRAEDTAVYYCASGVYSFDYRGQGTLVTVSSGTGGGGSGGGGSGGGGSEFEIQMTQSPSSMSASLGDTITITCQATQDIFKNLNWYQQKPGKPPSLLIYYATELAEGVPSRFSGSGSGSDYSLTISNLESEDFAAYYCLQFFEFPFTFGSGTKLEMKLEDLKNVFPPEVAVFEPSEAEISHTQKATLVCLATGFYPDHVELSWWVNGKEVHSGVCTDPQPLKEQPALNDSRYCLSSRLRVSATFWQNPRNHFRCQVQFYGLSENDEWTQDRAKPVTQIVSAEAWGRADDVIKIHWQEKKSNTILGSQEGNTMKTNDTYMKFSWLTVPEKSLDKEHRCIVRHENNKNGVDQEIIFPPIKTDVITMDPKDNCSKDANDTLLLQLTNTSAYYMYLLLLLKSVVYFAIITCCLLRRTAFCCNGEKSRAKRSGSGATNFSLLKQAGDVEENPGPTSMDWIWRILFLVGAATGAHSFEQVQLQQSGAELVRPGTSVKVSCKASGYVFTNYWIEWIKQRPGQGLEWIGVMNPGSGETTYNEKFKGKATLTADKSSSTAYMQLSSLTSVDSAVYFCARDHDRDYYAMDYWGQGTSVTVSSTRIQNPDPAVYQLRDSKSSDKSVCLFTDFDSQTNVSQSKDSDVYITDKCVLDMRSMDFKSNSAVAWSNKSDFACANAFNNSIIPEDTFFPSPESSDSTDHVKPKETENTKQPSKSCHKPKAIVHTEKVNMMSLTVLGLRMLFAKTVAVNFLLTAKLFFL

SEQ ID NO: 15838 - protein, 854 aa, synthetic construct
MALPVTALLLPLALLLHAARPEVQLVESGGGLVQPGGSLRLSCAASGFSFSDFWMSWVRQAPGKGLEWVATISQAGSEKDYVDSVKGRFTISRDNAKKSLYLQMNSLRAEDTAVYYCASGVYSFDYRGQGTLVTVSSGTGGGGSGGGGSGGGGSEFDILLTQSPAILSVSPGERVSFSCRASQNIGTSIHWYQQRTNGSPRLLIKYASESVSGIPSRFSGSGSGTDFTLSINSVESEDIADYYCQHTNSWPTTFGGGTKLEIKRLEDLKNVFPPEVAVFEPSEAEISHTQKATLVCLATGFYPDHVELSWWVNGKEVHSGVCTDPQPLKEQPALNDSRYCLSSRLRVSATFWQNPRNHFRCQVQFYGLSENDEWTQDRAKPVTQIVSAEAWGRADDVIKIHWQEKKSNTILGSQEGNTMKTNDTYMKFSWLTVPEKSLDKEHRCIVRHENNKNGVDQEIIFPPIKTDVITMDPKDNCSKDANDTLLLQLTNTSAYYMYLLLLLKSVVYFAIITCCLLRRTAFCCNGEKSRAKRSGSGATNFSLLKQAGDVEENPGPTSMDWIWRILFLVGAATGAHSFEQVQLQQSDAELVKPGASVKISCKASGYTFTDHAIHWVKQKPEQGLEWIGYFSPGNGDIKYNEKFKGKATLTADKSSSTAYMQLNSLTSEDSAVYFCKRSYGNYDYWGQGTTLTVSSTRIQNPDPAVYQLRDSKSSDKSVCLFTDFDSQTNVSQSKDSDVYITDKCVLDMRSMDFKSNSAVAWSNKSDFACANAFNNSIIPEDTFFPSPESSDSTDHVKPKETENTKQPSKSCHKPKAIVHTEKVNMMSLTVLGLRMLFAKTVAVNFLLTAKLFFL

SEQ ID NO: 15839 - protein, 859 aa, synthetic construct
MALPVTALLLPLALLLHAARPEVQLVESGGGLVQPGGSLRLSCAASGFSFSDFWMSWVRQAPGKGLEWVATISQAGSEKDYVDSVKGRFTISRDNAKKSLYLQMNSLRAEDTAVYYCASGVYSFDYRGQGTLVTVSSGTGGGGSGGGGSGGGGSEFDIVMTQSPDSLAVSLGERATINCKSSQSLLNSGDQKNYLTWYQQKPGQPPKLLIYWASTRESGVPDRFSGSGSGTDFTLTISSLQAEDVAVYYCQNDYSYPLTFGQGTKVEIKLEDLKNVFPPEVAVFEPSEAEISHTQKATLVCLATGFYPDHVELSWWVNGKEVHSGVCTDPQPLKEQPALNDSRYCLSSRLRVSATFWQNPRNHFRCQVQFYGLSENDEWTQDRAKPVTQIVSAEAWGRADDVIKIHWQEKKSNTILGSQEGNTMKTNDTYMKFSWLTVPEKSLDKEHRCIVRHENNKNGVDQEIIFPPIKTDVITMDPKDNCSKDANDTLLLQLTNTSAYYMYLLLLLKSVVYFAIITCCLLRRTAFCCNGEKSRAKRSGSGATNFSLLKQAGDVEENPGPTSMDWIWRILFLVGAATGAHSFEQVQLVQSGAEVKKTGSSVKVSCKASGYTFTDHAIHVWRQAPGQALEWMGHFSPGNTDIKYNDKFKGRVTLTVDRSMSTAYMELSSLRSEDTAMYYCKTSTFFFDYWGQGTMVTVSSTRIQNPDPAVYQLRDSKSSDKSVCLFTDFDSQTNVSQSKDSDVYITDKCVLDMRSMDFKSNSAVAWSNKSDFACANAFNNSIIPEDTFFPSPESSDSTDHVKPKETENTKQPSKSCHKPKAIVHTEKVNMMSLTVLGLRMLFAKTVAVNFLLTAKLFFL

SEQ ID NO: 15840 - protein, 858 aa, synthetic construct
MALPVTALLLPLALLLHAARPEVQLVESGGGLVQPGGSLRLSCAASGFSFSDFWMSWVRQAPGKGLEWVATISQAGSEKDYVDSVKGRFTISRDNAKKSLYLQMNSLRAEDTAVYYCASGVYSFDYRGQGTLVTVSSGTGGGGSGGGGSGGGGSEFDIQMTQSPSSLSASVGDRVTITCKASQDVSIAVAWYQQKPGKAPKVLIYSASYRYTGVPDRFSGSGSGTDFTFTISSLQPEDIAVYYCQQHYITPLTFGGGTKVEIKLEDLKNVFPPEVAVFEPSEAEISHTQKATLVCLATGFYPDHVELSWWVNGKEVHSGVCTDPQPLKEQPALNDSRYCLSSRLRVSATFWQNPRNHFRCQVQFYGLSENDEWTQDRAKPVTQIVSAEAWGRADDVIKIHWQEKKSNTILGSQEGNTMKTNDTYMKFSWLTVPEKSLDKEHRCIVRHENNKNGVDQEIIFPPIKTDVITMDPKDNCSKDANDTLLLQLTNTSAYYMYLLLLLKSVVYFAIITCCLLRRTAFCCNGEKSRAKRSGSGATNFSLLKQAGDVEENPGPTSMDWIWRILFLVGAATGAHSFEQIQLVQSGHEVKKPGASVKVSCKASGYTFTNYGMNWVRQAPGQGLEWMGWINTKTGEPTYAEEFKGRFVFSLETSASTAYLQISSLKAEDTAMYFCGRGGYGSSYWYFDVWGQGTTVTVSSTRIQNPDPAVYQLRDSKSSDKSVCLFTDFDSQTNVSQSKDSDVYITDKCVLDMRSMDFKSNSAVAWSNKSDFACANAFNNSIIPEDTFFPSPESSDSTDHVKPKETENTKQPSKSCHKPKAIVHTEKVNMMSLTVLGLRMLFAKTVAVNFLLTAKLFFL

SEQ ID NO: 15841 - protein, 860 aa, synthetic construct
MALPVTALLLPLALLLHAARPEVQLVESGGGLVQPGGSLRLSCAASGFSFSDFWMSWVRQAPGKGLEWVATISQAGSEKDYVDSVKGRFTISRDNAKKSLYLQMNSLRAEDTAVYYCASGVYSFDYRGQGTLVTVSSGTGGGGSGGGGSGGGGSEFDIVMTQSPDSLAVSLGERATINCRASKSVSTSGYSYMHWYQQKPGQPPKLLIYLASNLESGVPDRFSGSGSGTDFTLTISSLQAEDVAVYYCQHSRELPYTFGQGTKLEIKLEDLKNVFPPEVAVFEPSEAEISHTQKATLVCLATGFYPDHVELSWWVNGKEVHSGVCTDPQPLKEQPALNDSRYCLSSRLRVSATFWQNPRNHFRCQVQFYGLSENDEWTQDRAKPVTQIVSAEAWGRADDVIKIHWQEKKSNTILGSQEGNTMKTNDTYMKFSWLTVPEKSLDKEHRCIVRHENNKNGVDQEIIFPPIKTDVITMDPKDNCSKDANDTLLLQLTNTSAYYMYLLLLLKSVVYFAIITCCLLRRTAFCCNGEKSRAKRSGSGATNFSLLKQAGDVEENPGPTSMDWIWRILFLVGAATGAHSFEQVQLQESGPGLVKPSETLSLTCTVSGGSISSYGVHWIRQPPGKGLEWIGVIWTSGVTDYNSALMGRVTISVDTSKNQFSLKLSSVTAADTAVYYCARDGDYDRYTMDYWGQGTLVTVSSTRIQNPDPAVYQLRDSKSSDKSVCLFTDFDSQTNVSQSKDSDVYITDKCVLDMRSMDFKSNSAVAWSNKSDFACANAFNNSIIPEDTFFPSPESSDSTDHVKPKETENTKQPSKSCHKPKAIVHTEKVNMMSLTVLGLRMLFAKTVAVNFLLTAKLFFL

SEQ ID NO: 15842 - protein, 860 aa, synthetic construct
MALPVTALLLPLALLLHAARPEVQLVESGGGLVQPGGSLRLSCAASGFSFSDFWMSWVRQAPGKGLEWVATISQAGSEKDYVDSVKGRFTISRDNAKKSLYLQMNSLRAEDTAVYYCASGVYSFDYRGQGTLVTVSSGTGGGGSGGGGSGGGGSEFDIQMTQSPSSLSASVGDRVTITCRASQSIGTSLHWYQQKPGKAPKLLIKFASRLQSGVPSRFSGSGSGTDFTLTISSLQPEDFATYYCQQSPGFPPTFGQGTKLEIKRLEDLKNVFPPEVAVFEPSEAEISHTQKATLVCLATGFYPDHVELSWWVNGKEVHSGVCTDPQPLKEQPALNDSRYCLSSRLRVSATFWQNPRNHFRCQVQFYGLSENDEWTQDRAKPVTQIVSAEAWGRADDVIKIHWQEKKSNTILGSQEGNTMKTNDTYMKFSWLTVPEKSLDKEHRCIVRHENNKNGVDQEIIFPPIKTDVITMDPKDNCSKDANDTLLLQLTNTSAYYMYLLLLLKSVVYFAIITCCLLRRTAFCCNGEKSRAKRSGSGATNFSLLKQAGDVEENPGPTSMDWIWRILFLVGAATGAHSFEQVQLVESGGGLVKPGGSLRLSCAASGFSITTSGYYWTWIRQFPGKGLEWMGYIGYNSKTYYNPALKSRITISRDNAKNSLYLQMNSLRAEDTAVYYCARSLYGGYKDAFDSWGQGTLVTVSSTRIQNPDPAVYQLRDSKSSDKSVCLFTDFDSQTNVSQSKDSDVYITDKCVLDMRSMDFKSNSAVAWSNKSDFACANAFNNSIIPEDTFFPSPESSDSTDHVKPKETENTKQPSKSCHKPKAIVHTEKVNMMSLTVLGLRMLFAKTVAVNFLLTAKLFFL

SEQ ID NO: 15843 - protein, 865 aa, synthetic construct
MALPVTALLLPLALLLHAARPEVQLVESGGGLVQPGGSLRLSCAASGFSFSDFWMSWVRQAPGKGLEWVATISQAGSEKDYVDSVKGRFTISRDNAKKSLYLQMNSLRAEDTAVYYCASGVYSFDYRGQGTLVTVSSGTGGGGSGGGGSGGGGSEFDEIVLTQSPLSLPVTPGEPASISCRSSQSLLHSIGYNYLDWYLQKPGQSPQLLIYLGSNRASGVPDRFSGSGSGTDFTLKISRVEAEDVGVYYCMQALQTPLTFGGGTKVEIKRLEDLKNVFPPEVAVFEPSEAEISHTQKATLVCLATGFYPDHVELSWWVNGKEVHSGVCTDPQPLKEQPALNDSRYCLSSRLRVSATFWQNPRNHFRCQVQFYGLSENDEWTQDRAKPVTQIVSAEAWGRADDVIKIHWQEKKSNTILGSQEGNTMKTNDTYMKFSWLTVPEKSLDKEHRCIVRHENNKNGVDQEIIFPPIKTDVITMDPKDNCSKDANDTLLLQLTNTSAYYMYLLLLLKSVVYFAIITCCLLRRTAFCCNGEKSRAKRSGSGATNFSLLKQAGDVEENPGPTSMDWIWRILFLVGAATGAHSFEEVQLVESGGGVVQPGRSLRLSCAASGFTFRSYGMHWVRQAPGKGLEWVAVISYDGSNKYYTDSVNGRFTISRDNSKNTLYLQMNSLRAEDTAVYYCARGGGYYETSGPDYWGQGTLVTVSSTRIQNPDPAVYQLRDSKSSDKSVCLFTDFDSQTNVSQSKDSDVYITDKCVLDMRSMDFKSNSAVAWSNKSDFACANAFNNSIIPEDTFFPSPESSDSTDHVKPKETENTKQPSKSCHKPKAIVHTEKVNMMSLTVLGLRMLFAKTVAVNFLLTAKLFFL

SEQ ID NO: 15844 - protein, 863 aa, synthetic construct
MALPVTALLLPLALLLHAARPEVQLVESGGGLVQPGGSLRLSCAASGFSFSDFWMSWVRQAPGKGLEWVATISQAGSEKDYVDSVKGRFTISRDNAKKSLYLQMNSLRAEDTAVYYCASGVYSFDYRGQGTLVTVSSGTGGGGSGGGGSGGGGSEFDDVVMTQSPLSLPVTPGEPASISCRSSQSLLHSIGYNYLHWFLQKPGQSPQLLIYLGSNRASGVPDRFSGSGSGTDFTLKISRVEAEDVGVYYCMQALQTPPTFGQGTRLEIKRLEDLKNVFPPEVAVFEPSEAEISHTQKATLVCLATGFYPDHVELSWWVNGKEVHSGVCTDPQPLKEQPALNDSRYCLSSRLRVSATFWQNPRNHFRCQVQFYGLSENDEWTQDRAKPVTQIVSAEAWGRADDVIKIHWQEKKSNTILGSQEGNTMKTNDTYMKFSWLTVPEKSLDKEHRCIVRHENNKNGVDQEIIFPPIKTDVITMDPKDNCSKDANDTLLLQLTNTSAYYMYLLLLLKSVVYFAIITCCLLRRTAFCCNGEKSRAKRSGSGATNFSLLKQAGDVEENPGPTSMDWIWRILFLVGAATGAHSFEQLQLQESGPGLVKPSGTLSLTCAVSGGSISSSNWWSWVRQPPGKGLEWIGEIYHSGSTNYNPSLKSRVTISVDKSKNQFSLKLSSVTAADTAVYYCVGSPYGDYVLDYWGQGTLVTVSSTRIQNPDPAVYQLRDSKSSDKSVCLFTDFDSQTNVSQSKDSDVYITDKCVLDMRSMDFKSNSAVAWSNKSDFACANAFNNSIIPEDTFFPSPESSDSTDHVKPKETENTKQPSKSCHKPKAIVHTEKVNMMSLTVLGLRMLFAKTVAVNFLLTAKLFFL

SEQ ID NO: 15845 - protein, 861 aa, synthetic construct
MALPVTALLLPLALLLHAARPEVQLVESGGGLVQPGGSLRLSCAASGFSFSDFWMSWVRQAPGKGLEWVATISQAGSEKDYVDSVKGRFTISRDNAKKSLYLQMNSLRAEDTAVYYCASGVYSFDYRGQGTLVTVSSGTGGGGSGGGGSGGGGSEFDEIVLTQSPGTLSLSLGERATLSCRASQSISSSFLAWYQQKPGQAPKLLIYAASTRATGIPDRFSGSGSGTDFTLTISRLEPEDFAVYYCQQYGRSLSFGGGTKVEVKLEDLKNVFPPEVAVFEPSEAEISHTQKATLVCLATGFYPDHVELSWWVNGKEVHSGVCTDPQPLKEQPALNDSRYCLSSRLRVSATFWQNPRNHFRCQVQFYGLSENDEWTQDRAKPVTQIVSAEAWGRADDVIKIHWQEKKSNTILGSQEGNTMKTNDTYMKFSWLTVPEKSLDKEHRCIVRHENNKNGVDQEIIFPPIKTDVITMDPKDNCSKDANDTLLLQLTNTSAYYMYLLLLLKSVVYFAIITCCLLRRTAFCCNGEKSRAKRSGSGATNFSLLKQAGDVEENPGPTSMDWIWRILFLVGAATGAHSFEQVQLQQSGPGLVKPSQTLSLTCAISGDSVSGNSATWNWIRQSPSRGLEWLGRTYYRSKWNHDYAESVKSRITINPDTSKNQFSLQLNSVTPEDTAVYYCARGDSSSWYAFDYWGQGTLVTVSSTRIQNPDPAVYQLRDSKSSDKSVCLFTDFDSQTNVSQSKDSDVYITDKCVLDMRSMDFKSNSAVAWSNKSDFACANAFNNSIIPEDTFFPSPESSDSTDHVKPKETENTKQPSKSCHKPKAIVHTEKVNMMSLTVLGLRMLFAKTVAVNFLLTAKLFFL

SEQ ID NO: 15846 - protein, 860 aa, synthetic construct
MALPVTALLLPLALLLHAARPEVQLVESGGGLVQPGGSLRLSCAASGFSFSDFWMSWVRQAPGKGLEWVATISQAGSEKDYVDSVKGRFTISRDNAKKSLYLQMNSLRAEDTAVYYCASGVYSFDYRGQGTLVTVSSGTGGGGSGGGGSGGGGSEFDQSVVTQPPSVSVAPGKTARITCGRNNIGSKSVHWYQQKPGQAPVLVVYDDSDRPSGIPERFSGSNSGNTATLTISRVEAGDEADYYCQVWDSSSDHVVFGGGTKLTVLGLEDLKNVFPPEVAVFEPSEAEISHTQKATLVCLATGFYPDHVELSWWVNGKEVHSGVCTDPQPLKEQPALNDSRYCLSSRLRVSATFWQNPRNHFRCQVQFYGLSENDEWTQDRAKPVTQIVSAEAWGRADDVIKIHWQEKKSNTILGSQEGNTMKTNDTYMKFSWLTVPEKSLDKEHRCIVRHENNKNGVDQEIIFPPIKTDVITMDPKDNCSKDANDTLLLQLTNTSAYYMYLLLLLKSVVYFAIITCCLLRRTAFCCNGEKSRAKRSGSGATNFSLLKQAGDVEENPGPTSMDWIWRILFLVGAATGAHSFEVQLVQSGGGVMRPGGSLRLSCAASGFTFDDYGMSWVRQAPGKGLEWVSGINWNGGSTGYADSVRGRFTISRDNAKNSLYLQMNSLRAEDTALYYCARERGYGYHDPHDYWGQGTLVTVSSTRIQNPDPAVYQLRDSKSSDKSVCLFTDFDSQTNVSQSKDSDVYITDKCVLDMRSMDFKSNSAVAWSNKSDFACANAFNNSIIPEDTFFPSPESSDSTDHVKPKETENTKQPSKSCHKPKAIVHTEKVNMMSLTVLGLRMLFAKTVAVNFLLTAKLFFL

SEQ ID NO: 15847 - protein, 873 aa, synthetic construct
MALPVTALLLPLALLLHAARPEVQLVESGGGLVQPGGSLRLSCAASGFSFSDFWMSWVRQAPGKGLEWVATISQAGSEKDYVDSVKGRFTISRDNAKKSLYLQMNSLRAEDTAVYYCASGVYSFDYRGQGTLVTVSSGTGGGGSGGGGSGGGGSEFEQKLISEEDLEFQAVVTQPPSASGTPGQRVTISCSGSSSNIGSNTVNWYQQVPGTAPKLLIYSNNQRPSGVPDRFSGSKSGTSASLAISGLQSEDEADYYCAAWDDSLNGWVFGGGTKLTVLLEDLKNVFPPEVAVFEPSEAEISHTQKATLVCLATGFYPDHVELSWWVNGKEVHSGVCTDPQPLKEQPALNDSRYCLSSRLRVSATFWQNPRNHFRCQVQFYGLSENDEWTQDRAKPVTQIVSAEAWGRADDVIKIHWQEKKSNTILGSQEGNTMKTNDTYMKFSWLTVPEKSLDKEHRCIVRHENNKNGVDQEIIFPPIKTDVITMDPKDNCSKDANDTLLLQLTNTSAYYMYLLLLLKSVVYFAIITCCLLRRTAFCCNGEKSRAKRSGSGATNFSLLKQAGDVEENPGPTSMDWIWRILFLVGAATGAHSFEQMQLVQSGAEVKEPGESLRISCKGSGYSFTNFWISWVRQMPGKGLEWMGRVDPGYSYSTYSPSFQGHVTISADKSTSTAYLQWNSLKASDTAMYYCARVQYSGYYDWFDPWGQGTLVTVSSTRIQNPDPAVYQLRDSKSSDKSVCLFTDFDSQTNVSQSKDSDVYITDKCVLDMRSMDFKSNSAVAWSNKSDFACANAFNNSIIPEDTFFPSPESSDSTDHVKPKETENTKQPSKSCHKPKAIVHTEKVNMMSLTVLGLRMLFAKTVAVNFLLTAKLFFL

SEQ ID NO: 15848 - protein, 867 aa, synthetic construct
MALPVTALLLPLALLLHAARPEVQLVESGGGLVQPGGSLRLSCAASGFSFSDFWMSWVRQAPGKGLEWVATISQAGSEKDYVDSVKGRFTISRDNAKKSLYLQMNSLRAEDTAVYYCASGVYSFDYRGQGTLVTVSSGTGGGGSGGGGSGGGGSEFEQKLISEEDLEFDIQMTQSPSTLSASVGDRVTITCRASQNINKWLAWYQQRPGKAPQLLIYKASSLESGVPSRFSGSGSGTEYTLTISSLQPDDFATYYCQQYNSYATFGQGTKVEIKRLEDLKNVFPPEVAVFEPSEAEISHTQKATLVCLATGFYPDHVELSWWVNGKEVHSGVCTDPQPLKEQPALNDSRYCLSSRLRVSATFWQNPRNHFRCQVQFYGLSENDEWTQDRAKPVTQIVSAEAWGRADDVIKIHWQEKKSNTILGSQEGNTMKTNDTYMKFSWLTVPEKSLDKEHRCIVRHENNKNGVDQEIIFPPIKTDVITMDPKDNCSKDANDTLLLQLTNTSAYYMYLLLLLKSVVYFAIITCCLLRRTAFCCNGEKSRAKRSGSGATNFSLLKQAGDVEENPGPTSMDWIWRILFLVGAATGAHSFEQVQLVQSGAEVKKPGESLKISCKGSGYNFSNKWIGWVRQLPGRGLEWIAIIYPGYSDITYSPSFQGRVTISADTSINTAYLHWHSLKASDTAMYYCVRHTALAGFDYWGLGTLVTVSSTRIQNPDPAVYQLRDSKSSDKSVCLFTDFDSQTNVSQSKDSDVYITDKCVLDMRSMDFKSNSAVAWSNKSDFACANAFNNSIIPEDTFFPSPESSDSTDHVKPKETENTKQPSKSCHKPKAIVHTEKVNMMSLTVLGLRMLFAKTVAVNFLLTAKLFFL

SEQ ID NO: 15849 - protein, 858 aa, synthetic construct
MALPVTALLLPLALLLHAARPEVQLVESGGGLVQPGGSLRLSCAASGFSFSDFWMSWVRQAPGKGLEWVATISQAGSEKDYVDSVKGRFTISRDNAKKSLYLQMNSLRAEDTAVYYCASGVYSFDYRGQGTLVTVSSGTGGGGSGGGGSGGGGSEFIVLTQSPASLAVSLGQRATISCRASESVDNYGNTFMHWYQQKPGQPPKLLIYRASNLESGIPARFSGSGSRTDFTLTINPVEADDVATYYCQQSNEDPPTFGAGTKLELKLEDLKNVFPPEVAVFEPSEAEISHTQKATLVCLATGFYPDHVELSWWVNGKEVHSGVCTDPQPLKEQPALNDSRYCLSSRLRVSATFWQNPRNHFRCQVQFYGLSENDEWTQDRAKPVTQIVSAEAWGRADDVIKIHWQEKKSNTILGSQEGNTMKTNDTYMKFSWLTVPEKSLDKEHRCIVRHENNKNGVDQEIIFPPIKTDVITMDPKDNCSKDANDTLLLQLTNTSAYYMYLLLLLKSVVYFAIITCCLLRRTAFCCNGEKSRAKRSGSGATNFSLLKQAGDVEENPGPTSMDWIWRILFLVGAATGAHSFEQIQLVQSGPELKKPGETVKISCKASGYIFTNYGMNWVKQAPGKSFKWMGWINTYTGESTYSADFKGRFAFSLETSASTAYLHINDLKNEDTATYFCARSGGYDPMDYWGQGTSVTVSSTRIQNPDPAVYQLRDSKSSDKSVCLFTDFDSQTNVSQSKDSDVYITDKCVLDMRSMDFKSNSAVAWSNKSDFACANAFNNSIIPEDTFFPSPESSDSTDHVKPKETENTKQPSKSCHKPKAIVHTEKVNMMSLTVLGLRMLFAKTVAVNFLLTAKLFFL

SEQ ID NO: 15850 - protein, 857 aa, synthetic construct
MALPVTALLLPLALLLHAARPEVQLVESGGGLVQPGGSLRLSCAASGFSFSDFWMSWVRQAPGKGLEWVATISQAGSEKDYVDSVKGRFTISRDNAKKSLYLQMNSLRAEDTAVYYCASGVYSFDYRGQGTLVTVSSGTGGGGSGGGGSGGGGSEFEIVLTQSPGTLSLSPGERATLSCRASQSVSNTYLAWYHQRPGQAPRLLIYGASSRATGIPDRFSGSGSGTDFALTISSLEPEDFAVYYCQQYSNSWTFGQGTKVEIKRLEDLKNVFPPEVAVFEPSEAEISHTQKATLVCLATGFYPDHVELSWWVNGKEVHSGVCTDPQPLKEQPALNDSRYCLSSRLRVSATFWQNPRNHFRCQVQFYGLSENDEWTQDRAKPVTQIVSAEAWGRADDVIKIHWQEKKSNTILGSQEGNTMKTNDTYMKFSWLTVPEKSLDKEHRCIVRHENNKNGVDQEIIFPPIKTDVITMDPKDNCSKDANDTLLLQLTNTSAYYMYLLLLLKSVVYFAIITCCLLRRTAFCCNGEKSRAKRSGSGATNFSLLKQAGDVEENPGPTSMDWIWRILFLVGAATGAHSFEQVQLVESGGGVVQPGRSLRLSCAASGFTFSSYDMHWVRQAPGKGLEWVAVISYDGTNEYYADSVKGRFTISRDTSKNTLYLQMNSLRAEDTAVYYCARERYFDWSFDYWGQGTLVSVSSTRIQNPDPAVYQLRDSKSSDKSVCLFTDFDSQTNVSQSKDSDVYITDKCVLDMRSMDFKSNSAVAWSNKSDFACANAFNNSIIPEDTFFPSPESSDSTDHVKPKETENTKQPSKSCHKPKAIVHTEKVNMMSLTVLGLRMLFAKTVAVNFLLTAKLFFL

SEQ ID NO: 15851 - protein, 856 aa, synthetic construct
MALPVTALLLPLALLLHAARPEVQLVESGGGLVQPGGSLRLSCAASGFSFSDFWMSWVRQAPGKGLEWVATISQAGSEKDYVDSVKGRFTISRDNAKKSLYLQMNSLRAEDTAVYYCASGVYSFDYRGQGTLVTVSSGTGGGGSGGGGSGGGGSEFELTQDPAVSVALGQTVRITCQGDSLRSNYANWYQQKPGQAPVLVIYGQNNRPSGIPDRFSGSSSGNTASLTITGAQAADEADYYCDSRVSTGNHVVFGGGTKLTVLGQLEDLKNVFPPEVAVFEPSEAEISHTQKATLVCLATGFYPDHVELSWWVNGKEVHSGVCTDPQPLKEQPALNDSRYCLSSRLRVSATFWQNPRNHFRCQVQFYGLSENDEWTQDRAKPVTQIVSAEAWGRADDVIKIHWQEKKSNTILGSQEGNTMKTNDTYMKFSWLTVPEKSLDKEHRCIVRHENNKNGVDQEIIFPPIKTDVITMDPKDNCSKDANDTLLLQLTNTSAYYMYLLLLLKSVVYFAIITCCLLRRTAFCCNGEKSRAKRSGSGATNFSLLKQAGDVEENPGPTSMDWIWRILFLVGAATGAHSFEEVQLVQSGAEVKKPGASVKVSCKASGYTFTSYAMHWVRQAPGQRLEWMGWINAGNGNTKYSQKFQGRVTITRDTSASTAYMELSSLRSEDTAVYYCARDISYGSFDYWGQGTLVTVSSTRIQNPDPAVYQLRDSKSSDKSVCLFTDFDSQTNVSQSKDSDVYITDKCVLDMRSMDFKSNSAVAWSNKSDFACANAFNNSIIPEDTFFPSPESSDSTDHVKPKETENTKQPSKSCHKPKAIVHTEKVNMMSLTVLGLRMLFAKTVAVNFLLTAKLFFL

SEQ ID NO: 15852 - protein, 858 aa, synthetic construct
MALPVTALLLPLALLLHAARPEVQLVESGGGLVQPGGSLRLSCAASGFSFSDFWMSWVRQAPGKGLEWVATISQAGSEKDYVDSVKGRFTISRDNAKKSLYLQMNSLRAEDTAVYYCASGVYSFDYRGQGTLVTVSSGTGGGGSGGGGSGGGGSEFDIVLTQTPATLSVTPGDSVSLSCRASQSISNNLHWYQQKSHESPRLLIKNASQSISGIPSKFSGSGSGTDFTLRINSVETEDFGMYFCQQSNSWPYTFGSGTKLEIKLEDLKNVFPPEVAVFEPSEAEISHTQKATLVCLATGFYPDHVELSWWVNGKEVHSGVCTDPQPLKEQPALNDSRYCLSSRLRVSATFWQNPRNHFRCQVQFYGLSENDEWTQDRAKPVTQIVSAEAWGRADDVIKIHWQEKKSNTILGSQEGNTMKTNDTYMKFSWLTVPEKSLDKEHRCIVRHENNKNGVDQEIIFPPIKTDVITMDPKDNCSKDANDTLLLQLTNTSAYYMYLLLLLKSVVYFAIITCCLLRRTAFCCNGEKSRAKRSGSGATNFSLLKQAGDVEENPGPTSMDWIWRILFLVGAATGAHSFEQVKLQQSGPELVKPGASVKISCKASGYSFTGYYMHWVKQSHGNILDWIGYIYPYNGVSSYNQKFKGKATLTVDKSSSTAYMELRSLTSEDSAVYYCARERGLYQLRAMDYWGQGTSVTVSSTRIQNPDPAVYQLRDSKSSDKSVCLFTDFDSQTNVSQSKDSDVYITDKCVLDMRSMDFKSNSAVAWSNKSDFACANAFNNSIIPEDTFFPSPESSDSTDHVKPKETENTKQPSKSCHKPKAIVHTEKVNMMSLTVLGLRMLFAKTVAVNFLLTAKLFFL

SEQ ID NO: 15853 - protein, 849 aa, synthetic construct
MALPVTALLLPLALLLHAARPEVQLVESGGGLVQPGGSLRLSCAASGFSFSDFWMSWVRQAPGKGLEWVATISQAGSEKDYVDSVKGRFTISRDNAKKSLYLQMNSLRAEDTAVYYCASGVYSFDYRGQGTLVTVSSGTGGGGSGGGGSGGGGSEFDIVMTQTPAIMSASPGQKVTITCSASSSVNYMHWYQQKLGSSPKLWIYDTSKLAPGVPARFSGSGSGTSYSLTISSMEAEDAASYFCHQWSSYPYTFGSGTKLEIKLEDLKNVFPPEVAVFEPSEAEISHTQKATLVCLATGFYPDHVELSWWVNGKEVHSGVCTDPQPLKEQPALNDSRYCLSSRLRVSATFWQNPRNHFRCQVQFYGLSENDEWTQDRAKPVTQIVSAEAWGRADDVIKIHWQEKKSNTILGSQEGNTMKTNDTYMKFSWLTVPEKSLDKEHRCIVRHENNKNGVDQEIIFPPIKTDVITMDPKDNCSKDANDTLLLQLTNTSAYYMYLLLLLKSVVYFAIITCCLLRRTAFCCNGEKSRAKRSGSGATNFSLLKQAGDVEENPGPTSMDWIWRILFLVGAATGAHSFEEVQLQESGPDLVKPSQSLSLTCTVTGYSITSGYGWHWIRQFPGNKLEWMGYIHYSGSTTYNPSLKSRISISRDTSKNQFFLQLNSVTTEDTATYYCARSLRYWGQGTTLTVSSTRIQNPDPAVYQLRDSKSSDKSVCLFTDFDSQTNVSQSKDSDVYITDKCVLDMRSMDFKSNSAVAWSNKSDFACANAFNNSIIPEDTFFPSPESSDSTDHVKPKETENTKQPSKSCHKPKAIVHTEKVNMMSLTVLGLRMLFAKTVAVNFLLTAKLFFL

SEQ ID NO: 15854 - protein, 852 aa, synthetic construct
MALPVTALLLPLALLLHAARPEVQLVESGGGLVQPGGSLRLSCAASGFSFSDFWMSWVRQAPGKGLEWVATISQAGSEKDYVDSVKGRFTISRDNAKKSLYLQMNSLRAEDTAVYYCASGVYSFDYRGQGTLVTVSSGTGGGGSGGGGSGGGGSEFDIQMTQSPSSLSASVGDRVTITCSATSSISYMHWYQQKPGKAPKGWIYDTSKLAHGVPSRFSGSGSGTDFTLTISSLQPEDFATYYCHQRRSYPFTFGQGTKVEIKLEDLKNVFPPEVAVFEPSEAEISHTQKATLVCLATGFYPDHVELSWWVNGKEVHSGVCTDPQPLKEQPALNDSRYCLSSRLRVSATFWQNPRNHFRCQVQFYGLSENDEWTQDRAKPVTQIVSAEAWGRADDVIKIHWQEKKSNTILGSQEGNTMKTNDTYMKFSWLTVPEKSLDKEHRCIVRHENNKNGVDQEIIFPPIKTDVITMDPKDNCSKDANDTLLLQLTNTSAYYMYLLLLLKSVVYFAIITCCLLRRTAFCCNGEKSRAKRSGSGATNFSLLKQAGDVEENPGPTSMDWIWRILFLVGAATGAHSFEEVQLVQSGAEVKKPGASVKVSCKASGYTFTNFWIHWVRQAPGQGLEWIGEIDPSDSYTNYNQKFKGRVTITRDTSTSTAYLELSSLRSEDTAVYYCAREITTVDYWGQGTLVTVSSTRIQNPDPAVYQLRDSKSSDKSVCLFTDFDSQTNVSQSKDSDVYITDKCVLDMRSMDFKSNSAVAWSNKSDFACANAFNNSIIPEDTFFPSPESSDSTDHVKPKETENTKQPSKSCHKPKAIVHTEKVNMMSLTVLGLRMLFAKTVAVNFLLTAKLFFL

SEQ ID NO: 15855 - protein, 859 aa, synthetic construct
MALPVTALLLPLALLLHAARPEVQLVESGGGLVQPGGSLRLSCAASGFSFSDFWMSWVRQAPGKGLEWVATISQAGSEKDYVDSVKGRFTISRDNAKKSLYLQMNSLRAEDTAVYYCASGVYSFDYRGQGTLVTVSSGTGGGGSGGGGSGGGGSEFDIQMTQSPSSLSASVGDRVTITCKASQGFNKYVAWYQQKPGKAPKLLIYYTSTLQPGVPSRFSGSGSGRDYTLTISSLQPEDFATYYCLQYGNLLYAFGQGTKVEIKRLEDLKNVFPPEVAVFEPSEAEISHTQKATLVCLATGFYPDHVELSWWVNGKEVHSGVCTDPQPLKEQPALNDSRYCLSSRLRVSATFWQNPRNHFRCQVQFYGLSENDEWTQDRAKPVTQIVSAEAWGRADDVIKIHWQEKKSNTILGSQEGNTMKTNDTYMKFSWLTVPEKSLDKEHRCIVRHENNKNGVDQEIIFPPIKTDVITMDPKDNCSKDANDTLLLQLTNTSAYYMYLLLLLKSVVYFAIITCCLLRRTAFCCNGEKSRAKRSGSGATNFSLLKQAGDVEENPGPTSMDWIWRILFLVGAATGAHSFEEVQLVQSGAEVKKPGASVKVSCKASGYTFTSYWIGWVRQAPGQGLEWIGDIYPGGGYTNYNEKFKGRVTITRDTSTSTAYLELSSLRSEDTAVYYCARLDGSSYRGAMDSWGQGTLVTVSSTRIQNPDPAVYQLRDSKSSDKSVCLFTDFDSQTNVSQSKDSDVYITDKCVLDMRSMDFKSNSAVAWSNKSDFACANAFNNSIIPEDTFFPSPESSDSTDHVKPKETENTKQPSKSCHKPKAIVHTEKVNMMSLTVLGLRMLFAKTVAVNFLLTAKLFFL

SEQ ID NO: 15856 - protein, 855 aa, synthetic construct
MALPVTALLLPLALLLHAARPEVQLVESGGGLVQPGGSLRLSCAASGFSFSDFWMSWVRQAPGKGLEWVATISQAGSEKDYVDSVKGRFTISRDNAKKSLYLQMNSLRAEDTAVYYCASGVYSFDYRGQGTLVTVSSGTGGGGSGGGGSGGGGSEFDIQMTQSPSSLSASVGDRVTITCRASQDIRYYLNWYQQKPGKAPKLLIYVASSLQSGVPSRFSGSGSGTEFTLTVSSLQPEDFATYYCLQVYSTPRTFGQGTKVEIKLEDLKNVFPPEVAVFEPSEAEISHTQKATLVCLATGFYPDHVELSWWVNGKEVHSGVCTDPQPLKEQPALNDSRYCLSSRLRVSATFWQNPRNHFRCQVQFYGLSENDEWTQDRAKPVTQIVSAEAWGRADDVIKIHWQEKKSNTILGSQEGNTMKTNDTYMKFSWLTVPEKSLDKEHRCIVRHENNKNGVDQEIIFPPIKTDVITMDPKDNCSKDANDTLLLQLTNTSAYYMYLLLLLKSVVYFAIITCCLLRRTAFCCNGEKSRAKRSGSGATNFSLLKQAGDVEENPGPTSMDWIWRILFLVGAATGAHSFEEVQLVESGGGLAKPGGSLRLSCAASGFRFTFNNYYMDWVRQAPGQGLEWVSRISSSGDPTWYADSVKGRFTISRENAKNTLFLQMNSLRAEDTAVYYCASLTTGSDSWGQGVLVTVSSTRIQNPDPAVYQLRDSKSSDKSVCLFTDFDSQTNVSQSKDSDVYITDKCVLDMRSMDFKSNSAVAWSNKSDFACANAFNNSIIPEDTFFPSPESSDSTDHVKPKETENTKQPSKSCHKPKAIVHTEKVNMMSLTVLGLRMLFAKTVAVNFLLTAKLFFL

SEQ ID NO: 15857 - protein, 856 aa, synthetic construct
MALPVTALLLPLALLLHAARPEVQLVESGGGLVQPGGSLRLSCAASGFSFSDFWMSWVRQAPGKGLEWVATISQAGSEKDYVDSVKGRFTISRDNAKKSLYLQMNSLRAEDTAVYYCASGVYSFDYRGQGTLVTVSSGTGGGGSGGGGSGGGGSEFEIVMTQSPATLSVSPGERATLSCRASQSVSRNLAWYQQKPGQAPRLLIYGASTRATGIPARFSGSGSGTEFTLTIGSLQSEDFAVYYCQQYKTWPRTFGQGTNVEIKLEDLKNVFPPEVAVFEPSEAEISHTQKATLVCLATGFYPDHVELSWWVNGKEVHSGVCTDPQPLKEQPALNDSRYCLSSRLRVSATFWQNPRNHFRCQVQFYGLSENDEWTQDRAKPVTQIVSAEAWGRADDVIKIHWQEKKSNTILGSQEGNTMKTNDTYMKFSWLTVPEKSLDKEHRCIVRHENNKNGVDQEIIFPPIKTDVITMDPKDNCSKDANDTLLLQLTNTSAYYMYLLLLLKSVVYFAIITCCLLRRTAFCCNGEKSRAKRSGSGATNFSLLKQAGDVEENPGPTSMDWIWRILFLVGAATGAHSFEQVQLQQWGAGLLKPSETLSLTCAVFGGSFSGYYWSWIRQPPGKGLEWIGEINHRGNTNDNPSLKSRVTISVDTSKNQFALKLSSVTAADTAVYYCARERGYTYGNFDHWGQGTLVTVSSTRIQNPDPAVYQLRDSKSSDKSVCLFTDFDSQTNVSQSKDSDVYITDKCVLDMRSMDFKSNSAVAWSNKSDFACANAFNNSIIPEDTFFPSPESSDSTDHVKPKETENTKQPSKSCHKPKAIVHTEKVNMMSLTVLGLRMLFAKTVAVNFLLTAKLFFL

SEQ ID NO: 15858 - protein, 857 aa, synthetic construct
MALPVTALLLPLALLLHAARPEVQLVESGGGLVQPGGSLRLSCAASGFSFSDFWMSWVRQAPGKGLEWVATISQAGSEKDYVDSVKGRFTISRDNAKKSLYLQMNSLRAEDTAVYYCASGVYSFDYRGQGTLVTVSSGTGGGGSGGGGSGGGGSEFEIVMTPSSATLSVSPGERATLSCRASQSVSRNLAWYQQKPGQAPRLLIYGASTRATGIPARFSGSGSGTEFTLTISSLQSEDFAVYYCHQYSNWMCSFGQGTKLEIKLEDLKNVFPPEVAVFEPSEAEISHTQKATLVCLATGFYPDHVELSWWVNGKEVHSGVCTDPQPLKEQPALNDSRYCLSSRLRVSATFWQNPRNHFRCQVQFYGLSENDEWTQDRAKPVTQIVSAEAWGRADDVIKIHWQEKKSNTILGSQEGNTMKTNDTYMKFSWLTVPEKSLDKEHRCIVRHENNKNGVDQEIIFPPIKTDVITMDPKDNCSKDANDTLLLQLTNTSAYYMYLLLLLKSVVYFAIITCCLLRRTAFCCNGEKSRAKRSGSGATNFSLLKQAGDVEENPGPTSMDWIWRILFLVGAATGAHSFEEVQLLESGGGLVQPGGSLRLSCAASGFTFSRYAMNWVRQAPGKGLEWVSGISGSGGRTYYADSVKGRFTISRDNSKNTLYLQMNSLRAEDTAVYYCAKDRDFWSGPFDYWGQGTLVTVSSTRIQNPDPAVYQLRDSKSSDKSVCLFTDFDSQTNVSQSKDSDVYITDKCVLDMRSMDFKSNSAVAWSNKSDFACANAFNNSIIPEDTFFPSPESSDSTDHVKPKETENTKQPSKSCHKPKAIVHTEKVNMMSLTVLGLRMLFAKTVAVNFLLTAKLFFL

SEQ ID NO: 15859 - protein, 862 aa, synthetic construct
MALPVTALLLPLALLLHAARPEVQLVESGGGLVQPGGSLRLSCAASGFSFSDFWMSWVRQAPGKGLEWVATISQAGSEKDYVDSVKGRFTISRDNAKKSLYLQMNSLRAEDTAVYYCASGVYSFDYRGQGTLVTVSSGTGGGGSGGGGSGGGGSEFDIQMTQSPSSLSASVGDRVTITCKASKNIRSYLAWYQQKPGKAPKLLIYSGSTLHSGVPSRFSGSGSGTDFTLTISSLQPEDFATYYCQQHHEYPLTFGQGTKVEIKRLEDLKNVFPPEVAVFEPSEAEISHTQKATLVCLATGFYPDHVELSWWVNGKEVHSGVCTDPQPLKEQPALNDSRYCLSSRLRVSATFWQNPRNHFRCQVQFYGLSENDEWTQDRAKPVTQIVSAEAWGRADDVIKIHWQEKKSNTILGSQEGNTMKTNDTYMKFSWLTVPEKSLDKEHRCIVRHENNKNGVDQEIIFPPIKTDVITMDPKDNCSKDANDTLLLQLTNTSAYYMYLLLLLKSVVYFAIITCCLLRRTAFCCNGEKSRAKRSGSGATNFSLLKQAGDVEENPGPTSMDWIWRILFLVGAATGAHSFEQVQLQESGPGLVKPSETLSLTCTVSGYTITSGYDWSWIRQPPGKGLEWIGYINYGGSTNYKPSLGSRVTISVDTSKNQFSLKLSSVTAADTAVYYCARYNEYKSYIYDWYFDFWGQGTLVTVSSTRIQNPDPAVYQLRDSKSSDKSVCLFTDFDSQTNVSQSKDSDVYITDKCVLDMRSMDFKSNSAVAWSNKSDFACANAFNNSIIPEDTFFPSPESSDSTDHVKPKETENTKQPSKSCHKPKAIVHTEKVNMMSLTVLGLRMLFAKTVAVNFLLTAKLFFL

SEQ ID NO: 15860 - protein, 864 aa, synthetic construct
MALPVTALLLPLALLLHAARPEVQLVESGGGLVQPGGSLRLSCAASGFSFSDFWMSWVRQAPGKGLEWVATISQAGSEKDYVDSVKGRFTISRDNAKKSLYLQMNSLRAEDTAVYYCASGVYSFDYRGQGTLVTVSSGTGGGGSGGGGSGGGGSEFQSVVTQPPSVSAAPGQKVTISCSGSSSNIGNNYVSWYQQLPGTAPKLLIYDNNKRPSGIPDRFSGSKSGTSATLGITGLQTGDEADYYCGTWDGSLYTMLFGGGTKLTVLLEDLKNVFPPEVAVFEPSEAEISHTQKATLVCLATGFYPDHVELSWWVNGKEVHSGVCTDPQPLKEQPALNDSRYCLSSRLRVSATFWQNPRNHFRCQVQFYGLSENDEWTQDRAKPVTQIVSAEAWGRADDVIKIHWQEKKSNTILGSQEGNTMKTNDTYMKFSWLTVPEKSLDKEHRCIVRHENNKNGVDQEIIFPPIKTDVITMDPKDNCSKDANDTLLLQLTNTSAYYMYLLLLLKSVVYFAIITCCLLRRTAFCCNGEKSRAKRSGSGATNFSLLKQAGDVEENPGPTSMDWIWRILFLVGAATGAHSFEEVQLVESGGGLVKPGGSLRLSCAASGFTFSNAWMSWVRQAPGKGLEWVGFIRSKAYGGTTEYAASVKGRFTISRDDSKSIAYLQMNNLKTEDTAVYYCARDGLYSSSWYDSDYWGQGTLVTVSSTRIQNPDPAVYQLRDSKSSDKSVCLFTDFDSQTNVSQSKDSDVYITDKCVLDMRSMDFKSNSAVAWSNKSDFACANAFNNSIIPEDTFFPSPESSDSTDHVKPKETENTKQPSKSCHKPKAIVHTEKVNMMSLTVLGLRMLFAKTVAVNFLLTAKLFFL

SEQ ID NO: 15861 - protein, 869 aa, synthetic construct
MALPVTALLLPLALLLHAARPEVQLVESGGGLVQPGGSLRLSCAASGFSFSDFWMSWVRQAPGKGLEWVATISQAGSEKDYVDSVKGRFTISRDNAKKSLYLQMNSLRAEDTAVYYCASGVYSFDYRGQGTLVTVSSGTGGGGSGGGGSGGGGSEFQSVLTQPPSVSGAPGQRVTISCTGSSSNIGAGYDVHWYQQLPGTAPKLLIFGNSNRPSGVPDRFSGFKSGTSASLAITGLQAEDEADYFCQSYDSSLSGSGVFGTGTKVTVLGLEDLKNVFPPEVAVFEPSEAEISHTQKATLVCLATGFYPDHVELSWWVNGKEVHSGVCTDPQPLKEQPALNDSRYCLSSRLRVSATFWQNPRNHFRCQVQFYGLSENDEWTQDRAKPVTQIVSAEAWGRADDVIKIHWQEKKSNTILGSQEGNTMKTNDTYMKFSWLTVPEKSLDKEHRCIVRHENNKNGVDQEIIFPPIKTDVITMDPKDNCSKDANDTLLLQLTNTSAYYMYLLLLLKSVVYFAIITCCLLRRTAFCCNGEKSRAKRSGSGATNFSLLKQAGDVEENPGPTSMDWIWRILFLVGAATGAHSFEQMQLVQSGGGLVQPGRSLRLSCAASGFTFDDYAMHWVRQAPGKGLEWVSGISWNSGSIGYADSVKGRFTISRDNAKNSLYLQMNSLRAEDTALYYCAKDIHSGSYYGLLYYAMDVWGQGTTVTVSSTRIQNPDPAVYQLRDSKSSDKSVCLFTDFDSQTNVSQSKDSDVYITDKCVLDMRSMDFKSNSAVAWSNKSDFACANAFNNSIIPEDTFFPSPESSDSTDHVKPKETENTKQPSKSCHKPKAIVHTEKVNMMSLTVLGLRMLFAKTVAVNFLLTAKLFFL

SEQ ID NO: 15862 - protein, 869 aa, synthetic construct
MALPVTALLLPLALLLHAARPEVQLVESGGGLVQPGGSLRLSCAASGFSFSDFWMSWVRQAPGKGLEWVATISQAGSEKDYVDSVKGRFTISRDNAKKSLYLQMNSLRAEDTAVYYCASGVYSFDYRGQGTLVTVSSGTGGGGSGGGGSGGGGSEFLPVLTQPPSASGTPGQRVTISCSGRSSNIGSNSVNWYRQLPGAAPKLLIYSNNQRPPGVPVRFSGSKSGTSASLAISGLQSEDEATYYCATWDDNLNVHYVFGTGTKVTVLGSRLEDLKNVFPPEVAVFEPSEAEISHTQKATLVCLATGFYPDHVELSWWVNGKEVHSGVCTDPQPLKEQPALNDSRYCLSSRLRVSATFWQNPRNHFRCQVQFYGLSENDEWTQDRAKPVTQIVSAEAWGRADDVIKIHWQEKKSNTILGSQEGNTMKTNDTYMKFSWLTVPEKSLDKEHRCIVRHENNKNGVDQEIIFPPIKTDVITMDPKDNCSKDANDTLLLQLTNTSAYYMYLLLLLKSVVYFAIITCCLLRRTAFCCNGEKSRAKRSGSGATNFSLLKQAGDVEENPGPTSMDWIWRILFLVGAATGAHSFELEMAQVQLVQSGAEVKKPGSSVKVSCKASGGTFSSYAISWVRQAPGQGLEWMGRIIPILGIANYAQKFQGRVTITADKSTSTAYMELSSLRSEDTAVYYCARGGYYSHDMWSEDWGQGTLVTVSSTRIQNPDPAVYQLRDSKSSDKSVCLFTDFDSQTNVSQSKDSDVYITDKCVLDMRSMDFKSNSAVAWSNKSDFACANAFNNSIIPEDTFFPSPESSDSTDHVKPKETENTKQPSKSCHKPKAIVHTEKVNMMSLTVLGLRMLFAKTVAVNFLLTAKLFFL

SEQ ID NO: 15863 - protein, 863 aa, synthetic construct
MALPVTALLLPLALLLHAARPEVQLVESGGGLVQPGGSLRLSCAASGFSFSDFWMSWVRQAPGKGLEWVATISQAGSEKDYVDSVKGRFTISRDNAKKSLYLQMNSLRAEDTAVYYCASGVYSFDYRGQGTLVTVSSGTGGGGSGGGGSGGGGSEFDFVMTQSPDSLAVSLGERVTMSCKSSQSLLNSGNQKNYLTWYQQKPGQPPKLLIYWASTRESGVPDRFSGSGSGTDFTLTISSLQAEDVAVYYCQNDYSYPYTFGQGTKLEIKLEDLKNVFPPEVAVFEPSEAEISHTQKATLVCLATGFYPDHVELSWWVNGKEVHSGVCTDPQPLKEQPALNDSRYCLSSRLRVSATFWQNPRNHFRCQVQFYGLSENDEWTQDRAKPVTQIVSAEAWGRADDVIKIHWQEKKSNTILGSQEGNTMKTNDTYMKFSWLTVPEKSLDKEHRCIVRHENNKNGVDQEIIFPPIKTDVITMDPKDNCSKDANDTLLLQLTNTSAYYMYLLLLLKSVVYFAIITCCLLRRTAFCCNGEKSRAKRSGSGATNFSLLKQAGDVEENPGPTSMDWIWRILFLVGAATGAHSFEEVQLVQSGAELKKPGASVKVSCKASGYTFTDYYMKWVRQAPGQGLEWIGDIIPSNGATFYNQKFKGRVTITVDKSTSTAYMELSSLRSEDTAVYYCARSHLLRASWFAYWGQGTLVTVSSTRIQNPDPAVYQLRDSKSSDKSVCLFTDFDSQTNVSQSKDSDVYITDKCVLDMRSMDFKSNSAVAWSNKSDFACANAFNNSIIPEDTFFPSPESSDSTDHVKPKETENTKQPSKSCHKPKAIVHTEKVNMMSLTVLGLRMLFAKTVAVNFLLTAKLFFL

SEQ ID NO: 15864 - protein, 863 aa, synthetic construct
MALPVTALLLPLALLLHAARPEVQLVESGGGLVQPGGSLRLSCAASGFSFSDFWMSWVRQAPGKGLEWVATISQAGSEKDYVDSVKGRFTISRDNAKKSLYLQMNSLRAEDTAVYYCASGVYSFDYRGQGTLVTVSSGTGGGGSGGGGSGGGGSEFDFVMTQSPDSLAVSLGERVTMSCKSSQSLLNSGNQKNYLTWYQQKPGQPPKLLIYWASTRESGVPDRFSGSGSGTDFTLTISSLQAEDVAVYYCQNDYSYPYTFGQGTKLEIKLEDLKNVFPPEVAVFEPSEAEISHTQKATLVCLATGFYPDHVELSWWVNGKEVHSGVCTDPQPLKEQPALNDSRYCLSSRLRVSATFWQNPRNHFRCQVQFYGLSENDEWTQDRAKPVTQIVSAEAWGRADDVIKIHWQEKKSNTILGSQEGNTMKTNDTYMKFSWLTVPEKSLDKEHRCIVRHENNKNGVDQEIIFPPIKTDVITMDPKDNCSKDANDTLLLQLTNTSAYYMYLLLLLKSVVYFAIITCCLLRRTAFCCNGEKSRAKRSGSGATNFSLLKQAGDVEENPGPTSMDWIWRILFLVGAATGAHSFEQVQLVQSGAELKKPGASVKVSCKASGYTFTDYYMKWVRQAPGQGLEWIGDIIPSNGATFYNQKFKGRVTITVDKSTSTAYMELSSLRSEDTAVYYCARSHLLRASWFAYWGQGTLVTVSSTRIQNPDPAVYQLRDSKSSDKSVCLFTDFDSQTNVSQSKDSDVYITDKCVLDMRSMDFKSNSAVAWSNKSDFACANAFNNSIIPEDTFFPSPESSDSTDHVKPKETENTKQPSKSCHKPKAIVHTEKVNMMSLTVLGLRMLFAKTVAVNFLLTAKLFFL

SEQ ID NO: 15865 - protein, 853 aa, synthetic construct
MALPVTALLLPLALLLHAARPEVQLVESGGGLVQPGGSLRLSCAASGFSFSDFWMSWVRQAPGKGLEWVATISQAGSEKDYVDSVKGRFTISRDNAKKSLYLQMNSLRAEDTAVYYCASGVYSFDYRGQGTLVTVSSGTGGGGSGGGGSGGGGSEFDVQITQSPSYLAASPGETITINCRASKSISKDLAWYQEKPGKTNKLLIYSGSTLQSGIPSRFSGSGSGTDFTLTISSLEPEDFAMYYCQQHNKYPYTFGGGTKLEIKRLEDLKNVFPPEVAVFEPSEAEISHTQKATLVCLATGFYPDHVELSWWVNGKEVHSGVCTDPQPLKEQPALNDSRYCLSSRLRVSATFWQNPRNHFRCQVQFYGLSENDEWTQDRAKPVTQIVSAEAWGRADDVIKIHWQEKKSNTILGSQEGNTMKTNDTYMKFSWLTVPEKSLDKEHRCIVRHENNKNGVDQEIIFPPIKTDVITMDPKDNCSKDANDTLLLQLTNTSAYYMYLLLLLKSVVYFAIITCCLLRRTAFCCNGEKSRAKRSGSGATNFSLLKQAGDVEENPGPTSMDWIWRILFLVGAATGAHSFEQVQLQQPGAELVRPGASVKLSCKASGYTFTSYWMNWVKQRPDQGLEWIGRIDPYDSETHYNQKFKDKAILTVDKSSSTAYMQLSSLTSEDSAVYYCARGNWDDYWGQGTTLTVSSTRIQNPDPAVYQLRDSKSSDKSVCLFTDFDSQTNVSQSKDSDVYITDKCVLDMRSMDFKSNSAVAWSNKSDFACANAFNNSIIPEDTFFPSPESSDSTDHVKPKETENTKQPSKSCHKPKAIVHTEKVNMMSLTVLGLRMLFAKTVAVNFLLTAKLFFL

SEQ ID NO: 15866 - protein, 855 aa, synthetic construct
MALPVTALLLPLALLLHAARPEVQLVESGGGLVQPGGSLRLSCAASGFSFSDFWMSWVRQAPGKGLEWVATISQAGSEKDYVDSVKGRFTISRDNAKKSLYLQMNSLRAEDTAVYYCASGVYSFDYRGQGTLVTVSSGTGGGGSGGGGSGGGGSEFEIVLTQSPTSMTASPGEQVTITCRASSSINYMHWYQQKPGASPRPWIYETSKLASGVPDRFSGSASGTSYSLTINNMEAEDAATYYCQQWNYPSWTFGGGTKLELKLEDLKNVFPPEVAVFEPSEAEISHTQKATLVCLATGFYPDHVELSWWVNGKEVHSGVCTDPQPLKEQPALNDSRYCLSSRLRVSATFWQNPRNHFRCQVQFYGLSENDEWTQDRAKPVTQIVSAEAWGRADDVIKIHWQEKKSNTILGSQEGNTMKTNDTYMKFSWLTVPEKSLDKEHRCIVRHENNKNGVDQEIIFPPIKTDVITMDPKDNCSKDANDTLLLQLTNTSAYYMYLLLLLKSVVYFAIITCCLLRRTAFCCNGEKSRAKRSGSGATNFSLLKQAGDVEENPGPTSMDWIWRILFLVGAATGAHSFEEVQLVESGGGLVQPGRSLKLSCAASGFTFSDYNMAWVRQAPKKGLEWVATILYDGGRTYYRGSVKGRFTISRDNAKSTLYLRMDSLRSEDTATYYCATHSRGTDYFDYWGQGVMVTVSSTRIQNPDPAVYQLRDSKSSDKSVCLFTDFDSQTNVSQSKDSDVYITDKCVLDMRSMDFKSNSAVAWSNKSDFACANAFNNSIIPEDTFFPSPESSDSTDHVKPKETENTKQPSKSCHKPKAIVHTEKVNMMSLTVLGLRMLFAKTVAVNFLLTAKLFFL

SEQ ID NO: 15867 - protein, 864 aa, synthetic construct
MALPVTALLLPLALLLHAARPEVQLVESGGGLVQPGGSLRLSCAASGFSFSDFWMSWVRQAPGKGLEWVATISQAGSEKDYVDSVKGRFTISRDNAKKSLYLQMNSLRAEDTAVYYCASGVYSFDYRGQGTLVTVSSGTGGGGSGGGGSGGGGSEFDIVMTQSPSSLAVSEGETVTINCKSSQSFLSSGDGKNYVAWYQYKPGQSPKLLIYWASTRQSGVPDRFIGSGSGTDFTLTISTVQAEDLAIYYCQQYYDTPLTFGSGTKLEIKLEDLKNVFPPEVAVFEPSEAEISHTQKATLVCLATGFYPDHVELSWWVNGKEVHSGVCTDPQPLKEQPALNDSRYCLSSRLRVSATFWQNPRNHFRCQVQFYGLSENDEWTQDRAKPVTQIVSAEAWGRADDVIKIHWQEKKSNTILGSQEGNTMKTNDTYMKFSWLTVPEKSLDKEHRCIVRHENNKNGVDQEIIFPPIKTDVITMDPKDNCSKDANDTLLLQLTNTSAYYMYLLLLLKSVVYFAIITCCLLRRTAFCCNGEKSRAKRSGSGATNFSLLKQAGDVEENPGPTSMDWIWRILFLVGAATGAHSFEEVKLQESGPSLVQSSQTLSLTCTVSGFSLTSYHIHWVRQTPGKGLEWMGVMWSDGDTSYNSALKSRLSISRDTSQSQVFLKMNSLQTEDTATYYCARGYYSSYLYLWFAYWGQGTLVTVSSTRIQNPDPAVYQLRDSKSSDKSVCLFTDFDSQTNVSQSKDSDVYITDKCVLDMRSMDFKSNSAVAWSNKSDFACANAFNNSIIPEDTFFPSPESSDSTDHVKPKETENTKQPSKSCHKPKAIVHTEKVNMMSLTVLGLRMLFAKTVAVNFLLTAKLFFL

SEQ ID NO: 15868 - protein, 868 aa, synthetic construct
MALPVTALLLPLALLLHAARPEVQLVESGGGLVQPGGSLRLSCAASGFSFSDFWMSWVRQAPGKGLEWVATISQAGSEKDYVDSVKGRFTISRDNAKKSLYLQMNSLRAEDTAVYYCASGVYSFDYRGQGTLVTVSSGTGGGGSGGGGSGGGGSEFDVLMTQTPVSLPVSLGGQVSISCRSSQSLVHSDGDTYLHWYLQKPGQSPQLLIYRVSNRFSGVPDRFSGSGSGTDFTLKISRVEPEDLGLYYCLQTTHFPPWTFGGGTKLEMKLEDLKNVFPPEVAVFEPSEAEISHTQKATLVCLATGFYPDHVELSWWVNGKEVHSGVCTDPQPLKEQPALNDSRYCLSSRLRVSATFWQNPRNHFRCQVQFYGLSENDEWTQDRAKPVTQIVSAEAWGRADDVIKIHWQEKKSNTILGSQEGNTMKTNDTYMKFSWLTVPEKSLDKEHRCIVRHENNKNGVDQEIIFPPIKTDVITMDPKDNCSKDANDTLLLQLTNTSAYYMYLLLLLKSVVYFAIITCCLLRRTAFCCNGEKSRAKRSGSGATNFSLLKQAGDVEENPGPTSMDWIWRILFLVGAATGAHSFEQVQLQQSGPELRRPGSSVRLSCKASGYRIKDFLIHWIKNRPEHGLEWIGWIDPEDGETKYAQKFQTKATLTADTSSNTAYMQLSSLTSEDTATYFCARWGDVYYGLMRGHVMDAWGQGTSVTVSSTRIQNPDPAVYQLRDSKSSDKSVCLFTDFDSQTNVSQSKDSDVYITDKCVLDMRSMDFKSNSAVAWSNKSDFACANAFNNSIIPEDTFFPSPESSDSTDHVKPKETENTKQPSKSCHKPKAIVHTEKVNMMSLTVLGLRMLFAKTVAVNFLLTAKLFFL

SEQ ID NO: 15869 - protein, 863 aa, synthetic construct
MALPVTALLLPLALLLHAARPEVQLVESGGGLVQPGGSLRLSCAASGFSFSDFWMSWVRQAPGKGLEWVATISQAGSEKDYVDSVKGRFTISRDNAKKSLYLQMNSLRAEDTAVYYCASGVYSFDYRGQGTLVTVSSGTGGGGSGGGGSGGGGSEFDIVMTQSPATLSLSPGERATLSCRSSKSLQNVNGNTYLYWFQQKPGQSPQLLIYRMSNLNSGVPDRFSGSGSGTEFTLTISSLEPEDFAVYYCMQHLEYPITFGAGTKLEIKLEDLKNVFPPEVAVFEPSEAEISHTQKATLVCLATGFYPDHVELSWWVNGKEVHSGVCTDPQPLKEQPALNDSRYCLSSRLRVSATFWQNPRNHFRCQVQFYGLSENDEWTQDRAKPVTQIVSAEAWGRADDVIKIHWQEKKSNTILGSQEGNTMKTNDTYMKFSWLTVPEKSLDKEHRCIVRHENNKNGVDQEIIFPPIKTDVITMDPKDNCSKDANDTLLLQLTNTSAYYMYLLLLLKSVVYFAIITCCLLRRTAFCCNGEKSRAKRSGSGATNFSLLKQAGDVEENPGPTSMDWIWRILFLVGAATGAHSFEEVQLVESGGGLVKPGGSLKLSCAASGYTFTSYVMHWVRQAPGKGLEWIGYINPYNDGTKYNEKFQGRVTISSDKSISTAYMELSSLRSEDTAMYYCARGTYYYGTRVFDYWGQGTLVTVSSTRIQNPDPAVYQLRDSKSSDKSVCLFTDFDSQTNVSQSKDSDVYITDKCVLDMRSMDFKSNSAVAWSNKSDFACANAFNNSIIPEDTFFPSPESSDSTDHVKPKETENTKQPSKSCHKPKAIVHTEKVNMMSLTVLGLRMLFAKTVAVNFLLTAKLFFL

SEQ ID NO: 15870 - protein, 859 aa, synthetic construct
MALPVTALLLPLALLLHAARPEVQLVESGGGLVQPGGSLRLSCAASGFSFSDFWMSWVRQAPGKGLEWVATISQAGSEKDYVDSVKGRFTISRDNAKKSLYLQMNSLRAEDTAVYYCASGVYSFDYRGQGTLVTVSSGTGGGGSGGGGSGGGGSEFDIQMTQSPSSLSASVGDRVTITCKASDHINNWLAWYQQKPGQAPKLLIYGATTLETGVPSRFSGSGSGTDYTLTISSLQPEDFATYYCQQSWNTPWTFGQGTKLEIKRLEDLKNVFPPEVAVFEPSEAEISHTQKATLVCLATGFYPDHVELSWWVNGKEVHSGVCTDPQPLKEQPALNDSRYCLSSRLRVSATFWQNPRNHFRCQVQFYGLSENDEWTQDRAKPVTQIVSAEAWGRADDVIKIHWQEKKSNTILGSQEGNTMKTNDTYMKFSWLTVPEKSLDKEHRCIVRHENNKNGVDQEIIFPPIKTDVITMDPKDNCSKDANDTLLLQLTNTSAYYMYLLLLLKSVVYFAIITCCLLRRTAFCCNGEKSRAKRSGSGATNFSLLKQAGDVEENPGPTSMDWIWRILFLVGAATGAHSFEQVQLQQPGAELVKPGASVKMSCKASGYAFSSYWINWMKQKPGQGLEWIGQIYPGDGDTNYNGKFKGRATLTADTSSSTAYMQLSSLTSEDSAVYFCARSITTVVGCAMDYWGQGTSVTVSSTRIQNPDPAVYQLRDSKSSDKSVCLFTDFDSQTNVSQSKDSDVYITDKCVLDMRSMDFKSNSAVAWSNKSDFACANAFNNSIIPEDTFFPSPESSDSTDHVKPKETENTKQPSKSCHKPKAIVHTEKVNMMSLTVLGLRMLFAKTVAVNFLLTAKLFFL

SEQ ID NO: 15871 - protein, 861 aa, synthetic construct
MALPVTALLLPLALLLHAARPEVQLVESGGGLVQPGGSLRLSCAASGFSFSDFWMSWVRQAPGKGLEWVATISQAGSEKDYVDSVKGRFTISRDNAKKSLYLQMNSLRAEDTAVYYCASGVYSFDYRGQGTLVTVSSGTGGGGSGGGGSGGGGSEFQIVLSQSPAILSASPGEKVTMTCRASSSVSYMHWYQQKPGSSPKPWIYATSNLASGVPARFSGSGSGTSYSFTISRVEAEDAATYYCQQWTFNPPTFGGGTRLEIKRTVAALEDLKNVFPPEVAVFEPSEAEISHTQKATLVCLATGFYPDHVELSWWVNGKEVHSGVCTDPQPLKEQPALNDSRYCLSSRLRVSATFWQNPRNHFRCQVQFYGLSENDEWTQDRAKPVTQIVSAEAWGRADDVIKIHWQEKKSNTILGSQEGNTMKTNDTYMKFSWLTVPEKSLDKEHRCIVRHENNKNGVDQEIIFPPIKTDVITMDPKDNCSKDANDTLLLQLTNTSAYYMYLLLLLKSVVYFAIITCCLLRRTAFCCNGEKSRAKRSGSGATNFSLLKQAGDVEENPGPTSMDWIWRILFLVGAATGAHSFEQAYLQQSGAELVRPGASVKMSCKASGYTFTSYNMHWVKQTPRQGLEWIGGIYPGNGDTSYNQKFKGKATLTVGKSSSTAYMQLSSLTSEDSAVYFCARYDYNYAMDYWGQGTSVTVSSASTRIQNPDPAVYQLRDSKSSDKSVCLFTDFDSQTNVSQSKDSDVYITDKCVLDMRSMDFKSNSAVAWSNKSDFACANAFNNSIIPEDTFFPSPESSDSTDHVKPKETENTKQPSKSCHKPKAIVHTEKVNMMSLTVLGLRMLFAKTVAVNFLLTAKLFFL

SEQ ID NO: 15872 - protein, 859 aa, synthetic construct
MALPVTALLLPLALLLHAARPEVQLVESGGGLVQPGGSLRLSCAASGFSFSDFWMSWVRQAPGKGLEWVATISQAGSEKDYVDSVKGRFTISRDNAKKSLYLQMNSLRAEDTAVYYCASGVYSFDYRGQGTLVTVSSGTGGGGSGGGGSGGGGSEFEIVLTQSPATLSLSPGERATLSCRASQSVSSYLAWYQQKPGQAPRLLIYDASNRATGIPARFSGSGSGTDFTLTISSLEPEDFAVYYCQQRSNWPITFGQGTRLEIKLEDLKNVFPPEVAVFEPSEAEISHTQKATLVCLATGFYPDHVELSWWVNGKEVHSGVCTDPQPLKEQPALNDSRYCLSSRLRVSATFWQNPRNHFRCQVQFYGLSENDEWTQDRAKPVTQIVSAEAWGRADDVIKIHWQEKKSNTILGSQEGNTMKTNDTYMKFSWLTVPEKSLDKEHRCIVRHENNKNGVDQEIIFPPIKTDVITMDPKDNCSKDANDTLLLQLTNTSAYYMYLLLLLKSVVYFAIITCCLLRRTAFCCNGEKSRAKRSGSGATNFSLLKQAGDVEENPGPTSMDWIWRILFLVGAATGAHSFEEVQLVESGGGLVQPDRSLRLSCAASGFTFHDYAMHWVRQAPGKGLEWVSTISWNSGTIGYADSVKGRFTISRDNAKNSLYLQMNSLRAEDTALYYCAKDIQYGNYYYGMDVWGQGTTVTVSSTRIQNPDPAVYQLRDSKSSDKSVCLFTDFDSQTNVSQSKDSDVYITDKCVLDMRSMDFKSNSAVAWSNKSDFACANAFNNSIIPEDTFFPSPESSDSTDHVKPKETENTKQPSKSCHKPKAIVHTEKVNMMSLTVLGLRMLFAKTVAVNFLLTAKLFFL

SEQ ID NO: 15873 - protein, 854 aa, synthetic construct
MALPVTALLLPLALLLHAARPEVQLVESGGGLVQPGGSLRLSCAASGFSFSDFWMSWVRQAPGKGLEWVATISQAGSEKDYVDSVKGRFTISRDNAKKSLYLQMNSLRAEDTAVYYCASGVYSFDYRGQGTLVTVSSGTGGGGSGGGGSGGGGSEFDIQMTQSPSSLSASVGDRVTINCKASQDINSYLSWFQQKPGKAPKTLIYRANRLVDGVPSRFSGSGSGQDYTLTISSLQPEDFATYYCLQYDEFPLTFGGGTKVEIKLEDLKNVFPPEVAVFEPSEAEISHTQKATLVCLATGFYPDHVELSWWVNGKEVHSGVCTDPQPLKEQPALNDSRYCLSSRLRVSATFWQNPRNHFRCQVQFYGLSENDEWTQDRAKPVTQIVSAEAWGRADDVIKIHWQEKKSNTILGSQEGNTMKTNDTYMKFSWLTVPEKSLDKEHRCIVRHENNKNGVDQEIIFPPIKTDVITMDPKDNCSKDANDTLLLQLTNTSAYYMYLLLLLKSVVYFAIITCCLLRRTAFCCNGEKSRAKRSGSGATNFSLLKQAGDVEENPGPTSMDWIWRILFLVGAATGAHSFEQVQLVQSGAEVKKPGASVKVSCKASGYTFTNYDINWVRQAPGQGLEWIGWIYPGDGSTKYNEKFKAKATLTADTSTSTAYMELRSLRSDDTAVYYCASGYEDAMDYWGQGTTVTVSSTRIQNPDPAVYQLRDSKSSDKSVCLFTDFDSQTNVSQSKDSDVYITDKCVLDMRSMDFKSNSAVAWSNKSDFACANAFNNSIIPEDTFFPSPESSDSTDHVKPKETENTKQPSKSCHKPKAIVHTEKVNMMSLTVLGLRMLFAKTVAVNFLLTAKLFFL

SEQ ID NO: 15874 - protein, 856 aa, synthetic construct
MALPVTALLLPLALLLHAARPEVQLVESGGGLVQPGGSLRLSCAASGFSFSDFWMSWVRQAPGKGLEWVATISQAGSEKDYVDSVKGRFTISRDNAKKSLYLQMNSLRAEDTAVYYCASGVYSFDYRGQGTLVTVSSGTGGGGSGGGGSGGGGSEFDIVMTQTPLSLSVTPGQPASISCKSSQSLLDGDGKTYLNWLLQKPGQSPQRLIYLVSKLDSGVPDRFSGSGSGTDFTLKISRVEAEDVGVYYCWQGTHFPRTFGQGTKLEIKLEDLKNVFPPEVAVFEPSEAEISHTQKATLVCLATGFYPDHVELSWWVNGKEVHSGVCTDPQPLKEQPALNDSRYCLSSRLRVSATFWQNPRNHFRCQVQFYGLSENDEWTQDRAKPVTQIVSAEAWGRADDVIKIHWQEKKSNTILGSQEGNTMKTNDTYMKFSWLTVPEKSLDKEHRCIVRHENNKNGVDQEIIFPPIKTDVITMDPKDNCSKDANDTLLLQLTNTSAYYMYLLLLLKSVVYFAIITCCLLRRTAFCCNGEKSRAKRSGSGATNFSLLKQAGDVEENPGPTSMDWIWRILFLVGAATGAHSFEQVQLVQSGAEVKKPGASVKVSCKASGYTFKDTYIHWVRQAPGQGLEWMGRIDPANGNTKYDPKFQGRVTMTRDTSISTAYMELSRLRSDDTAVYYCARRGGVDWGQGTLVTVSSTRIQNPDPAVYQLRDSKSSDKSVCLFTDFDSQTNVSQSKDSDVYITDKCVLDMRSMDFKSNSAVAWSNKSDFACANAFNNSIIPEDTFFPSPESSDSTDHVKPKETENTKQPSKSCHKPKAIVHTEKVNMMSLTVLGLRMLFAKTVAVNFLLTAKLFFL

SEQ ID NO: 15875 - protein, 857 aa, synthetic construct
MALPVTALLLPLALLLHAARPEVQLVESGGGLVQPGGSLRLSCAASGFSFSDFWMSWVRQAPGKGLEWVATISQAGSEKDYVDSVKGRFTISRDNAKKSLYLQMNSLRAEDTAVYYCASGVYSFDYRGQGTLVTVSSGTGGGGSGGGGSGGGGSEFDIQMTQSPSSLSASVGDRVTITCKASQDVSTAVAWFQQKPGKAPKLLIYSPSYRYTGVPSRFSGSGSGTDFTLTISSLQPEDFTYYCQQLYSTPYTFGQGTKVEIKLEDLKNVFPPEVAVFEPSEAEISHTQKATLVCLATGFYPDHVELSWWVNGKEVHSGVCTDPQPLKEQPALNDSRYCLSSRLRVSATFWQNPRNHFRCQVQFYGLSENDEWTQDRAKPVTQIVSAEAWGRADDVIKIHWQEKKSNTILGSQEGNTMKTNDTYMKFSWLTVPEKSLDKEHRCIVRHENNKNGVDQEIIFPPIKTDVITMDPKDNCSKDANDTLLLQLTNTSAYYMYLLLLLKSVVYFAIITCCLLRRTAFCCNGEKSRAKRSGSGATNFSLLKQAGDVEENPGPTSMDWIWRILFLVGAATGAHSFEEVQLVQSGAEVKKPGASVKVSCKASGYTFTDYYLDVVVRQAPGQGLEWIGRVNPYNGGTIYNQKFKGRVTLTRDTSTSTAYLELSSLRSEDTAVYYCARDHYRYDPLLDYWGQGTLVTVSSTRIQNPDPAVYQLRDSKSSDKSVCLFTDFDSQTNVSQSKDSDVYITDKCVLDMRSMDFKSNSAVAWSNKSDFACANAFNNSIIPEDTFFPSPESSDSTDHVKPKETENTKQPSKSCHKPKAIVHTEKVNMMSLTVLGLRMLFAKTVAVNFLLTAKLFFL

SEQ ID NO: 15876 - protein, 863 aa, synthetic construct
MALPVTALLLPLALLLHAARPEVQLVESGGGLVQPGGSLRLSCAASGFSFSDFWMSWVRQAPGKGLEWVATISQAGSEKDYVDSVKGRFTISRDNAKKSLYLQMNSLRAEDTAVYYCASGVYSFDYRGQGTLVTVSSGTGGGGSGGGGSGGGGSEFDIQMTQSPSSLSASVGDRVTITCRASQSVSTSSYNYMHWYQQKPGKPPKLLIKYASNLESGVPSRFSGSGSGTDFTLTISSLQPEDFATYYCQHSWEIPLTFGQGTKVEIKLEDLKNVFPPEVAVFEPSEAEISHTQKATLVCLATGFYPDHVELSWWVNGKEVHSGVCTDPQPLKEQPALNDSRYCLSSRLRVSATFWQNPRNHFRCQVQFYGLSENDEWTQDRAKPVTQIVSAEAWGRADDVIKIHWQEKKSNTILGSQEGNTMKTNDTYMKFSWLTVPEKSLDKEHRCIVRHENNKNGVDQEIIFPPIKTDVITMDPKDNCSKDANDTLLLQLTNTSAYYMYLLLLLKSVVYFAIITCCLLRRTAFCCNGEKSRAKRSGSGATNFSLLKQAGDVEENPGPTSMDWIWRILFLVGAATGAHSFEEVQLVQSGAEVKKPGASVKVSCKASGYSFTDYYMHWVRQAPGQGLEWIGRINPYNGAAFYSQNFKDRVTLTVDTSTSTAYLELSSLRSEDTAVYYCAIERGADLEGYAMDYWGQGTLVTVSSTRIQNPDPAVYQLRDSKSSDKSVCLFTDFDSQTNVSQSKDSDVYITDKCVLDMRSMDFKSNSAVAWSNKSDFACANAFNNSIIPEDTFFPSPESSDSTDHVKPKETENTKQPSKSCHKPKAIVHTEKVNMMSLTVLGLRMLFAKTVAVNFLLTAKLFFL

SEQ ID NO: 15877 - protein, 861 aa, synthetic construct
MALPVTALLLPLALLLHAARPEVQLVESGGGLVQPGGSLRLSCAASGFSFSDFWMSWVRQAPGKGLEWVATISQAGSEKDYVDSVKGRFTISRDNAKKSLYLQMNSLRAEDTAVYYCASGVYSFDYRGQGTLVTVSSGTGGGGSGGGGSGGGGSEFEIVLTQSPATLSASPGERVTLTCRASSNVISSYVHWYQQKPGSSPRLFLYSTSNLASGVPSRFSGSGSGTDFTFTISSLEAEDAATYYCQQYSGYPLTFGQGTRLEIKLEDLKNVFPPEVAVFEPSEAEISHTQKATLVCLATGFYPDHVELSWWVNGKEVHSGVCTDPQPLKEQPALNDSRYCLSSRLRVSATFWQNPRNHFRCQVQFYGLSENDEWTQDRAKPVTQIVSAEAWGRADDVIKIHWQEKKSNTILGSQEGNTMKTNDTYMKFSWLTVPEKSLDKEHRCIVRHENNKNGVDQEIIFPPIKTDVITMDPKDNCSKDANDTLLLQLTNTSAYYMYLLLLLKSVVYFAIITCCLLRRTAFCCNGEKSRAKRSGSGATNFSLLKQAGDVEENPGPTSMDWIWRILFLVGAATGAHSFEQVQLQESGPGLVKPSETLSLTCAVSGYSITSAYYWNWIRQPPGKGLEWIGYISYDGRNNYNPSLKNRITINPDTSKNQFSLQLNSVTPEDTAVYYCAREGDYDVGNYYAMDYWGQGTLVTVSSTRIQNPDPAVYQLRDSKSSDKSVCLFTDFDSQTNVSQSKDSDVYITDKCVLDMRSMDFKSNSAVAWSNKSDFACANAFNNSIIPEDTFFPSPESSDSTDHVKPKETENTKQPSKSCHKPKAIVHTEKVNMMSLTVLGLRMLFAKTVAVNFLLTAKLFFL

SEQ ID NO: 15878 - protein, 861 aa, synthetic construct
MALPVTALLLPLALLLHAARPEVQLVESGGGLVQPGGSLRLSCAASGFSFSDFWMSWVRQAPGKGLEWVATISQAGSEKDYVDSVKGRFTISRDNAKKSLYLQMNSLRAEDTAVYYCASGVYSFDYRGQGTLVTVSSGTGGGGSGGGGSGGGGSEFEIVLTQSPATLSLSPGERATLSCRASSNVISSYVHWYQQKPGQAPRLLIYSTSNLASGIPARFSGSGSGTDFTLTISSLEPEDFAVYYCQQYSGYPLTFGQGTRLEIKLEDLKNVFPPEVAVFEPSEAEISHTQKATLVCLATGFYPDHVELSWWVNGKEVHSGVCTDPQPLKEQPALNDSRYCLSSRLRVSATFWQNPRNHFRCQVQFYGLSENDEWTQDRAKPVTQIVSAEAWGRADDVIKIHWQEKKSNTILGSQEGNTMKTNDTYMKFSWLTVPEKSLDKEHRCIVRHENNKNGVDQEIIFPPIKTDVITMDPKDNCSKDANDTLLLQLTNTSAYYMYLLLLLKSVVYFAIITCCLLRRTAFCCNGEKSRAKRSGSGATNFSLLKQAGDVEENPGPTSMDWIWRILFLVGAATGAHSFEEVQLVESGGGLVQPGRSLRLSCAASGYSITSAYYWNWVRQAPGKGLEWVSYISYDGRNNYNPSLKNRFTISRDNAKKSLYLQMNSLRAEDTALYYCAKEGDYDVGNYYAMDYWGQGTTVTVSSTRIQNPDPAVYQLRDSKSSDKSVCLFTDFDSQTNVSQSKDSDVYITDKCVLDMRSMDFKSNSAVAWSNKSDFACANAFNNSIIPEDTFFPSPESSDSTDHVKPKETENTKQPSKSCHKPKAIVHTEKVNMMSLTVLGLRMLFAKTVAVNFLLTAKLFFL

SEQ ID NO: 15879 - protein, 860 aa, synthetic construct
MALPVTALLLPLALLLHAARPEVQLVESGGGLVQPGGSLRLSCAASGFSFSDFWMSWVRQAPGKGLEWVATISQAGSEKDYVDSVKGRFTISRDNAKKSLYLQMNSLRAEDTAVYYCASGVYSFDYRGQGTLVTVSSGTGGGGSGGGGSGGGGSEFDVVMTQTPLSLPVSLGDQASISCRSSQSLVHSNGNTYLRWYLQKPGQSPKVLIYKVSNRVSGVPDRFSGSGSGTDFTLKINRVEAEDLGVYFCSQSTHVPWTFGGGTKLEIKLEDLKNVFPPEVAVFEPSEAEISHTQKATLVCLATGFYPDHVELSWWVNGKEVHSGVCTDPQPLKEQPALNDSRYCLSSRLRVSATFWQNPRNHFRCQVQFYGLSENDEWTQDRAKPVTQIVSAEAWGRADDVIKIHWQEKKSNTILGSQEGNTMKTNDTYMKFSWLTVPEKSLDKEHRCIVRHENNKNGVDQEIIFPPIKTDVITMDPKDNCSKDANDTLLLQLTNTSAYYMYLLLLLKSVVYFAIITCCLLRRTAFCCNGEKSRAKRSGSGATNFSLLKQAGDVEENPGPTSMDWIWRILFLVGAATGAHSFEGVKLDETGGGLVQPGGAMKLSCVTSGFTFGHYWMNWVRQSPEKGLEWVAQFRNKPYNYETYYSDSVKGRFTISRDDSKSSVYLQMNNLRVEDTGIYYCTGASYGMEYLGQGTSVTVSTTRIQNPDPAVYQLRDSKSSDKSVCLFTDFDSQTNVSQSKDSDVYITDKCVLDMRSMDFKSNSAVAWSNKSDFACANAFNNSIIPEDTFFPSPESSDSTDHVKPKETENTKQPSKSCHKPKAIVHTEKVNMMSLTVLGLRMLFAKTVAVNFLLTAKLFFL

SEQ ID NO: 15880 - protein, 866 aa, synthetic construct
MALPVTALLLPLALLLHAARPEVQLVESGGGLVQPGGSLRLSCAASGFSFSDFWMSWVRQAPGKGLEWVATISQAGSEKDYVDSVKGRFTISRDNAKKSLYLQMNSLRAEDTAVYYCASGVYSFDYRGQGTLVTVSSGTGGGGSGGGGSGGGGSEFQVQLVESGGNLVQPGGSLRLSCAASGFTFGSFSMSWVRQAPGGGLEWVAGLSARSSLTHYADSVKGRFTISRDNAKNSVYLQMNSLRVEDTAVYYCARRSYDSSGYWGHFYSYMDVWGQGTLVTVSLEDLKNVFPPEVAVFEPSEAEISHTQKATLVCLATGFYPDHVELSWWVNGKEVHSGVCTDPQPLKEQPALNDSRYCLSSRLRVSATFWQNPRNHFRCQVQFYGLSENDEWTQDRAKPVTQIVSAEAWGRADDVIKIHWQEKKSNTILGSQEGNTMKTNDTYMKFSWLTVPEKSLDKEHRCIVRHENNKNGVDQEIIFPPIKTDVITMDPKDNCSKDANDTLLLQLTNTSAYYMYLLLLLKSVVYFAIITCCLLRRTAFCCNGEKSRAKRSGSGATNFSLLKQAGDVEENPGPTSMDWIWRILFLVGAATGAHSFESVLTQPSSVSAAPGQKVTISCSGSTSNIGNNYVSWYQQHPGKAPKLMIYDVSKRPSGVPDRFSGSKSGNSASLDISGLQSEDEADYYCAAWDDSLSEFLFGTGTKLTVLGTRIQNPDPAVYQLRDSKSSDKSVCLFTDFDSQTNVSQSKDSDVYITDKCVLDMRSMDFKSNSAVAWSNKSDFACANAFNNSIIPEDTFFPSPESSDSTDHVKPKETENTKQPSKSCHKPKAIVHTEKVNMMSLTVLGLRMLFAKTVAVNFLLTAKLFFL

SEQ ID NO: 15881 - protein, 861 aa, synthetic construct
MALPVTALLLPLALLLHAARPEVQLVESGGGLVQPGGSLRLSCAASGFSFSDFWMSWVRQAPGKGLEWVATISQAGSEKDYVDSVKGRFTISRDNAKKSLYLQMNSLRAEDTAVYYCASGVYSFDYRGQGTLVTVSSGTGGGGSGGGGSGGGGSEFDVVMTQSPSSLSASVGDRVTITCQSSLDISHYLNWYQQKPGKAPKLLIYDASNLETGVPSRFSGSGSGTHFTFTISSLQPEDFATYYCQQYDNLPLTFGGGTKLEIKRLEDLKNVFPPEVAVFEPSEAEISHTQKATLVCLATGFYPDHVELSWWVNGKEVHSGVCTDPQPLKEQPALNDSRYCLSSRLRVSATFWQNPRNHFRCQVQFYGLSENDEWTQDRAKPVTQIVSAEAWGRADDVIKIHWQEKKSNTILGSQEGNTMKTNDTYMKFSWLTVPEKSLDKEHRCIVRHENNKNGVDQEIIFPPIKTDVITMDPKDNCSKDANDTLLLQLTNTSAYYMYLLLLLKSVVYFAIITCCLLRRTAFCCNGEKSRAKRSGSGATNFSLLKQAGDVEENPGPTSMDWIWRILFLVGAATGAHSFEQVQLVQSGGGVVQPGGSLRVSCAASGVTLSDYGMHWVRQAPGKGLEWVAFIRNDGSDKYYADSVKGRFTISRDNSEKTVSLQMSSLRAEDTAVYYCAKNGESGPLDYWYLDLWGRGTLVTVSSTRIQNPDPAVYQLRDSKSSDKSVCLFTDFDSQTNVSQSKDSDVYITDKCVLDMRSMDFKSNSAVAWSNKSDFACANAFNNSIIPEDTFFPSPESSDSTDHVKPKETENTKQPSKSCHKPKAIVHTEKVNMMSLTVLGLRMLFAKTVAVNFLLTAKLFFL

SEQ ID NO: 15882 - protein, 865 aa, synthetic construct
MALPVTALLLPLALLLHAARPEVQLVESGGGLVQPGGSLRLSCAASGFSFSDFWMSWVRQAPGKGLEWVATISQAGSEKDYVDSVKGRFTISRDNAKKSLYLQMNSLRAEDTAVYYCASGVYSFDYRGQGTLVTVSSGTGGGGSGGGGSGGGGSEFSYELTQPPSVSGTPGQRVAISCSGSSSNIGTRMVTWYQHVPGTAPKLLIFNNNQRPSGVPDRFSASKSGTSASLAIIGLQSDDEADYYCATWDDNVKSYVFGTGTKVTVLGSRLEDLKNVFPPEVAVFEPSEAEISHTQKATLVCLATGFYPDHVELSWWVNGKEVHSGVCTDPQPLKEQPALNDSRYCLSSRLRVSATFWQNPRNHFRCQVQFYGLSENDEWTQDRAKPVTQIVSAEAWGRADDVIKIHWQEKKSNTILGSQEGNTMKTNDTYMKFSWLTVPEKSLDKEHRCIVRHENNKNGVDQEIIFPPIKTDVITMDPKDNCSKDANDTLLLQLTNTSAYYMYLLLLLKSVVYFAIITCCLLRRTAFCCNGEKSRAKRSGSGATNFSLLKQAGDVEENPGPTSMDWIWRILFLVGAATGAHSFELEMAQVQLQQWGAGLLKPSETLSLTCAVYGGSFSGYYWSWIRQPPGKGLEWIGEINHSGSTNYNPSLKSRVTISVDTSKNQFSLKLSSVTAADTAVYYCARAPQSWYVGDVWGQGTLVTVSSTRIQNPDPAVYQLRDSKSSDKSVCLFTDFDSQTNVSQSKDSDVYITDKCVLDMRSMDFKSNSAVAWSNKSDFACANAFNNSIIPEDTFFPSPESSDSTDHVKPKETENTKQPSKSCHKPKAIVHTEKVNMMSLTVLGLRMLFAKTVAVNFLLTAKLFFL

SEQ ID NO: 15883 - protein, 862 aa, synthetic construct
MALPVTALLLPLALLLHAARPEVQLVESGGGLVQPGGSLRLSCAASGFSFSDFWMSWVRQAPGKGLEWVATISQAGSEKDYVDSVKGRFTISRDNAKKSLYLQMNSLRAEDTAVYYCASGVYSFDYRGQGTLVTVSSGTGGGGSGGGGSGGGGSEFQSVLTQPPSLSVAPGKTASITCGGNNIGMKSVHWYQQRPGQAPVLVIYYDSDRPSGIPGRFSGSNSGNTATLTISRVEAGDEADYYCQVWDTTGDHPGYVFGTGTKVTVLLEDLKNVFPPEVAVFEPSEAEISHTQKATLVCLATGFYPDHVELSWWVNGKEVHSGVCTDPQPLKEQPALNDSRYCLSSRLRVSATFWQNPRNHFRCQVQFYGLSENDEWTQDRAKPVTQIVSAEAWGRADDVIKIHWQEKKSNTILGSQEGNTMKTNDTYMKFSWLTVPEKSLDKEHRCIVRHENNKNGVDQEIIFPPIKTDVITMDPKDNCSKDANDTLLLQLTNTSAYYMYLLLLLKSVVYFAIITCCLLRRTAFCCNGEKSRAKRSGSGATNFSLLKQAGDVEENPGPTSMDWIWRILFLVGAATGAHSFEQVQLVQSGAEVKKPGSSVKVSCKASGGTFSSYAISWVRQAPGQGLEWMGGIIPIFGTANYAQKFQGRVTITADESTSTAYMELSSLRSEDTAVYYCARGVYGYSGSAPYDEWGQGTLVTVSSTRIQNPDPAVYQLRDSKSSDKSVCLFTDFDSQTNVSQSKDSDVYITDKCVLDMRSMDFKSNSAVAWSNKSDFACANAFNNSIIPEDTFFPSPESSDSTDHVKPKETENTKQPSKSCHKPKAIVHTEKVNMMSLTVLGLRMLFAKTVAVNFLLTAKLFFL

SEQ ID NO: 15884 - protein, 860 aa, synthetic construct
MALPVTALLLPLALLLHAARPEVQLVESGGGLVQPGGSLRLSCAASGFSFSDFWMSWVRQAPGKGLEWVATISQAGSEKDYVDSVKGRFTISRDNAKKSLYLQMNSLRAEDTAVYYCASGVYSFDYRGQGTLVTVSSGTGGGGSGGGGSGGGGSEFEVQLVESGGGLVQPGRSLRLSCAASGFTFDDYAMHWVRQAPGKGLEWVSGISWNSGSIGYADSVKGRFTISRDNAKNSLYLQMNSLRAEDTALYYCAKDKGGGYYDFWSGSDYWGQGTLVTVSSLEDLKNVFPPEVAVFEPSEAEISHTQKATLVCLATGFYPDHVELSWWVNGKEVHSGVCTDPQPLKEQPALNDSRYCLSSRLRVSATFWQNPRNHFRCQVQFYGLSENDEWTQDRAKPVTQIVSAEAWGRADDVIKIHWQEKKSNTILGSQEGNTMKTNDTYMKFSWLTVPEKSLDKEHRCIVRHENNKNGVDQEIIFPPIKTDVITMDPKDNCSKDANDTLLLQLTNTSAYYMYLLLLLKSVVYFAIITCCLLRRTAFCCNGEKSRAKRSGSGATNFSLLKQAGDVEENPGPTSMDWIWRILFLVGAATGAHSFESSELTQDPAVSVALGQTVRITCQGDSLRSYYASWYQQKPGQAPVLVIYGKNNRPSGIPDRFSGSSSGNTASLTITGAQAEDEADYYCNSRDSSGWVFGGGTKLTVLTRIQNPDPAVYQLRDSKSSDKSVCLFTDFDSQTNVSQSKDSDVYITDKCVLDMRSMDFKSNSAVAWSNKSDFACANAFNNSIIPEDTFFPSPESSDSTDHVKPKETENTKQPSKSCHKPKAIVHTEKVNMMSLTVLGLRMLFAKTVAVNFLLTAKLFFL

SEQ ID NO: 15885 - protein, 869 aa, synthetic construct
MALPVTALLLPLALLLHAARPEVQLVESGGGLVQPGGSLRLSCAASGFSFSDFWMSWVRQAPGKGLEWVATISQAGSEKDYVDSVKGRFTISRDNAKKSLYLQMNSLRAEDTAVYYCASGVYSFDYRGQGTLVTVSSGTGGGGSGGGGSGGGGSEFEVQLQQSGPGLVKPSQTLSLTCAISGDSVLSNSDTWNWIRQSPSRGLEWLGRTYHRSTWYDDYASSVRGRVSINVDTSKNQYSLQLNAVTPEDTGVYYCARDRLQDGNSWSDAFDVWGQGTMVTVSSLEDLKNVFPPEVAVFEPSEAEISHTQKATLVCLATGFYPDHVELSWWVNGKEVHSGVCTDPQPLKEQPALNDSRYCLSSRLRVSATFWQNPRNHFRCQVQFYGLSENDEWTQDRAKPVTQIVSAEAWGRADDVIKIHWQEKKSNTILGSQEGNTMKTNDTYMKFSWLTVPEKSLDKEHRCIVRHENNKNGVDQEIIFPPIKTDVITMDPKDNCSKDANDTLLLQLTNTSAYYMYLLLLLKSVVYFAIITCCLLRRTAFCCNGEKSRAKRSGSGATNFSLLKQAGDVEENPGPTSMDWIWRILFLVGAATGAHSFEQSALTQPASVSGSPGQSITISCTGTSSDVGGYNYVSWYQQHPGKAPKLMIYDVSNRPSGVSNRFSGSKSGNTASLTISGLQAEDEADYYCSSYTSSSTLVYVFGTGTKVTVLTRIQNPDPAVYQLRDSKSSDKSVCLFTDFDSQTNVSQSKDSDVYITDKCVLDMRSMDFKSNSAVAWSNKSDFACANAFNNSIIPEDTFFPSPESSDSTDHVKPKETENTKQPSKSCHKPKAIVHTEKVNMMSLTVLGLRMLFAKTVAVNFLLTAKLFFL

SEQ ID NO: 15886 - protein, 847 aa, synthetic construct
MALPVTALLLPLALLLHAARPEVQLVESGGGLVQPGGSLRLSCAASGFSFSDFWMSWVRQAPGKGLEWVATISQAGSEKDYVDSVKGRFTISRDNAKKSLYLQMNSLRAEDTAVYYCASGVYSFDYRGQGTLVTVSSGTGGGGSGGGGSGGGGSEFQVQLVQSGAEVKKPGASVKVSCKASGYTFTSYDINWVRQATGQGLEWMGWMNPNSGNTGYAQKFQGRVTMTRNTSISTAYMELSSLRSEDTAVYYCARGDSTKVEIKLEDLKNVFPPEVAVFEPSEAEISHTQKATLVCLATGFYPDHVELSWWVNGKEVHSGVCTDPQPLKEQPALNDSRYCLSSRLRVSATFWQNPRNHFRCQVQFYGLSENDEWTQDRAKPVTQIVSAEAWGRADDVIKIHWQEKKSNTILGSQEGNTMKTNDTYMKFSWLTVPEKSLDKEHRCIVRHENNKNGVDQEIIFPPIKTDVITMDPKDNCSKDANDTLLLQLTNTSAYYMYLLLLLKSVVYFAIITCCLLRRTAFCCNGEKSRAKRSGSGATNFSLLKQAGDVEENPGPTSMDWIWRILFLVGAATGAHSFEQSVLTQPRSVSGSPGQSVTISCTGTSSDVGGYNYVSWYQQHPGEAPKLIIYDADKRPSGISNRFSSGKSGNTASLTISGLQVEDEADYYCCSYAGGSTWVFGGGTKVTVLTRIQNPDPAVYQLRDSKSSDKSVCLFTDFDSQTNVSQSKDSDVYITDKCVLDMRSMDFKSNSAVAWSNKSDFACANAFNNSIIPEDTFFPSPESSDSTDHVKPKETENTKQPSKSCHKPKAIVHTEKVNMMSLTVLGLRMLFAKTVAVNFLLTAKLFFL

SEQ ID NO: 15887 - protein, 869 aa, synthetic construct
MALPVTALLLPLALLLHAARPEVQLVESGGGLVQPGGSLRLSCAASGFSFSDFWMSWVRQAPGKGLEWVATISQAGSEKDYVDSVKGRFTISRDNAKKSLYLQMNSLRAEDTAVYYCASGVYSFDYRGQGTLVTVSSGTGGGGSGGGGSGGGGSEFEVQLQQSGPGLVKPSQTLSLTCAISGDSVSSNSAAWNWIRQSPSRGLEWLGRTYYRSKWYSDYAVSVKSRITINPDTSKNQFSLQLNSVTPEDTAVYYCARDPYDFWSGYPDAFDIWGQGTMVTVSSLEDLKNVFPPEVAVFEPSEAEISHTQKATLVCLATGFYPDHVELSWWVNGKEVHSGVCTDPQPLKEQPALNDSRYCLSSRLRVSATFWQNPRNHFRCQVQFYGLSENDEWTQDRAKPVTQIVSAEAWGRADDVIKIHWQEKKSNTILGSQEGNTMKTNDTYMKFSWLTVPEKSLDKEHRCIVRHENNKNGVDQEIIFPPIKTDVITMDPKDNCSKDANDTLLLQLTNTSAYYMYLLLLLKSVVYFAIITCCLLRRTAFCCNGEKSRAKRSGSGATNFSLLKQAGDVEENPGPTSMDWIWRILFLVGAATGAHSFEQSALTQPASVSGSPGQSITISCTGTSSDVGGYNYVSWYQQHPGKAPKVIISEVNNRPSGVSHRFSGSKSGNTASLTISGLQAEDEADYFCSSYTSGRTLYVFGTGSKVTVLGTRIQNPDPAVYQLRDSKSSDKSVCLFTDFDSQTNVSQSKDSDVYITDKCVLDMRSMDFKSNSAVAWSNKSDFACANAFNNSIIPEDTFFPSPESSDSTDHVKPKETENTKQPSKSCHKPKAIVHTEKVNMMSLTVLGLRMLFAKTVAVNFLLTAKLFFL

SEQ ID NO: 15888 - protein, 868 aa, synthetic construct
MALPVTALLLPLALLLHAARPEVQLVESGGGLVQPGGSLRLSCAASGFSFSDFWMSWVRQAPGKGLEWVATISQAGSEKDYVDSVKGRFTISRDNAKKSLYLQMNSLRAEDTAVYYCASGVYSFDYRGQGTLVTVSSGTGGGGSGGGGSGGGGSEFQSALTQPASASGSPGQSVTISCTGTSSDVGGYNYVSWYQQHPGKAPKLMIYDVSNRPSGVSNRFSGSKSGNTASLTISGLQAEDEADYYCSSYTSSSTLYVFGTGTQLTVLLEDLKNVFPPEVAVFEPSEAEISHTQKATLVCLATGFYPDHVELSWWVNGKEVHSGVCTDPQPLKEQPALNDSRYCLSSRLRVSATFWQNPRNHFRCQVQFYGLSENDEWTQDRAKPVTQIVSAEAWGRADDVIKIHWQEKKSNTILGSQEGNTMKTNDTYMKFSWLTVPEKSLDKEHRCIVRHENNKNGVDQEIIFPPIKTDVITMDPKDNCSKDANDTLLLQLTNTSAYYMYLLLLLKSVVYFAIITCCLLRRTAFCCNGEKSRAKRSGSGATNFSLLKQAGDVEENPGPTSMDWIWRILFLVGAATGAHSFEEVQLQQSGPGLVKPSQTLSLTCAISGDSMLSNSDTWNWIRQSPSRGLEWLGRTYHRSTWYDDYASSVRGRVSINVDTSKNQYSLQLNAVTPEDTGVYYCARVRLQDGNSWSDAFDVWGQGTMVTVSSTRIQNPDPAVYQLRDSKSSDKSVCLFTDFDSQTNVSQSKDSDVYITDKCVLDMRSMDFKSNSAVAWSNKSDFACANAFNNSIIPEDTFFPSPESSDSTDHVKPKETENTKQPSKSCHKPKAIVHTEKVNMMSLTVLGLRMLFAKTVAVNFLLTAKLFFL

SEQ ID NO: 15889 - protein, 868 aa, synthetic construct
MALPVTALLLPLALLLHAARPEVQLVESGGGLVQPGGSLRLSCAASGFSFSDFWMSWVRQAPGKGLEWVATISQAGSEKDYVDSVKGRFTISRDNAKKSLYLQMNSLRAEDTAVYYCASGVYSFDYRGQGTLVTVSSGTGGGGSGGGGSGGGGSEFDVMLTQTPLSLPVSLGDQASISCRSSQSILHSTGDTYLEWYLQKPGQSPKLLINKVSNRLSGVPDRFSGSGSGTDFTLKISRVEAEDLGVYYCFQGSHVPWTFGGGTKLEIKRADAAPTVSIFPLEDLKNVFPPEVAVFEPSEAEISHTQKATLVCLATGFYPDHVELSWWVNGKEVHSGVCTDPQPLKEQPALNDSRYCLSSRLRVSATFWQNPRNHFRCQVQFYGLSENDEWTQDRAKPVTQIVSAEAWGRADDVIKIHWQEKKSNTILGSQEGNTMKTNDTYMKFSWLTVPEKSLDKEHRCIVRHENNKNGVDQEIIFPPIKTDVITMDPKDNCSKDANDTLLLQLTNTSAYYMYLLLLLKSVVYFAIITCCLLRRTAFCCNGEKSRAKRSGSGATNFSLLKQAGDVEENPGPTSMDWIWRILFLVGAATGAHSFEQVKLQQSGPSLVKPGASVKMSCKASGYTFTDFYMKWVKQSHGKSLEWIGDINPNIGDTFYNQKFKGKATLTVDKSSSTAYMQLNSLTSEDSAVYFCSVGYFDVWGAGTTVTVSSTRIQNPDPAVYQLRDSKSSDKSVCLFTDFDSQTNVSQSKDSDVYITDKCVLDMRSMDFKSNSAVAWSNKSDFACANAFNNSIIPEDTFFPSPESSDSTDHVKPKETENTKQPSKSCHKPKAIVHTEKVNMMSLTVLGLRMLFAKTVAVNFLLTAKLFFL

SEQ ID NO: 15890 - protein, 864 aa, synthetic construct
MALPVTALLLPLALLLHAARPEVQLVESGGGLVQPGGSLRLSCAASGFSFSDFWMSWVRQAPGKGLEWVATISQAGSEKDYVDSVKGRFTISRDNAKKSLYLQMNSLRAEDTAVYYCASGVYSFDYRGQGTLVTVSSGTGGGGSGGGGSGGGGSEFEIVLTQSPATLSLSPGERATLSCRASQSVSIYLAWYQQKPGQAPRLLIYDASNRATGIPARFSGSGSGTDFTLTISSLEPEDFAVYYCQQRSNWPPFTFGPGTKVDIKLEDLKNVFPPEVAVFEPSEAEISHTQKATLVCLATGFYPDHVELSWWVNGKEVHSGVCTDPQPLKEQPALNDSRYCLSSRLRVSATFWQNPRNHFRCQVQFYGLSENDEWTQDRAKPVTQIVSAEAWGRADDVIKIHWQEKKSNTILGSQEGNTMKTNDTYMKFSWLTVPEKSLDKEHRCIVRHENNKNGVDQEIIFPPIKTDVITMDPKDNCSKDANDTLLLQLTNTSAYYMYLLLLLKSVVYFAIITCCLLRRTAFCCNGEKSRAKRSGSGATNFSLLKQAGDVEENPGPTSMDWIWRILFLVGAATGAHSFEQVQLVESGGGVVQPGRSLRLSCAASGFTFSSYGMHWVRQAPGKGLEWVAVIWDDGSNKYYVDSVKGRFTISRDNSKNTLYLQMNSLRAEDTAVYYCARDDYYGSGSFNSYYGTDVWGQGTTVTVSSTRIQNPDPAVYQLRDSKSSDKSVCLFTDFDSQTNVSQSKDSDVYITDKCVLDMRSMDFKSNSAVAWSNKSDFACANAFNNSIIPEDTFFPSPESSDSTDHVKPKETENTKQPSKSCHKPKAIVHTEKVNMMSLTVLGLRMLFAKTVAVNFLLTAKLFFL

SEQ ID NO: 15891 - protein, 849 aa, synthetic construct
MALPVTALLLPLALLLHAARPEVQLVESGGGLVQPGGSLRLSCAASGFSFSDFWMSWVRQAPGKGLEWVATISQAGSEKDYVDSVKGRFTISRDNAKKSLYLQMNSLRAEDTAVYYCASGVYSFDYRGQGTLVTVSSGTGGGGSGGGGSGGGGSEFDIQMTQSPSSLSASVGDRVTITCRASQGISSWLAWYQQKPEKAPKSLIYAASSLQSGVPSRFSGSGSGTDFTLTISSLQPEDFATYYCQQYNSYPYTFGQGTKLEIKLEDLKNVFPPEVAVFEPSEAEISHTQKATLVCLATGFYPDHVELSWWVNGKEVHSGVCTDPQPLKEQPALNDSRYCLSSRLRVSATFWQNPRNHFRCQVQFYGLSENDEWTQDRAKPVTQIVSAEAWGRADDVIKIHWQEKKSNTILGSQEGNTMKTNDTYMKFSWLTVPEKSLDKEHRCIVRHENNKNGVDQEIIFPPIKTDVITMDPKDNCSKDANDTLLLQLTNTSAYYMYLLLLLKSVVYFAIITCCLLRRTAFCCNGEKSRAKRSGSGATNFSLLKQAGDVEENPGPTSMDWIWRILFLVGAATGAHSFEEVQLVQSGGGLVHPGGSLRLSCAGSGFTFSTYLMYWVRQAPGKTLEWVSAIGSGGDTYYADSVKGRFTISRDNAKNSLYLQMNSLRAEDMAVYYCARGLGYWGQGTLVTVSSTRIQNPDPAVYQLRDSKSSDKSVCLFTDFDSQTNVSQSKDSDVYITDKCVLDMRSMDFKSNSAVAWSNKSDFACANAFNNSIIPEDTFFPSPESSDSTDHVKPKETENTKQPSKSCHKPKAIVHTEKVNMMSLTVLGLRMLFAKTVAVNFLLTAKLFFL

SEQ ID NO: 15892 - protein, 868 aa, synthetic construct
MALPVTALLLPLALLLHAARPEVQLVESGGGLVQPGGSLRLSCAASGFSFSDFWMSWVRQAPGKGLEWVATISQAGSEKDYVDSVKGRFTISRDNAKKSLYLQMNSLRAEDTAVYYCASGVYSFDYRGQGTLVTVSSGTGGGGSGGGGSGGGGSEFLPVLTQPPSVSVAPGKTARITCGGNNIGSKSVHWYQQKPGQAPVLVVYDDSDRPSGIPERFSGSNSGNTATLTISRVEAGDEADYYCQVWDSSSDYVVFGGGTKLTVLLEDLKNVFPPEVAVFEPSEAEISHTQKATLVCLATGFYPDHVELSWWVNGKEVHSGVCTDPQPLKEQPALNDSRYCLSSRLRVSATFWQNPRNHFRCQVQFYGLSENDEWTQDRAKPVTQIVSAEAWGRADDVIKIHWQEKKSNTILGSQEGNTMKTNDTYMKFSWLTVPEKSLDKEHRCIVRHENNKNGVDQEIIFPPIKTDVITMDPKDNCSKDANDTLLLQLTNTSAYYMYLLLLLKSVVYFAIITCCLLRRTAFCCNGEKSRAKRSGSGATNFSLLKQAGDVEENPGPTSMDWIWRILFLVGAATGAHSFEEVQLVQSGAEVKKPGESLKISCKGSGYSFTSYWIGWVRQMPGKGLEWMGIIYPGDSDTRYSPSFQGQVTISADKSISTAYLQWSSLKASDTAMYYCARQVWGWQGGMYPRSNWWYNLDSWGQGTLVTVSSTRIQNPDPAVYQLRDSKSSDKSVCLFTDFDSQTNVSQSKDSDVYITDKCVLDMRSMDFKSNSAVAWSNKSDFACANAFNNSIIPEDTFFPSPESSDSTDHVKPKETENTKQPSKSCHKPKAIVHTEKVNMMSLTVLGLRMLFAKTVAVNFLLTAKLFFL

SEQ ID NO: 15893 - protein, 861 aa, synthetic construct
MALPVTALLLPLALLLHAARPEVQLVESGGGLVQPGGSLRLSCAASGFSFSDFWMSWVRQAPGKGLEWVATISQAGSEKDYVDSVKGRFTISRDNAKKSLYLQMNSLRAEDTAVYYCASGVYSFDYRGQGTLVTVSSGTGGGGSGGGGSGGGGSEFELVMTQSPASLAVSLGQRATISCRASESVDSYGKSFMHWYQLKPGQPPKLLIYRASNLESGVPARFSGSGSRTDFTLTIDPVEADDAATYYCQQNNEDPWTFGGGTKLEIKLEDLKNVFPPEVAVFEPSEAEISHTQKATLVCLATGFYPDHVELSWWVNGKEVHSGVCTDPQPLKEQPALNDSRYCLSSRLRVSATFWQNPRNHFRCQVQFYGLSENDEWTQDRAKPVTQIVSAEAWGRADDVIKIHWQEKKSNTILGSQEGNTMKTNDTYMKFSWLTVPEKSLDKEHRCIVRHENNKNGVDQEIIFPPIKTDVITMDPKDNCSKDANDTLLLQLTNTSAYYMYLLLLLKSVVYFAIITCCLLRRTAFCCNGEKSRAKRSGSGATNFSLLKQAGDVEENPGPTSMDWIWRILFLVGAATGAHSFEEVQLEQSGPELVKPGASVKMSCKASGYTFTNYYMKWVKQSHGKSLEWIGDLNPNNGDTFYNQKFKGKATLTVDKSSNTAYMQLNSLTSEDSAVYYCARTGRYEENAMDYWGQGTSVTVSSTRIQNPDPAVYQLRDSKSSDKSVCLFTDFDSQTNVSQSKDSDVYITDKCVLDMRSMDFKSNSAVAWSNKSDFACANAFNNSIIPEDTFFPSPESSDSTDHVKPKETENTKQPSKSCHKPKAIVHTEKVNMMSLTVLGLRMLFAKTVAVNFLLTAKLFFL

SEQ ID NO: 15894 - protein, 855 aa, synthetic construct
MALPVTALLLPLALLLHAARPEVQLVESGGGLVQPGGSLRLSCAASGFSFSDFWMSWVRQAPGKGLEWVATISQAGSEKDYVDSVKGRFTISRDNAKKSLYLQMNSLRAEDTAVYYCASGVYSFDYRGQGTLVTVSSGTGGGGSGGGGSGGGGSEFDVVMTQSPSSLSASVGDRVTITCMASEDIYIRLAWYQQKPGNAPKLLIYAATSLETGVPSRFSGSGSGTDFTLTISSLQPEDFATYYCQQYWSSPWTFGGGTKVEIKLEDLKNVFPPEVAVFEPSEAEISHTQKATLVCLATGFYPDHVELSWWVNGKEVHSGVCTDPQPLKEQPALNDSRYCLSSRLRVSATFWQNPRNHFRCQVQFYGLSENDEWTQDRAKPVTQIVSAEAWGRADDVIKIHWQEKKSNTILGSQEGNTMKTNDTYMKFSWLTVPEKSLDKEHRCIVRHENNKNGVDQEIIFPPIKTDVITMDPKDNCSKDANDTLLLQLTNTSAYYMYLLLLLKSVVYFAIITCCLLRRTAFCCNGEKSRAKRSGSGATNFSLLKQAGDVEENPGPTSMDWIWRILFLVGAATGAHSFEQVQLQESGPGLVKPSQTLSLTCTVSGYSITSDYTWNWIRQPPGNGLEWIGYITYSGSTSYNPSLKSRVLISVDTSKNQVSLKLSSVTAADTAVYYCARLGRRYTMDYWGQGTTVTVSSTRIQNPDPAVYQLRDSKSSDKSVCLFTDFDSQTNVSQSKDSDVYITDKCVLDMRSMDFKSNSAVAWSNKSDFACANAFNNSIIPEDTFFPSPESSDSTDHVKPKETENTKQPSKSCHKPKAIVHTEKVNMMSLTVLGLRMLFAKTVAVNFLLTAKLFFL

SEQ ID NO: 15895 - protein, 859 aa, synthetic construct; identical to SEQ ID NO: 15758

SEQ ID NO: 15896 - protein, 859 aa, synthetic construct
MALPVTALLLPLALLLHAARPEVQLVESGGGLVQPGGSLRLSCAASGFSFSDFWMSWVRQAPGKGLEWVATISQAGSEKDYVDSVKGRFTISRDNAKKSLYLQMNSLRAEDTAVYYCASGVYSFDYRGQGTLVTVSSGTGGGGSGGGGSGGGGSEFDIVLTQSPATLSLSPGDRATLSCRASESVTILGSHLIYWYQQKPGQAPRLLIQLASNVQTGIPARFSGSGSRTDFTLTISSLEPEDFAVYYCLQSRTIPRTFGQGTKLEIKRLEDLKNVFPPEVAVFEPSEAEISHTQKATLVCLATGFYPDHVELSWWVNGKEVHSGVCTDPQPLKEQPALNDSRYCLSSRLRVSATFWQNPRNHFRCQVQFYGLSENDEWTQDRAKPVTQIVSAEAWGRADDVIKIHWQEKKSNTILGSQEGNTMKTNDTYMKFSWLTVPEKSLDKEHRCIVRHENNKNGVDQEIIFPPIKTDVITMDPKDNCSKDANDTLLLQLTNTSAYYMYLLLLLKSVVYFAIITCCLLRRTAFCCNGEKSRAKRSGSGATNFSLLKQAGDVEENPGPTSMDWIWRILFLVGAATGAHSFEQVQLVQSGSELKKPGESVKISCKASGYTFTHYSMNWVRQAPGQGLEWMGRINTETGEPLYADDFKGRFVFSLDTSASTAYLQISSLKAEDTAVYYCSNDYLYSLDYWGQGTLVTVSSTRIQNPDPAVYQLRDSKSSDKSVCLFTDFDSQTNVSQSKDSDVYITDKCVLDMRSMDFKSNSAVAWSNKSDFACANAFNNSIIPEDTFFPSPESSDSTDHVKPKETENTKQPSKSCHKPKAIVHTEKVNMMSLTVLGLRMLFAKTVAVNFLLTAKLFFL

SEQ ID NO: 15897 - protein, 860 aa, synthetic construct
MALPVTALLLPLALLLHAARPEVQLVESGGGLVQPGGSLRLSCAASGFSFSDFWMSWVRQAPGKGLEWVATISQAGSEKDYVDSVKGRFTISRDNAKKSLYLQMNSLRAEDTAVYYCASGVYSFDYRGQGTLVTVSSGTGGGGSGGGGSGGGGSEFDIQLTQSPSFLSASVGDRVTITCRASQGISTDLNWYQQKPGKAPKLLIYAASNLESGVPSRFSGSGSGTEFTLTISSLQPEDFATYYCQQSYNWPYTFGGGTKVEIKRLEDLKNVFPPEVAVFEPSEAEISHTQKATLVCLATGFYPDHVELSWWVNGKEVHSGVCTDPQPLKEQPALNDSRYCLSSRLRVSATFWQNPRNHFRCQVQFYGLSENDEWTQDRAKPVTQIVSAEAWGRADDVIKIHWQEKKSNTILGSQEGNTMKTNDTYMKFSWLTVPEKSLDKEHRCIVRHENNKNGVDQEIIFPPIKTDVITMDPKDNCSKDANDTLLLQLTNTSAYYMYLLLLLKSVVYFAIITCCLLRRTAFCCNGEKSRAKRSGSGATNFSLLKQAGDVEENPGPTSMDWIWRILFLVGAATGAHSFEEVQLVESGGGLVKPGGSLRLSCAASGFTFSNFEMNWVRQAPGKGLEWVSGISSNGRYINYADSVKGRFTISRDNAKNSLYLQMNSLRAEDTAVYYCARVVDFDQDYNGFDYWGQGTLVTVSSTRIQNPDPAVYQLRDSKSSDKSVCLFTDFDSQTNVSQSKDSDVYITDKCVLDMRSMDFKSNSAVAWSNKSDFACANAFNNSIIPEDTFFPSPESSDSTDHVKPKETENTKQPSKSCHKPKAIVHTEKVNMMSLTVLGLRMLFAKTVAVNFLLTAKLFFL

SEQ ID NO: 15898 - protein, 858 aa, synthetic construct
MALPVTALLLPLALLLHAARPEVQLVESGGGLVQPGGSLRLSCAASGFSFSDFWMSWVRQAPGKGLEWVATISQAGSEKDYVDSVKGRFTISRDNAKKSLYLQMNSLRAEDTAVYYCASGVYSFDYRGQGTLVTVSSGTGGGGSGGGGSGGGGSEFDIQLTQSPSFLSASVGDRVTITCSLSLGISTWRDWFPPRLGRGLEPLTYAASTLQSGVPSRFSGSGSGTEFTLTISSLQPEDFATYYCQQLNSYPLTFGGGTKVEIKRLEDLKNVFPPEVAVFEPSEAEISHTQKATLVCLATGFYPDHVELSWWVNGKEVHSGVCTDPQPLKEQPALNDSRYCLSSRLRVSATFWQNPRNHFRCQVQFYGLSENDEWTQDRAKPVTQIVSAEAWGRADDVIKIHWQEKKSNTILGSQEGNTMKTNDTYMKFSWLTVPEKSLDKEHRCIVRHENNKNGVDQEIIFPPIKTDVITMDPKDNCSKDANDTLLLQLTNTSAYYMYLLLLLKSVVYFAIITCCLLRRTAFCCNGEKSRAKRSGSGATNFSLLKQAGDVEENPGPTSMDWIWRILFLVGAATGAHSFEEVQLVESGGGLVKPGGSLRLSCAASGFTFSTYGMSWVRQAPGKGLEWVAYINNGSGYIYYADSVKGRFTISRDNAKNSLYLQMNSLRAEDTAVYYCARGQWWSGGDFDYWGQGTLVTVSSTRIQNPDPAVYQLRDSKSSDKSVCLFTDFDSQTNVSQSKDSDVYITDKCVLDMRSMDFKSNSAVAWSNKSDFACANAFNNSIIPEDTFFPSPESSDSTDHVKPKETENTKQPSKSCHKPKAIVHTEKVNMMSLTVLGLRMLFAKTVAVNFLLTAKLFFL

SEQ ID NO: 15899 - protein, 859 aa, synthetic construct
MALPVTALLLPLALLLHAARPEVQLVESGGGLVQPGGSLRLSCAASGFSFSDFWMSWVRQAPGKGLEWVATISQAGSEKDYVDSVKGRFTISRDNAKKSLYLQMNSLRAEDTAVYYCASGVYSFDYRGQGTLVTVSSGTGGGGSGGGGSGGGGSEFEIVLTQSPATLSLSPGERATLSCSASSSVSYMYWYQQKPGQAPRLLIYRTSNLASGIPARFSGSGSGTDFTLTISSLEPEDFAVYYCQQYHSYPTTFGQGTKVEIKRTVLEDLKNVFPPEVAVFEPSEAEISHTQKATLVCLATGFYPDHVELSWWVNGKEVHSGVCTDPQPLKEQPALNDSRYCLSSRLRVSATFWQNPRNHFRCQVQFYGLSENDEWTQDRAKPVTQIVSAEAWGRADDVIKIHWQEKKSNTILGSQEGNTMKTNDTYMKFSWLTVPEKSLDKEHRCIVRHENNKNGVDQEIIFPPIKTDVITMDPKDNCSKDANDTLLLQLTNTSAYYMYLLLLLKSVVYFAIITCCLLRRTAFCCNGEKSRAKRSGSGATNFSLLKQAGDVEENPGPTSMDWIWRILFLVGAATGAHSFEEVQLVESGGGLVQPGGSLRLSCAASGFSFNTYAMNWVRQAPGKGLEWVSHIRSKSNNFATYYADSVKDRFTISRDNAKNSLYLQMNSLRAEDTAVYYCARQGGDFPMDYWGQGTLVTVSSTRIQNPDPAVYQLRDSKSSDKSVCLFTDFDSQTNVSQSKDSDVYITDKCVLDMRSMDFKSNSAVAWSNKSDFACANAFNNSIIPEDTFFPSPESSDSTDHVKPKETENTKQPSKSCHKPKAIVHTEKVNMMSLTVLGLRMLFAKTVAVNFLLTAKLFFL

SEQ ID NO: 15900 - protein, 855 aa, synthetic construct
MALPVTALLLPLALLLHAARPEVQLVESGGGLVQPGGSLRLSCAASGFSFSDFWMSWVRQAPGKGLEWVATISQAGSEKDYVDSVKGRFTISRDNAKKSLYLQMNSLRAEDTAVYYCASGVYSFDYRGQGTLVTVSSGTGGGGSGGGGSGGGGSEFDVVMTQSPSSLSASVGDRVTITCKASEDIYIRLAWYQQKPGKAPKLLIYAATSLETGVPSRFSGSGSGTDFTLTISSLQPEDFATYYCQQYWTTPWTFGGGTKVEIKLEDLKNVFPPEVAVFEPSEAEISHTQKATLVCLATGFYPDHVELSWWVNGKEVHSGVCTDPQPLKEQPALNDSRYCLSSRLRVSATFWQNPRNHFRCQVQFYGLSENDEWTQDRAKPVTQIVSAEAWGRADDVIKIHWQEKKSNTILGSQEGNTMKTNDTYMKFSWLTVPEKSLDKEHRCIVRHENNKNGVDQEIIFPPIKTDVITMDPKDNCSKDANDTLLLQLTNTSAYYMYLLLLLKSVVYFAIITCCLLRRTAFCCNGEKSRAKRSGSGATNFSLLKQAGDVEENPGPTSMDWIWRILFLVGAATGAHSFEQVQLQESGPGLVKPSQTLSLTCTVSGYSITIDYTWNWIRQPPGKGLEWIGYITYSGSTDYNPSLKSRVLISVDTSKNQVSLKLSSVTAADTAVYYCARLGRRYALDYWGQGTTVTVSSTRIQNPDPAVYQLRDSKSSDKSVCLFTDFDSQTNVSQSKDSDVYITDKCVLDMRSMDFKSNSAVAWSNKSDFACANAFNNSIIPEDTFFPSPESSDSTDHVKPKETENTKQPSKSCHKPKAIVHTEKVNMMSLTVLGLRMLFAKTVAVNFLLTAKLFFL

SEQ ID NO: 15901 - protein, 860 aa, synthetic construct
MALPVTALLLPLALLLHAARPEVQLVESGGGLVQPGGSLRLSCAASGFSFSDFWMSWVRQAPGKGLEWVATISQAGSEKDYVDSVKGRFTISRDNAKKSLYLQMNSLRAEDTAVYYCASGVYSFDYRGQGTLVTVSSGTGGGGSGGGGSGGGGSEFDIQMTQTTSSLSASLGDRVTISCRASQDISNYLNWYQQKPDGTVKLLIYYTSILHSGVPSRFSGSGSGTDYSLTISNLEQEDFATYFCQQGNTLPWTFGGGTKLEIKALEDLKNVFPPEVAVFEPSEAEISHTQKATLVCLATGFYPDHVELSWWVNGKEVHSGVCTDPQPLKEQPALNDSRYCLSSRLRVSATFWQNPRNHFRCQVQFYGLSENDEWTQDRAKPVTQIVSAEAWGRADDVIKIHWQEKKSNTILGSQEGNTMKTNDTYMKFSWLTVPEKSLDKEHRCIVRHENNKNGVDQEIIFPPIKTDVITMDPKDNCSKDANDTLLLQLTNTSAYYMYLLLLLKSVVYFAIITCCLLRRTAFCCNGEKSRAKRSGSGATNFSLLKQAGDVEENPGPTSMDWIWRILFLVGAATGAHSFEEVQLVESGGGLVKPGGSLKLSCAASGFAFSIYDMSWVRQTPEKRLEWVAYISSGGGTYYPDTVKGRFTISRDNAKNTLYLQMSSLKSEDTAMYYCARHSGYGTHWGVLFAYWGQGTLVTVSATRIQNPDPAVYQLRDSKSSDKSVCLFTDFDSQTNVSQSKDSDVYITDKCVLDMRSMDFKSNSAVAWSNKSDFACANAFNNSIIPEDTFFPSPESSDSTDHVKPKETENTKQPSKSCHKPKAIVHTEKVNMMSLTVLGLRMLFAKTVAVNFLLTAKLFFL

SEQ ID NO: 15902 - protein, 870 aa, synthetic construct
MALPVTALLLPLALLLHAARPEVQLVESGGGLVQPGGSLRLSCAASGFSFSDFWMSWVRQAPGKGLEWVATISQAGSEKDYVDSVKGRFTISRDNAKKSLYLQMNSLRAEDTAVYYCASGVYSFDYRGQGTLVTVSSGTGGGGSGGGGSGGGGSEFDIVMTQSPDSLAVSLGERATINCKSSQSLLYRSNQKNYLAWYQQKPGQPPKLLIYWASTRESGVPDRFSGSGSGTDFTLTISSLQAEDVAVYYCQQYYNYPRTFGQGTKVEIKRTVLEDLKNVFPPEVAVFEPSEAEISHTQKATLVCLATGFYPDHVELSWWVNGKEVHSGVCTDPQPLKEQPALNDSRYCLSSRLRVSATFWQNPRNHFRCQVQFYGLSENDEWTQDRAKPVTQIVSAEAWGRADDVIKIHWQEKKSNTILGSQEGNTMKTNDTYMKFSWLTVPEKSLDKEHRCIVRHENNKNGVDQEIIFPPIKTDVITMDPKDNCSKDANDTLLLQLTNTSAYYMYLLLLLKSVVYFAIITCCLLRRTAFCCNGEKSRAKRSGSGATNFSLLKQAGDVEENPGPTSMDWIWRILFLVGAATGAHSFEEVQLLESGGGLVQPGGSLRLSCAASGYSITSDYAWNWVRQAPGKGLEWVSYISNSGSTSYNPSLKSRFTISRDNSKNTLYLQMNSLRAEDTAVYYCAKERNYDYDDYYYAMDYWGQGTLVTVSSTRIQNPDPAVYQLRDSKSSDKSVCLFTDFDSQTNVSQSKDSDVYITDKCVLDMRSMDFKSNSAVAWSNKSDFACANAFNNSIIPEDTFFPSPESSDSTDHVKPKETENTKQPSKSCHKPKAIVHTEKVNMMSLTVLGLRMLFAKTVAVNFLLTAKLFFL

SEQ ID NO: 15903 - protein, 863 aa, synthetic construct
MALPVTALLLPLALLLHAARPEVQLVESGGGLVQPGGSLRLSCAASGFSFSDFWMSWVRQAPGKGLEWVATISQAGSEKDYVDSVKGRFTISRDNAKKSLYLQMNSLRAEDTAVYYCASGVYSFDYRGQGTLVTVSSGTGGGGSGGGGSGGGGSEFDVVMTQSPLSLPVTLGQPASISCRSSQSLLHSSGNTYLEWYQQRPGQSPRPLIYKISTRFSGVPDRFSGSGSGTDFTLKISRVEAEDVGVYYCFQGSHVPYTFGGGTKVEIKRLEDLKNVFPPEVAVFEPSEAEISHTQKATLVCLATGFYPDHVELSWWVNGKEVHSGVCTDPQPLKEQPALNDSRYCLSSRLRVSATFWQNPRNHFRCQVQFYGLSENDEWTQDRAKPVTQIVSAEAWGRADDVIKIHWQEKKSNTILGSQEGNTMKTNDTYMKFSWLTVPEKSLDKEHRCIVRHENNKNGVDQEIIFPPIKTDVITMDPKDNCSKDANDTLLLQLTNTSAYYMYLLLLLKSVVYFAIITCCLLRRTAFCCNGEKSRAKRSGSGATNFSLLKQAGDVEENPGPTSMDWIWRILFLVGAATGAHSFEQVQLVQSGAEVKKPGASVKVSCKASGLTIEDYYMHWVRQAPGQGLEWMGWIDPENGDTEYGPKFQGRVTMTRDTSINTAYMELSRLRSDDTAVYYCAVHNAHYGTWFAYWGQGTLVTVSSTRIQNPDPAVYQLRDSKSSDKSVCLFTDFDSQTNVSQSKDSDVYITDKCVLDMRSMDFKSNSAVAWSNKSDFACANAFNNSIIPEDTFFPSPESSDSTDHVKPKETENTKQPSKSCHKPKAIVHTEKVNMMSLTVLGLRMLFAKTVAVNFLLTAKLFFL

SEQ ID NO: 15904 - protein, 855 aa, synthetic construct
MALPVTALLLPLALLLHAARPEVQLVESGGGLVQPGGSLRLSCAASGFSFSDFWMSWVRQAPGKGLEWVATISQAGSEKDYVDSVKGRFTISRDNAKKSLYLQMNSLRAEDTAVYYCASGVYSFDYRGQGTLVTVSSGTGGGGSGGGGSGGGGSEFDIQMTQSPSSLSASVGDRVTITCRASENIYSNLAWYQQKPGKAPKLLIYAATNLADGVPSRFSGSGSGTDFTLTISSLQPEDFATYYCQHFWGTPTFGQGTKVEIKRTVLEDLKNVFPPEVAVFEPSEAEISHTQKATLVCLATGFYPDHVELSWWVNGKEVHSGVCTDPQPLKEQPALNDSRYCLSSRLRVSATFWQNPRNHFRCQVQFYGLSENDEWTQDRAKPVTQIVSAEAWGRADDVIKIHWQEKKSNTILGSQEGNTMKTNDTYMKFSWLTVPEKSLDKEHRCIVRHENNKNGVDQEIIFPPIKTDVITMDPKDNCSKDANDTLLLQLTNTSAYYMYLLLLLKSVVYFAIITCCLLRRTAFCCNGEKSRAKRSGSGATNFSLLKQAGDVEENPGPTSMDWIWRILFLVGAATGAHSFEEVQLVESGGGLVQPGGSLRLSCAASGFSLTNYGVHWVRQAPGKGLEWVSVIWSGGSTDYNAAFISRFTISADTSKNTAYLQMNSLRAEDTAVYYCARELIHAMDNWGQGTLVTVSSTRIQNPDPAVYQLRDSKSSDKSVCLFTDFDSQTNVSQSKDSDVYITDKCVLDMRSMDFKSNSAVAWSNKSDFACANAFNNSIIPEDTFFPSPESSDSTDHVKPKETENTKQPSKSCHKPKAIVHTEKVNMMSLTVLGLRMLFAKTVAVNFLLTAKLFFL

SEQ ID NO: 15905 - protein, 862 aa, synthetic construct
MALPVTALLLPLALLLHAARPEVQLVESGGGLVQPGGSLRLSCAASGFSFSDFWMSWVRQAPGKGLEWVATISQAGSEKDYVDSVKGRFTISRDNAKKSLYLQMNSLRAEDTAVYYCASGVYSFDYRGQGTLVTVSSGTGGGGSGGGGSGGGGSEFDFVMTQSPLSLPVTPGEPASISCRSSQSIVHSNGNTYLEWYLQKPGQSPQLLIYKVSNRFSGVPDRFSGSGSGTDFTLKISRVEAEDVGVYYCFQGSHVPLTFGQGTKLEIKRLEDLKNVFPPEVAVFEPSEAEISHTQKATLVCLATGFYPDHVELSWWVNGKEVHSGVCTDPQPLKEQPALNDSRYCLSSRLRVSATFWQNPRNHFRCQVQFYGLSENDEWTQDRAKPVTQIVSAEAWGRADDVIKIHWQEKKSNTILGSQEGNTMKTNDTYMKFSWLTVPEKSLDKEHRCIVRHENNKNGVDQEIIFPPIKTDVITMDPKDNCSKDANDTLLLQLTNTSAYYMYLLLLLKSVVYFAIITCCLLRRTAFCCNGEKSRAKRSGSGATNFSLLKQAGDVEENPGPTSMDWIWRILFLVGAATGAHSFEEVQLVESGAEVKKPGASVKVSCKASGYTFTSYWIHWVRQAPGQGLEWMGENDPSNGRTNYNEKFKNRVTLTVDTSISTAYMELSRLRSDDTAVYYCARGPNYFYSMDYWGQGTMVTVSSTRIQNPDPAVYQLRDSKSSDKSVCLFTDFDSQTNVSQSKDSDVYITDKCVLDMRSMDFKSNSAVAWSNKSDFACANAFNNSIIPEDTFFPSPESSDSTDHVKPKETENTKQPSKSCHKPKAIVHTEKVNMMSLTVLGLRMLFAKTVAVNFLLTAKLFFL

SEQ ID NO: 15906 - protein, 855 aa, synthetic construct
MALPVTALLLPLALLLHAARPEVQLVESGGGLVQPGGSLRLSCAASGFSFSDFWMSWVRQAPGKGLEWVATISQAGSEKDYVDSVKGRFTISRDNAKKSLYLQMNSLRAEDTAVYYCASGVYSFDYRGQGTLVTVSSGTGGGGSGGGGSGGGGSEFDIQLTQSPSFLSASVGDRVTITCSARSSISFMYWYQQKPGKAPKLLIYDTSNLASGVPSRFSGSGSGTEFTLTISSLEAEDAATYYCQQWSSYPLTFGQGTKLEIKLEDLKNVFPPEVAVFEPSEAEISHTQKATLVCLATGFYPDHVELSWWVNGKEVHSGVCTDPQPLKEQPALNDSRYCLSSRLRVSATFWQNPRNHFRCQVQFYGLSENDEWTQDRAKPVTQIVSAEAWGRADDVIKIHWQEKKSNTILGSQEGNTMKTNDTYMKFSWLTVPEKSLDKEHRCIVRHENNKNGVDQEIIFPPIKTDVITMDPKDNCSKDANDTLLLQLTNTSAYYMYLLLLLKSVVYFAIITCCLLRRTAFCCNGEKSRAKRSGSGATNFSLLKQAGDVEENPGPTSMDWIWRILFLVGAATGAHSFEQVQLVQSGAEVKKPGASVKVSCKASGYTFTGSWMNWVRQAPGQGLEWIGRIYPGDGETNYNGKFKDRVTITADKSTSTAYMELSSLRSEDTAVYYCARIYGNNVYFDVWGQGTTVTVSSTRIQNPDPAVYQLRDSKSSDKSVCLFTDFDSQTNVSQSKDSDVYITDKCVLDMRSMDFKSNSAVAWSNKSDFACANAFNNSIIPEDTFFPSPESSDSTDHVKPKETENTKQPSKSCHKPKAIVHTEKVNMMSLTVLGLRMLFAKTVAVNFLLTAKLFFL

SEQ ID NO: 15907 - protein, 863 aa, synthetic construct
MALPVTALLLPLALLLHAARPEVQLVESGGGLVQPGGSLRLSCAASGFSFSDFWMSWVRQAPGKGLEWVATISQAGSEKDYVDSVKGRFTISRDNAKKSLYLQMNSLRAEDTAVYYCASGVYSFDYRGQGTLVTVSSGTGGGGSGGGGSGGGGSEFQLVLTQSPSASASLGSSVKLTCTLSSGHKTDTIDWYQQQPGKAPRYLMKLEGSGSYNKGSGVPDRFSGSSSGADWYLTISSLQSEDEADYYCGTDYPGNYLFGGGTQLTVLGLEDLKNVFPPEVAVFEPSEAEISHTQKATLVCLATGFYPDHVELSWWVNGKEVHSGVCTDPQPLKEQPALNDSRYCLSSRLRVSATFWQNPRNHFRCQVQFYGLSENDEWTQDRAKPVTQIVSAEAWGRADDVIKIHWQEKKSNTILGSQEGNTMKTNDTYMKFSWLTVPEKSLDKEHRCIVRHENNKNGVDQEIIFPPIKTDVITMDPKDNCSKDANDTLLLQLTNTSAYYMYLLLLLKSVVYFAIITCCLLRRTAFCCNGEKSRAKRSGSGATNFSLLKQAGDVEENPGPTSMDWIWRILFLVGAATGAHSFEQEQLVESGGGLVQPGGSLRLSCAASGFTFSDYYMSWIRQAPGKGLEWVATIYPSSGKTYYADSAKGRLTISSDNAKDSLYLQMNSLRAEDTAVYYCTRDSYADDAALFDIWGQGTTVTVSSTRIQNPDPAVYQLRDSKSSDKSVCLFTDFDSQTNVSQSKDSDVYITDKCVLDMRSMDFKSNSAVAWSNKSDFACANAFNNSIIPEDTFFPSPESSDSTDHVKPKETENTKQPSKSCHKPKAIVHTEKVNMMSLTVLGLRMLFAKTVAVNFLLTAKLFFL

SEQ ID NO: 15908 - protein, 855 aa, synthetic construct; identical to SEQ ID NO: 15904

SEQ ID NO: 15909 - protein, 862 aa, synthetic construct; identical to SEQ ID NO: 15905

SEQ ID NO: 15910 - protein, 855 aa, synthetic construct; identical to SEQ ID NO: 15906

SEQ ID NO: 15911 - protein, 863 aa, synthetic construct; identical to SEQ ID NO: 15907

SEQ ID NO: 15912 - protein, 862 aa, synthetic construct
MALPVTALLLPLALLLHAARPEVQLVESGGGLVQPGGSLRLSCAASGFSFSDFWMSWVRQAPGKGLEWVATISQAGSEKDYVDSVKGRFTISRDNAKKSLYLQMNSLRAEDTAVYYCASGVYSFDYRGQGTLVTVSSGTGGGGSGGGGSGGGGSEFDIQLTQSPSSLSASVGDRVSFTCQASQDINNFLNWYQQKPGKAPKLLIYDASNLETGVPSRFSGSGSGTDFTFTISSLQPEDIATYYCQQYGNLPFTFGGGTKVEIKRLEDLKNVFPPEVAVFEPSEAEISHTQKATLVCLATGFYPDHVELSWWVNGKEVHSGVCTDPQPLKEQPALNDSRYCLSSRLRVSATFWQNPRNHFRCQVQFYGLSENDEWTQDRAKPVTQIVSAEAWGRADDVIKIHWQEKKSNTILGSQEGNTMKTNDTYMKFSWLTVPEKSLDKEHRCIVRHENNKNGVDQEIIFPPIKTDVITMDPKDNCSKDANDTLLLQLTNTSAYYMYLLLLLKSVVYFAIITCCLLRRTAFCCNGEKSRAKRSGSGATNFSLLKQAGDVEENPGPTSMDWIWRILFLVGAATGAHSFEQVQLQESGPGLVKPSQTLSLTCTVSGGSISSGGFYWSWIRQHPGKGLEWIGYIHHSGSTHYNPSLKSRVTISIDTSKNLFSLRLSSVTAADTAVYYCASLVYCGGDCYSGFDYWGQGTLVTVSSTRIQNPDPAVYQLRDSKSSDKSVCLFTDFDSQTNVSQSKDSDVYITDKCVLDMRSMDFKSNSAVAWSNKSDFACANAFNNSIIPEDTFFPSPESSDSTDHVKPKETENTKQPSKSCHKPKAIVHTEKVNMMSLTVLGLRMLFAKTVAVNFLLTAKLFFL

SEQ ID NO: 15913 - protein, 858 aa, synthetic construct
MALPVTALLLPLALLLHAARPEVQLVESGGGLVQPGGSLRLSCAASGFSFSDFWMSWVRQAPGKGLEWVATISQAGSEKDYVDSVKGRFTISRDNAKKSLYLQMNSLRAEDTAVYYCASGVYSFDYRGQGTLVTVSSGTGGGGSGGGGSGGGGSEFDIQMTQSPSSLSASVGDRVTITCKSSQSVLYSSNQKNYLAWFQQKPGKAPKLLIYWASTRESGVPSRFSGSGSGTDFTLTISSLQPEDFATYFCHQYLSSYTFGQGTKVEIKRLEDLKNVFPPEVAVFEPSEAEISHTQKATLVCLATGFYPDHVELSWWVNGKEVHSGVCTDPQPLKEQPALNDSRYCLSSRLRVSATFWQNPRNHFRCQVQFYGLSENDEWTQDRAKPVTQIVSAEAWGRADDVIKIHWQEKKSNTILGSQEGNTMKTNDTYMKFSWLTVPEKSLDKEHRCIVRHENNKNGVDQEIIFPPIKTDVITMDPKDNCSKDANDTLLLQLTNTSAYYMYLLLLLKSVVYFAIITCCLLRRTAFCCNGEKSRAKRSGSGATNFSLLKQAGDVEENPGPTSMDWIWRILFLVGAATGAHSFEEVQLVESGGGLVQPGGSLRLSCAASGYTFTTYWMHWVRQAPGKGLEWVGYIRPSTGYTEYNQKFKDRFTISADTSKNTAYLQMNSLRAEDTAVYYCARSRWLLDYWGQGTLVTVSTRIQNPDPAVYQLRDSKSSDKSVCLFTDFDSQTNVSQSKDSDVYITDKCVLDMRSMDFKSNSAVAWSNKSDFACANAFNNSIIPEDTFFPSPESSDSTDHVKPKETENTKQPSKSCHKPKAIVHTEKVNMMSLTVLGLRMLFAKTVAVNFLLTAKLFFL

SEQ ID NO: 15914 - protein, 855 aa, synthetic construct
MALPVTALLLPLALLLHAARPEVQLVESGGGLVQPGGSLRLSCAASGFSFSDFWMSWVRQAPGKGLEWVATISQAGSEKDYVDSVKGRFTISRDNAKKSLYLQMNSLRAEDTAVYYCASGVYSFDYRGQGTLVTVSSGTGGGGSGGGGSGGGGSEFDIQMTQSPSSLSASVGDRVTITCRASQDISNYLNWYQQKPGKAPKLLIYYTSRLHSGVPSRFSGSGSGTDFTLTISSLQPEDFATYYCQQGNTLPYTFGQGTKVEIKRLEDLKNVFPPEVAVFEPSEAEISHTQKATLVCLATGFYPDHVELSWWVNGKEVHSGVCTDPQPLKEQPALNDSRYCLSSRLRVSATFWQNPRNHFRCQVQFYGLSENDEWTQDRAKPVTQIVSAEAWGRADDVIKIHWQEKKSNTILGSQEGNTMKTNDTYMKFSWLTVPEKSLDKEHRCIVRHENNKNGVDQEIIFPPIKTDVITMDPKDNCSKDANDTLLLQLTNTSAYYMYLLLLLKSVVYFAIITCCLLRRTAFCCNGEKSRAKRSGSGATNFSLLKQAGDVEENPGPTSMDWIWRILFLVGAATGAHSFEEVQLVESGGGLVQPGGSLRLSCAASGFTFSDYFMSWVRQAPGKGLEWVATISNGGTYTYYPDSVKGRFTISRDNSKNTLYLQMNSLRAEDTAVYYCARFDGYIFDYWGQGTLVTVSSTRIQNPDPAVYQLRDSKSSDKSVCLFTDFDSQTNVSQSKDSDVYITDKCVLDMRSMDFKSNSAVAWSNKSDFACANAFNNSIIPEDTFFPSPESSDSTDHVKPKETENTKQPSKSCHKPKAIVHTEKVNMMSLTVLGLRMLFAKTVAVNFLLTAKLFFL

SEQ ID NO: 15915 - protein, 860 aa, synthetic construct
MALPVTALLLPLALLLHAARPEVQLVESGGGLVQPGGSLRLSCAASGFSFSDFWMSWVRQAPGKGLEWVATISQAGSEKDYVDSVKGRFTISRDNAKKSLYLQMNSLRAEDTAVYYCASGVYSFDYRGQGTLVTVSSGTGGGGSGGGGSGGGGSEFDIQMTQTTSSLSASLGDRVTISCRASQDISKYLNWYQQKPDGTVKLLIYHTSRLHSGVPSRFSGSGSGTDYSLTISNLEQEDIATYFCQQGNTLPYTFGGGTKLEITLEIQNPDPAVYQLRDSKSSDKSVCLFTDFDSQTNVSQSKDSDVYITDKCVLDMRSMDFKSNSAVAWSNKSDFACANAFNNSIIPEDTFFPSPESSDSTDHVKPKETENTKQPSKSCHKPKAIVHTEKVNMMSLTVLGLRMLFAKTVAVNFLLTAKLFFLRAKRSGSGVKQTLNFDLLKLAGDVESNPGPTSMDWIWRILFLVGAATGAHSFEVKLQESGPGLVAPSQSLSVTCTVSGVSLPDYGVSWIRQPPRKGLEWLGVIWGSETTYYNSALKSRLTIIKDNSKSQVFLKMNSLQTDDTAIYYCAKHYYYGGSYAMDYWGQGTSVTVSSTREDLKNVFPPEVAVFEPSEAEISHTQKATLVCLATGFYPDHVELSWWVNGKEVHSGVCTDPQPLKEQPALNDSRYCLSSRLRVSATFWQNPRNHFRCQVQFYGLSENDEWTQDRAKPVTQIVSAEAWGRADDVIKIHWQEKKSNTILGSQEGNTMKTNDTYMKFSWLTVPEKSLDKEHRCIVRHENNKNGVDQEIIFPPIKTDVITMDPKDNCSKDANDTLLLQLTNTSAYYMYLLLLLKSVVYFAIITCCLLRRTAFCCNGEKS

SEQ ID NO: 15916 - protein, 861 aa, synthetic construct
MALPVTALLLPLALLLHAARPEVQLVESGGGLVQPGGSLRLSCAASGFSFSDFWMSWVRQAPGKGLEWVATISQAGSEKDYVDSVKGRFTISRDNAKKSLYLQMNSLRAEDTAVYYCASGVYSFDYRGQGTLVTVSSGTGGGGSGGGGSGGGGSEFEIVMTQSPATLSLSPGERATLSCRASQDISKYLNWYQQKPGQAPRLLIYHTSRLHSGIPARFSGSGSGTDYTLTISSLQPEDFAVYFCQQGNTLPYTFGQGTKLEIKLEIQNPDPAVYQLRDSKSSDKSVCLFTDFDSQTNVSQSKDSDVYITDKCVLDMRSMDFKSNSAVAWSNKSDFACANAFNNSIIPEDTFFPSPESSDSTDHVKPKETENTKQPSKSCHKPKAIVHTEKVNMMSLTVLGLRMLFAKTVAVNFLLTAKLFFLRAKRSGSGVKQTLNFDLLKLAGDVESNPGPTSMDWIWRILFLVGAATGAHSFEQVQLQESGPGLVKPSETLSLTCTVSGVSLPDYGVSWIRQPPGKGLEWIGVIWGSETTYYNSSLKSRVTISKDNSKNQVSLKLSSVTAADTAVYYCAKHYYYGGSYAMDYWGQGTLVTVSSTREDLKNVFPPEVAVFEPSEAEISHTQKATLVCLATGFYPDHVELSWWVNGKEVHSGVCTDPQPLKEQPALNDSRYCLSSRLRVSATFWQNPRNHFRCQVQFYGLSENDEWTQDRAKPVTQIVSAEAWGRADDVIKIHWQEKKSNTILGSQEGNTMKTNDTYMKFSWLTVPEKSLDKEHRCIVRHENNKNGVDQEIIFPPIKTDVITMDPKDNCSKDANDTLLLQLTNTSAYYMYLLLLLKSVVYFAIITCCLLRRTAFCCNGEKS

SEQ ID NO: 15917 - protein, 862 aa, synthetic construct
MALPVTALLLPLALLLHAARPEVQLVESGGGLVQPGGSLRLSCAASGFSFSDFWMSWVRQAPGKGLEWVATISQAGSEKDYVDSVKGRFTISRDNAKKSLYLQMNSLRAEDTAVYYCASGVYSFDYRGQGTLVTVSSGTGGGGSGGGGSGGGGSEFDEIVLTQSPATLSLSPGERATLSCSASSSVSYMHWYQQKPGQAPRLLIYDTSKLASGIPARFSGSGSGTDFTLTISSLEPEDVAVYYCFQGSVYPFTFGQGTKLEIKRLEIQNPDPAVYQLRDSKSSDKSVCLFTDFDSQTNVSQSKDSDVYITDKCVLDMRSMDFKSNSAVAWSNKSDFACANAFNNSIIPEDTFFPSPESSDSTDHVKPKETENTKQPSKSCHKPKAIVHTEKVNMMSLTVLGLRMLFAKTVAVNFLLTAKLFFLRAKRSGSGVKQTLNFDLLKLAGDVESNPGPTSMDWIWRILFLVGAATGAHSFEQVQLQESGPGLVKPSQTLSLTCTVSGGSISTSGMGVGWIRQHPGKGLEWIGHIWWDDDKRYNPALKSRVTISVDTSKNQFSLKLSSVTAADTAVYYCARMELWSYYFDYWGQGTLVTVSSTREDLKNVFPPEVAVFEPSEAEISHTQKATLVCLATGFYPDHVELSWWVNGKEVHSGVCTDPQPLKEQPALNDSRYCLSSRLRVSATFWQNPRNHFRCQVQFYGLSENDEWTQDRAKPVTQIVSAEAWGRADDVIKIHWQEKKSNTILGSQEGNTMKTNDTYMKFSWLTVPEKSLDKEHRCIVRHENNKNGVDQEIIFPPIKTDVITMDPKDNCSKDANDTLLLQLTNTSAYYMYLLLLLKSVVYFAIITCCLLRRTAFCCNGEKS

SEQ ID NO: 15918 - protein, 860 aa, synthetic construct
MALPVTALLLPLALLLHAARPEVQLVESGGGLVQPGGSLRLSCAASGFSFSDFWMSWVRQAPGKGLEWVATISQAGSEKDYVDSVKGRFTISRDNAKKSLYLQMNSLRAEDTAVYYCASGVYSFDYRGQGTLVTVSSGTGGGGSGGGGSGGGGSEFDYIHVTQSPSSLSVSIGDRVTINCQTSQGVGSDLHWYQHKPGRAPKLLIHHASSVEDGVPSRFSGTGFHTSFNLTINDLQADDIGTYYCQVLQSFGRGSRLDTKLEIQNPDPAVYQLRDSKSSDKSVCLFTDFDSQTNVSQSKDSDVYITDKCVLDMRSMDFKSNSAVAWSNKSDFACANAFNNSIIPEDTFFPSPESSDSTDHVKPKETENTKQPSKSCHKPKAIVHTEKVNMMSLTVLGLRMLFAKTVAVNFLLTAKLFFLRAKRSGSGVKQTLNFDLLKLAGDVESNPGPTSMDWIWRILFLVGAATGAHSFERAHLVQSGTAMKKPGASVRVSCQTSGYTFTAHILFWFRQAPGRGLEWVGWIKPQYGAVNFGGGFRDRVTLTRDVYREIAYMDIRGLKPDDTAVYYCARDRSYGDSSWALDAWGQGTTVVVSATREDLKNVFPPEVAVFEPSEAEISHTQKATLVCLATGFYPDHVELSWWVNGKEVHSGVCTDPQPLKEQPALNDSRYCLSSRLRVSATFWQNPRNHFRCQVQFYGLSENDEWTQDRAKPVTQIVSAEAWGRADDVIKIHWQEKKSNTILGSQEGNTMKTNDTYMKFSWLTVPEKSLDKEHRCIVRHENNKNGVDQEIIFPPIKTDVITMDPKDNCSKDANDTLLLQLTNTSAYYMYLLLLLKSVVYFAIITCCLLRRTAFCCNGEKS

SEQ ID NO: 15919 - protein, 870 aa, synthetic construct
MALPVTALLLPLALLLHAARPEVQLVESGGGLVQPGGSLRLSCAASGFSFSDFWMSWVRQAPGKGLEWVATISQAGSEKDYVDSVKGRFTISRDNAKKSLYLQMNSLRAEDTAVYYCASGVYSFDYRGQGTLVTVSSGTGGGGSGGGGSGGGGSEFDVQMIQTPDSLAVSLGQRATISCRASESVDNYGISFMHWYQQKPGQSPKLLIYRASNLESGIPARFSGSGSRTDFTLTINPVETDDVATYYCQQNNKDPPTFGGGTKLEIKLEIQNPDPAVYQLRDSKSSDKSVCLFTDFDSQTNVSQSKDSDVYITDKCVLDMRSMDFKSNSAVAWSNKSDFACANAFNNSIIPEDTFFPSPESSDSTDHVKPKETENTKQPSKSCHKPKAIVHTEKVNMMSLTVLGLRMLFAKTVAVNFLLTAKLFFLRAKRSGSGVKQTLNFDLLKLAGDVESNPGPTSMDWIWRILFLVGAATGAHSFEGGGGSQVQLQQSGAELVKPGASVKISCKASGYAFSSYWMNWVKQRPGKGLEWIGQIYPGDGDTTYNGKFKGKATLTADKSSSTVYMQLNSLTSEDSAVYFCVRYYYGSSGYFDYWGQGTTLTVSSTREDLKNVFPPEVAVFEPSEAEISHTQKATLVCLATGFYPDHVELSWWVNGKEVHSGVCTDPQPLKEQPALNDSRYCLSSRLRVSATFWQNPRNHFRCQVQFYGLSENDEWTQDRAKPVTQIVSAEAWGRADDVIKIHWQEKKSNTILGSQEGNTMKTNDTYMKFSWLTVPEKSLDKEHRCIVRHENNKNGVDQEIIFPPIKTDVITMDPKDNCSKDANDTLLLQLTNTSAYYMYLLLLLKSVVYFAIITCCLLRRTAFCCNGEKS

SEQ ID NO: 15920 - protein, 861 aa, synthetic construct
MALPVTALLLPLALLLHAARPEVQLVESGGGLVQPGGSLRLSCAASGFSFSDFWMSWVRQAPGKGLEWVATISQAGSEKDYVDSVKGRFTISRDNAKKSLYLQMNSLRAEDTAVYYCASGVYSFDYRGQGTLVTVSSGTGGGGSGGGGSGGGGSEFDVQMIQTPSSLSASLGDRVTISCRASQDIGNYLNWYQQKPDGTVKLLIYYTSRLHSGVPSRFSGSGSGTEYSLTISNLEQEDIATYFCQQGSALPPTFGGGTKLEINLEIQNPDPAVYQLRDSKSSDKSVCLFTDFDSQTNVSQSKDSDVYITDKCVLDMRSMDFKSNSAVAWSNKSDFACANAFNNSIIPEDTFFPSPESSDSTDHVKPKETENTKQPSKSCHKPKAIVHTEKVNMMSLTVLGLRMLFAKTVAVNFLLTAKLFFLRAKRSGSGVKQTLNFDLLKLAGDVESNPGPTSMDWIWRILFLVGAATGAHSFEALQLQQSGAELVRPGASVTLSCKASGYTFTDYEMHWVKQTPVHGLEWIGAIDPETGGTAYNQKFEGKAILTADKSSSTAYMELRSLTSEDSPVYYCARRRYYGSSSFDYWGQGTTLTVSSTREDLKNVFPPEVAVFEPSEAEISHTQKATLVCLATGFYPDHVELSWWVNGKEVHSGVCTDPQPLKEQPALNDSRYCLSSRLRVSATFWQNPRNHFRCQVQFYGLSENDEWTQDRAKPVTQIVSAEAWGRADDVIKIHWQEKKSNTILGSQEGNTMKTNDTYMKFSWLTVPEKSLDKEHRCIVRHENNKNGVDQEIIFPPIKTDVITMDPKDNCSKDANDTLLLQLTNTSAYYMYLLLLLKSVVYFAIITCCLLRRTAFCCNGEKS

SEQ ID NO: 15921 - protein, 865 aa, synthetic construct
MALPVTALLLPLALLLHAARPEVQLVESGGGLVQPGGSLRLSCAASGFSFSDFWMSWVRQAPGKGLEWVATISQAGSEKDYVDSVKGRFTISRDNAKKSLYLQMNSLRAEDTAVYYCASGVYSFDYRGQGTLVTVSSGTGGGGSGGGGSGGGGSEFDIVLTQSPASLAVSLGQRATISCRASKSVSTSGYSYLHWYQQKPGQPPKLLIYLASNLESGVPARFSGSGSGTDFTLNIHPVEEEDAATYYCQHSRELPFTFGSGTKLEIKLEIQNPDPAVYQLRDSKSSDKSVCLFTDFDSQTNVSQSKDSDVYITDKCVLDMRSMDFKSNSAVAWSNKSDFACANAFNNSIIPEDTFFPSPESSDSTDHVKPKETENTKQPSKSCHKPKAIVHTEKVNMMSLTVLGLRMLFAKTVAVNFLLTAKLFFLRAKRSGSGVKQTLNFDLLKLAGDVESNPGPTSMDWIWRILFLVGAATGAHSFEQVQLVESGGGLVQPGGSLKLSCAASGFDFSRYWMSWVRQAPGKGLEWIGEINPTSSTINFTPSLKDKVFISRDNAKNTLYLQMSKVRSEDTALYYCARGNYYRYGDAMDYWGQGTSVTVSTREDLKNVFPPEVAVFEPSEAEISHTQKATLVCLATGFYPDHVELSWWVNGKEVHSGVCTDPQPLKEQPALNDSRYCLSSRLRVSATFWQNPRNHFRCQVQFYGLSENDEWTQDRAKPVTQIVSAEAWGRADDVIKIHWQEKKSNTILGSQEGNTMKTNDTYMKFSWLTVPEKSLDKEHRCIVRHENNKNGVDQEIIFPPIKTDVITMDPKDNCSKDANDTLLLQLTNTSAYYMYLLLLLKSVVYFAIITCCLLRRTAFCCNGEKS

SEQ ID NO: 15922 - protein, 863 aa, synthetic construct
MALPVTALLLPLALLLHAARPEVQLVESGGGLVQPGGSLRLSCAASGFSFSDFWMSWVRQAPGKGLEWVATISQAGSEKDYVDSVKGRFTISRDNAKKSLYLQMNSLRAEDTAVYYCASGVYSFDYRGQGTLVTVSSGTGGGGSGGGGSGGGGSEFDIQMTQSPSSLSASVGDRVTITCSASQDISNYLNWYQQKPGKAPKLLIYYTSNLHSGVPSRFSGSGSGTDFTLTISSLQPEDFATYYCQQYRKLPWTFGQGTKLEIKRLEIQNPDPAVYQLRDSKSSDKSVCLFTDFDSQTNVSQSKDSDVYITDKCVLDMRSMDFKSNSAVAWSNKSDFACANAFNNSIIPEDTFFPSPESSDSTDHVKPKETENTKQPSKSCHKPKAIVHTEKVNMMSLTVLGLRMLFAKTVAVNFLLTAKLFFLRAKRSGSGVKQTLNFDLLKLAGDVESNPGPTSMDWIWRILFLVGAATGAHSFEQVQLVQSGAEVKKPGSSVKVSCKASGGTFSNYWMHWVRQAPGQGLEWMGATYRGHSDTYYNQKFKGRVTITADKSTSTAYMELSSLRSEDTAVYYCARGAIYDGYDVLDNWGQGTLVTVSSTREDLKNVFPPEVAVFEPSEAEISHTQKATLVCLATGFYPDHVELSWWVNGKEVHSGVCTDPQPLKEQPALNDSRYCLSSRLRVSATFWQNPRNHFRCQVQFYGLSENDEWTQDRAKPVTQIVSAEAWGRADDVIKIHWQEKKSNTILGSQEGNTMKTNDTYMKFSWLTVPEKSLDKEHRCIVRHENNKNGVDQEIIFPPIKTDVITMDPKDNCSKDANDTLLLQLTNTSAYYMYLLLLLKSVVYFAIITCCLLRRTAFCCNGEKS

SEQ ID NO: 15923 - protein, 863 aa, synthetic construct
MALPVTALLLPLALLLHAARPEVQLVESGGGLVQPGGSLRLSCAASGFSFSDFWMSWVRQAPGKGLEWVATISQAGSEKDYVDSVKGRFTISRDNAKKSLYLQMNSLRAEDTAVYYCASGVYSFDYRGQGTLVTVSSGTGGGGSGGGGSGGGGSEFDIVLTQSPATLSLSPGDRATISCRASESVTILGSHLIYWYQQKPGQPPRLLIQLASNVQTGVPARFSGSGSRTDFTLTISSVEPEDFAVYYCLQSRTIPRTFGQGTKLEIKRLEIQNPDPAVYQLRDSKSSDKSVCLFTDFDSQTNVSQSKDSDVYITDKCVLDMRSMDFKSNSAVAWSNKSDFACANAFNNSIIPEDTFFPSPESSDSTDHVKPKETENTKQPSKSCHKPKAIVHTEKVNMMSLTVLGLRMLFAKTVAVNFLLTAKLFFLRAKRSGSGVKQTLNFDLLKLAGDVESNPGPTSMDWIWRILFLVGAATGAHSFEQVQLVQSGPEVKKPGESVKISCKASGYTFRHYSMNWVKQAPGQGLKWMGRINTESGVPIYADDFKGRFSFTVDTSASTAYLEISSLTSEDTAVYFCSNDYLYSLDFWGQGTTLTVSSTREDLKNVFPPEVAVFEPSEAEISHTQKATLVCLATGFYPDHVELSWWVNGKEVHSGVCTDPQPLKEQPALNDSRYCLSSRLRVSATFWQNPRNHFRCQVQFYGLSENDEWTQDRAKPVTQIVSAEAWGRADDVIKIHWQEKKSNTILGSQEGNTMKTNDTYMKFSWLTVPEKSLDKEHRCIVRHENNKNGVDQEIIFPPIKTDVITMDPKDNCSKDANDTLLLQLTNTSAYYMYLLLLLKSVVYFAIITCCLLRRTAFCCNGEKS

SEQ ID NO: 15924 - protein, 864 aa, synthetic construct
MALPVTALLLPLALLLHAARPEVQLVESGGGLVQPGGSLRLSCAASGFSFSDFWMSWVRQAPGKGLEWVATISQAGSEKDYVDSVKGRFTISRDNAKKSLYLQMNSLRAEDTAVYYCASGVYSFDYRGQGTLVTVSSGTGGGGSGGGGSGGGGSEFQSVLTQPPSVSGAPGQRVTISCTGSSSNIGAGFDVHWYQQLPGTAPKLLIYGNSNRPSGVPDRFSGSKSGTSASLAITGLQAEDEADYYCQSYDSSLSGYVFGTGTKVTVLGLEIQNPDPAVYQLRDSKSSDKSVCLFTDFDSQTNVSQSKDSDVYITDKCVLDMRSMDFKSNSAVAWSNKSDFACANAFNNSIIPEDTFFPSPESSDSTDHVKPKETENTKQPSKSCHKPKAIVHTEKVNMMSLTVLGLRMLFAKTVAVNFLLTAKLFFLRAKRSGSGVKQTLNFDLLKLAGDVESNPGPTSMDWIWRILFLVGAATGAHSFEQVQLVQSGAEVKKPGASVKVSCKASGYTFTDYYMHWVRQAPGQRLEWMGWINPNSGGTNYAQKFQDRITVTRDTSSNTGYMELTRLRSDDTAVYYCARSPYSGVLDKWGQGTLVTVSSTREDLKNVFPPEVAVFEPSEAEISHTQKATLVCLATGFYPDHVELSWWVNGKEVHSGVCTDPQPLKEQPALNDSRYCLSSRLRVSATFWQNPRNHFRCQVQFYGLSENDEWTQDRAKPVTQIVSAEAWGRADDVIKIHWQEKKSNTILGSQEGNTMKTNDTYMKFSWLTVPEKSLDKEHRCIVRHENNKNGVDQEIIFPPIKTDVITMDPKDNCSKDANDTLLLQLTNTSAYYMYLLLLLKSVVYFAIITCCLLRRTAFCCNGEKS

SEQ ID NO: 15925 - protein, 861 aa, synthetic construct
MALPVTALLLPLALLLHAARPEVQLVESGGGLVQPGGSLRLSCAASGFSFSDFWMSWVRQAPGKGLEWVATISQAGSEKDYVDSVKGRFTISRDNAKKSLYLQMNSLRAEDTAVYYCASGVYSFDYRGQGTLVTVSSGTGGGGSGGGGSGGGGSEFQAVLTQPPSASGTPGQRVTISCSGSSSNIGSYTVSWYQQLPGTAPKFLIYSNNQRPSGVPDRFSGSKSGTSASLAISGLQSEDEADYYCAAWDDSLNGYVFGTGTKVTVLGLEIQNPDPAVYQLRDSKSSDKSVCLFTDFDSQTNVSQSKDSDVYITDKCVLDMRSMDFKSNSAVAWSNKSDFACANAFNNSIIPEDTFFPSPESSDSTDHVKPKETENTKQPSKSCHKPKAIVHTEKVNMMSLTVLGLRMLFAKTVAVNFLLTAKLFFLRAKRSGSGVKQTLNFDLLKLAGDVESNPGPTSMDWIWRILFLVGAATGAHSFEVQLVQSGAEVKKPGESLKISCKGSGYDFTTYWIGWVRQMPGKGLEWMGIIYPGDSDTRYSPSVRGRVTISADKSINTAYLQWSSLEASDTAMYYCARMWTFSQDGWGQGTLVTVSSTREDLKNVFPPEVAVFEPSEAEISHTQKATLVCLATGFYPDHVELSWWVNGKEVHSGVCTDPQPLKEQPALNDSRYCLSSRLRVSATFWQNPRNHFRCQVQFYGLSENDEWTQDRAKPVTQIVSAEAWGRADDVIKIHWQEKKSNTILGSQEGNTMKTNDTYMKFSWLTVPEKSLDKEHRCIVRHENNKNGVDQEIIFPPIKTDVITMDPKDNCSKDANDTLLLQLTNTSAYYMYLLLLLKSVVYFAIITCCLLRRTAFCCNGEKS

SEQ ID NO: 15926 - protein, 864 aa, synthetic construct
MALPVTALLLPLALLLHAARPEVQLVESGGGLVQPGGSLRLSCAASGFSFSDFWMSWVRQAPGKGLEWVATISQAGSEKDYVDSVKGRFTISRDNAKKSLYLQMNSLRAEDTAVYYCASGVYSFDYRGQGTLVTVSSGTGGGGSGGGGSGGGGSEFDIVMTQSPDSLAVSLGERATINCKSSQSILYSSNQKNYLAWYQQKPGQSPKLLIYWASTRESGVPDRFSGSGSGTDFTLTISSLQAEDVAVYYCHQYISSYTFGQGTKLEIKLEIQNPDPAVYQLRDSKSSDKSVCLFTDFDSQTNVSQSKDSDVYITDKCVLDMRSMDFKSNSAVAWSNKSDFACANAFNNSIIPEDTFFPSPESSDSTDHVKPKETENTKQPSKSCHKPKAIVHTEKVNMMSLTVLGLRMLFAKTVAVNFLLTAKLFFLRAKRSGSGVKQTLNFDLLKLAGDVESNPGPTSMDWIWRILFLVGAATGAHSFEQVQLVQSGAEVKKPGASVKVSCKASGYTFASQWMHWMRQAPGQGLEWIGWINPGNVNTKYNEKFKGRATLTVDTSTNTAYMELSSLRSEDTAVYYCARSTWYRPLDYWGQGTLVTVSSTREDLKNVFPPEVAVFEPSEAEISHTQKATLVCLATGFYPDHVELSWWVNGKEVHSGVCTDPQPLKEQPALNDSRYCLSSRLRVSATFWQNPRNHFRCQVQFYGLSENDEWTQDRAKPVTQIVSAEAWGRADDVIKIHWQEKKSNTILGSQEGNTMKTNDTYMKFSWLTVPEKSLDKEHRCIVRHENNKNGVDQEIIFPPIKTDVITMDPKDNCSKDANDTLLLQLTNTSAYYMYLLLLLKSVVYFAIITCCLLRRTAFCCNGEKS

SEQ ID NO: 15927 - protein, 864 aa, synthetic construct
MALPVTALLLPLALLLHAARPEVQLVESGGGLVQPGGSLRLSCAASGFSFSDFWMSWVRQAPGKGLEWVATISQAGSEKDYVDSVKGRFTISRDNAKKSLYLQMNSLRAEDTAVYYCASGVYSFDYRGQGTLVTVSSGTGGGGSGGGGSGGGGSEFDHIVLTQSPSSLSASLGDRVTISCRASQDISTYLNWYQQKPDGTVKLLIFYTSRLHAGVPSRFSGSGSGTHHSLTISNLEQEDIATYFCQQGNSLPFTFGSGTKLEIKRLEIQNPDPAVYQLRDSKSSDKSVCLFTDFDSQTNVSQSKDSDVYITDKCVLDMRSMDFKSNSAVAWSNKSDFACANAFNNSIIPEDTFFPSPESSDSTDHVKPKETENTKQPSKSCHKPKAIVHTEKVNMMSLTVLGLRMLFAKTVAVNFLLTAKLFFLRAKRSGSGVKQTLNFDLLKLAGDVESNPGPTSMDWIWRILFLVGAATGAHSFEQVQLKESGPELEKPGASVKISCKASGYSFTAYSMNWVKQNNGMSLEWIGSIDPYYGDTKYAQKFKGKATLTVDKASSTAYLQLKSLTSEDSAVYYCARRMITTGDWYFDVWGAGTTVTVSSTREDLKNVFPPEVAVFEPSEAEISHTQKATLVCLATGFYPDHVELSWWVNGKEVHSGVCTDPQPLKEQPALNDSRYCLSSRLRVSATFWQNPRNHFRCQVQFYGLSENDEWTQDRAKPVTQIVSAEAWGRADDVIKIHWQEKKSNTILGSQEGNTMKTNDTYMKFSWLTVPEKSLDKEHRCIVRHENNKNGVDQEIIFPPIKTDVITMDPKDNCSKDANDTLLLQLTNTSAYYMYLLLLLKSVVYFAIITCCLLRRTAFCCNGEKS

SEQ ID NO: 15928 - protein, 864 aa, synthetic construct; identical to SEQ ID NO: 15927

SEQ ID NO: 15929 - protein, 864 aa, synthetic construct
MALPVTALLLPLALLLHAARPEVQLVESGGGLVQPGGSLRLSCAASGFSFSDFWMSWVRQAPGKGLEWVATISQAGSEKDYVDSVKGRFTISRDNAKKSLYLQMNSLRAEDTAVYYCASGVYSFDYRGQGTLVTVSSGTGGGGSGGGGSGGGGSEFDEIVLTQSPATLSLSPGERATLSCRASQSVSSYLAWYQQKPGQAPRLLIYDASNRATGIPARFSGSGSGTDFTLTISSLEPEDFAVYYCQQRSNWPITFGQGTRLEIKLEIQNPDPAVYQLRDSKSSDKSVCLFTDFDSQTNVSQSKDSDVYITDKCVLDMRSMDFKSNSAVAWSNKSDFACANAFNNSIIPEDTFFPSPESSDSTDHVKPKETENTKQPSKSCHKPKAIVHTEKVNMMSLTVLGLRMLFAKTVAVNFLLTAKLFFLRAKRSGSGVKQTLNFDLLKLAGDVESNPGPTSMDWIWRILFLVGAATGAHSFEEVQLVESGGGLVQPGRSLRLSCAASGFTFNDYAMHWVRQAPGKGLEWVSTISWNSGSIGYADSVKGRFTISRDNAKKSLYLQMNSLRAEDTALYYCAKDIQYGNYYYGMDVWGQGTTVTVSSTREDLKNVFPPEVAVFEPSEAEISHTQKATLVCLATGFYPDHVELSWWVNGKEVHSGVCTDPQPLKEQPALNDSRYCLSSRLRVSATFWQNPRNHFRCQVQFYGLSENDEWTQDRAKPVTQIVSAEAWGRADDVIKIHWQEKKSNTILGSQEGNTMKTNDTYMKFSWLTVPEKSLDKEHRCIVRHENNKNGVDQEIIFPPIKTDVITMDPKDNCSKDANDTLLLQLTNTSAYYMYLLLLLKSVVYFAIITCCLLRRTAFCCNGEKS

SEQ ID NO: 15930 - protein, 866 aa, synthetic construct
MALPVTALLLPLALLLHAARPEVQLVESGGGLVQPGGSLRLSCAASGFSFSDFWMSWVRQAPGKGLEWVATISQAGSEKDYVDSVKGRFTISRDNAKKSLYLQMNSLRAEDTAVYYCASGVYSFDYRGQGTLVTVSSGTGGGGSGGGGSGGGGSEFDIVMTQTPLSLPVTPGEPASISCRSSKSLLHSNGITYLYWYLQKPGQSPQLLIYQMSNLVSGVPDRFSGSGSGTDFTLKISRVEAEDVGVYYCAQNLELPYTFGGGTKVEIKRLEIQNPDPAVYQLRDSKSSDKSVCLFTDFDSQTNVSQSKDSDVYITDKCVLDMRSMDFKSNSAVAWSNKSDFACANAFNNSIIPEDTFFPSPESSDSTDHVKPKETENTKQPSKSCHKPKAIVHTEKVNMMSLTVLGLRMLFAKTVAVNFLLTAKLFFLRAKRSGSGVKQTLNFDLLKLAGDVESNPGPTSMDWIWRILFLVGAATGAHSFEQVQLVQSGAEVKKPGSSVKVSCKASGYAFSYSWINWVRQAPGQGLEWMGRIFPGDGDTDYNGKFKGRVTITADKSTSTAYMELSSLRSEDTAVYYCARNVFDGYWLVYWGQGTLVTVSSTREDLKNVFPPEVAVFEPSEAEISHTQKATLVCLATGFYPDHVELSWWVNGKEVHSGVCTDPQPLKEQPALNDSRYCLSSRLRVSATFWQNPRNHFRCQVQFYGLSENDEWTQDRAKPVTQIVSAEAWGRADDVIKIHWQEKKSNTILGSQEGNTMKTNDTYMKFSWLTVPEKSLDKEHRCIVRHENNKNGVDQEIIFPPIKTDVITMDPKDNCSKDANDTLLLQLTNTSAYYMYLLLLLKSVVYFAIITCCLLRRTAFCCNGEKS

SEQ ID NO: 15931 - protein, 867 aa, synthetic construct
MALPVTALLLPLALLLHAARPEVQLVESGGGLVQPGGSLRLSCAASGFSFSDFWMSWVRQAPGKGLEWVATISQAGSEKDYVDSVKGRFTISRDNAKKSLYLQMNSLRAEDTAVYYCASGVYSFDYRGQGTLVTVSSGTGGGGSGGGGSGGGGSEFDIQMTQSPSSLSASVGDRVTITCRSSQSIVHSVGNTFLEWYQQKPGKAPKLLIYKVSNRFSGVPSRFSGSGSGTDFTLTISSLQPEDFATYYCFQGSQFPYTFGQGTKVEIKRLEIQNPDPAVYQLRDSKSSDKSVCLFTDFDSQTNVSQSKDSDVYITDKCVLDMRSMDFKSNSAVAWSNKSDFACANAFNNSIIPEDTFFPSPESSDSTDHVKPKETENTKQPSKSCHKPKAIVHTEKVNMMSLTVLGLRMLFAKTVAVNFLLTAKLFFLRAKRSGSGVKQTLNFDLLKLAGDVESNPGPTSMDWIWRILFLVGAATGAHSFEEVQLVESGGGLVQPGGSLRLSCAASGYEFSRSWMNWVRQAPGKGLEWVGRIYPGDGDTNYSGKFKGRFTISADTSKNTAYLQMNSLRAEDTAVYYCARDGSSWDWYFDVWGQGTLVTVSSTREDLKNVFPPEVAVFEPSEAEISHTQKATLVCLATGFYPDHVELSWWVNGKEVHSGVCTDPQPLKEQPALNDSRYCLSSRLRVSATFWQNPRNHFRCQVQFYGLSENDEWTQDRAKPVTQIVSAEAWGRADDVIKIHWQEKKSNTILGSQEGNTMKTNDTYMKFSWLTVPEKSLDKEHRCIVRHENNKNGVDQEIIFPPIKTDVITMDPKDNCSKDANDTLLLQLTNTSAYYMYLLLLLKSVVYFAIITCCLLRRTAFCCNGEKS

SEQ ID NO: 15932 - protein, 865 aa, synthetic construct
MALPVTALLLPLALLLHAARPEVQLVESGGGLVQPGGSLRLSCAASGFSFSDFWMSWVRQAPGKGLEWVATISQAGSEKDYVDSVKGRFTISRDNAKKSLYLQMNSLRAEDTAVYYCASGVYSFDYRGQGTLVTVSSGTGGGGSGGGGSGGGGSEFDIQMTQSPSSLSASVGDRVTITCRASQTIWSYLNWYQQRPGKAPNLLIYAASSLQSGVPSRFSGRGSGTDFTLTISSLQAEDFATYYCQQSYSIPQIFGQGTKLEIKLEIQNPDPAVYQLRDSKSSDKSVCLFTDFDSQTNVSQSKDSDVYITDKCVLDMRSMDFKSNSAVAWSNKSDFACANAFNNSIIPEDTFFPSPESSDSTDHVKPKETENTKQPSKSCHKPKAIVHTEKVNMMSLTVLGLRMLFAKTVAVNFLLTAKLFFLRAKRSGSGVKQTLNFDLLKLAGDVESNPGPTSMDWIWRILFLVGAATGAHSFEQVQLQQSGPGLVKPSQTLSLTCAISGDSVSSNSAAWNWIRQSPSRGLEWLGRTYYRSKWYNDYAVSVKSRITINPDTSKNQFSLQLNSVTPEDTAVYYCAREVTGDLEDAFDIWGQGTMVTVSSTREDLKNVFPPEVAVFEPSEAEISHTQKATLVCLATGFYPDHVELSWWVNGKEVHSGVCTDPQPLKEQPALNDSRYCLSSRLRVSATFWQNPRNHFRCQVQFYGLSENDEWTQDRAKPVTQIVSAEAWGRADDVIKIHWQEKKSNTILGSQEGNTMKTNDTYMKFSWLTVPEKSLDKEHRCIVRHENNKNGVDQEIIFPPIKTDVITMDPKDNCSKDANDTLLLQLTNTSAYYMYLLLLLKSVVYFAIITCCLLRRTAFCCNGEKS

SEQ ID NO: 15933 - protein, 858 aa, synthetic construct
MALPVTALLLPLALLLHAARPEVQLVESGGGLVQPGGSLRLSCAASGFSFSDFWMSWVRQAPGKGLEWVATISQAGSEKDYVDSVKGRFTISRDNAKKSLYLQMNSLRAEDTAVYYCASGVYSFDYRGQGTLVTVSSGTGGGGSGGGGSGGGGSEFDIQMTQSPATIENTSLSASVGDRVTITCRASQGISSWLTWYQQKPEKAPKSLIYAASSLQSGVPSRFSGSGSGTDFTLTISSLQPEDFATYYCQQYDSYPITFGQGTRLEIKLEIQNPDPAVYQLRDSKSSDKSVCLFTDFDSQTNVSQSKDSDVYITDKCVLDMRSMDFKSNSAVAWSNKSDFACANAFNNSIIPEDTFFPSPESSDSTDHVKPKETENTKQPSKSCHKPKAIVHTEKVNMMSLTVLGLRMLFAKTVAVNFLLTAKLFFLRAKRSGSGVKQTLNFDLLKLAGDVESNPGPTSMDWIWRILFLVGAATGAHSFEQVQLQQWGAGLLKPSETLSLTCAVYGGSFSAYYWSWIRQPPGKGLEWIGDINHGGGTNYNPSLKSRVTISVDTSKNQFSLKLNSVTAADTAVYYCASLTAYWGQGSLVTVSSTREDLKNVFPPEVAVFEPSEAEISHTQKATLVCLATGFYPDHVELSWWVNGKEVHSGVCTDPQPLKEQPALNDSRYCLSSRLRVSATFWQNPRNHFRCQVQFYGLSENDEWTQDRAKPVTQIVSAEAWGRADDVIKIHWQEKKSNTILGSQEGNTMKTNDTYMKFSWLTVPEKSLDKEHRCIVRHENNKNGVDQEIIFPPIKTDVITMDPKDNCSKDANDTLLLQLTNTSAYYMYLLLLLKSVVYFAIITCCLLRRTAFCCNGEKS

SEQ ID NO: 15934 - protein, 863 aa, synthetic construct
MALPVTALLLPLALLLHAARPEVQLVESGGGLVQPGGSLRLSCAASGFSFSDFWMSWVRQAPGKGLEWVATISQAGSEKDYVDSVKGRFTISRDNAKKSLYLQMNSLRAEDTAVYYCASGVYSFDYRGQGTLVTVSSGTGGGGSGGGGSGGGGSEFDEIVLTQSPDSLAVSLGERATINCKASQSVDFDGDSYLNWYQQKPGQPPKVLIYAASTLQSGVPSRFSGSGSGTDFTLTINSLEAEDAATYYCQQSNEDPWTFGGGTKVEIKLEIQNPDPAVYQLRDSKSSDKSVCLFTDFDSQTNVSQSKDSDVYITDKCVLDMRSMDFKSNSAVAWSNKSDFACANAFNNSIIPEDTFFPSPESSDSTDHVKPKETENTKQPSKSCHKPKAIVHTEKVNMMSLTVLGLRMLFAKTVAVNFLLTAKLFFLRAKRSGSGVKQTLNFDLLKLAGDVESNPGPTSMDWIWRILFLVGAATGAHSFEQVQLVQSGAEVKKPGASVKVSCKVSGYTFTDYYITWVRQAPGQALEWMGWIYPGSGNTKYSQKFQGRFVFSVDTSASTAYLQLSSLKAEDTAVYYCANYGNYWFAYWGQGTLVTVSSTREDLKNVFPPEVAVFEPSEAEISHTQKATLVCLATGFYPDHVELSWWVNGKEVHSGVCTDPQPLKEQPALNDSRYCLSSRLRVSATFWQNPRNHFRCQVQFYGLSENDEWTQDRAKPVTQIVSAEAWGRADDVIKIHWQEKKSNTILGSQEGNTMKTNDTYMKFSWLTVPEKSLDKEHRCIVRHENNKNGVDQEIIFPPIKTDVITMDPKDNCSKDANDTLLLQLTNTSAYYMYLLLLLKSVVYFAIITCCLLRRTAFCCNGEKS

SEQ ID NO: 15935 - protein, 860 aa, synthetic construct
MALPVTALLLPLALLLHAARPEVQLVESGGGLVQPGGSLRLSCAASGFSFSDFWMSWVRQAPGKGLEWVATISQAGSEKDYVDSVKGRFTISRDNAKKSLYLQMNSLRAEDTAVYYCASGVYSFDYRGQGTLVTVSSGTGGGGSGGGGSGGGGSEFDIQMTQSPSSLSASVGDRVTITCRASQGISSWLAWYQQKPEKAPKSLIYAASSLQSGVPSRFSGSGSGTDFTLTISSLQPEDFATYYCQQYNSYPPTFGGGTKVEIKLEIQNPDPAVYQLRDSKSSDKSVCLFTDFDSQTNVSQSKDSDVYITDKCVLDMRSMDFKSNSAVAWSNKSDFACANAFNNSIIPEDTFFPSPESSDSTDHVKPKETENTKQPSKSCHKPKAIVHTEKVNMMSLTVLGLRMLFAKTVAVNFLLTAKLFFLRAKRSGSGVKQTLNFDLLKLAGDVESNPGPTSMDWIWRILFLVGAATGAHSFEEVQLVQSGGGLVHPGGSLRLSCAGSGFAFSSSTMHWIRQAPGKGLEWISLIGSGGGIYYGDSVKGRFTISRDNAKNSLYLQMNSLRAEDMAVYYCVRGYFDWVDYFDYWGQGTLVTVSSTREDLKNVFPPEVAVFEPSEAEISHTQKATLVCLATGFYPDHVELSWWVNGKEVHSGVCTDPQPLKEQPALNDSRYCLSSRLRVSATFWQNPRNHFRCQVQFYGLSENDEWTQDRAKPVTQIVSAEAWGRADDVIKIHWQEKKSNTILGSQEGNTMKTNDTYMKFSWLTVPEKSLDKEHRCIVRHENNKNGVDQEIIFPPIKTDVITMDPKDNCSKDANDTLLLQLTNTSAYYMYLLLLLKSVVYFAIITCCLLRRTAFCCNGEKS

SEQ ID NO: 15936 - protein, 870 aa, synthetic construct
MALPVTALLLPLALLLHAARPEVQLVESGGGLVQPGGSLRLSCAASGFSFSDFWMSWVRQAPGKGLEWVATISQAGSEKDYVDSVKGRFTISRDNAKKSLYLQMNSLRAEDTAVYYCASGVYSFDYRGQGTLVTVSSGTGGGGSGGGGSGGGGSEFDDIVMTQSPDSLTVSLGERTTINCKSSQSVLDSSKNKNSLAWYQQKPGQPPKLLLSWASTRESGIPDRFSGSGSGTDFTLTIDSLQPEDSATYYCQQSAHFPITFGQGTRLEIKLEIQNPDPAVYQLRDSKSSDKSVCLFTDFDSQTNVSQSKDSDVYITDKCVLDMRSMDFKSNSAVAWSNKSDFACANAFNNSIIPEDTFFPSPESSDSTDHVKPKETENTKQPSKSCHKPKAIVHTEKVNMMSLTVLGLRMLFAKTVAVNFLLTAKLFFLRAKRSGSGVKQTLNFDLLKLAGDVESNPGPTSMDWIWRILFLVGAATGAHSFEQVQLVQSGAEVKKPGASVKVSCKASGYTFTNYGMNWVKQAPGQGLKWMGWINTYTGEPTYADDFKGRVTMTSDTSTSTAYLELHNLRSDDTAVYYCARWSWSDGYYVYFDYWGQGTTVTVSSTREDLKNVFPPEVAVFEPSEAEISHTQKATLVCLATGFYPDHVELSWWVNGKEVHSGVCTDPQPLKEQPALNDSRYCLSSRLRVSATFWQNPRNHFRCQVQFYGLSENDEWTQDRAKPVTQIVSAEAWGRADDVIKIHWQEKKSNTILGSQEGNTMKTNDTYMKFSWLTVPEKSLDKEHRCIVRHENNKNGVDQEIIFPPIKTDVITMDPKDNCSKDANDTLLLQLTNTSAYYMYLLLLLKSVVYFAIITCCLLRRTAFCCNGEKS

SEQ ID NO: 15937 - protein, 866 aa, synthetic construct
MALPVTALLLPLALLLHAARPEVQLVESGGGLVQPGGSLRLSCAASGFSFSDFWMSWVRQAPGKGLEWVATISQAGSEKDYVDSVKGRFTISRDNAKKSLYLQMNSLRAEDTAVYYCASGVYSFDYRGQGTLVTVSSGTGGGGSGGGGSGGGGSEFDEIVLTQSPGSLAVSPGERVTMSCKSSQSVFFSSSQKNYLAWYQQIPGQSPRLLIYWASTRESGVPDRFTGSGSGTDFTLTISSVQPEDLAIYYCHQYLSSRTFGQGTKLEIKRLEIQNPDPAVYQLRDSKSSDKSVCLFTDFDSQTNVSQSKDSDVYITDKCVLDMRSMDFKSNSAVAWSNKSDFACANAFNNSIIPEDTFFPSPESSDSTDHVKPKETENTKQPSKSCHKPKAIVHTEKVNMMSLTVLGLRMLFAKTVAVNFLLTAKLFFLRAKRSGSGVKQTLNFDLLKLAGDVESNPGPTSMDWIWRILFLVGAATGAHSFEQVQLQQPGAEVVKPGASVKMSCKASGYTFTSYYIHWIKQTPGQGLEWVGVIYPGNDDISYNQKFQGKATLTADKSSTTAYMQLSSLTSEDSAVYYCAREVRLRYFDVWGQGTTVTVSSTREDLKNVFPPEVAVFEPSEAEISHTQKATLVCLATGFYPDHVELSWWVNGKEVHSGVCTDPQPLKEQPALNDSRYCLSSRLRVSATFWQNPRNHFRCQVQFYGLSENDEWTQDRAKPVTQIVSAEAWGRADDVIKIHWQEKKSNTILGSQEGNTMKTNDTYMKFSWLTVPEKSLDKEHRCIVRHENNKNGVDQEIIFPPIKTDVITMDPKDNCSKDANDTLLLQLTNTSAYYMYLLLLLKSVVYFAIITCCLLRRTAFCCNGEKS

SEQ ID NO: 15938 - protein, 870 aa, synthetic construct
MALPVTALLLPLALLLHAARPEVQLVESGGGLVQPGGSLRLSCAASGFSFSDFWMSWVRQAPGKGLEWVATISQAGSEKDYVDSVKGRFTISRDNAKKSLYLQMNSLRAEDTAVYYCASGVYSFDYRGQGTLVTVSSGTGGGGSGGGGSGGGGSEFDVLLTQSPLSLPVTLGQPASISCRSSQTIVHSNGNTYLEWFQQRPGQSPRLLIYQVSNRFSGVPDRFSGSGSGTDFTLKISRVEAEDVGVYYCFQGSHVPRTFGGGTKVEIKRALEIQNPDPAVYQLRDSKSSDKSVCLFTDFDSQTNVSQSKDSDVYITDKCVLDMRSMDFKSNSAVAWSNKSDFACANAFNNSIIPEDTFFPSPESSDSTDHVKPKETENTKQPSKSCHKPKAIVHTEKVNMMSLTVLGLRMLFAKTVAVNFLLTAKLFFLRAKRSGSGVKQTLNFDLLKLAGDVESNPGPTSMDWIWRILFLVGAATGAHSFEQIQLVQSGSELKKPGASVKVSCKASGYTFTNYGMNWVRQAPGQGLKWMGWINTNTGEPKYAEEFKGRFALSLDTSVSTAYLQINSLKAEDTAVYFCARGYGNYARGAWLAYWGQGTLVTVSSTREDLKNVFPPEVAVFEPSEAEISHTQKATLVCLATGFYPDHVELSWWVNGKEVHSGVCTDPQPLKEQPALNDSRYCLSSRLRVSATFWQNPRNHFRCQVQFYGLSENDEWTQDRAKPVTQIVSAEAWGRADDVIKIHWQEKKSNTILGSQEGNTMKTNDTYMKFSWLTVPEKSLDKEHRCIVRHENNKNGVDQEIIFPPIKTDVITMDPKDNCSKDANDTLLLQLTNTSAYYMYLLLLLKSVVYFAIITCCLLRRTAFCCNGEKS

SEQ ID NO: 15939 - protein, 855 aa, synthetic construct
MALPVTALLLPLALLLHAARPEVQLVESGGGLVQPGGSLRLSCAASGFSFSDFWMSWVRQAPGKGLEWVATISQAGSEKDYVDSVKGRFTISRDNAKKSLYLQMNSLRAEDTAVYYCASGVYSFDYRGQGTLVTVSSGTGGGGSGGGGSGGGGSEFDEIVLTQSPATLSLSPGERATLSCSASSSINYIYWLQQKPGQAPRILIYLTSNLASGVPARFSGSGSGTDFTLTISSLEPEDFAVYYCLQWSSNPLTFGGGTKVEIKLEIQNPDPAVYQLRDSKSSDKSVCLFTDFDSQTNVSQSKDSDVYITDKCVLDMRSMDFKSNSAVAWSNKSDFACANAFNNSIIPEDTFFPSPESSDSTDHVKPKETENTKQPSKSCHKPKAIVHTEKVNMMSLTVLGLRMLFAKTVAVNFLLTAKLFFLRAKRSGSGVKQTLNFDLLKLAGDVESNPGPTSMDWIWRILFLVGAATGAHSFEEVQLVESGGGLVKPGGSLRLSCAASGFTFSSYDMSWVRQAPGKGLEWVSTISSGGSYTYYLDSIKGRFTISRDNAKNSLYLQMNSLRAEDTAVYYCARQGLDYWGRGTLVTVSSTREDLKNVFPPEVAVFEPSEAEISHTQKATLVCLATGFYPDHVELSWWVNGKEVHSGVCTDPQPLKEQPALNDSRYCLSSRLRVSATFWQNPRNHFRCQVQFYGLSENDEWTQDRAKPVTQIVSAEAWGRADDVIKIHWQEKKSNTILGSQEGNTMKTNDTYMKFSWLTVPEKSLDKEHRCIVRHENNKNGVDQEIIFPPIKTDVITMDPKDNCSKDANDTLLLQLTNTSAYYMYLLLLLKSVVYFAIITCCLLRRTAFCCNGEKS

SEQ ID NO: 15940 - protein, 864 aa, synthetic construct
MALPVTALLLPLALLLHAARPEVQLVESGGGLVQPGGSLRLSCAASGFSFSDFWMSWVRQAPGKGLEWVATISQAGSEKDYVDSVKGRFTISRDNAKKSLYLQMNSLRAEDTAVYYCASGVYSFDYRGQGTLVTVSSGTGGGGSGGGGSGGGGSEFDIVMTQSPDSLAVSLGERATINCRASKSVSTSGYSFMHWYQQKPGQPPKLLIYLASNLESGVPDRFSGSGSGTDFTLTISSLQAEDVAVYYCQHSREVPWTFGQGTKVEIKRLEIQNPDPAVYQLRDSKSSDKSVCLFTDFDSQTNVSQSKDSDVYITDKCVLDMRSMDFKSNSAVAWSNKSDFACANAFNNSIIPEDTFFPSPESSDSTDHVKPKETENTKQPSKSCHKPKAIVHTEKVNMMSLTVLGLRMLFAKTVAVNFLLTAKLFFLRAKRSGSGVKQTLNFDLLKLAGDVESNPGPTSMDWIWRILFLVGAATGAHSFEQVQLVQSGAEVKKPGASVKVSCKASGYTFTNYGMNWVRQAPGQGLEWMGWINTYTGEPTYADAFKGRFAFSLDTSTSTAYLQINSLRSDDTAVYYCARDYGDYGMDYWGQGTTVTVSSTREDLKNVFPPEVAVFEPSEAEISHTQKATLVCLATGFYPDHVELSWWVNGKEVHSGVCTDPQPLKEQPALNDSRYCLSSRLRVSATFWQNPRNHFRCQVQFYGLSENDEWTQDRAKPVTQIVSAEAWGRADDVIKIHWQEKKSNTILGSQEGNTMKTNDTYMKFSWLTVPEKSLDKEHRCIVRHENNKNGVDQEIIFPPIKTDVITMDPKDNCSKDANDTLLLQLTNTSAYYMYLLLLLKSVVYFAIITCCLLRRTAFCCNGEKS

SEQ ID NO: 15941 - protein, 860 aa, synthetic construct
MALPVTALLLPLALLLHAARPEVQLVESGGGLVQPGGSLRLSCAASGFSFSDFWMSWVRQAPGKGLEWVATISQAGSEKDYVDSVKGRFTISRDNAKKSLYLQMNSLRAEDTAVYYCASGVYSFDYRGQGTLVTVSSGTGGGGSGGGGSGGGGSEFDIVMTQTPLTLSVTIGQPASISCKSSQSLLDSDGKTYLNWLLQRPGQSPERLIYLVSKLDSGVPDRFTGSGSGTDFTLKISRVEAEDLGVYCCWQGTHFPYTFGGGTKVEIKGLEIQNPDPAVYQLRDSKSSDKSVCLFTDFDSQTNVSQSKDSDVYITDKCVLDMRSMDFKSNSAVAWSNKSDFACANAFNNSIIPEDTFFPSPESSDSTDHVKPKETENTKQPSKSCHKPKAIVHTEKVNMMSLTVLGLRMLFAKTVAVNFLLTAKLFFLRAKRSGSGVKQTLNFDLLKLAGDVESNPGPTSMDWIWRILFLVGAATGAHSFEQVQLQQPGAELVRPGASVKLSCKASGYTFTSYWMNWVKQRPGQGLEWIGMIDPSDSETHYNHIFKDKATLTVDKSSSTAYLQLSSLTSEDSAVYYCARNLYLWGQGTSVTVSSTREDLKNVFPPEVAVFEPSEAEISHTQKATLVCLATGFYPDHVELSWWVNGKEVHSGVCTDPQPLKEQPALNDSRYCLSSRLRVSATFWQNPRNHFRCQVQFYGLSENDEWTQDRAKPVTQIVSAEAWGRADDVIKIHWQEKKSNTILGSQEGNTMKTNDTYMKFSWLTVPEKSLDKEHRCIVRHENNKNGVDQEIIFPPIKTDVITMDPKDNCSKDANDTLLLQLTNTSAYYMYLLLLLKSVVYFAIITCCLLRRTAFCCNGEKS

SEQ ID NO: 15942 - protein, 868 aa, synthetic construct
MALPVTALLLPLALLLHAARPEVQLVESGGGLVQPGGSLRLSCAASGFSFSDFWMSWVRQAPGKGLEWVATISQAGSEKDYVDSVKGRFTISRDNAKKSLYLQMNSLRAEDTAVYYCASGVYSFDYRGQGTLVTVSSGTGGGGSGGGGSGGGGSEFDIVMTQSPDSLAVSLGERATINCESSQSLLNSGNQKNYLTWYQQKPGQPPKPLIYWASTRESGVPDRFSGSGSGTDFTLTISSLQAEDVAVYYCQNDYSYPYTFGQGTKLEIKRLEIQNPDPAVYQLRDSKSSDKSVCLFTDFDSQTNVSQSKDSDVYITDKCVLDMRSMDFKSNSAVAWSNKSDFACANAFNNSIIPEDTFFPSPESSDSTDHVKPKETENTKQPSKSCHKPKAIVHTEKVNMMSLTVLGLRMLFAKTVAVNFLLTAKLFFLRAKRSGSGVKQTLNFDLLKLAGDVESNPGPTSMDWIWRILFLVGAATGAHSFEEVQLVQSGAEVKKPGESLKISCKGSGYSFTDYYMKWARQMPGKGLEWMGDIIPSNGATFYNQKFKGQVTISADKSISTTYLQWSSLKASDTAMYYCARSHLLRASWFAYWGQGTMVTVSSTREDLKNVFPPEVAVFEPSEAEISHTQKATLVCLATGFYPDHVELSWWVNGKEVHSGVCTDPQPLKEQPALNDSRYCLSSRLRVSATFWQNPRNHFRCQVQFYGLSENDEWTQDRAKPVTQIVSAEAWGRADDVIKIHWQEKKSNTILGSQEGNTMKTNDTYMKFSWLTVPEKSLDKEHRCIVRHENNKNGVDQEIIFPPIKTDVITMDPKDNCSKDANDTLLLQLTNTSAYYMYLLLLLKSVVYFAIITCCLLRRTAFCCNGEKS

SEQ ID NO: 15943 - protein, 863 aa, synthetic construct
MALPVTALLLPLALLLHAARPEVQLVESGGGLVQPGGSLRLSCAASGFSFSDFWMSWVRQAPGKGLEWVATISQAGSEKDYVDSVKGRFTISRDNAKKSLYLQMNSLRAEDTAVYYCASGVYSFDYRGQGTLVTVSSGTGGGGSGGGGSGGGGSEFDIQMTQSTSSLSASLGDRVTISCSASQGINNYLNWYQQKPDGTVELLIYYTSTLQSGVPSRFSGSGSGTDYSLTISNLEPEDIGTYYCQQYSKLPRTFGGGTKLEIKLEIQNPDPAVYQLRDSKSSDKSVCLFTDFDSQTNVSQSKDSDVYITDKCVLDMRSMDFKSNSAVAWSNKSDFACANAFNNSIIPEDTFFPSPESSDSTDHVKPKETENTKQPSKSCHKPKAIVHTEKVNMMSLTVLGLRMLFAKTVAVNFLLTAKLFFLRAKRSGSGVKQTLNFDLLKLAGDVESNPGPTSMDWIWRILFLVGAATGAHSFEQVQLQQSGSELMMPGASVKISCKATGYTFSNYWIEWVKQRPGHGLEWIGEILPGTGRTIYNEKFKGKATFTADISSNTVQMQLSSLTSEDSAVYYCARRDYYGNFYYAMDYWGQGTSVTVSSTREDLKNVFPPEVAVFEPSEAEISHTQKATLVCLATGFYPDHVELSWWVNGKEVHSGVCTDPQPLKEQPALNDSRYCLSSRLRVSATFWQNPRNHFRCQVQFYGLSENDEWTQDRAKPVTQIVSAEAWGRADDVIKIHWQEKKSNTILGSQEGNTMKTNDTYMKFSWLTVPEKSLDKEHRCIVRHENNKNGVDQEIIFPPIKTDVITMDPKDNCSKDANDTLLLQLTNTSAYYMYLLLLLKSVVYFAIITCCLLRRTAFCCNGEKS

SEQ ID NO: 15944 - protein, 858 aa, synthetic construct
MALPVTALLLPLALLLHAARPEVQLVESGGGLVQPGGSLRLSCAASGFSFSDFWMSWVRQAPGKGLEWVATISQAGSEKDYVDSVKGRFTISRDNAKKSLYLQMNSLRAEDTAVYYCASGVYSFDYRGQGTLVTVSSGTGGGGSGGGGSGGGGSEFDIQMTQSPASLSVSVGETVTITCRASENIYSNLAWYQQKQGKSPQLLVYAATNLADGVPSRFSGSGSGTQYSLKINSLQSEDFGSYYCQHFWGTWTFGGGTTLEIKLEIQNPDPAVYQLRDSKSSDKSVCLFTDFDSQTNVSQSKDSDVYITDKCVLDMRSMDFKSNSAVAWSNKSDFACANAFNNSIIPEDTFFPSPESSDSTDHVKPKETENTKQPSKSCHKPKAIVHTEKVNMMSLTVLGLRMLFAKTVAVNFLLTAKLFFLRAKRSGSGVKQTLNFDLLKLAGDVESNPGPTSMDWIWRILFLVGAATGAHSFEEVQLQQSGPELVKPGASVKMSCKASGYTFTDYYMKWMKQSHGKSLEWIGDINPNNGGTTYNQKFKGKATLTVDKSSSTAYMQLNSLTSEDSAVYYCARDYGYGYFDYWGQGTTLTVSSTREDLKNVFPPEVAVFEPSEAEISHTQKATLVCLATGFYPDHVELSWWVNGKEVHSGVCTDPQPLKEQPALNDSRYCLSSRLRVSATFWQNPRNHFRCQVQFYGLSENDEWTQDRAKPVTQIVSAEAWGRADDVIKIHWQEKKSNTILGSQEGNTMKTNDTYMKFSWLTVPEKSLDKEHRCIVRHENNKNGVDQEIIFPPIKTDVITMDPKDNCSKDANDTLLLQLTNTSAYYMYLLLLLKSVVYFAIITCCLLRRTAFCCNGEKS

SEQ ID NO: 15945 - protein, 861 aa, synthetic construct
MALPVTALLLPLALLLHAARPEVQLVESGGGLVQPGGSLRLSCAASGFSFSDFWMSWVRQAPGKGLEWVATISQAGSEKDYVDSVKGRFTISRDNAKKSLYLQMNSLRAEDTAVYYCASGVYSFDYRGQGTLVTVSSGTGGGGSGGGGSGGGGSEFEIVLTQSPGTLSLSPGERATLSCRASQSVGGYLAWYQQKPGQAPRLLIYDASNRATGIPARFSGSGSGTDFTLTISSLEPEDFAVYYCQQRNNWPPMYTFGQGTKLEIKRLEIQNPDPAVYQLRDSKSSDKSVCLFTDFDSQTNVSQSKDSDVYITDKCVLDMRSMDFKSNSAVAWSNKSDFACANAFNNSIIPEDTFFPSPESSDSTDHVKPKETENTKQPSKSCHKPKAIVHTEKVNMMSLTVLGLRMLFAKTVAVNFLLTAKLFFLRAKRSGSGVKQTLNFDLLKLAGDVESNPGPTSMDWIWRILFLVGAATGAHSFEQVQLVQSGAEVKKPGSSVKVSCKASGGTFSSYAISWVRQAPGQGLEWMGGIIPILGTANYAQKFQGRVTITADESTSTAYMELSSLRSEDTAVYYCARWGGGAFDIWGQGTMVTVSSTREDLKNVFPPEVAVFEPSEAEISHTQKATLVCLATGFYPDHVELSWWVNGKEVHSGVCTDPQPLKEQPALNDSRYCLSSRLRVSATFWQNPRNHFRCQVQFYGLSENDEWTQDRAKPVTQIVSAEAWGRADDVIKIHWQEKKSNTILGSQEGNTMKTNDTYMKFSWLTVPEKSLDKEHRCIVRHENNKNGVDQEIIFPPIKTDVITMDPKDNCSKDANDTLLLQLTNTSAYYMYLLLLLKSVVYFAIITCCLLRRTAFCCNGEKS

SEQ ID NO: 15946 - protein, 856 aa, synthetic construct
MALPVTALLLPLALLLHAARPEVQLVESGGGLVQPGGSLRLSCAASGFSFSDFWMSWVRQAPGKGLEWVATISQAGSEKDYVDSVKGRFTISRDNAKKSLYLQMNSLRAEDTAVYYCASGVYSFDYRGQGTLVTVSSGTGGGGSGGGGSGGGGSEFQIVLTQSPALMSASPGEKVTMTCSASSSVRYMYWYQQKPRSSPKPWIHLTSNLASGVPARFSGSGSGTSYSLTISSMEAEDAATYYCQQWSSHPFTFGSGTKLEIKLEIQNPDPAVYQLRDSKSSDKSVCLFTDFDSQTNVSQSKDSDVYITDKCVLDMRSMDFKSNSAVAWSNKSDFACANAFNNSIIPEDTFFPSPESSDSTDHVKPKETENTKQPSKSCHKPKAIVHTEKVNMMSLTVLGLRMLFAKTVAVNFLLTAKLFFLRAKRSGSGVKQTLNFDLLKLAGDVESNPGPTSMDWIWRILFLVGAATGAHSFEDVQLQESGPGLVKPSQSLSLTCTVTGFSITSDYSWNWIRQFPGNKLEWMGYISYSGHTSYNPSLESRISITRDTSKNQFFLQLNSVTTEDTATYYCTRGNWDVVYWGQGTLVTVSATREDLKNVFPPEVAVFEPSEAEISHTQKATLVCLATGFYPDHVELSWWVNGKEVHSGVCTDPQPLKEQPALNDSRYCLSSRLRVSATFWQNPRNHFRCQVQFYGLSENDEWTQDRAKPVTQIVSAEAWGRADDVIKIHWQEKKSNTILGSQEGNTMKTNDTYMKFSWLTVPEKSLDKEHRCIVRHENNKNGVDQEIIFPPIKTDVITMDPKDNCSKDANDTLLLQLTNTSAYYMYLLLLLKSVVYFAIITCCLLRRTAFCCNGEKS

SEQ ID NO: 15947 - protein, 866 aa, synthetic construct
MALPVTALLLPLALLLHAARPEVQLVESGGGLVQPGGSLRLSCAASGFSFSDFWMSWVRQAPGKGLEWVATISQAGSEKDYVDSVKGRFTISRDNAKKSLYLQMNSLRAEDTAVYYCASGVYSFDYRGQGTLVTVSSGTGGGGSGGGGSGGGGSEFDVVMTQSPLSLPVTLGQPASISCRSSQSIVHSDGNTYLEWYQQRPGQSPRRLIYKVSNRFSGVPDRFSGSGSGTDFTLKISRVEAEDVGVYYCFQGSHAPWTFGGGTKVEIKLEIQNPDPAVYQLRDSKSSDKSVCLFTDFDSQTNVSQSKDSDVYITDKCVLDMRSMDFKSNSAVAWSNKSDFACANAFNNSIIPEDTFFPSPESSDSTDHVKPKETENTKQPSKSCHKPKAIVHTEKVNMMSLTVLGLRMLFAKTVAVNFLLTAKLFFLRAKRSGSGVKQTLNFDLLKLAGDVESNPGPTSMDWIWRILFLVGAATGAHSFEEVQLVESGGGLVQPGGSLRLSCAASGFTFSSYGMHWVRQAPGKGLEWVAYITTRSSTIYYADSVKGRFTISRDNAKNSLYLQMNSLRAEDTAVYYCTREPLTGYYAMDYWGQGTSVTVSSTREDLKNVFPPEVAVFEPSEAEISHTQKATLVCLATGFYPDHVELSWWVNGKEVHSGVCTDPQPLKEQPALNDSRYCLSSRLRVSATFWQNPRNHFRCQVQFYGLSENDEWTQDRAKPVTQIVSAEAWGRADDVIKIHWQEKKSNTILGSQEGNTMKTNDTYMKFSWLTVPEKSLDKEHRCIVRHENNKNGVDQEIIFPPIKTDVITMDPKDNCSKDANDTLLLQLTNTSAYYMYLLLLLKSVVYFAIITCCLLRRTAFCCNGEKS

SEQ ID NO: 15948 - protein, 858 aa, synthetic construct
MALPVTALLLPLALLLHAARPEVQLVESGGGLVQPGGSLRLSCAASGFSFSDFWMSWVRQAPGKGLEWVATISQAGSEKDYVDSVKGRFTISRDNAKKSLYLQMNSLRAEDTAVYYCASGVYSFDYRGQGTLVTVSSGTGGGGSGGGGSGGGGSEFDIQMTQSPSSLSASVGDRVTITCRASQSISLWLNWYQQKPGKAPKLLIYAASTLQSGVPSRFSGSGSGTDFTLTISSLQPEDFATYYCQQYYTSPYTFGQGTKVEIKRLEIQNPDPAVYQLRDSKSSDKSVCLFTDFDSQTNVSQSKDSDVYITDKCVLDMRSMDFKSNSAVAWSNKSDFACANAFNNSIIPEDTFFPSPESSDSTDHVKPKETENTKQPSKSCHKPKAIVHTEKVNMMSLTVLGLRMLFAKTVAVNFLLTAKLFFLRAKRSGSGVKQTLNFDLLKLAGDVESNPGPTSMDWIWRILFLVGAATGAHSFEQVQLLESGGGLVQPGGSLRLSCAASGFTFSSYAMSWVRQAPGKGLEWVSVIRSSGSSTYYADSVKGRFTISRDNSKNTLYLQMNSLRAEDTAVYYCARGGGYFDYWGQGTLVTVSSTREDLKNVFPPEVAVFEPSEAEISHTQKATLVCLATGFYPDHVELSWWVNGKEVHSGVCTDPQPLKEQPALNDSRYCLSSRLRVSATFWQNPRNHFRCQVQFYGLSENDEWTQDRAKPVTQIVSAEAWGRADDVIKIHWQEKKSNTILGSQEGNTMKTNDTYMKFSWLTVPEKSLDKEHRCIVRHENNKNGVDQEIIFPPIKTDVITMDPKDNCSKDANDTLLLQLTNTSAYYMYLLLLLKSVVYFAIITCCLLRRTAFCCNGEKS

SEQ ID NO: 15949 - protein, 861 aa, synthetic construct
MALPVTALLLPLALLLHAARPEVQLVESGGGLVQPGGSLRLSCAASGFSFSDFWMSWVRQAPGKGLEWVATISQAGSEKDYVDSVKGRFTISRDNAKKSLYLQMNSLRAEDTAVYYCASGVYSFDYRGQGTLVTVSSGTGGGGSGGGGSGGGGSEFDIQMTQSPSSLSASVGDRVTITCRASQSISSYLNWYQQKPGKAPKLLIYAVSTLQSGVPSRFSGSGSGTDFTLTISSLQPEDFATYYCQQSGTFPPTTFGQGTKVEIKRLEIQNPDPAVYQLRDSKSSDKSVCLFTDFDSQTNVSQSKDSDVYITDKCVLDMRSMDFKSNSAVAWSNKSDFACANAFNNSIIPEDTFFPSPESSDSTDHVKPKETENTKQPSKSCHKPKAIVHTEKVNMMSLTVLGLRMLFAKTVAVNFLLTAKLFFLRAKRSGSGVKQTLNFDLLKLAGDVESNPGPTSMDWIWRILFLVGAATGAHSFEQVQLLESGGGLVQPGGSLRLSCAASGFTFSSHGMHWVRQAPGKGLEWVSVISGSGSNTGYADSVKGRFTISRDNSKNTLYLQMNSLRAEDTAVYYCARQWGSYAFDSWGQGTLVTVSSTREDLKNVFPPEVAVFEPSEAEISHTQKATLVCLATGFYPDHVELSWWVNGKEVHSGVCTDPQPLKEQPALNDSRYCLSSRLRVSATFWQNPRNHFRCQVQFYGLSENDEWTQDRAKPVTQIVSAEAWGRADDVIKIHWQEKKSNTILGSQEGNTMKTNDTYMKFSWLTVPEKSLDKEHRCIVRHENNKNGVDQEIIFPPIKTDVITMDPKDNCSKDANDTLLLQLTNTSAYYMYLLLLLKSVVYFAIITCCLLRRTAFCCNGEKS

SEQ ID NO: 15950 - protein, 871 aa, synthetic construct
MALPVTALLLPLALLLHAARPEVQLVESGGGLVQPGGSLRLSCAASGFSFSDFWMSWVRQAPGKGLEWVATISQAGSEKDYVDSVKGRFTISRDNAKKSLYLQMNSLRAEDTAVYYCASGVYSFDYRGQGTLVTVSSGTGGGGSGGGGSGGGGSEFDIVMSQSPSSLAVSVGEKVTMSCKSSQSLLHSSNQKNYLAWYQQKPGQSPKVLIYWASTRESGVPDRFTGSGSGTDFTLTITSVKSEDLAVYYCQQYYSYPWTFGGGTRLEIKRLEIQNPDPAVYQLRDSKSSDKSVCLFTDFDSQTNVSQSKDSDVYITDKCVLDMRSMDFKSNSAVAWSNKSDFACANAFNNSIIPEDTFFPSPESSDSTDHVKPKETENTKQPSKSCHKPKAIVHTEKVNMMSLTVLGLRMLFAKTVAVNFLLTAKLFFLRAKRSGSGVKQTLNFDLLKLAGDVESNPGPTSMDWIWRILFLVGAATGAHSFEEVQLQQSVAELVKPGASVKMSCKVSGYTLTDHTIHWMKQRPEQGLEWIGYIYPRDGITGYNEKFKGKATLTADTSSSTAYMQLNSLTSEDSAVYFCARWGYSYRNYAYYYDYWGQGTTLTVSSTREDLKNVFPPEVAVFEPSEAEISHTQKATLVCLATGFYPDHVELSWWVNGKEVHSGVCTDPQPLKEQPALNDSRYCLSSRLRVSATFWQNPRNHFRCQVQFYGLSENDEWTQDRAKPVTQIVSAEAWGRADDVIKIHWQEKKSNTILGSQEGNTMKTNDTYMKFSWLTVPEKSLDKEHRCIVRHENNKNGVDQEIIFPPIKTDVITMDPKDNCSKDANDTLLLQLTNTSAYYMYLLLLLKSVVYFAIITCCLLRRTAFCCNGEKS

SEQ ID NO: 15951 - protein, 868 aa, synthetic construct
MALPVTALLLPLALLLHAARPEVQLVESGGGLVQPGGSLRLSCAASGFSFSDFWMSWVRQAPGKGLEWVATISQAGSEKDYVDSVKGRFTISRDNAKKSLYLQMNSLRAEDTAVYYCASGVYSFDYRGQGTLVTVSSGTGGGGSGGGGSGGGGSEFEIVLTQSPGTLSLSPGERATLSCRASQSVSSSYLAWYQQKPGQAPRLLIYGTSSRATGIPDRFSGSGSGTDFTLTISRLEPEDFAVYYCQQYGSSPFTFGGGTKVEIKRLEIQNPDPAVYQLRDSKSSDKSVCLFTDFDSQTNVSQSKDSDVYITDKCVLDMRSMDFKSNSAVAWSNKSDFACANAFNNSIIPEDTFFPSPESSDSTDHVKPKETENTKQPSKSCHKPKAIVHTEKVNMMSLTVLGLRMLFAKTVAVNFLLTAKLFFLRAKRSGSGVKQTLNFDLLKLAGDVESNPGPTSMDWIWRILFLVGAATGAHSFEQVQLQESGPGLAKPSETLSLTCTVSGDSITSYYWSWIRQPPGKGLEWIGYIYYSGSTNYNPSLKSRVTISVDTSKNQFSLKLSSVTAADTAVYYCARDQRRIAAAGTHFYGMDVWGQGTTVTVSSTREDLKNVFPPEVAVFEPSEAEISHTQKATLVCLATGFYPDHVELSWWVNGKEVHSGVCTDPQPLKEQPALNDSRYCLSSRLRVSATFWQNPRNHFRCQVQFYGLSENDEWTQDRAKPVTQIVSAEAWGRADDVIKIHWQEKKSNTILGSQEGNTMKTNDTYMKFSWLTVPEKSLDKEHRCIVRHENNKNGVDQEIIFPPIKTDVITMDPKDNCSKDANDTLLLQLTNTSAYYMYLLLLLKSVVYFAIITCCLLRRTAFCCNGEKS

SEQ ID NO: 15952 - protein, 860 aa, synthetic construct
MALPVTALLLPLALLLHAARPEVQLVESGGGLVQPGGSLRLSCAASGFSFSDFWMSWVRQAPGKGLEWVATISQAGSEKDYVDSVKGRFTISRDNAKKSLYLQMNSLRAEDTAVYYCASGVYSFDYRGQGTLVTVSSGTGGGGSGGGGSGGGGSEFDILLTQSPVILSVSPGERVSFSCRASQSIGTNIHWYQQRTNGSPRLLIKYASESISGIPSRFSGSGSGTDFTLSINSVESEDIADYYCQQNNNWPTTFGAGTKLELKLEIQNPDPAVYQLRDSKSSDKSVCLFTDFDSQTNVSQSKDSDVYITDKCVLDMRSMDFKSNSAVAWSNKSDFACANAFNNSIIPEDTFFPSPESSDSTDHVKPKETENTKQPSKSCHKPKAIVHTEKVNMMSLTVLGLRMLFAKTVAVNFLLTAKLFFLRAKRSGSGVKQTLNFDLLKLAGDVESNPGPTSMDWIWRILFLVGAATGAHSFEQVQLKQSGPGLVQPSQSLSITCTVSGFSLTNYGVHWVRQSPGKGLEWLGVIWSGGNTDYNTPFTSRLSINKDNSKSQVFFKMNSLQSNDTAIYYCARALTYYDYEFAYWGQGTLVTVSATREDLKNVFPPEVAVFEPSEAEISHTQKATLVCLATGFYPDHVELSWWVNGKEVHSGVCTDPQPLKEQPALNDSRYCLSSRLRVSATFWQNPRNHFRCQVQFYGLSENDEWTQDRAKPVTQIVSAEAWGRADDVIKIHWQEKKSNTILGSQEGNTMKTNDTYMKFSWLTVPEKSLDKEHRCIVRHENNKNGVDQEIIFPPIKTDVITMDPKDNCSKDANDTLLLQLTNTSAYYMYLLLLLKSVVYFAIITCCLLRRTAFCCNGEKS

SEQ ID NO: 15953 - protein, 853 aa, synthetic construct
MALPVTALLLPLALLLHAARPEVQLVESGGGLVQPGGSLRLSCAASGFSFSDFWMSWVRQAPGKGLEWVATISQAGSEKDYVDSVKGRFTISRDNAKKSLYLQMNSLRAEDTAVYYCASGVYSFDYRGQGTLVTVSSGTGGGGSGGGGSGGGGSEFMTQSPKFLLVSAGDRVTLTCKASQSVNNDVYWYQQEPGQSPKLLIYWASTRESGVPDRFTGSGSGTDFTLTISSVQAEDLAVYYCKQSYNLYTFGGGTKLEIKRLEIQNPDPAVYQLRDSKSSDKSVCLFTDFDSQTNVSQSKDSDVYITDKCVLDMRSMDFKSNSAVAWSNKSDFACANAFNNSIIPEDTFFPSPESSDSTDHVKPKETENTKQPSKSCHKPKAIVHTEKVNMMSLTVLGLRMLFAKTVAVNFLLTAKLFFLRAKRSGSGVKQTLNFDLLKLAGDVESNPGPTSMDWIWRILFLVGAATGAHSFEESGRGLVQPGGSRKLSCAASGFTFSTSGMHWVRQAPEKGLEWVAYISSGSTTIYHADTVKGRFTISRDNPKNTLFLQMTSLRSEDTAMYYCCARSGQFGNYFDYWGQGTTLTVSSTREDLKNVFPPEVAVFEPSEAEISHTQKATLVCLATGFYPDHVELSWWVNGKEVHSGVCTDPQPLKEQPALNDSRYCLSSRLRVSATFWQNPRNHFRCQVQFYGLSENDEWTQDRAKPVTQIVSAEAWGRADDVIKIHWQEKKSNTILGSQEGNTMKTNDTYMKFSWLTVPEKSLDKEHRCIVRHENNKNGVDQEIIFPPIKTDVITMDPKDNCSKDANDTLLLQLTNTSAYYMYLLLLLKSVVYFAIITCCLLRRTAFCCNGEKS

SEQ ID NO: 15954 - protein, 858 aa, synthetic construct
MALPVTALLLPLALLLHAARPEVQLVESGGGLVQPGGSLRLSCAASGFSFSDFWMSWVRQAPGKGLEWVATISQAGSEKDYVDSVKGRFTISRDNAKKSLYLQMNSLRAEDTAVYYCASGVYSFDYRGQGTLVTVSSGTGGGGSGGGGSGGGGSEFQSPSSLAVSAGEKVTMSCKSSQSLLNSRTRKNYLAWYQQKPGQSPKLLIYWASTRESGVPDRFTGSGSGTDFTLTISSVQAEDLAVYYCKQSNLYTFGGGTKLEIKLEIQNPDPAVYQLRDSKSSDKSVCLFTDFDSQTNVSQSKDSDVYITDKCVLDMRSMDFKSNSAVAWSNKSDFACANAFNNSIIPEDTFFPSPESSDSTDHVKPKETENTKQPSKSCHKPKAIVHTEKVNMMSLTVLGLRMLFAKTVAVNFLLTAKLFFLRAKRSGSGVKQTLNFDLLKLAGDVESNPGPTSMDWIWRILFLVGAATGAHSFEQVQLEESGPELVKPGASVKLSCKASGYTFTEYIIHWVKQRSGQGLEWIGWFYPGSGSIKYNEKFKDKATLTADKSSSTVYMELSGLTSEDSAVYFCARHDGYSYFDYWGQGTTLTVSSTREDLKNVFPPEVAVFEPSEAEISHTQKATLVCLATGFYPDHVELSWWVNGKEVHSGVCTDPQPLKEQPALNDSRYCLSSRLRVSATFWQNPRNHFRCQVQFYGLSENDEWTQDRAKPVTQIVSAEAWGRADDVIKIHWQEKKSNTILGSQEGNTMKTNDTYMKFSWLTVPEKSLDKEHRCIVRHENNKNGVDQEIIFPPIKTDVITMDPKDNCSKDANDTLLLQLTNTSAYYMYLLLLLKSVVYFAIITCCLLRRTAFCCNGEKS

SEQ ID NO: 15955 - protein, 861 aa, synthetic construct
MALPVTALLLPLALLLHAARPEVQLVESGGGLVQPGGSLRLSCAASGFSFSDFWMSWVRQAPGKGLEWVATISQAGSEKDYVDSVKGRFTISRDNAKKSLYLQMNSLRAEDTAVYYCASGVYSFDYRGQGTLVTVSSGTGGGGSGGGGSGGGGSEFDIQMTQSPSSLSASLGERVSLTCRATQELSGYLSWLQQKPDGTIKRLIYAASTLDSGVPKRFSGNRSGSDYSLTISSLESEDFADYYCLQYAIYPYTFGGGTKLEIKLEIQNPDPAVYQLRDSKSSDKSVCLFTDFDSQTNVSQSKDSDVYITDKCVLDMRSMDFKSNSAVAWSNKSDFACANAFNNSIIPEDTFFPSPESSDSTDHVKPKETENTKQPSKSCHKPKAIVHTEKVNMMSLTVLGLRMLFAKTVAVNFLLTAKLFFLRAKRSGSGVKQTLNFDLLKLAGDVESNPGPTSMDWIWRILFLVGAATGAHSFEEVQLQQSGPELVKPGASVKMSCKASGYTFTSYFIHWVKQKPGQGLEWIGFINPYNDGSKYNEKFKGKATLTSDKSSSTAYMELSSLTSEDSAVYYCTRDDGYYGYAMDYWGQGTSVTVSSTREDLKNVFPPEVAVFEPSEAEISHTQKATLVCLATGFYPDHVELSWWVNGKEVHSGVCTDPQPLKEQPALNDSRYCLSSRLRVSATFWQNPRNHFRCQVQFYGLSENDEWTQDRAKPVTQIVSAEAWGRADDVIKIHWQEKKSNTILGSQEGNTMKTNDTYMKFSWLTVPEKSLDKEHRCIVRHENNKNGVDQEIIFPPIKTDVITMDPKDNCSKDANDTLLLQLTNTSAYYMYLLLLLKSVVYFAIITCCLLRRTAFCCNGEKS

SEQ ID NO: 15956 - protein, 866 aa, synthetic construct
MALPVTALLLPLALLLHAARPEVQLVESGGGLVQPGGSLRLSCAASGFSFSDFWMSWVRQAPGKGLEWVATISQAGSEKDYVDSVKGRFTISRDNAKKSLYLQMNSLRAEDTAVYYCASGVYSFDYRGQGTLVTVSSGTGGGGSGGGGSGGGGSEFDTIVLTQSPASLAVSLGQRATISCRASESVDSYGNSFMHWYQQKPGQPPKLLIYLASNLESGVPARFSGSGSRTDFTLTIDPVEADDAATYYCQQNNYDPWTFGGGTKLEIKLEIQNPDPAVYQLRDSKSSDKSVCLFTDFDSQTNVSQSKDSDVYITDKCVLDMRSMDFKSNSAVAWSNKSDFACANAFNNSIIPEDTFFPSPESSDSTDHVKPKETENTKQPSKSCHKPKAIVHTEKVNMMSLTVLGLRMLFAKTVAVNFLLTAKLFFLRAKRSGSGVKQTLNFDLLKLAGDVESNPGPTSMDWIWRILFLVGAATGAHSFEEVQLQQSGPELVKPGASVKMSCKASGYTFTSYVMHWVKQKPGQGLEWIGYINPYNDGTKYNEKFKGKATLTSDTSSSTAYMELNSLTSEDSAVYFCARPIYFDNDYFDYWGQGTTLKVSSTREDLKNVFPPEVAVFEPSEAEISHTQKATLVCLATGFYPDHVELSWWVNGKEVHSGVCTDPQPLKEQPALNDSRYCLSSRLRVSATFWQNPRNHFRCQVQFYGLSENDEWTQDRAKPVTQIVSAEAWGRADDVIKIHWQEKKSNTILGSQEGNTMKTNDTYMKFSWLTVPEKSLDKEHRCIVRHENNKNGVDQEIIFPPIKTDVITMDPKDNCSKDANDTLLLQLTNTSAYYMYLLLLLKSVVYFAIITCCLLRRTAFCCNGEKS

SEQ ID NO: 15957 - protein, 861 aa, synthetic construct
MALPVTALLLPLALLLHAARPEVQLVESGGGLVQPGGSLRLSCAASGFSFSDFWMSWVRQAPGKGLEWVATISQAGSEKDYVDSVKGRFTISRDNAKKSLYLQMNSLRAEDTAVYYCASGVYSFDYRGQGTLVTVSSGTGGGGSGGGGSGGGGSEFDIQMTQSPSSLSASVGDRVTITCKASQDVGIAVAWYQQKPGKVPKLLIYWASTRHTGVPDRFSGSGSGTDFTLTISSLQPEDVATYYCQQYSSYPYTFGQGTKVEIKRLEIQNPDPAVYQLRDSKSSDKSVCLFTDFDSQTNVSQSKDSDVYITDKCVLDMRSMDFKSNSAVAWSNKSDFACANAFNNSIIPEDTFFPSPESSDSTDHVKPKETENTKQPSKSCHKPKAIVHTEKVNMMSLTVLGLRMLFAKTVAVNFLLTAKLFFLRAKRSGSGVKQTLNFDLLKLAGDVESNPGPTSMDWIWRILFLVGAATGAHSFEEVQLVESGGGLVQPGGSLRLSCAASGFDFSRYWMSWVRQAPGKGLEWIGEINPDSSTINYAPSLKDKFIISRDNAKNSLYLQMNSLRAEDTAVYYCARPDGNYWYFDVWGQGTLVTVSSTREDLKNVFPPEVAVFEPSEAEISHTQKATLVCLATGFYPDHVELSWWVNGKEVHSGVCTDPQPLKEQPALNDSRYCLSSRLRVSATFWQNPRNHFRCQVQFYGLSENDEWTQDRAKPVTQIVSAEAWGRADDVIKIHWQEKKSNTILGSQEGNTMKTNDTYMKFSWLTVPEKSLDKEHRCIVRHENNKNGVDQEIIFPPIKTDVITMDPKDNCSKDANDTLLLQLTNTSAYYMYLLLLLKSVVYFAIITCCLLRRTAFCCNGEKS

SEQ ID NO: 15958 - protein, 861 aa, synthetic construct
MALPVTALLLPLALLLHAARPEVQLVESGGGLVQPGGSLRLSCAASGFSFSDFWMSWVRQAPGKGLEWVATISQAGSEKDYVDSVKGRFTISRDNAKKSLYLQMNSLRAEDTAVYYCASGVYSFDYRGQGTLVTVSSGTGGGGSGGGGSGGGGSEFDIVMTQSQKSMSTSVGDRVSITCKASQDVITGVAWYQQKPGQSPKLLIYSASYRYTGVPDRFTGSGSGTDFTFTISNVQAEDLAVYYCQQHYSTPLTFGAGTKLELKLEIQNPDPAVYQLRDSKSSDKSVCLFTDFDSQTNVSQSKDSDVYITDKCVLDMRSMDFKSNSAVAWSNKSDFACANAFNNSIIPEDTFFPSPESSDSTDHVKPKETENTKQPSKSCHKPKAIVHTEKVNMMSLTVLGLRMLFAKTVAVNFLLTAKLFFLRAKRSGSGVKQTLNFDLLKLAGDVESNPGPTSMDWIWRILFLVGAATGAHSFEQVQLQQPGAELVRPGASVKLSCKASGYSFTTYWMNWVKQRPGQGLEWIGMIHPSDSETRLNQKFKDKATLTVDKSSSTAYMQLSSPTSEDSAVYYCARSTMIATRAMDYWGQGTSVTVSSTREDLKNVFPPEVAVFEPSEAEISHTQKATLVCLATGFYPDHVELSWWVNGKEVHSGVCTDPQPLKEQPALNDSRYCLSSRLRVSATFWQNPRNHFRCQVQFYGLSENDEWTQDRAKPVTQIVSAEAWGRADDVIKIHWQEKKSNTILGSQEGNTMKTNDTYMKFSWLTVPEKSLDKEHRCIVRHENNKNGVDQEIIFPPIKTDVITMDPKDNCSKDANDTLLLQLTNTSAYYMYLLLLLKSVVYFAIITCCLLRRTAFCCNGEKS

SEQ ID NO: 15959 - protein, 867 aa, synthetic construct
MALPVTALLLPLALLLHAARPEVQLVESGGGLVQPGGSLRLSCAASGFSFSDFWMSWVRQAPGKGLEWVATISQAGSEKDYVDSVKGRFTISRDNAKKSLYLQMNSLRAEDTAVYYCASGVYSFDYRGQGTLVTVSSGTGGGGSGGGGSGGGGSEFQSVLTQPPSVSGAPGQRVTISCTGSGSNIGAPYDVSWYQQLPGTAPKLLIYHNNKRPSGVPDRFSGSKSGTSASLAITGLQAEDEADYYCATVEAGLSGSVFGGGTKLTVLGALEIQNPDPAVYQLRDSKSSDKSVCLFTDFDSQTNVSQSKDSDVYITDKCVLDMRSMDFKSNSAVAWSNKSDFACANAFNNSIIPEDTFFPSPESSDSTDHVKPKETENTKQPSKSCHKPKAIVHTEKVNMMSLTVLGLRMLFAKTVAVNFLLTAKLFFLRAKRSGSGVKQTLNFDLLKLAGDVESNPGPTSMDWIWRILFLVGAATGAHSFEQVQLVQSGAEVKKPGASVKVSCKVSGYTLTELSIHWVRQAPGKGLEWMGGFDPEENEIVYAQRFQGRVTMTEDTSTDTAYMELSSLRSEDTAVYYCAIVGSFSPLTLGLWGQGTMVTVSSTREDLKNVFPPEVAVFEPSEAEISHTQKATLVCLATGFYPDHVELSWWVNGKEVHSGVCTDPQPLKEQPALNDSRYCLSSRLRVSATFWQNPRNHFRCQVQFYGLSENDEWTQDRAKPVTQIVSAEAWGRADDVIKIHWQEKKSNTILGSQEGNTMKTNDTYMKFSWLTVPEKSLDKEHRCIVRHENNKNGVDQEIIFPPIKTDVITMDPKDNCSKDANDTLLLQLTNTSAYYMYLLLLLKSVVYFAIITCCLLRRTAFCCNGEKS

SEQ ID NO: 15960 - protein, 867 aa, synthetic construct
MALPVTALLLPLALLLHAARPEVQLVESGGGLVQPGGSLRLSCAASGFSFSDFWMSWVRQAPGKGLEWVATISQAGSEKDYVDSVKGRFTISRDNAKKSLYLQMNSLRAEDTAVYYCASGVYSFDYRGQGTLVTVSSGTGGGGSGGGGSGGGGSEFQSVLTQPPSVSGAPGQRVTISCTGSGSNIGAPYDVSWYQQLPGTAPKLLIYHNNKRPSGVPDRFSGSKSGTSASLAITGLQAEDEADYYCQSYDSSSISTIFGGGTKLTVLGALEIQNPDPAVYQLRDSKSSDKSVCLFTDFDSQTNVSQSKDSDVYITDKCVLDMRSMDFKSNSAVAWSNKSDFACANAFNNSIIPEDTFFPSPESSDSTDHVKPKETENTKQPSKSCHKPKAIVHTEKVNMMSLTVLGLRMLFAKTVAVNFLLTAKLFFLRAKRSGSGVKQTLNFDLLKLAGDVESNPGPTSMDWIWRILFLVGAATGAHSFEQVQLVQSGAEVKKPGASVKVSCKVSGYTLTELSIHWVRQAPGKGLEWMGGFDPEENEIVYAQRFQGRVTMTEDTSTDTAYMELSSLRSEDTAVYYCAIVGSFSGIAYRPWGQGTMVTVSSTREDLKNVFPPEVAVFEPSEAEISHTQKATLVCLATGFYPDHVELSWWVNGKEVHSGVCTDPQPLKEQPALNDSRYCLSSRLRVSATFWQNPRNHFRCQVQFYGLSENDEWTQDRAKPVTQIVSAEAWGRADDVIKIHWQEKKSNTILGSQEGNTMKTNDTYMKFSWLTVPEKSLDKEHRCIVRHENNKNGVDQEIIFPPIKTDVITMDPKDNCSKDANDTLLLQLTNTSAYYMYLLLLLKSVVYFAIITCCLLRRTAFCCNGEKS

SEQ ID NO: 15961 - protein, 855 aa, synthetic construct
MALPVTALLLPLALLLHAARPEVQLVESGGGLVQPGGSLRLSCAASGFSFSDFWMSWVRQAPGKGLEWVATISQAGSEKDYVDSVKGRFTISRDNAKKSLYLQMNSLRAEDTAVYYCASGVYSFDYRGQGTLVTVSSGTGGGGSGGGGSGGGGSEFDIQMTQSPSSLSASVGDRVTITCRASQGIRNNLAWYQQKPGKAPKRLIYAASNLQSGVPSRFTGSGSGTEFTLIVSSLQPEDFATYYCLQHHSYPLTSGGGTKVELEIQNPDPAVYQLRDSKSSDKSVCLFTDFDSQTNVSQSKDSDVYITDKCVLDMRSMDFKSNSAVAWSNKSDFACANAFNNSIIPEDTFFPSPESSDSTDHVKPKETENTKQPSKSCHKPKAIVHTEKVNMMSLTVLGLRMLFAKTVAVNFLLTAKLFFLRAKRSGSGVKQTLNFDLLKLAGDVESNPGPTSMDWIWRILFLVGAATGAHSFEEVQVLESGGGLVQPGGSLRLSCAASGFTFSSYAMSWVRQAPGKGLEWVSAISGSGGSTNYADSVKGRFTISRDNSKNTLYLQMNSLRAEDTAVYYCAGSSGWSEYWGQGTLVTVSSTREDLKNVFPPEVAVFEPSEAEISHTQKATLVCLATGFYPDHVELSWWVNGKEVHSGVCTDPQPLKEQPALNDSRYCLSSRLRVSATFWQNPRNHFRCQVQFYGLSENDEWTQDRAKPVTQIVSAEAWGRADDVIKIHWQEKKSNTILGSQEGNTMKTNDTYMKFSWLTVPEKSLDKEHRCIVRHENNKNGVDQEIIFPPIKTDVITMDPKDNCSKDANDTLLLQLTNTSAYYMYLLLLLKSVVYFAIITCCLLRRTAFCCNGEKS

SEQ ID NO: 15962 - protein, 861 aa, synthetic construct
MALPVTALLLPLALLLHAARPEVQLVESGGGLVQPGGSLRLSCAASGFSFSDFWMSWVRQAPGKGLEWVATISQAGSEKDYVDSVKGRFTISRDNAKKSLYLQMNSLRAEDTAVYYCASGVYSFDYRGQGTLVTVSSGTGGGGSGGGGSGGGGSEFDEIQLVQSGAEVKKPGESLRISCKGSGFNIEDYYIHWVRQMPGKGLEWMGRIDPENDETKYGPIFQGHVTISADTSINTVYLQWSSLKASDTAMYYCAFRGGVYWGQGTTVTVSSLEIQNPDPAVYQLRDSKSSDKSVCLFTDFDSQTNVSQSKDSDVYITDKCVLDMRSMDFKSNSAVAWSNKSDFACANAFNNSIIPEDTFFPSPESSDSTDHVKPKETENTKQPSKSCHKPKAIVHTEKVNMMSLTVLGLRMLFAKTVAVNFLLTAKLFFLRAKRSGSGVKQTLNFDLLKLAGDVESNPGPTSMDWIWRILFLVGAATGAHSFEDVVMTQSPDSLAVSLGERATINCKSSQSLLDSDGKTYLNWLQQKPGQPPKRLISLVSKLDSGVPDRFSGSGSGTDFTLTISSLQAEDVAVYYCWQGTHFPGTFGGGTKVEIKTREDLKNVFPPEVAVFEPSEAEISHTQKATLVCLATGFYPDHVELSWWVNGKEVHSGVCTDPQPLKEQPALNDSRYCLSSRLRVSATFWQNPRNHFRCQVQFYGLSENDEWTQDRAKPVTQIVSAEAWGRADDVIKIHWQEKKSNTILGSQEGNTMKTNDTYMKFSWLTVPEKSLDKEHRCIVRHENNKNGVDQEIIFPPIKTDVITMDPKDNCSKDANDTLLLQLTNTSAYYMYLLLLLKSVVYFAIITCCLLRRTAFCCNGEKS

SEQ ID NO: 15963 - protein, 868 aa, synthetic construct
MALPVTALLLPLALLLHAARPEVQLVESGGGLVQPGGSLRLSCAASGFSFSDFWMSWVRQAPGKGLEWVATISQAGSEKDYVDSVKGRFTISRDNAKKSLYLQMNSLRAEDTAVYYCASGVYSFDYRGQGTLVTVSSGTGGGGSGGGGSGGGGSEFDELVMTQSPSSLTVTAGEKVTMSCKSSQSLLNSGNQKNYLTWYQQKPGQPPKLLIYWASTRESGVPDRFTGSGSGTDFTLTISSVQAEDLAVYYCQNDYSYPLTFGAGTKLEIKLEIQNPDPAVYQLRDSKSSDKSVCLFTDFDSQTNVSQSKDSDVYITDKCVLDMRSMDFKSNSAVAWSNKSDFACANAFNNSIIPEDTFFPSPESSDSTDHVKPKETENTKQPSKSCHKPKAIVHTEKVNMMSLTVLGLRMLFAKTVAVNFLLTAKLFFLRAKRSGSGVKQTLNFDLLKLAGDVESNPGPTSMDWIWRILFLVGAATGAHSFEEVQLLEQSGAELVRPGTSVKISCKASGYAFTNYWLGWVKQRPGHGLEWIGDIFPGSGNIHYNEKFKGKATLTADKSSSTAYMQLSSLTFEDSAVYFCARLRNWDEPMDYWGQGTTVTVSSTREDLKNVFPPEVAVFEPSEAEISHTQKATLVCLATGFYPDHVELSWWVNGKEVHSGVCTDPQPLKEQPALNDSRYCLSSRLRVSATFWQNPRNHFRCQVQFYGLSENDEWTQDRAKPVTQIVSAEAWGRADDVIKIHWQEKKSNTILGSQEGNTMKTNDTYMKFSWLTVPEKSLDKEHRCIVRHENNKNGVDQEIIFPPIKTDVITMDPKDNCSKDANDTLLLQLTNTSAYYMYLLLLLKSVVYFAIITCCLLRRTAFCCNGEKS

SEQ ID NO: 15964 - protein, 869 aa, synthetic construct
MALPVTALLLPLALLLHAARPEVQLVESGGGLVQPGGSLRLSCAASGFSFSDFWMSWVRQAPGKGLEWVATISQAGSEKDYVDSVKGRFTISRDNAKKSLYLQMNSLRAEDTAVYYCASGVYSFDYRGQGTLVTVSSGTGGGGSGGGGSGGGGSEFDELQMTQSPSSLSASVGDRVTITCRASQSISSYLNWYQQKPGQPPKLLIYWASTRESGVPDRFSGSESGTNYTLTISSLQPEDFATYFCQQSDSLPITFGQGTRLDIQLEIQNPDPAVYQLRDSKSSDKSVCLFTDFDSQTNVSQSKDSDVYITDKCVLDMRSMDFKSNSAVAWSNKSDFACANAFNNSIIPEDTFFPSPESSDSTDHVKPKETENTKQPSKSCHKPKAIVHTEKVNMMSLTVLGLRMLFAKTVAVNFLLTAKLFFLRAKRSGSGVKQTLNFDLLKLAGDVESNPGPTSMDWIWRILFLVGAATGAHSFEEVQLLESGGGVVQPGRSLRLSCAASGFTFSSYGMHWVRQAPGKGLEWVAVISYDGSNKYYADSVKGRFTISRDNSKNTLYLQMNSLRAEDTAVYYCAKDMGWGSGWRPYYYYGMDVWGQGTTVTVSSTREDLKNVFPPEVAVFEPSEAEISHTQKATLVCLATGFYPDHVELSWWVNGKEVHSGVCTDPQPLKEQPALNDSRYCLSSRLRVSATFWQNPRNHFRCQVQFYGLSENDEWTQDRAKPVTQIVSAEAWGRADDVIKIHWQEKKSNTILGSQEGNTMKTNDTYMKFSWLTVPEKSLDKEHRCIVRHENNKNGVDQEIIFPPIKTDVITMDPKDNCSKDANDTLLLQLTNTSAYYMYLLLLLKSVVYFAIITCCLLRRTAFCCNGEKS

SEQ ID NO: 15965 - protein, 866 aa, synthetic construct
MALPVTALLLPLALLLHAARPEVQLVESGGGLVQPGGSLRLSCAASGFSFSDFWMSWVRQAPGKGLEWVATISQAGSEKDYVDSVKGRFTISRDNAKKSLYLQMNSLRAEDTAVYYCASGVYSFDYRGQGTLVTVSSGTGGGGSGGGGSGGGGSEFDDIQMTQSPSSLSASVGDRVTITCRASQSISSYLNWYQQKPGKAPKLLIYAASSLQSGVPSRFSGSGSGTDFTLTISSLQPEDLATYYCQQSYSTPFTFGPGTKVDIKLEIQNPDPAVYQLRDSKSSDKSVCLFTDFDSQTNVSQSKDSDVYITDKCVLDMRSMDFKSNSAVAWSNKSDFACANAFNNSIIPEDTFFPSPESSDSTDHVKPKETENTKQPSKSCHKPKAIVHTEKVNMMSLTVLGLRMLFAKTVAVNFLLTAKLFFLRAKRSGSGVKQTLNFDLLKLAGDVESNPGPTSMDWIWRILFLVGAATGAHSFEVHEVQLVQSGAEVKKPGSSVKVSCKASGGTFSSYAISWVRQAPGQGLEWMGGIIPIFGTANYAQKFQGRVTITADKSTSTAYMELSSLRSEDTAVYYCATFALFGFREQAFDIWGQGTTVTVSSTREDLKNVFPPEVAVFEPSEAEISHTQKATLVCLATGFYPDHVELSWWVNGKEVHSGVCTDPQPLKEQPALNDSRYCLSSRLRVSATFWQNPRNHFRCQVQFYGLSENDEWTQDRAKPVTQIVSAEAWGRADDVIKIHWQEKKSNTILGSQEGNTMKTNDTYMKFSWLTVPEKSLDKEHRCIVRHENNKNGVDQEIIFPPIKTDVITMDPKDNCSKDANDTLLLQLTNTSAYYMYLLLLLKSVVYFAIITCCLLRRTAFCCNGEKS

SEQ ID NO: 15966 - protein, 864 aa, synthetic construct
MALPVTALLLPLALLLHAARPEVQLVESGGGLVQPGGSLRLSCAASGFSFSDFWMSWVRQAPGKGLEWVATISQAGSEKDYVDSVKGRFTISRDNAKKSLYLQMNSLRAEDTAVYYCASGVYSFDYRGQGTLVTVSSGTGGGGSGGGGSGGGGSEFDIVLTQSPLSLAVSLGQPAIISCKASQSVSFAGTSLMHWYHQKPGQQPRLLIYRASNLEAGVPDRFSGSGSKTDFTLTISPVEAEDAATYYCQQSREYPYTFGGGTKLEIKRLEIQNPDPAVYQLRDSKSSDKSVCLFTDFDSQTNVSQSKDSDVYITDKCVLDMRSMDFKSNSAVAWSNKSDFACANAFNNSIIPEDTFFPSPESSDSTDHVKPKETENTKQPSKSCHKPKAIVHTEKVNMMSLTVLGLRMLFAKTVAVNFLLTAKLFFLRAKRSGSGVKQTLNFDLLKLAGDVESNPGPTSMDWIWRILFLVGAATGAHSFEQVQLVQSGAEVVKPGASVKISCKASGYTFTGYFMNWVKQSPGQSLEWIGRIHPYDGDTFYNQKFQGKATLTVDKSSNTAHMELLSLTSEDFAVYYCTRYDGSRAMDYWGQGTTVTVSSTREDLKNVFPPEVAVFEPSEAEISHTQKATLVCLATGFYPDHVELSWWVNGKEVHSGVCTDPQPLKEQPALNDSRYCLSSRLRVSATFWQNPRNHFRCQVQFYGLSENDEWTQDRAKPVTQIVSAEAWGRADDVIKIHWQEKKSNTILGSQEGNTMKTNDTYMKFSWLTVPEKSLDKEHRCIVRHENNKNGVDQEIIFPPIKTDVITMDPKDNCSKDANDTLLLQLTNTSAYYMYLLLLLKSVVYFAIITCCLLRRTAFCCNGEKS

SEQ ID NO: 15967 - protein, 861 aa, synthetic construct
MALPVTALLLPLALLLHAARPEVQLVESGGGLVQPGGSLRLSCAASGFSFSDFWMSWVRQAPGKGLEWVATISQAGSEKDYVDSVKGRFTISRDNAKKSLYLQMNSLRAEDTAVYYCASGVYSFDYRGQGTLVTVSSGTGGGGSGGGGSGGGGSEFDDVVMTQTPLSLPVTPGEPASISCRSSQSLVHRNGNTYLHWYLQKPGQSPKLLIHKVSNRFSGVPDRFSGSGSGTDFTLKISRVEAEDLGVYFCSQSTHVPPLTFGAGTKLELKLEIQNPDPAVYQLRDSKSSDKSVCLFTDFDSQTNVSQSKDSDVYITDKCVLDMRSMDFKSNSAVAWSNKSDFACANAFNNSIIPEDTFFPSPESSDSTDHVKPKETENTKQPSKSCHKPKAIVHTEKVNMMSLTVLGLRMLFAKTVAVNFLLTAKLFFLRAKRSGSGVKQTLNFDLLKLAGDVESNPGPTSMDWIWRILFLVGAATGAHSFEEVQLVQSGAEVEKPGASVKISCKASGSSFTGYNMNWVRQNIGKSLEWIGAIDPYYGGTSYNQKFKGRATLTVDKSTSTAYMHLKSLRSEDTAVYYCVSGMEYWGQGTSVTVSSTREDLKNVFPPEVAVFEPSEAEISHTQKATLVCLATGFYPDHVELSWWVNGKEVHSGVCTDPQPLKEQPALNDSRYCLSSRLRVSATFWQNPRNHFRCQVQFYGLSENDEWTQDRAKPVTQIVSAEAWGRADDVIKIHWQEKKSNTILGSQEGNTMKTNDTYMKFSWLTVPEKSLDKEHRCIVRHENNKNGVDQEIIFPPIKTDVITMDPKDNCSKDANDTLLLQLTNTSAYYMYLLLLLKSVVYFAIITCCLLRRTAFCCNGEKS

SEQ ID NO: 15968 - protein, 859 aa, synthetic construct
MALPVTALLLPLALLLHAARPEVQLVESGGGLVQPGGSLRLSCAASGFSFSDFWMSWVRQAPGKGLEWVATISQAGSEKDYVDSVKGRFTISRDNAKKSLYLQMNSLRAEDTAVYYCASGVYSFDYRGQGTLVTVSSGTGGGGSGGGGSGGGGSEFDEIVMTQTPATLSVSAGERVTITCKASQSVSNDVTWYQQKPGQAPRLLIYSASNRYSGVPARFSGSGYGTEFTFTISSVQSEDFAVYFCQQDYSSFGQGTKLEIKRLEIQNPDPAVYQLRDSKSSDKSVCLFTDFDSQTNVSQSKDSDVYITDKCVLDMRSMDFKSNSAVAWSNKSDFACANAFNNSIIPEDTFFPSPESSDSTDHVKPKETENTKQPSKSCHKPKAIVHTEKVNMMSLTVLGLRMLFAKTVAVNFLLTAKLFFLRAKRSGSGVKQTLNFDLLKLAGDVESNPGPTSMDWIWRILFLVGAATGAHSFEQVQLVESGPGVVQPGRSLRISCAVSGFSVTNYGVHWVRQPPGKGLEWLGVIWAGGITNYNSAFMSRLTISKDNSKNTVYLQMNSLRAEDTAMYYCASRGGHYGYALDYWGQGTLVTVSSTREDLKNVFPPEVAVFEPSEAEISHTQKATLVCLATGFYPDHVELSWWVNGKEVHSGVCTDPQPLKEQPALNDSRYCLSSRLRVSATFWQNPRNHFRCQVQFYGLSENDEWTQDRAKPVTQIVSAEAWGRADDVIKIHWQEKKSNTILGSQEGNTMKTNDTYMKFSWLTVPEKSLDKEHRCIVRHENNKNGVDQEIIFPPIKTDVITMDPKDNCSKDANDTLLLQLTNTSAYYMYLLLLLKSVVYFAIITCCLLRRTAFCCNGEKS

SEQ ID NO: 15969 - protein, 861 aa, synthetic construct
MALPVTALLLPLALLLHAARPEVQLVESGGGLVQPGGSLRLSCAASGFSFSDFWMSWVRQAPGKGLEWVATISQAGSEKDYVDSVKGRFTISRDNAKKSLYLQMNSLRAEDTAVYYCASGVYSFDYRGQGTLVTVSSGTGGGGSGGGGSGGGGSEFDIQMTQTASSLPASLGDRVTISCSASQDISNYLNWYQQKPDGTVKLLIFYSSNLHSGVPSRFSGGGSGTDYSLTISNLEPEDIATYFCHQYSKLPWTFGGGTKLEIKRLEIQNPDPAVYQLRDSKSSDKSVCLFTDFDSQTNVSQSKDSDVYITDKCVLDMRSMDFKSNSAVAWSNKSDFACANAFNNSIIPEDTFFPSPESSDSTDHVKPKETENTKQPSKSCHKPKAIVHTEKVNMMSLTVLGLRMLFAKTVAVNFLLTAKLFFLRAKRSGSGVKQTLNFDLLKLAGDVESNPGPTSMDWIWRILFLVGAATGAHSFEEVTLVESGGDFVKPGGSLKVSCAASGFAFSHYAMSWVRQTPAKRLEWVAYISSGGSGTYYSDSVKGRFTISRDNAKNTLYLQMRSLRSEDSAMYFCTRVKLGTYYFDSWGQGTTLTVSSTREDLKNVFPPEVAVFEPSEAEISHTQKATLVCLATGFYPDHVELSWWVNGKEVHSGVCTDPQPLKEQPALNDSRYCLSSRLRVSATFWQNPRNHFRCQVQFYGLSENDEWTQDRAKPVTQIVSAEAWGRADDVIKIHWQEKKSNTILGSQEGNTMKTNDTYMKFSWLTVPEKSLDKEHRCIVRHENNKNGVDQEIIFPPIKTDVITMDPKDNCSKDANDTLLLQLTNTSAYYMYLLLLLKSVVYFAIITCCLLRRTAFCCNGEKS

SEQ ID NO: 15970 - protein, 863 aa, synthetic construct
MALPVTALLLPLALLLHAARPEVQLVESGGGLVQPGGSLRLSCAASGFSFSDFWMSWVRQAPGKGLEWVATISQAGSEKDYVDSVKGRFTISRDNAKKSLYLQMNSLRAEDTAVYYCASGVYSFDYRGQGTLVTVSSGTGGGGSGGGGSGGGGSEFQFVLTQSPSASAALGASAKLTCTLSSAHKTYTIDWYQQQKGKAPRYLIQVKSDGTYTKATGVPDRFSGSSSGADRYLIIPSVQADDEADYYCGTDYTGGYVFGGGTQLTVTLEIQNPDPAVYQLRDSKSSDKSVCLFTDFDSQTNVSQSKDSDVYITDKCVLDMRSMDFKSNSAVAWSNKSDFACANAFNNSIIPEDTFFPSPESSDSTDHVKPKETENTKQPSKSCHKPKAIVHTEKVNMMSLTVLGLRMLFAKTVAVNFLLTAKLFFLRAKRSGSGVKQTLNFDLLKLAGDVESNPGPTSMDWIWRILFLVGAATGAHSFEEQLKESGGGLFKPTDTLTLTCTVSGFSLSYYGVNWVRQAPGNGLEWIGTIGGSGDTYYASWAKSRSTIIRNTNENTVTLKMTSLTAADTATYFCVRYANIGYEYFNVWGPGTLVTVSSTREDLKNVFPPEVAVFEPSEAEISHTQKATLVCLATGFYPDHVELSWWVNGKEVHSGVCTDPQPLKEQPALNDSRYCLSSRLRVSATFWQNPRNHFRCQVQFYGLSENDEWTQDRAKPVTQIVSAEAWGRADDVIKIHWQEKKSNTILGSQEGNTMKTNDTYMKFSWLTVPEKSLDKEHRCIVRHENNKNGVDQEIIFPPIKTDVITMDPKDNCSKDANDTLLLQLTNTSAYYMYLLLLLKSVVYFAIITCCLLRRTAFCCNGEKS

SEQ ID NO: 15971 - protein, 868 aa, synthetic construct
MALPVTALLLPLALLLHAARPEVQLVESGGGLVQPGGSLRLSCAASGFSFSDFWMSWVRQAPGKGLEWVATISQAGSEKDYVDSVKGRFTISRDNAKKSLYLQMNSLRAEDTAVYYCASGVYSFDYRGQGTLVTVSSGTGGGGSGGGGSGGGGSEFQFVLTQSPSVSAALGASAKLTCTLSSAHKTYTIDWYQQQQGEAPRYLMQVKSDGSYTKGTGVPDRFSGSSSGADRYLIIPSVQADDEAGYVCGADDNGGYVFGGGTQLTVTLEIQNPDPAVYQLRDSKSSDKSVCLFTDFDSQTNVSQSKDSDVYITDKCVLDMRSMDFKSNSAVAWSNKSDFACANAFNNSIIPEDTFFPSPESSDSTDHVKPKETENTKQPSKSCHKPKAIVHTEKVNMMSLTVLGLRMLFAKTVAVNFLLTAKLFFLRAKRSGSGVKQTLNFDLLKLAGDVESNPGPTSMDWIWRILFLVGAATGAHSFEQSVKESEGGLFKPTDTLTLTCTVSGFSLSRHALTWVRQAPGNGLEWIGAIDNAGTTYYASWAKSRSTITRNTDLHTVTLKMTSLTASDTATYFCARVFYDINSGYYLDGMDLWGPGTLVTVSSTREDLKNVFPPEVAVFEPSEAEISHTQKATLVCLATGFYPDHVELSWWVNGKEVHSGVCTDPQPLKEQPALNDSRYCLSSRLRVSATFWQNPRNHFRCQVQFYGLSENDEWTQDRAKPVTQIVSAEAWGRADDVIKIHWQEKKSNTILGSQEGNTMKTNDTYMKFSWLTVPEKSLDKEHRCIVRHENNKNGVDQEIIFPPIKTDVITMDPKDNCSKDANDTLLLQLTNTSAYYMYLLLLLKSVVYFAIITCCLLRRTAFCCNGEKS

SEQ ID NO: 15972 - protein, 862 aa, synthetic construct
MALPVTALLLPLALLLHAARPEVQLVESGGGLVQPGGSLRLSCAASGFSFSDFWMSWVRQAPGKGLEWVATISQAGSEKDYVDSVKGRFTISRDNAKKSLYLQMNSLRAEDTAVYYCASGVYSFDYRGQGTLVTVSSGTGGGGSGGGGSGGGGSEFDIQMTQSPSSLSASVGDRVTITCRASQGISSWLAWYQQKPEKAPKSLIYAASSLQSGVPSRFSGSGSGTDFTLTISSLQPEDFATYYCQQYNSYPPTFGGGTKVEIKLEIQNPDPAVYQLRDSKSSDKSVCLFTDFDSQTNVSQSKDSDVYITDKCVLDMRSMDFKSNSAVAWSNKSDFACANAFNNSIIPEDTFFPSPESSDSTDHVKPKETENTKQPSKSCHKPKAIVHTEKVNMMSLTVLGLRMLFAKTVAVNFLLTAKLFFLRAKRSGSGVKQTLNFDLLKLAGDVESNPGPTSMDWIWRILFLVGAATGAHSFEEVQLVESGGGLVQPGESLRLSCVASGFTFSRYKMNWVRQAPGKGLEWVSYISRSGRDIYYADSVKGRFTISRDNAKNSLYLQMNSLRDEDTAVYYCAGTVTTYYYFGMDVWGHGTTVTVSSTREDLKNVFPPEVAVFEPSEAEISHTQKATLVCLATGFYPDHVELSWWVNGKEVHSGVCTDPQPLKEQPALNDSRYCLSSRLRVSATFWQNPRNHFRCQVQFYGLSENDEWTQDRAKPVTQIVSAEAWGRADDVIKIHWQEKKSNTILGSQEGNTMKTNDTYMKFSWLTVPEKSLDKEHRCIVRHENNKNGVDQEIIFPPIKTDVITMDPKDNCSKDANDTLLLQLTNTSAYYMYLLLLLKSVVYFAIITCCLLRRTAFCCNGEKS

SEQ ID NO: 15973 - protein, 863 aa, synthetic construct
MALPVTALLLPLALLLHAARPEVQLVESGGGLVQPGGSLRLSCAASGFSFSDFWMSWVRQAPGKGLEWVATISQAGSEKDYVDSVKGRFTISRDNAKKSLYLQMNSLRAEDTAVYYCASGVYSFDYRGQGTLVTVSSGTGGGGSGGGGSGGGGSEFDIQMTQSPSSLSASVGDRVTITCRASQGISSWLAWYQQKPEKAPKSLIYAASSLQSGVPSRFSGSGSGTDFTLTISSLQPEDFATYYCQQYNSYPPTFGGGTKVEIKLEIQNPDPAVYQLRDSKSSDKSVCLFTDFDSQTNVSQSKDSDVYITDKCVLDMRSMDFKSNSAVAWSNKSDFACANAFNNSIIPEDTFFPSPESSDSTDHVKPKETENTKQPSKSCHKPKAIVHTEKVNMMSLTVLGLRMLFAKTVAVNFLLTAKLFFLRAKRSGSGVKQTLNFDLLKLAGDVESNPGPTSMDWIWRILFLVGAATGAHSFEEVQLVESGGGSVQPGESLRLSCVASGFTFSRYKMNWVRQAPGKGLEWVSYISRSGRDIYYADSVKGRFTISRDNAKNSLYLQMNSLRDEDTAVYYCAGTVTTYYYDFGMDVWGQGTTVTVSSTREDLKNVFPPEVAVFEPSEAEISHTQKATLVCLATGFYPDHVELSWWVNGKEVHSGVCTDPQPLKEQPALNDSRYCLSSRLRVSATFWQNPRNHFRCQVQFYGLSENDEWTQDRAKPVTQIVSAEAWGRADDVIKIHWQEKKSNTILGSQEGNTMKTNDTYMKFSWLTVPEKSLDKEHRCIVRHENNKNGVDQEIIFPPIKTDVITMDPKDNCSKDANDTLLLQLTNTSAYYMYLLLLLKSVVYFAIITCCLLRRTAFCCNGEKS

SEQ ID NO: 15974 - protein, 861 aa, synthetic construct
MALPVTALLLPLALLLHAARPEVQLVESGGGLVQPGGSLRLSCAASGFSFSDFWMSWVRQAPGKGLEWVATISQAGSEKDYVDSVKGRFTISRDNAKKSLYLQMNSLRAEDTAVYYCASGVYSFDYRGQGTLVTVSSGTGGGGSGGGGSGGGGSEFQSVLTQPPSASGTPGQRVTISCSGSRSNVGGNYVFWYQQVPGATPKLLIYRSNQRPSGVPDRFAGSKSGSSASLAISGLRSEDEADYYCATWDDSLSGFVFGTGTKVTVLGLEIQNPDPAVYQLRDSKSSDKSVCLFTDFDSQTNVSQSKDSDVYITDKCVLDMRSMDFKSNSAVAWSNKSDFACANAFNNSIIPEDTFFPSPESSDSTDHVKPKETENTKQPSKSCHKPKAIVHTEKVNMMSLTVLGLRMLFAKTVAVNFLLTAKLFFLRAKRSGSGVKQTLNFDLLKLAGDVESNPGPTSMDWIWRILFLVGAATGAHSFEVQLVESGGGLVKPGGSLRLSCAASGFTFSDYYMSWIRQAPGKGLEWVSYISSSGSTIYYADSVKGRFTISRDNAKNSLYLQMNSLRAEDTAVYYCARGYGKAYDQWGQGTLVTVSSTREDLKNVFPPEVAVFEPSEAEISHTQKATLVCLATGFYPDHVELSWWVNGKEVHSGVCTDPQPLKEQPALNDSRYCLSSRLRVSATFWQNPRNHFRCQVQFYGLSENDEWTQDRAKPVTQIVSAEAWGRADDVIKIHWQEKKSNTILGSQEGNTMKTNDTYMKFSWLTVPEKSLDKEHRCIVRHENNKNGVDQEIIFPPIKTDVITMDPKDNCSKDANDTLLLQLTNTSAYYMYLLLLLKSVVYFAIITCCLLRRTAFCCNGEKS

SEQ ID NO: 15975 - protein, 860 aa, synthetic construct
MALPVTALLLPLALLLHAARPEVQLVESGGGLVQPGGSLRLSCAASGFSFSDFWMSWVRQAPGKGLEWVATISQAGSEKDYVDSVKGRFTISRDNAKKSLYLQMNSLRAEDTAVYYCASGVYSFDYRGQGTLVTVSSGTGGGGSGGGGSGGGGSEFQSVVTQPPSMSAAPGQQVTISCSGGNSNIERNYVSWYLQLPGTAPKLVIFDNDRRPSGIPDRFSGSKSGTSATLGITGLQTGDEADYYCGTWDSSLRGWVFGGGTKLTVLGLEIQNPDPAVYQLRDSKSSDKSVCLFTDFDSQTNVSQSKDSDVYITDKCVLDMRSMDFKSNSAVAWSNKSDFACANAFNNSIIPEDTFFPSPESSDSTDHVKPKETENTKQPSKSCHKPKAIVHTEKVNMMSLTVLGLRMLFAKTVAVNFLLTAKLFFLRAKRSGSGVKQTLNFDLLKLAGDVESNPGPTSMDWIWRILFLVGAATGAHSFEVQLVESGGGLIQPGGSLRLSCAASGFTFSNYAMNWVRQAPGKGLEWVSTINGRGSSTIYADSVKGRFTISRDNSKNTLYLQMNSLRAEDTATYYCARYISRGLGDSWGQGTLVTVTREDLKNVFPPEVAVFEPSEAEISHTQKATLVCLATGFYPDHVELSWWVNGKEVHSGVCTDPQPLKEQPALNDSRYCLSSRLRVSATFWQNPRNHFRCQVQFYGLSENDEWTQDRAKPVTQIVSAEAWGRADDVIKIHWQEKKSNTILGSQEGNTMKTNDTYMKFSWLTVPEKSLDKEHRCIVRHENNKNGVDQEIIFPPIKTDVITMDPKDNCSKDANDTLLLQLTNTSAYYMYLLLLLKSVVYFAIITCCLLRRTAFCCNGEKS

SEQ ID NO: 15976 - protein, 861 aa, synthetic construct
MALPVTALLLPLALLLHAARPEVQLVESGGGLVQPGGSLRLSCAASGFSFSDFWMSWVRQAPGKGLEWVATISQAGSEKDYVDSVKGRFTISRDNAKKSLYLQMNSLRAEDTAVYYCASGVYSFDYRGQGTLVTVSSGTGGGGSGGGGSGGGGSEFDVVMTQTPLSLPVSLGDQASISCRSSQSLVHSNGNTYLHWYLQKPGQSPKLLIYKVSNRFSGVPDRFSGSGSGTDFTLKISRVEAEDLGVYFCSQNTPVPPKFGSGTKLEIKLEIQNPDPAVYQLRDSKSSDKSVCLFTDFDSQTNVSQSKDSDVYITDKCVLDMRSMDFKSNSAVAWSNKSDFACANAFNNSIIPEDTFFPSPESSDSTDHVKPKETENTKQPSKSCHKPKAIVHTEKVNMMSLTVLGLRMLFAKTVAVNFLLTAKLFFLRAKRSGSGVKQTLNFDLLKLAGDVESNPGPTSMDWIWRILFLVGAATGAHSFEQVQLQQSGAELVRPGASVKLSCKASGYTFNDYEMHWVKQTPVHGLKWIGALEPKTGDTAYSQKFKGKATLTADKSSSTAYMELRSLTSEDSAVYYCTSCYYYTYSGQGTLVTVSATREDLKNVFPPEVAVFEPSEAEISHTQKATLVCLATGFYPDHVELSWWVNGKEVHSGVCTDPQPLKEQPALNDSRYCLSSRLRVSATFWQNPRNHFRCQVQFYGLSENDEWTQDRAKPVTQIVSAEAWGRADDVIKIHWQEKKSNTILGSQEGNTMKTNDTYMKFSWLTVPEKSLDKEHRCIVRHENNKNGVDQEIIFPPIKTDVITMDPKDNCSKDANDTLLLQLTNTSAYYMYLLLLLKSVVYFAIITCCLLRRTAFCCNGEKS

SEQ ID NO: 15977 - protein, 860 aa, synthetic construct
MALPVTALLLPLALLLHAARPEVQLVESGGGLVQPGGSLRLSCAASGFSFSDFWMSWVRQAPGKGLEWVATISQAGSEKDYVDSVKGRFTISRDNAKKSLYLQMNSLRAEDTAVYYCASGVYSFDYRGQGTLVTVSSGTGGGGSGGGGSGGGGSEFDIQLTQSPSSLSASVGDRVTITCRASQGIRNDLGWYQQKPGKAPKRLIYAASSLQNGVPSRFSGSGSGTEFTLTISSLQPEDFATYYCLQHNTYPAFGQGTKVEIKRLEIQNPDPAVYQLRDSKSSDKSVCLFTDFDSQTNVSQSKDSDVYITDKCVLDMRSMDFKSNSAVAWSNKSDFACANAFNNSIIPEDTFFPSPESSDSTDHVKPKETENTKQPSKSCHKPKAIVHTEKVNMMSLTVLGLRMLFAKTVAVNFLLTAKLFFLRAKRSGSGVKQTLNFDLLKLAGDVESNPGPTSMDWIWRILFLVGAATGAHSFEQVQLQESGPGLVKPSQTLSLTCTVSGGSISSFNYYWSWIRHHPGKGLEWIGYIYYSGSTYSNPSLKSRVTISVDTSKNQFSLTLSSVTAADTAVYYCARGYNWNYFDYWGQGTLVTVSSTREDLKNVFPPEVAVFEPSEAEISHTQKATLVCLATGFYPDHVELSWWVNGKEVHSGVCTDPQPLKEQPALNDSRYCLSSRLRVSATFWQNPRNHFRCQVQFYGLSENDEWTQDRAKPVTQIVSAEAWGRADDVIKIHWQEKKSNTILGSQEGNTMKTNDTYMKFSWLTVPEKSLDKEHRCIVRHENNKNGVDQEIIFPPIKTDVITMDPKDNCSKDANDTLLLQLTNTSAYYMYLLLLLKSVVYFAIITCCLLRRTAFCCNGEKS

SEQ ID NO: 15978 - protein, 862 aa, synthetic construct
MALPVTALLLPLALLLHAARPEVQLVESGGGLVQPGGSLRLSCAASGFSFSDFWMSWVRQAPGKGLEWVATISQAGSEKDYVDSVKGRFTISRDNAKKSLYLQMNSLRAEDTAVYYCASGVYSFDYRGQGTLVTVSSGTGGGGSGGGGSGGGGSEFDDIVLTQSPASLAVSLGQSVTISCRASESVEYYGTSLMQWYQQKPGQPPKLLIYATSNVESGVPARFSGSGSGTDFSLNIHPVEEDDIAMYFCQQSRKLPSTFGGGTKLEIKLEIQNPDPAVYQLRDSKSSDKSVCLFTDFDSQTNVSQSKDSDVYITDKCVLDMRSMDFKSNSAVAWSNKSDFACANAFNNSIIPEDTFFPSPESSDSTDHVKPKETENTKQPSKSCHKPKAIVHTEKVNMMSLTVLGLRMLFAKTVAVNFLLTAKLFFLRAKRSGSGVKQTLNFDLLKLAGDVESNPGPTSMDWIWRILFLVGAATGAHSFEDVRLQESGPGQVKPSQTVSLTCSVTGYSITNGNHWWNWIRQVSGSKLEWIGYISSSGSTDSNPSLKSRISITRDTSKNQLFLQLNSVTTEDIATYYCARGYYFDYWGQGTTLTVSSTREDLKNVFPPEVAVFEPSEAEISHTQKATLVCLATGFYPDHVELSWWVNGKEVHSGVCTDPQPLKEQPALNDSRYCLSSRLRVSATFWQNPRNHFRCQVQFYGLSENDEWTQDRAKPVTQIVSAEAWGRADDVIKIHWQEKKSNTILGSQEGNTMKTNDTYMKFSWLTVPEKSLDKEHRCIVRHENNKNGVDQEIIFPPIKTDVITMDPKDNCSKDANDTLLLQLTNTSAYYMYLLLLLKSVVYFAIITCCLLRRTAFCCNGEKS

SEQ ID NO: 15979 - protein, 861 aa, synthetic construct
MALPVTALLLPLALLLHAARPEVQLVESGGGLVQPGGSLRLSCAASGFSFSDFWMSWVRQAPGKGLEWVATISQAGSEKDYVDSVKGRFTISRDNAKKSLYLQMNSLRAEDTAVYYCASGVYSFDYRGQGTLVTVSSGTGGGGSGGGGSGGGGSEFDIQMTQSPSSLSASVGDRVTITCRASQDVNTAVAWYQQKPGKAPKLLIYSASFLESGVPSRFSGSRSGTDFTLTISSLQPEDFATYYCQQHYTTPPTFGQTKVEIKRLEIQNPDPAVYQLRDSKSSDKSVCLFTDFDSQTNVSQSKDSDVYITDKCVLDMRSMDFKSNSAVAWSNKSDFACANAFNNSIIPEDTFFPSPESSDSTDHVKPKETENTKQPSKSCHKPKAIVHTEKVNMMSLTVLGLRMLFAKTVAVNFLLTAKLFFLRAKRSGSGVKQTLNFDLLKLAGDVESNPGPTSMDWIWRILFLVGAATGAHSFEEVQLVESGGGLVQPGGSLRLSCAASGFNIKDTYIHWVRQAPGKGLEWVARIYPTNGYTRYADSVKGRFTISADTSKNTAYLQMNSLRAEDTAVYYCSRWGGDGFYAMDVWGQGTLVTVSSTREDLKNVFPPEVAVFEPSEAEISHTQKATLVCLATGFYPDHVELSWWVNGKEVHSGVCTDPQPLKEQPALNDSRYCLSSRLRVSATFWQNPRNHFRCQVQFYGLSENDEWTQDRAKPVTQIVSAEAWGRADDVIKIHWQEKKSNTILGSQEGNTMKTNDTYMKFSWLTVPEKSLDKEHRCIVRHENNKNGVDQEIIFPPIKTDVITMDPKDNCSKDANDTLLLQLTNTSAYYMYLLLLLKSVVYFAIITCCLLRRTAFCCNGEKS

SEQ ID NO: 15980 - protein, 860 aa, synthetic construct
MALPVTALLLPLALLLHAARPEVQLVESGGGLVQPGGSLRLSCAASGFSFSDFWMSWVRQAPGKGLEWVATISQAGSEKDYVDSVKGRFTISRDNAKKSLYLQMNSLRAEDTAVYYCASGVYSFDYRGQGTLVTVSSGTGGGGSGGGGSGGGGSEFDQSVLTQPPSVSVAPGKTARIPCEGNYIGSSNVHWYQQKPGQAPVLVIHFDSDRPSGIPDRFSGSNSGNMATLTISRVEAGDEADYYCQVWENHGWVFGGGTKLTVLSLEIQNPDPAVYQLRDSKSSDKSVCLFTDFDSQTNVSQSKDSDVYITDKCVLDMRSMDFKSNSAVAWSNKSDFACANAFNNSIIPEDTFFPSPESSDSTDHVKPKETENTKQPSKSCHKPKAIVHTEKVNMMSLTVLGLRMLFAKTVAVNFLLTAKLFFLRAKRSGSGVKQTLNFDLLKLAGDVESNPGPTSMDWIWRILFLVGAATGAHSFEEVQLVETGGGLVQPGESLRLSCAASGFTFSDYEMNWVRQAPGKGLEWVSYISSSGSTIYYADSVKGRFTIYRDNAKNSLYLQMNSLRAEDTALYYCARAWGVGPPDYWGQGTLVTVSSTREDLKNVFPPEVAVFEPSEAEISHTQKATLVCLATGFYPDHVELSWWVNGKEVHSGVCTDPQPLKEQPALNDSRYCLSSRLRVSATFWQNPRNHFRCQVQFYGLSENDEWTQDRAKPVTQIVSAEAWGRADDVIKIHWQEKKSNTILGSQEGNTMKTNDTYMKFSWLTVPEKSLDKEHRCIVRHENNKNGVDQEIIFPPIKTDVITMDPKDNCSKDANDTLLLQLTNTSAYYMYLLLLLKSVVYFAIITCCLLRRTAFCCNGEKS

SEQ ID NO: 15981 - protein, 868 aa, synthetic construct
MALPVTALLLPLALLLHAARPEVQLVESGGGLVQPGGSLRLSCAASGFSFSDFWMSWVRQAPGKGLEWVATISQAGSEKDYVDSVKGRFTISRDNAKKSLYLQMNSLRAEDTAVYYCASGVYSFDYRGQGTLVTVSSGTGGGGSGGGGSGGGGSEFDIQMTQSPSSLSASVGDTVTITCQANGYLNWYQQRRGKAPKLLIYDGSKLERGVPSRFSGRRWGQEYNLTINNLQPEDIATYFCQVYEFVVPGTRLDLKRTVAAPLEIQNPDPAVYQLRDSKSSDKSVCLFTDFDSQTNVSQSKDSDVYITDKCVLDMRSMDFKSNSAVAWSNKSDFACANAFNNSIIPEDTFFPSPESSDSTDHVKPKETENTKQPSKSCHKPKAIVHTEKVNMMSLTVLGLRMLFAKTVAVNFLLTAKLFFLRAKRSGSGVKQTLNFDLLKLAGDVESNPGPTSMDWIWRILFLVGAATGAHSFEQVQLLQSGAAVTKPGASVRVSCEASGYNIRDYFIHWWRQAPGQGLQWVGWINPKTGQPNNPRQFQGRVSLTRHASWDFDTFSFYMDLKALRSDDTAVYFCARQRSDYWDFDVWGSGTQVTVSSASTKGPTREDLKNVFPPEVAVFEPSEAEISHTQKATLVCLATGFYPDHVELSWWVNGKEVHSGVCTDPQPLKEQPALNDSRYCLSSRLRVSATFWQNPRNHFRCQVQFYGLSENDEWTQDRAKPVTQIVSAEAWGRADDVIKIHWQEKKSNTILGSQEGNTMKTNDTYMKFSWLTVPEKSLDKEHRCIVRHENNKNGVDQEIIFPPIKTDVITMDPKDNCSKDANDTLLLQLTNTSAYYMYLLLLLKSVVYFAIITCCLLRRTAFCCNGEKS

SEQ ID NO: 15982 - protein, 874 aa, synthetic construct
MALPVTALLLPLALLLHAARPEVQLVESGGGLVQPGGSLRLSCAASGFSFSDFWMSWVRQAPGKGLEWVATISQAGSEKDYVDSVKGRFTISRDNAKKSLYLQMNSLRAEDTAVYYCASGVYSFDYRGQGTLVTVSSGTGGGGSGGGGSGGGGSEFQSALTQPPSASGSPGQSITISCTGTSNNFVSWYQQHAGKAPKLVIYDVNKRPSGVPDRFSGSKSGNTASLTVSGLQTDDEAVYYCGSLVGNWDVIFGGGTKLTVLLEIQNPDPAVYQLRDSKSSDKSVCLFTDFDSQTNVSQSKDSDVYITDKCVLDMRSMDFKSNSAVAWSNKSDFACANAFNNSIIPEDTFFPSPESSDSTDHVKPKETENTKQPSKSCHKPKAIVHTEKVNMMSLTVLGLRMLFAKTVAVNFLLTAKLFFLRAKRSGSGVKQTLNFDLLKLAGDVESNPGPTSMDWIWRILFLVGAATGAHSFEQPQLQESGPTLVEASETLSLTCAVSGDSTAACNSFWGWVRQPPGKGLEWVGSLSHCASYWNRGWTYHNPSLKSRLTLALDTPKNLVFLKLNSVTAADTATYYCARFGGEVLRYTDWPKPAWVDLWGRGTLVTVSSTREDLKNVFPPEVAVFEPSEAEISHTQKATLVCLATGFYPDHVELSWWVNGKEVHSGVCTDPQPLKEQPALNDSRYCLSSRLRVSATFWQNPRNHFRCQVQFYGLSENDEWTQDRAKPVTQIVSAEAWGRADDVIKIHWQEKKSNTILGSQEGNTMKTNDTYMKFSWLTVPEKSLDKEHRCIVRHENNKNGVDQEIIFPPIKTDVITMDPKDNCSKDANDTLLLQLTNTSAYYMYLLLLLKSVVYFAIITCCLLRRTAFCCNGEKS
